United States Patent Application Publication US 2006/0134663 A1 - sequence listing, part 3

SEQ ID NO: 8042 - DNA, 1364 bp, Homo Sapiens
  misc_feature (99)..(110): n is a, c, g, or t
  misc_feature (152)..(171): n is a, c, g, or t
  misc_feature (173)..(321): n is a, c, g, or t
  misc_feature (385)..(393): n is a, c, g, or t
gtggggggggaaacccaaccctggtttttttacccgcgggtgttttttgtggggaaacattgtatatccccgttgtttcttccccccgggttggggcgnnnnnnnnnnnnaaaaaagggtgagaaaaatttttcttggggcggggggggcgnnnnnnnnnnnnnnnnnnnntnnnnnnnnnnnnnnnnnnnnnnnnnnnnnnnnnnnnnnnnnnnnnnnnnnnnnnnnnnnnnnnnnnnnnnnnnnnnnnnnnnnnnnnnnnnnnnnnnnnnnnnnnnnnnnnnnnnnnnnnnnnnnnnnnnnnnnnnnnnnnnnnnnnnntatacttaaattaaatagcatgatttaatttagttggtgcttaaccctgaatcctcttaagttnnnnnnnnngttataattaactattaacgttaatgaatttaaaccttccagaaagcatgaatccaaaaggaaatgtccaacaggtgatatgaaccagatattttatggcctttcctgtttcagtctcaaactttctaaacatcaatggggaaaaaaaattctctagagttttccagttttattcttctagagcacaattttccggcctgttactgagtacggtcttctaacaggtacacaattaactcataagtagacaacacaatggcagtatttgggatctgccggataagctgggcaaacagtcctctataaaaggcaaggtagccttcttcccggaacaccaggcgcgccgtctggacaaaagacttgtacttggtgccctcttcccggagcctcgtccttatgacttcgtgtggataagcaatgcaggaggcacagcccttagaaagagcagcagctgccataagtccaaaaaaacttgtggaatttttctcagtcccatttgcagaagaggctaatggagcttctttcggatacttctttaaactttcataaatagcaaagcagattatagtttcggaaattccagcatacgaggcagttaatcctctatagaagccacgaatgccttcggtctggtaaacgtaacgagcacactggagtgtattcatctgcttagagcccctcactttctgttctagctgcattcgggtattaaccatccatataggattcattaaggaatttgtgataaaagctgcagagccagctgagaaaatatgcacaataattgctgttaggcacgaaaatgccattaaattgctctttggctttggagtaacatgcaaagtatacagcccttgatggtgcaactccaaccaaatttggacccaagcctctaaaaagtgactttggtccctctttctccaagatcgacttcagaaactgaaagagtccaggtgtcacggatgttgggc

SEQ ID NO: 8043 - DNA, 1005 bp, Homo Sapiens
cgtgcttaccttgaagcctacaaagaatttaagggctttgggactgaagttactgaaaaggaggtagaaatactcttcattcaagtcaatcagtttgcatgggcttctcatttcttttggggattgtgggctctgattcaagccaaatactccactattgagtttgatttccttgggtaagcaattgttcgttttaaccagtactttaaaatgaagcctgaggttactgcattaaaagtgcctgagtaaagaagagatttaattattctccagtagctgagcaatgcttgtgaatcttttcttaagaaatcccaaaaagccaatattagttaaaattctgttgtttaatttggttatcttgctttataaattatgcctctaaacaatcaaatctatttttgaaatagactgaatgatgtcaagaaatatacctactgctatccgtatgtggtggattagaaatgtgttaaatctgcaaaaggtataaagatgtcagtttaatttctttgataatttaacctatgttgtatgtgaattatttattataaacttagcacgattctgtgactgtttttctctgtttcacgttcgttgagtgtaagcaatgaaaatgtcccaaataagttttttaagttttactttaataagattaatttcagtaaacattctagttgttcagtgtaacctttttatcttgatgcattgtaagtaaaatgaatcatttactcttgaaatgccagtcattgactgatgtagataatttaggattttcatataaaaatagctgtttaggaaggtgaaatacattcactgtctctgttggtggtacatcttgttgaattcaatattagaaagtatttctttttggggtaatataacttagaattaaatccctgtttctctatgtagtctggcagtataaatataaatatttaccatataatcttggaataagtattagttaatgttaccaaaatctgtattaaataatgtttacaaatgcta

SEQ ID NO: 8044 - DNA, 472 bp, Homo Sapiens
tgggctgtatctgtgttttccctctgggagtctcatgggtccagcatcaggcctgaggtcagcaacagggaaagagggtggccaacggggagggcttggccccgcctatctagaggcttgcctcgggcccctccttggggaaggtttgcgtgcagagctgcaagggagagggttccagaagcattgccttttgcctcgtctaataggatccttaggacactgtgggctttaggaatgactatagatgctcacacgtgtttaaagtgacatttggagatgctctcagtcctgtggcatctggcacgaagtctccaagaagccactttgcctcttctcccttcaagcacaagctttactgcaaaagggccagtcgcgtttctatttctctcgatcccaggcttctgcggaccgacgatacgtttaaatgttgttctagtaaatattcttgaatgtattaaaatggctgaaacaa

SEQ ID NO: 8045 - DNA, 1172 bp, Homo Sapiens
ggggttgtctcgctctggcgtcagagccgtcgtggctcgttccattctcggcggtggtacctgctcccggtggccctgaggacgtgtgggccaggggcggccccgaaattaggaagcggagggggagcagtctgcaggtctgcggggctaagtgtcgcggcggcgcacctcgcgtcaagaatccggaggaggagactgcaaggataggcccaggagtaatggagtccaaagaggaactagcggcaaacaatctcaacggggaaaatgcccaacaagaaaacgaaggaggggagcaggcccccacgcagaatgaagaagaatcccgccatttgggagggggtgaaggccagaagcctggaggaaatatcaggcgggggcgagttaggcgacttgtccctaattttcgatgggccatacctaataggcatattgagcacaatgaagcgagagatgatgtagaaaggtttgtagggcagatgatggaaatcaagagaaagactagggaacagcagatgaggcactatatgcgcttccaaactcctgaacctgacaaccattatgacttttgcctcataccttgaatcctaaaagttttcgctgagggtaatgtgaacactgctttacaaccttgtatatcttgggatttactttttctgtaagccttttggggtttacacttaccagtttctaatggaaattagaattctaattgaatattgttttgtctcagcctaaaagttacggtcagcatggcaattcacctattttaggaaaaatactcttttcataatatgaaatgcataaagcagctcaaaaagcagtctgtattccatcatcttcctttttcattccagtccttatttttgtaagtattacttttcctcctccggctacctggactcaaaatctcagttgtctttgacagtttttttcttgtccctgaccaaaaaagaatgatcatacccagaattcaatgtttgatattttaagaatgtatgttctagtgtttttcagagtgagtctaccatctgtataaaaacaccttgggggcaggcaggggcatttaaaaatgtaggacctatcgtccagactcacagagtggggctccagaatctccatttttaacaaactctcttaagtaattctgatgtgtaccaaaatcagtgccattg

SEQ ID NO: 8046 - DNA, 892 bp, Homo Sapiens
  misc_feature (551)..(601): n is a, c, g, or t
attaggcatggaatgacaaaaagagatgaataatccgatttgataccaacaatttgctctttcaaacctcctgtagagagccatatactaaagaataagaaaattcttaaatctgcaaaagatttgccgcctgatgcacttatcattgaatacagaagggaagtttatgctgagagaacagttgaagcatatgggtattttctttaaaagaccatacccctttttgtgttatttctactctaaatttcatgggctagaaatgtgtgttgatgcaggacttttgggaatgaggctcgatttcatcaggcggtcttgtacacccaatgcagaggtgaggcatgaaattcaagatggaaccatacatctttatatttattctatacacagtattccaaagggaactgaaattactattgcctttgattttgactatggaaattgtaagtacaaggtggactgtgcatgcctcaaagaaaacccagagtgccctgttctaaaacgtagttctgaatccatggaaaatatcaatagtggttatgagaccagacggnnnnnnnnnnnnnnnnnnnnnnnnnnnnnnnnnnnnnnnnnnnnnnnnnnncagaatattactttggattgtgaaggaacgaccaacaaaatgaagagcccagaaactaaacaaagaaagctttctccactgagactatcagtatcaaataatcaggaaccagattttattgatgatatagaagaaaaaactcctattagtaatgaagtagaaatggaatcagaggagcagattgcagaaaggaaaaggaagatgacagagaagaaagaaaaatggaagcaattttgcagcttttgccagacttgaaaagagaaatttagagaagggactggggatcctcta

SEQ ID NO: 8047 - DNA, 468 bp, Homo Sapiens
taccaggaaagaatacatatccaatagattggagaaagccagagattagccctcattccgcatctgtcaaccaggacagaatgcatggacaagggatgagctttacaaagatgatgcactttggagatcagaaaattcatatttaagcaaagtgatacaaacacagtgatttgggaatgccttcatttacaatgcaatacttaaattttaatactcttgtaggagaaaaagcaactgtataaatgaatgtagagtgactttctgcaatatttcaaacctatatcagagaattacactgtgggaaaactaccattgtaataagtgtagcaaaatctccttagatatctgaaaagtcatactggatggaatctgtaggaaacggttctattttgagggaagggggattcctttttgttttttaagtgaattcagaaaatgttataaataaatcttttggattattataaa

SEQ ID NO: 8048 - DNA, 161 bp, Homo Sapiens
cagactattagctgcatatgaaacaccccaaaacttagtggcacaaaacaagacatttatgatactcttggatatagaattctctgctggtcatagaattcagacgggacatagtaaggatagtttgtctctttgcacaacgtctgggacctcagctaggg

SEQ ID NO: 8049 - DNA, 581 bp, Homo Sapiens
tacatgtacttaacaatcatacatactattccatactatgtcccctacctctccaattgacatgctattacacatccttttcactttcctttgcaattaacatgtataccctattcaatcctaagaagacttaaaatagtgagtagtcctcatctctgatacccaggtgtgcttaagatcaaaataaaatattcccttatcaatattaatccattcattttatttaagtttgcaatcattcagtggttgggagtaacacttggatcacttaaagcagtaaagaaaattagattacaaaaaatgcagcagctgttcatgacaaactctgcatgaaaattgtaggtaaagaccagaatccagatatatcatgtccaccctctgccactgtccttataggagggagaaatttgcagttattcaaataaaggtttcatttaccaagaagctttaaaaaaatacctaagttccattcatactgcgaaaacgttcatataaaaccacttttagctagtcactaaatcattatatcctagacatacatatattttgcgctagcctaaaagttacacataagaatcttt

SEQ ID NO: 8050 - DNA, 1409 bp, Homo Sapiens
gggagcgctcgggcgccatgttaggacgaaggggaaggaggagaagcgcttaaagcggcgggagcggtgcgggagaggggttggacccagggctgaggcaggcccccccctccctcccgcctcagtggatcatgcccagggcggcagcggcggcggttgcgggggggaagtgactgggcggtgccggcgccggagacgatgccgtttccagttacaacacagggatcacaacaaacacaaccgccacagaagcactatggcattacttctcctatcagcttagcagcccccaaggagactgactgcgtacttacacagaaactaattgagacattgaaaccctttggggtttttgaagaggaagaggaactgcagcgcaggattttaattttgggaaaactaaataacctggtaaaagagtggatacgagaaatcagtgaaagcaagaatcttccacaatctgtaattgaaaatgttggaggaaaaatttttacatttggatcttacagattaggagtgcatacaaaaggtgctgatattgatgcgttgtgtgttgcaccaagacatgttgatcgaagtgactttttcacctcattctatgataagttgaaaatacaggaagaagtaaaagatttaagagctgttgaagaggcattcgtaccagttattaaactctgttttgatgggatagagattgatattttgtttgcaagattagcactgcagacaattcctgaagatttggatctacgagatgacagtctgctaaaaaatttagatataagatgtataagaagtcttaacggttgcagggtaaccgatgaaattttacatctagtaccaaacattgacaacttcaggttaactctgagagctatcaaactatgggccaaacgccacaacatctattccaatatattaggtttcctcggtggtgtttcctgggctatgctagtagcaagaacttgccagctttatccaaatgcaatagcatcaactcttgtacataaatttttcttggtattttctaaatgggaatggccaaatccagtgctattgaaacagcctgaagaatgcaatcttaatttgcctgtatgggacccaagggttagtgtattattttttcccctaccaattcacactgtgcaataacaagtaaaaatcatctgcataaactccagggagacttccagccttttacttatgaatggtcatgtccgtattacactttcttttagataacctcaactataattgtcctcaactataattgatgtgagaagcataattatgtaccctgtaaaccacatttaattgtacatagtttttaatacagattttactaacattttaatttattctatatagaactaccttgtaagtcaaagttgtgtgggcatttgtgcttt

SEQ ID NO: 8051 - DNA, 323 bp, Homo Sapiens
gccgatgaacccaccacttacactccagtcctgggccaaagaacaatgacccattcatcagaacatccaaaagattcttaaaaattgagaaacaagaaatgtcacatactatattagaaatactgtactggtttcgttgtatattcttctctttttccttctgtcatctcccaccttctacaacatatattcagatagctatatccttccttcattataccacaagaaatgaggctacttattggcggaagaaataactagaatgttctcctaacatttcactaaagaaggtaaaaaacatggtttcctagaatatacctgac

SEQ ID NO: 8052 - DNA, 310 bp, Homo Sapiens
cgcgcatatgtcggagggggaagggagcctggaatcccaaccacctcccttgcagaaccaggcctgtccagaatctagctgcctgagagagggcgagaagggccagaatggggacgactcgtccgctggcggcgacttcccgccgccggcagaagtggaaccgacgcccgaggccgagctgctcgcccagccttgtcatgactccgaggccagtaagttgggggctcctgccgcagggggcgaagaggagtggggacagcagcagagacagctggggaagaaaaaacagtaggagacgcccgtcgaccac

SEQ ID NO: 8053 - DNA, 1267 bp, Homo Sapiens
aatgtgaatataaaccagtgtttaaaaaaagaggtggtaccggtcggaattccgggatatcgtcgacccacgcgatcggacccacgcgatccggcctcattgcctgaggaaggagcagctatgggcccgtgggcggcgtcttcaaccatggaccgtggtcttgagagatggcttgctggagaaccagaccccagagttcttccaggacgtctgcaagcccaagtacagcggcaccctgaacctggacagggtgacccgagaggcgtgccctgagctggactactttgtggtcttctcctctgtgagctgcgggcgtggcaatgcgggacagagcaactacggctttgccaattccgccatggagcgtatctgtgagaaacgccggcacgaaggcctcccaggcctggccgtgcagtggggcgccatcggcgacgtgggcatttaggtggagacgatgagcaccaacgacacgatcgtcagtggcacgctgacccagcgcatggcgtcctgcctggaggtgctggacctcttactgaaccagccccacatggtcctgagcagctttgtgctaggctgagaaggctgcggcctatagggacagggacagccagcgggacctggtggaggccgtggcacacattcctgggcatccgcgacttggctgctgtcaacctggacagctcactggcggacctgggcctggactcgctcatgagcgtggaggtgcgccagacgctggagcgtgagctcaacctggtgctgtccgtgcgcgaggtgcggcaactcacgctccggaaactgcaggagctgtcctcaaaggcggatgaggccagcgagctggcatgccccacgcccaaggaggatggtctggcccagcagcagactcagctgaacctgcgctccctgctggtgaacccggagggccccaccctgatgcggctcaactccgtgcagagctcggagcggcccctgttcctggtgcacccaatcgagggctccaccaccgtgttccacagcctggcctcccggctcagcatccccacctatggcctgcagtgcacccgagctgcgccccttgacagcatccacagcctggctgcctactacatcgactgcatcaggcaggtgcagcccgagggcccctaccgcgtggccggctactcctacggggcctgcgtggcctttgaaatgtgctcccagctgcaggcccagcagagcccagcccccacccacaacagcctcttcctgttcggcagctcggcggcta

SEQ ID NO: 8054 - DNA, 437 bp, Homo Sapiens
ggggtgttgttgcaccagaactcgaagctctcggtaggagcggtggaactcgatcagggcctcctcctccgccgtgggctgctggggcgccgcaggttcggggcccagcccctgctcctcacgcttgttccccttcatgagccctggagtggactgtggagggctagagtcctgctcctccagcttgttcccctccatgagacctggtatgggctgcagaggtctagggtcctgctcctccagcttgttccccttcatgagccccggagtggattggggagagcaagggtcagggtcaaggctgagctctgggccctgagtgccctctcccatcacccctggaacccgagtgaggctgccctggccatacccatgtcccacctgcgcccacattctcccactcctccctccctcctccaccttcccccgtcttcaga

SEQ ID NO: 8055 - DNA, 1159 bp, Homo Sapiens
acttccttcgacaaagaggcgtcagaaactaattgaacggtgtggttttcaggatgatgtagcttatgggaagaccaaaattttcattcgaacaccccgaacattgtttaccttggaagaactccgtgcccagatgctcataaggattgtcctctttctacaaaaggtgtggcggggcaccctggcccgcatgcggtacaaaagaaccaaggcagctctgacaataatcaggtactaccggcgctacaaagtgaagtcgtacatccacgaggtggccagacgcttccatggcgtcaagaccatgcgagactacgggaagcacgtgaagtggccaagccctcctaaagttcttcgccgttttgaggaggccctgaagaacgattttcaatagatggagaggcatcccagactcatcaagagcattccgccctcagacctgccccaggtcaggccaaaggttgcagccgtggaaatgttgaagggtcaaagggctgacctcgggctccagagggcctgggagggcaactatcttgcttcaaagccagatacacctcagacctcaggcacttttgtccctgttgctaatgaattgaaacggaaggacaaatacatgaatgtcctcttttcctgtcacgtccgtaaggtaaatcgatttagtaaggtggaagacagagcaatttttgtcactgaccgtcacctgtataaaatggatcccactaaacagtacaaggtgatgaagactatccctctatacaatttgactggtctgagtgtctccaatggaaaggaccaacttgtagtgttccatacgaaagacaacaaagacctcattgtctgcctcttcagcaaacagccaacccatgagagtcgaattggagaacttgtgggagtgctggtgaatcatttcaagagtgagaagcgccaccttcaagtgaacgtcaccaacccagtacagtgcagcctgcacgggaagaagtgcaccgtctccgtggagacgcggctcaaccagccccagcccgacttcaccaagaatcgctcgggcttcatcctcagcgtgcccgggaactgacgccccgcggaggcctggcccggagcccggccacactccgagtcctgggtcccagtccagctgctgcctcccaacccatgcccgctagaa

SEQ ID NO: 8056 - DNA, 221 bp, Homo Sapiens
agtgtaatgagtgccacacctggattcacctgtcctgtgcgaaaatccggaaatccaatgttccagaagtgtttgtctgccaaaagtgccgggactccaagtttgacatccgccgttccaaccgctcgcggacgggctcccggaagctgttcctggactgactgctggctggcgaggaggctgcgagcgtggaatcggaagcgaccacacggccgacatgg

SEQ ID NO: 8057 - DNA, 1029 bp, Homo Sapiens
ccgcccggtgttgtgctcgctgcagtctgaggtcagcagggaggagtttaccggcaagtatcggccattatgggtgcagccacaatcttggacagggatgcagacaccctgtgaaagcaggaagcggtcgtcgcactcacagccctcaaaacagcgggtggtgcagcccgtgaggccggagagagccgcacaggatccctggcaggtgcgagtgcagatggagtagtggctgtgggcggggcaatggagcgggcagaagctgtctgtcctccagggcttcacggccacgccagctgcctgacaggccgccgtgtaggctgccaggctgcggcacaggaaggctttgtcacccttttgcgcgcacaggtcgtatacgcattggcggaagtactcagagggactcagcaccgcctggcaggtcgcgaaggggccctgggggttccggagctgcccgcaggcctcgttgctctcatagggtgcagtctcctctgccaagcacactgggcagccttggggcccgcagccctcgccacagcccttggaggagccgggcacccgccatgcagccccgaaggtctccacactggacgctgctgagccattgggcaggacaaagtcgtcactccagttgccattgaagttcccacagaggccacagagccgtccacggaaggggctggggatggacatgaggaggtgggcatcgccatcaaagagaagccgcagccccttggtcgtctgcagaaccatgtttcggccctcggcggtcacccgcacgcggcccacagccacaggcagggccacagcctcgccgtccacggtgacctgctgcccctgagctaggctcacaacctggccagccacagtaaccaggaggcgttggagatctccagctgcattcttctcaagcacgatggaaaagtcctcgtccccaggctgtgggtggcagacttgggccaagacataggagcacgagccatgcaggtcgtagacacggccatcaagggtgatgtagtgatgcccccgttg

SEQ ID NO: 8058 - DNA, 1064 bp, Homo Sapiens
gcatatgcactataaaccactggttcaaaaagcaggctgggtacggtccggatattccgggatatcgtcgaccacgcgtcgccccatgatagttgaaaatcgggcgaagtcctaaaacgcaaaactgtcagtatcaggacaccccgtcgccagtattcggctccgacccacaccgtaaactgcagctgaacccagcggctcgccgctgccctcccctccacaccaaagcctgagacagcaggagccccgcctggcccgaagccgtctccaccgcagcaggcagaggggctggacaggcactgtcagccaatgtggggggtcctgaagactcccccttggggccccgagtgccccttctcagggctcagtctgaccgtagccaccgtcctgcctcgcgccgccctcgggcctgacctggaagctccgtcagctccgtccttgtccttagagctgagcccagaccccggggtctggccgaatcctcacccccaggcagtgttttcggtctgccaccttcaggaaaacggctgcggcctcggcctcccttcgggcacccaggaatgcgggggtctgctcagtccccgaccacactccatgctccaaacaccaaggggagcttgcaggagctagctagcccactccccgcagggtgagcacgttcctaatgccaaacagcggctccactttaagacgtggcgcgcatagcgtacaccggccgccctaccccggcgcggcccccgaggttccaaaggctgggcgcagcccccttctggactcactatagttccgcaggcaggatccttcctcccgtcccagttcaaacgctatctccttacaacaaacaccacaatcgatggaccgtcgtctacttgtccttggagaatattgcatgtcgcgcgccgccctagcgccacgacgaccgctggcggcctgcggcccccgaatccatacaggcagccccggcaggccaccagctacggtccccagcatctcgagccctccaacccccagcggttcccccaccaccgccactgtaccaaacagcgaccctgcctcacaacaca

SEQ ID NO: 8059 - DNA, 292 bp, Homo Sapiens
gacttattttgaccagaaaatctactattctgtcaataacctgtttaccttattttaaaagtgtcttcattataaatcaatataatgcatttcagaagaattgcaaacactgatggataaagttatatttatgattctgccataatagaattcatgttgacattttggtttattcttgcctttctcatttttttattaagtatattgcagttgtctcaaacttcctctctcttcaccgtttttaagagataaagtactcagtgtcgttgttctgtcagtgctgagccactcc

SEQ ID NO: 8060 - DNA, 234 bp, Homo Sapiens
ggggccaatgcaaacccatctcaacactgtggggtgcaaggagcaggcacccacagaagacatgcgtgacctcgaggatcactggccgcccaccaaagagcccagcagggacacctacacatgcttgtgcggacacgagacacgtgagggtgcagacacccacgtgcagacacgagacacttgagggcacagacacccacatgcagacacccacgtgcagacgaccacatcgcc

SEQ ID NO: 8061 - DNA, 855 bp, Homo Sapiens
cacaaacaaagacaaaccatagtgaaatagaacagtgtacaaaaaagcaggctggtaccggtcggaatcccgggaatatcgtcgacccacgcgtcgcactgccatgatgaagatgatgatgaagaggaggaggaggaggaagaataaggaggaaaacaaaacccaagcacccattaaacaagtcctggcaggactcacagcaacaaacgaggtccctgttagggttctactcgggggagggagggggctccatgaaaggtacgtctgaaaagtttctgaagattttattatcatagataattgttttggttttgtgtatctgtactctctgcagatggtccaaaattgtaatggagtctgtattagcaagaaaataagggtaaaatctaggctgaactgcatgtatatggctccactgtggcttgtgacacttttaaaatcatccgtatgtcagtgtatctggatacacgaggaacacaggaaagagtctcagagtggaacaacagagtgggcacagaggtgatctgtaatgttacaaattgtgctattactccacaaggtccaactattaacagatgcattacatggtcattgtatatcagtggagaaatgtattatttccatgatcaacatgtagtctcggtgaaggtcaagtctctatatataagccctttaacttcagtcctcagtgaatctgggaaaggctggcttctctatcactgggcttttgaccagaagtatggctctagttgggtggttaggggcaggatgctatgttgcaggaaagacagtttctaataccttatgctggtaatagcacaatgctaattggatccgaaccagctcactaattgg

SEQ ID NO: 8062 - DNA, 678 bp, Homo Sapiens
gccagtgcgatttggtgaaggaagctaggcagaagcaggaagtgccgaagcttgatcacgtgatcaagcttcggcaacatgagcatcctggggctcaccatcgactacgggccctttggcttcctggacaggtacgaccccgaccacgtgtgcaatgcctccgacaacaccggccgctacgcgtacagcaagcagcccgaggtgtgcaggtggaacctgcggaagctggccgaggccctgcagccggaactgcccctggagctgggggaggccatcctggccgaggagtttgacgccgagttccaaaggcactacctgcagaagatgcgcaggaagctgggcctcgtgcaggtggagctggaggaagacggggcgctgcgtgtccaagctcctggagaccatgcatctgaccggtgccgacttcacaaacaccttctacttgctgagctccttcccagtggagctagagtcgccaggcttggcggaattcctggccaggctgatggagcagtgtgcctccctggaggagctgaggctggccttccggccccagatggatccccggcagctatccatgatgctgatgctggcgcagtcaaacccgcagctgttcgcgcttatgggcacccgggcaggcatcgccagggagctggagcgtgtggagcagcagtctcggct

SEQ ID NO: 8063 - DNA, 1011 bp, Homo Sapiens
tcatagtgaatatagaaccagtgtgtacaaaaagcaggctgtacggtcggaattccgggatatcgtcgaccacgcgttcggcttgcggtgcgttctgggaaagttgctgggccagctcctttgtttccagtctgagcgttgcgttcggtttcccgagggtcttctgaggcaccgcggctgcgggcttctgagttcccggctctccgcagggaagcctcctcttcgtacctcgttttttggctcgtggggggtcctcccaccgctggccgacgcagccagcatgtccggggtgcgcgcagtgcggatcagcatcgaatcggcctgcgagaagcaggtccatgaggtgggcctggatggcaccgagacgtacctgcccccgctgtccatgtcgcagaatctggcgcgtctggcccagcggatagacttcagccagggttcgggctccgaggaggaggaggcggcggggaccgagggcgacgcgcaggactggccgggcgccgggtccagcgcagaccaggacgacgaggaaggagtggtcaaaatttcagccttccctttggccttgggactcagtgaggaacaatttgagaagtgccctgacagagatgtgtgtactctatggatgttctcagtattgttagggataaaaatttatgactcttgatcctgtctctcaagatggacttcctccaaaacagaatcctcagacgttgcaattggatatcttaaaagaagtcacttttgctggaacaccacaaatccttattgaaaaggggccaaaaagaactgactaaattccattacccgaaaacccaagaaaacaagcttacaaagaagaatttccaattcctgaagctttttgcggaataacgggaaacacttggaaactttccaaaaagttgggaaataaaatatcctcggagaatcctgagactctcccaaggggcagggaattttctctttccccacacactgggaacctttcggaaggtattaaaagaaatacgggat

SEQ ID NO: 8064 - DNA, 770 bp, Homo Sapiens
accgcatgtgctatacacgttaaacagcaggctggtacgctccggtatcccgggatatcgtcgaccacgcgtcgctagtgtgggatgcgccgccaccgaccgcgccatggggctgaaggccgcccagaagacgctgttccctgctgcgctccatcgacgacgtggtgcgcctgtttgctgccgagctgggccgagaggaagccggacctggtgctcctttccttggtgctgggcttcgtggagcattttctggctgtcaaccgcgtcatccctaccaacgttccctgagctcaccttccagcccagccccgcccccgagcccgctggcgggctcacctactttcccgctggccgacctgtctatcatcgccgccctctatgcccgcttcaccgaccacatccgagcgcgccgtcgacctgtccctctatcctcgagcaagggggtgtctccagccgctgagctggtcaacaaggtctccgatgtcatatggacacagcctcagcacgctcctactacaaggatcgggcccacatccacgtccctcttcaccttcatcacaggacaccaaaattggacagctccgtgtgtggcctttgctgtcggctcggggcctgccagcgcccctgggtctccgggatgtccacctcgtcctgtctgaggatcatgcctgcggtcagtgtattgggcccacatgggcgagcagacacgctgaggtcaacctggcacggcaagggcaccgacggacgggtgggccagacagtcaatcgca

SEQ ID NO: 8065 - DNA, 718 bp, Homo Sapiens
gcggccgctgtcctcaccacgcacgttccgccgccggatcgccttaatccaggaatgttccaggctctgggcaatggtcattctccgcttgggatctttgacgagcagccggcgaatgaagtccttggccagctcgctggtgttgctgaagtactcctcgtcgaagtcgtagttcacggctgagatgttggtgagcgtctcctgcttggtctcgcccaggaacggggatgcaccgctcaggaggatataggtgatgacaccgatgctccacatgtccgcctccaggcccagcggctcatagttcacaatctctggggccacaaactccggggtgccgaagatgttcttgaactcgttccccgcctcgatcttgtgcgcgatgccgaagtcgatgagcttgattcgtgggttgggcacgttcttgtccagcagcatgatgttttccggcttcaggtcaaagtgtgcgatgcgcttagagtgcaggtagtgaacgccgtccaggatctgcttgaggaactgggtggcctcgtcctccgtcagcgactccttctccgccaggaagtcaaagagctccccgccagagaccagctccaggatgaggaccacgtccgtcttgttctcgaagatgtcgtgcagggtgatgatgttggggtgccggatctaacgcaggatgttaacctcccgctcgatctcctcccgcaaccccggacgcggttac

SEQ ID NO: 8066 - DNA, 551 bp, Homo Sapiens
ccaatgaacacctgctgcaggagctgagccaggtgcgggcgcagcacagagccgaggtggagcagatgcactggagctaccaggagctcaagaagaccatggccctgtttccacacagcagcgccagccatggaggctgccaggcctgctgactcctgccgagaagctgggccaccccttaagcttcctggtaaagttacattgtctgcacctttgtacttctttattgagtgtactggctggcaagagttctctcttctgttggtaattatttaggatttttggaatgtattcaggacctgtagcttggttttctaaagcacctcgtaaaatgatatgattactccaagccctctgcatgttttcagacagaacacattgacatattttgagacaaactgactattaatcttgtatccagtatcctgagatgaagtaaatgcagtgttctactgcctgatgtgaaagagagctatgtatgataattaaagaaaataattttctgtgtaacaagcaatctttatttaataaacaaatacattgttctgaaa

SEQ ID NO: 8067 - DNA, 831 bp, Homo Sapiens
  misc_feature (73)..(73): n is a, c, g, or t
  misc_feature (813)..(813): n is a, c, g, or t
gccctcctgttgctggcacaccccctgcactgttgaccgccaccgccccgctggcggagaaggcccgctgacngacagaggaaacaaaggccggttgctggacctgcctgacgcatctgtgatggctggagctccgatgagaaaaaggcagggggcctggatgatgaagaggaggccgagctcgtcccctccgaggtgctcatgcaccaggccatccacaccatcgagttctgcctgggctgcgtctccaacaccgcctcctacctgcgcctgtgggccctgagcctggcccacgcccagctgtccgaggttctgtgggccatggtgatgcgcataggcctgggcctgggccgggaggtgggcgtggcggctgtggtgctggtccccatctttgccgcctttgccgtgatgaccgtggctatcctgctggtgatggagggactctcagccttcctgcacgccctgcggctgcactgggtggaattccagaacaagttctactcaggcacgggctacaagctgagtcccttcaccttcgctgccacagatgactagggcccactgcaggtcctgccagacctccttcctgacctctgaggcaggagaggaataaagacggtccgccctggcagtgatgtctcgtctctcttccctcctttttagctgaggcaggtggcagggtagaaggcatggtgtaggatctgggacctcaaaagtcaaggcctggacctgagcagatctgcataatgtcagactcttggggtgaaaaggggcagaaaagggccaggagagatgtttccagcacattctaancgaggaggagaacagcag

SEQ ID NO: 8068 - DNA, 1468 bp, Homo Sapiens
  misc_feature (1201)..(1236): n is a, c, g, or t
  misc_feature (1322)..(1322): n is a, c, g, or t
  misc_feature (1361)..(1384): n is a, c, g, or t
agaggcatgtaccggtaattaaaaacaaagataggtaacatatgtgccagtgttgcaacgttttaaactgctaacagaccttaaaatatccccctacctgggtcctcagtgctatgtttaaagtgctgcagggatggagtggcgttttcttattgctgtatgtattgtacatagtggagtagttagttacctgataacagtcttgttatttgggtctcttagaccttacctctcaactccctcaagagtaccagtctctgaagttataatgctttggtctctacattaggggcaagatccagtctgagagaagtctcctttgacgaagggccacgcggctctttcctgagtgttcgctttcgcttcgttggtatgcctgtattgctgggctgtgctgctgctcgaagcagatggttttgactgtctttttgctctttcctatataatgaatagatgagtgaaaggagttttctttttctctttagtacttacgtatggggattcctgtgtcttacagctctccctctccaaataatacacagaatcctgcaactttttgcacagctggtatctgtctggtagcagtgagaccccttgtcttggtgatccttactgggtttccaagcagaggagtcacatgattacaattgccagtagagttgttgtttggggtacaagatgagaagaaagaaaaacctacagcctttctacattctgacatgctaacagtggtttaagtttctaaagtgtttaccagatgctgaaggcaaggggagggagcagaagcacttatgtttacggatattttaaactctgttagagagcagcctttgaaaatccccaatttggttctgctttttgacctctctctaccttttcagggtaatctttgtggcacaaacgatagcatttccaagctttagagttttctgaattcctgcgccttcctgacgtgagccctgagcgatcttctatgcagttctgccatgcgtcctgttggtctctctgtgttctttgttacttgggtgcaatagcaacttccctaccccgtgcattccatctttcatgttgtgtaaagttcttcacttttttctctgagggctgggggttgggggagtcagcatgattatattttaatgtagaaaatgtgacatctggatataaaatgaaaataaatgttaaattaaatgggcacaccacnnnnnnnnnnnnnnnnnnnnnnnnnnnnnnnnnnnngaacccgctttccctattctgtcccctcttattccctccataactaaagtcggggggcccatgccccccatcagttacccaagatncccttgtgtggggggcgccttcggccccttagaaaaaannnnnnnnnnnnnnnnnnnnnnnnggggcccggggcccccctattatgataaagcccaacaggggggacaaaagcggtgttccccacaaaaaagaacctgtggtgcca

SEQ ID NO: 8069 - DNA, 536 bp, Homo Sapiens
  misc_feature (55)..(73): n is a, c, g, or t
gggactcccctacctggcgcccagccccaaccagctggccgctcctgcccatgcnnnnnnnnnnnnnnnnnnnaacttttataattggagcccctggtgaggttacgcgtgccatgagaacccactctacaccacgacgctggtgctcagtgttggccaaactctggagtcactgactggtttgactttcatacggtgaatatgcatttggtctgtactgatcatggaataaacacatctctctttttttaatgctggcgtctccctgacatttctttgtgacccaactgttccctagcttaggcccaaggggacccctggacccaggacaccctctgaccaggaatacgccaggagataccttagccctctctgtgacctgtcctgtctgcctggcgggcaccagaattcaatgcacaccccaaggtgaactgtgacaagagcccggtaccaatctggtgacctggttaagttgaagggtgtcttctaccaggaaaccactgccagacctccagccagtattttcccgtccacct

SEQ ID NO: 8070 - DNA, 636 bp, Homo Sapiens
ataaagtttccggaaatcttagatttggctcctttttgcacccttaaatgtaagaatgttgcagaagaaaatacaagggtactctattccttatatggagttgttgaacacagtggtactatgaggtcggggcattacactgcctatgccaaggcaagaaccgcaaatagtcatctctctaatctagttcttcacggtgatattccacaagattttgaaatggaatcaaaagggcagtggtttcacatcagcgacacacatgtgcaagctgtgcctacaactaaagtactaaactcacaagcgtacctcctattttatgagagaatactgtaataatatcaaaagcactttttctggaaacacatttatggcttttataatggctgaaataacgataaaaaaagactaattaaaatcatgttcacttaacattaaatacatgccagaagaaatcatgtttatttaaatattgaagggaaaaatacctaaaaatgtacaaaggttttatattgtcatagtggtttttattcctgctttgtttctggaaaggaaatcctgaattacttaagtactttgtgtttaatatatctgggtgatggatcacaacacatcaataaactgacttaccctaaaaaa

SEQ ID NO: 8071 - DNA, 399 bp, Homo Sapiens
ggtagttttgggtctgaccaaatttgcagtgggaattgtgttgatcctcttggttcgtcagcttgtacaaaatctctcactgcaagtattatactcatggttcaaggtggtcaccaggaacaaggaggccaggcggagactggagattgaagtgccttacaagtttgttacctacacatctgttggcatctgcgctacaacctttgtgccgatgcttcacaggtttctgggattaccctgagtctcaaacagttggaaactagcccactggacatgaaagccaagacataggaaagttattggtaggcaaatcttgacaacttatttttctttaacaacaacaaaaagtcatacggctgtcttgctactaccagataaatgatgcaaatgtgtgaaagg

SEQ ID NO: 8072 - DNA, 801 bp, Homo Sapiens
cggcgcgggatgcagacggctgcgaggcgctgggcacagttgctgtcccctttgacgatgatgacaagattgttgggggctacacctgtgaggagaattctctcccctaccaggtgtccctgaattctggctcccacttctgcggtggctccctcatcagcgaacagtgggtggtatcagcagctcactgctacaagacccgcatccaggtgagactgggagagcacaacatcaaagtcctggaggggaatgagcagttcatcaatgcggccaagatcatccgccaccctaaatacaacagggacactctggacaatgacatcatgctgatcaaactctcctcacctgccgtcatcaatgcccgcgtgtccaccatctctctgcccaccgcccctccagctgctggcactgagtgcctcatctccggctggggcaacactctgagctttggtgctgactacccagacgagctgaagtgcctggatgctccggtgctgacccaggctgagtgtaaagcctcctaccctggaaagattaccaacagcatgttctgtgtgggcttccttgagggaggcaaggattcctgccagcgtgattctggtggccctgtggtctgcaacggacagctccaaggagttgtctcctggggccatggctgtgcctggaagaacaggcctggagtctacaccaaggtctacaactatgtggactggattaaggacaccatcgctgccaacagctaaagcccccggtccctctgcagtctctataccaataaagtggccctgctctcaaaaaaaa

SEQ ID NO: 8073 - DNA, 503 bp, Homo Sapiens
gtttacgcgcacacccacaccccgaggtaaccccaattttccctctttcaaacttagtacgattcctatcttcaagtgatttactatctgagtcaaaaggtcaattcttctgtgctttgtaaaaaatctgatgcttcataattttcattatattattccacatatttttcctcgaagttcttagcataatgtatccattacttagtatatatctaggcaacaacacttagaagtttatcagtgtttaaactaaaaaaataaagattcctgtgtactggtttacatttgtgtgagtggcatactcaagtctgctgtgcctgtcgtcgtgactgtcagtattctcgctattttatagtcgtgccatgttgttactcacagcgctctgacatactttcatgtggtaggttctttctcaggaactcagtttaactattatttattgatatatcattacctttgaaaagcttctactggcacaatttattattaaaattttgaatcca

SEQ ID NO: 8074 - DNA, 312 bp, Homo Sapiens
tttaaactcctgactgtcaggataaactccgtgggggtacaggagcccagacaaagcccaggcctgtcaaaagacgcaaagggcccctgccagggttggccccagggaccctgggacgaggctgcaaaagctttccctccctactccctgggagccacgtgtctggccatgtggccagggacggcatgagcaggaggcggggacgtgggggccttctggtttggtgtcaacagctcacaggagcgtgaaccatgagggccctcaggaggggaacgtggtaaaacccaagacattaaatttgccatttcaggc

SEQ ID NO: 8075 - DNA, 409 bp, Homo Sapiens
ggggagatgctgtgaaattaaaacctctttgtacctgagacatctagattcacctcaggaggcctgaaggaaatgtgtaacttgtgggaaagaactagacaaccatttaggaattctctagatatactcagcctaacccagtggcttaacacaaggagattggctttgatctttttttcttgtggcatcttccagcaagttagaagtctcatgggataagactgcagttcccctggttcaatagctggaacagtgattttaaatgtccctttttctggatcccttgtaaacatgaaatcattccatggatggctgccttataattttgtctctttccactttaattgtgaatggttaaaaaaatgctgttttctgatattaaatttttattagtgcatacctaaaaaaa

SEQ ID NO: 8076 - DNA, 739 bp, Homo Sapiens
  misc_feature (402)..(469): n is a, c, g, or t
  misc_feature (534)..(535): n is a, c, g, or t
  misc_feature (539)..(539): n is a, c, g, or t
  misc_feature (542)..(542): n is a, c, g, or t
  misc_feature (546)..(548): n is a, c, g, or t
  misc_feature (550)..(550): n is a, c, g, or t
ggggcaaccattgttccaggtcccccagggcttcctccaacagcagctgtgaatggcacagtgaccttcctgcagcgtggagatggcacatccttgctgctggggacttggccctgctatttatttttgtatttatgtcttaatctcttccactgatgcatcctccaagggtagatggggagggtctgtgtgaaggggccggcttctcttggtgcctgctgggttgcaggggcaggaagcgtgtggactgcagcttctgctggtgctccccccgtcctcctggaggcagtataggagagagagcaaggattgagtctgagacttaagcactcggtcccagcttgccagttcctggttctgtgtccttggacaaactacctaacctttctgagcctcctatannnnnnnnnnnnnnnnnnnnnnnnnnnnnnnnnnnnnnnnnnnnnnnnnnnnnnnnnnnnnnnnnnnngaatgaaactgcacaaagccagaaccagcaggcactcaataaacgttcatgtccttttttctctnngacncanaaannnanacacccacacaccttttccttgtcgggccgccctcggcccctcgaaaaagcttttcctagaccaattcggtttggggggcgcggggccccagtaaaggtaaaggggaacacaggggcaattagcctggtttccctaagggagaatcctggggcccattgaacaaagtgggttggagaatttcccccccc

SEQ ID NO: 8077 - DNA, 764 bp, Homo Sapiens
ggaaccgaggtgatacctccagactgccttcagactcaagtgaaacttcaggccaggttcagcacagagctggaaagagagaagcttatcagacagcagatggaagaacaggttgctcaaaagtcctctgaactggaacagtatttacagcgagtacgggagctggaagacatgtacctaaagctgcaggaggctcttgaagatgagagacaggcccggcaagatgaagagacagtgcggaagcttcaggccaggttgttggaggaagagtcttccaagagggctgaactagaaaagtggcacttggagcagcagcaggccattcagacaaccgaggcggagaagcaggagttggagaatcagcgtgtcctgaaggaacaggccctgcaggaggccatggagcagctggaggagattgagttagaacggaagcaagcacttgagcagtacgaggaagttaaaaagaagctggagatggcaactaataagaccaagagctggaaggacaaagtggcccatcatgaaggattaattcgactgatagaaccaggttcaaagaaccctcacctgatcactaactggggacctgcagctttcactgaggcagaacttgaagagagagagaagaactggaaagagcgaaagaccacggagtgactgagcttgctggcagtcacgtcagtatatgtagatagctgcactggcaggagagctttacgctaaagaccaaagggacagctttggggcccgggcgtggtggctca

SEQ ID NO: 8078 - DNA, 193 bp, Homo Sapiens
cttgtcgcgctggggctcgaggcctacggtacctaagttggcgcaaaaagaccccgcgaccctcgaccctccctaaaatcaccctatccagccaaacggtgtgtgtcgactcccgaccgccctgtataagcaaaggcaaaggggacaagcatgcgaattttgatagccgaagacgccacatcgcgacatgggt

SEQ ID NO: 8079 - DNA, 508 bp, Homo Sapiens
agagaatttcccctatttatgcactaggtttctgtgctttttctttgagttctctggagtagatattaatttgataccttcatggtaatgaaattatgatggagctgtgttataaattccttatgtcagaggccagtgcggtagcctttgtcccttcatgcctttcaattctgagtgggaggaaaagcaaacatcaaaacagtgcttcagccaaattccatatgtaatgccattgggagagtattgactaaaatatcattcgtcagggaaatatagttgtaatatttttacaggatattcctaggtaaatgaaggagccttcagttgtaaatttcaattaccccaaaatgtatttgctacattttgttgtttgaagtattacctcttaaccttctttgttaatttttttcattttgtcttatatagtccagttttccaagataagctcagtcctttttcaaatgtcacctttttaccaatactttttcattaaattatgaaaactgct

SEQ ID NO: 8080 - DNA, 196 bp, Homo Sapiens
ctgtcgcgctatggtcgggagggaatcctggcttatttattacctctgtcctcgggtgtgggggccctagctcgccctctctgggtgggtgggtgagagaggctgcaggggaggctggcaccgggcttgggcctccagtccctgccttgctgactttggccgttgcggtatcacgtgacaatcaactctcccttaa

SEQ ID NO: 8081 - DNA, 403 bp, Homo Sapiens
tctgcagaatgttcagcatgccatttctgactggcacatctcgtgaagtttcatagaaacaaggagttggcatcttggatctcagaatggcctggaaacggatggcctctacgctgttccatcacagtctccaactaaggcttatggtatttcattaaactgttgcatacccagttagcacagtaggtggggagtctgcttcatttctatcattccatttttctgattaaactgtcaaatctgtcattgcatatgccatcgttttctagcaaaatcccatgattggctataaacgttttgtaagaagtcactctccttgaaaatactgaacatagctgtataggtttgtgattattagagaatatgttaataaaacttcttgtaacggctaactgccacctaa

SEQ ID NO: 8082 - DNA, 154 bp, Homo Sapiens
cattactaggcagaatgggagaaaagaggagagcgagagaaggtgaatccaagcgggacgggcactctcgaaagggaactgaggaggagaaagggatcccacacactggaaagtcacctatctgggggaaagatcaaacgaaccgaccacggcg

SEQ ID NO: 8083 - DNA, 470 bp, Homo Sapiens
caccattgtgcggtgcgatggggactcttctgtgcccgctgcttccgagagggccatgatgcctttgagcttaaagagcaccagacatctgcctactctcctccacgtgcaggccaagagcactgaagacaccctggtcctcccggaagggcagtcccacaggcagcggcacccatttctgggcccagccacaggacgtccgatgggagagcttgtctggctctactgatgatggataggccccttcctgagccttggtgtccctggaatgaggaaagattctccattcgagagaatgactgggagggaagaagtcggggccctcctattagaagcccagactggaagtgagaggcatgatggggagagaccagactgaatctacgggtgagccctgtaacctggctctagggcacaggcccctcccctggcacttagtgggtctaataaagtatgttgattcattgaaa

SEQ ID NO: 8084 - DNA, 164 bp, Homo Sapiens
gtgccgcacttggtcgctcgaaggcactatatatgaaatttcacatgaactctcagttgctcaaggaccatgtgccaccttctcgaagctcatggacccaagaaccccagaggaatctttagcatgaccgaaagaatagcatacattggggttccagttgccgc

SEQ ID NO: 8085 - DNA, 207 bp, Homo Sapiens
  misc_feature (43)..(44): n is a, c, g, or t
ccccatgttgggccgcacagtggtcgcttcatgggtgagtaanngagtgaggacatgagctaggaaaggggcacgagggagctttctggagtgatgtgatgttctgtacctcaacaggcgtttgcacacagatatatgcatttgttaaacctcacagaacagtacacttacaatttgacattttgctatgcaaaggttgcttaaagc

SEQ ID NO: 8086 - DNA, 534 bp, Homo Sapiens
atggcgcgacactcgatgtactggatttcgaaatcgctcggccgagcgcctcgtgtcagccggcgctgcgctggagagtagcagtgcagccgtcgccagtatgcggttgagcaatggcatgacgctgaaggccgatccgctgtccagcatcagcgatggggctgccggcgtactggtcatccccagcctggggctggacggcatgctcgatgccaacgggcacgagccatgtggactggatgcccgctacaccgacggtattgcattgcgcccggttggccatgccggatgcccagaatctggcacgcttggcttgcccacttccacgcgagccgggggcagggttgtgcgccagctgtacgggggtgctggttgctggggggaggccgggattgctcgacggccgtcgtgtcaccagtcattgggcattggggggccttgctgtgtaaggcgttccacggcagggcacggttggatcccggcctgcatggtgccagaggaggggcgaccgaccacgttgccggccaacatggg

SEQ ID NO: 8087 - DNA, 1091 bp, Homo Sapiens
  misc_feature (1026)..(1026): n is a, c, g, or t
cacagaacacaaacaaaaaaaacaatcatgtgaactataacccttgtaaacaagcaggctggtacggtccggattcccgggatatgtcgaccacgcgtcgggccgcagcctcgcctctgcgcgactgccaggcctggaaggatgcgaggctcccgctctccaccacaagcaacgaagcctgcaagctgttcgatgccacgctgacccagtatgtaaaatggaccaatgacaagagtctcggtggcatcgagggctgcctgtcaaagctcaaagcagcagatccaacctttgtgatgggccacgccatggctactggccttgtgctgattggcactggaagctccgtgaagctggacaaagagctggacctggctgtgaagacaatggtggagatttcaagaacccagccgctgacaaggcgggagcagctgcacgtgtctgcagtagagacatttgccaatgggaactttccgaaagcctgtgaactatgggaacagattctccaggaccacccgacagacatgttggccctgaaattttcccatgatgcttatttttacctgggctatcaggaacagatgagagattctgttgctcgaatttaccccttctggacacctgacatccccctaagcagctatgtgaaaggcatctactcttttggcttgatggaaaccaacttctacgaccaggcagaaaaactcgccaaagaggctttatctattaacccgacagacgcatggtcggtgcacaccgtcgctcacatccacgagatgaaagcagagatcaaggatgggttggaattcatgcagcactcagagaccctctggaaggactctgatatgtcggcttgtcataactattggcactgggctttatatctgattgagaagggcgaatatgaggccgcgctgaacatctaacgatacccacatccttcccagccctgcagccaacgatgcaatggctggacgtggtggacagctgctccatgctctaccgcctgcaaatggaaagagtgtctgntgggccaccggtggcaggatgtcctgcctgtggcccggaaagccagccgagaccacatcctgctg

SEQ ID NO: 8088 - DNA, 196 bp, Homo Sapiens
gcggatcgcaactggaaacgctggagagccttggccccgatgagcagggattcgtcgtgggcctggcaggtacgccggcacagcaggccagcgacatcatcatcgcgcttgaaagcgccggtcgcgcctgacgctccggctcagtggatcttctcgccacgcgcgagcatcgccaccagcttctcgccataagcgc

SEQ ID NO: 8089 - DNA, 954 bp, Homo Sapiens
tggtacgcgtcggattccgggatatgtcgaccacgcgtcgtggttcatcatggtgcaagaagagcggcgtctacgaaaggccctgctggagaagggtatcacagaggctgagcgagaggctttcgagctgctcccagatgatgagcgccagtgtatcaagtgcaagactacgtgtttcctgtcagccctggcctgctacgactgcccagacggccttgtctgcctttcccacatcaatgatctctgcaagtgctccaatagccggcagtacctgcggtatcggtatacctcggatgagcttcctgccatgctgcataagctgaaggttcgggctgagtcctttgacacctgggcccacaaagtgcgagtggccctggaggtggaggcatgggcggaagcgcagccttgaagaactgagggcactagagtctgaagcccgtgagcggaggtttcctaactagtgagctgctgcagcaactaaagaactgcctgagtgaggcagaggcttgccgtgtcccgagctctgggacctggtcagcgcgccaggaagctggccgcccacagggtggcttggtctacccgattgacctgactgagctccgggccttctcctggacagatgatcaacctgccttgcgccatgccaccagatggggatgtcaaggtgtctggcccaggtggaggcctaccaggctgaggatcgtgaggccctggactcactgccttccattcagggctactgaagacccatgtgcagacggggccggcacctggggtggtggaccgtgccagacgaccaaccaaatcagccgtagctggacaacggcaaagccgaataaggaaacaccacactgcggcccctcagccccaacgaggccctgctgcacacgcaagactggttcggaacgcggttaacacgacaacctaaaccgcgacgaggaaaaaccacagcca

SEQ ID NO: 8090 - DNA, 231 bp, Homo Sapiens
ttcccattaaccaggctccaggggtccaacaggcgcctgacctgttcacacgaagttcaggaaacagaagatcttacatagatataaaattatcagcttaaaaaaagtcctaatccatcgaccctatcccgagggattctgctctggggcacagtctggacattttaagctcctctaacgactctaacatgcggtcaaggttgagtacactgacatagaaagacacctcag

SEQ ID NO: 8091 - DNA, 826 bp, Homo Sapiens
tgctggtaccggtccggtatcccggcatatcgtcgaccacgcgtccgcagatcttgaaagttcaggcctcacacaagccttctgaaattctggaatgcagtgaaacttgctttacaggaagtagctagtaaagcagcagtactaacagagacccctcgtacaagtgacggtgagaagactttaatagaaaaaaatgtttggaggaaaatctacgaactcacatacgtggtttgaactgcaggagtacctcacaaaaagtggaagccttgacagatctttcgcttgccttttgtccttcctcttctttggaaaacatgtctgtccaagatccagcatcatcacccagtatacaagatggtggtctaatgcaagcctctgtacccggtccttcagaagaaccagtagtttataatccaacaacagctgccttcatctgtgactcacttgtgaatgaaaaaaccataggcagtcctcctaatgagttttactgttctgaaaacacttctgtccctaacgaatctaacaagattctcgttaatcaaagatgtacctcagaaaccaggaggctcgcacaccacaccttcagtaactgacttactacaattcatttcccggctccagagattcttactggtgataaccaatatcatcgcgaccactgtgcctctctgcccaatgctgacgacaactatgcaacctcaccggagggaaccctggaataacctcaatccttacctccccctgacactccccactactgatctcacacagtcttcatgcttgacacggcgaaacaaacaagcaaccccggtcccactgccaccgg

SEQ ID NO: 8092 - DNA, 194 bp, Homo Sapiens
gcgaactccatcagatggaacagcagcgggctcgagatgttgtacggcagattgccgacgatgcgaagcgggcgtccgggctgcttcagctggtcgaaatcgaaggccagcgcatcgccggcgtggatcgtcatgcggtcgccataacggcggcgcagccgttcgaccagagtcgcggtccagttgaccacatg

SEQ ID NO: 8093 - DNA, 1081 bp, Homo Sapiens
ggatgggaatatagaccaggtgtaacgaaagcaggtggtacggtcggatatcccgggataatgtcgacccacgcgtcggatcatatcataattgatggtctccacgcagaatcaccagatgacttggtgcgagaagctgcttataaaatttttctttatcccaatgctggtcaattgaaatgtttagaagaattgctcagcagcagagatcttctggcaaagttggtggggtattccacgttttctcacagggctctccaaggaacgatagctaaaaatccagagactgtcatgcagttccttgaaaaactatactgacaaactttcttgaaagaactctgaaagatttagagatgatacgagggatgaaaatgaaactgaatcctcaaaattccgaagtaatgccctgggaccccccttactacagtggtgtgattcgtgcagaaaggtataatattgagcccagcctatattgcccgtttttctctcttggagcatgcatggaaggcctgaatattttgcttaacagactgttggggatttcattatatgcagagcagcctgcaaaaggagaggtgtggagcgaagatgtccgaaaactggctgtgttcatgaatctgaaggatgtggggtacatttactgtgatttttttcagcgagccagacaaacaatcaggattgtcatttcatatccgtggaggcagactacaggaagatggagaatatcaaacttccccagtgtagatcttatgtgaatcttacccgttcctcaaggagttgtccaacttggttaacttcctggatgatggacaatcttttcatgaaatgggacatgcgaaggatcaatggtaggaagtagctcgtcacacacaggtcgtgggaccaggtgactatgattggtaaggtcaccatcgaggagactgggaagtatatcgaggttaaacatgcaaattaaactggaacccggcaaaaagggctgcagaaaaagggaggcagtagaacggtagcacggtatcacggaacgggtaacaatagaaaatagcgtagggcagagatttcacgcgttgtacgtattttgtag

SEQ ID NO: 8094 - DNA, 573 bp, Homo Sapiens
  misc_feature (510)..(510): n is a, c, g, or t
aatgtgaatatagaacagcttgtaaaaaaagcacgctgtacggtccggaatcccgggatatcgtcgacccacgcgtcgtggtgctgcagaccgtcatgaaggacatcctgcaggctgtgaaggaggccgcggtgcagaggaagcacaacctctaccgggacagcatggtcatgcacaacagcgaccccaacctgcacctgctggccgagggcgcccccatcgactggggcgaggagtacagcaacagcggcaggggcggcagccccagccccagcaccccggagtcagccaccctctcggaaaagcgacggcgcgccaagcaggtggtctctgtggtccaggatgaggaggtggggctgccctttgaggctagccctgagtcaccaccactgcgtccccggacggtgtcactgagatcctgaggcctgctggcccaaggtctgcggcctgagagccccccatcagccggccccctgctcaactggggcccccgctggggagagtccccangctaaggccgcccctgaggcctcctcgccgcttgcttcaccctccagcatctcctgcctggac

SEQ ID NO: 8095 - DNA, 993 bp, Homo Sapiens
  misc_feature (774)..(774): n is a, c, g, or t
ggccagggtctggtacggtccggaattcccgggaatatcgtcgaaccacgcgtccgcgctgggccgtcttctgccggccgcaaggccggggctccccgctgctctcgaaaagccgcaggtactaaacagacaagtactttgaaacaagaagatgcttctaaaaggaaagctgaactagaagcagctgtgagaaagaagattgaatttgagagaaaagctctacatattgttgaacagcttttagaggagaatattacagaagagttcctaatggagtgtgggaggttcattacacctgctcactacagtgatgtcgtggatgaacgttctattgtcaaactctgtggttatcctttatgtcagaagaagctgggaattgtaccaaaacagaaatataaaatttctaccaaaaccaataaagtctatgatattactgaaagaaagtctttttgcagcaattttggttatcaagcatctaagttttttgaagcacaaattcccaaaactccagtatgggttcgagaagaagagaggcatcctgattttcaactgctaaaggaagaacaaagtggccattctggagaagaagtacagttatgcagtaaagccattaaaacatcagatatcgacaatcctagccactttgaaaagcaatatgaatctagttcttctagcactcacagggatagtagcagtgacaatgagcaagacttggtgtcctccattctaaccggggaaacgacccattcgcaatttgtacacagctggccaaanagcttatggaaaagcaagtgcggccaggtactcccaccaagaccagaagaaccgtgaggtcctcagggtggctgcactatgcggggaaaggacgtgggtccctcaaaggaatcacaggtcaaacggggggtaagcgcatgagggggcacactgtgtaaggggcaaaacaacactcactcaggcgcgaaaggaggtgattcactggatctgagtgaatta

SEQ ID NO: 8096 - DNA, 805 bp, Homo Sapiens
  misc_feature (79)..(142): n is a, c, g, or t
ggcatgttgactatagacagttgttaaaaaagcaggctggtacggtcggatttccgggatatgtcgaacccacgcgtcnnnnnnnnnnnnnnnnnnnnnnnnnnnnnnnnnnnnnnnnnnnnnnnnnnnnnnnnnnnnnnnngagccgaggaggaggttccggacgctgcttaggaaccggggactcaggagtgcccgcgccctgagcgctcagctccagaggcgtcatggctgagtacgggaccctcctgcaagacctgaccaacaacatcacccttgaagatctagaacagctcaagtcggcctgcaaggaagacatccccagcgaaaagagtgaggagatcactactggcagtgcctggtttagcttcctggagagccacaacaagctggacaaagacaacctctcctacattgagcacatctttgagatctcccgccgtcctgacctactcactatggtggttgactacagaaacccgtgtgctgaagatctctgaggaggtgggggctatttctatgcaaatagaaatcagcacattcctcctacttccctttcctccactccccccatatctttaaagtgtggaagcagaaaggacctgcattttcctacattgaggagctgacataggggtaaggtatgggagaggtaggtggatccagggaaaagcagtggggacggaaggcaagagaccactcaacccccacctggaaggggcaaagaaaagccagagttccatgtttgtactccttgtgctggactgtttcctgagtaccagcaggtccctttttgtctctcatg

SEQ ID NO: 8097 - DNA, 276 bp, Homo Sapiens
ccttggtggaattctgcaacttccttcctgcctcggccacagcatgtcagccaagcacctgtcagggtccctccctggcaggacgatgtttagaagctcaacaccgtgctcctgcctcctcttcagacccatcagaacttgctaccatgggtgtgttttaataaataacttcatttctgcagcaaataaataaataaataaatgtagttgcaatattgcctttaaaagcacttttaagcatcaattgtgaaataaaaagcccgagcgaaagccctc

SEQ ID NO: 8098 - DNA, 462 bp, Homo Sapiens
caggagcccctgaccgcgtccatgctggctgcggcgcccctgcatgagcaaaagcagatgattggggagcgtctctacccccttatccatgatgtccacacccagctggctggcaagatcacgggcatgctgctggagattgacaactcagagctgttgctcatgctggagtctccagaatccctccatgccaagatagacgaggcagtggccgtgctgcaggcacaccaggctatggagcagccgaaggcgtacatgcactgaaaccagaaaaggaaatcctcgcttccatggctgccaaaaggacagtgtttctggctctcagccctaaggccctgcaaactctaacttatttcccaattagtctgtatctatacttgggctctgtatgtgaatgaaggttggtcacccatccagcctattaccttttgctttgtgtattaaaagtgctgcaaaatcaaa

SEQ ID NO: 8099 - DNA, 487 bp, Homo Sapiens
gcggccgccgcgatctgctgttgcactgacacctcgcgttccagggcctcaagagccagctcctcagcagggcacaaggagtggtgtgcttggttggggtgcggtggagggtaggcgcgggctgtggggggccgccggcggaccaactggggccgttcaccaggctctagtgggcactcagggggcagctggccagtcagctccgcctcctggagacacactttgcggagctcctgaagtttcaggctcagggcctcctgcagggtccgctgccggtcaagcagcccccgcagacgctctgacttcacctggggggcagcctctccgaacagggcagctggggcattgaaggtaggagagctgatcagctgacctttgacttccatcttggtgctgtcgagaggccgtggctgatggctggacaaagtctgcttgacctgccctttcagaatccgtgtggatgtctggacccacttggccctggtac

SEQ ID NO: 8100 - DNA, 989 bp, Homo Sapiens
  misc_feature (754)..(771): n is a, c, g, or t
acagaggcagtggcgaattttgacagccacataccctgtggtccacatgccatacggctggttgacggaaatccgtgctgtgtatcctgctttcgacaagaataaccccagcaacaaactggtgagcacgagcaacacagtcacggcagcccacatcaagaagttcaccttcgtctgcatggctctgtcactcacgctctgtttcgtgatgttttggacacccaacgtgtctgagaaaatcttgatagacatcatcggagtggacttcgcctttgcagaactctgtgtaggtactttgcggatcttctccttcttcccagttccagtcacagtgagggcgcatctcaccgggtggctgatgacactgaagaaaaccttcgtccttgcccccagctctgtgctgcggatcatcgtcctcatcgccagcctcgtggtcctaccctacctgggggtgcacggtgcgaccctgggcgtgggctccctcctggcgggctttgtgggagaatccaccatggtcgccatcgctgcgtgctatgtctaccggaagcagaaaaagaagatggagaatgagtcggccacggagggggaagactctgccatgacagacatgcctccgacagaggaggtgacagacatcgtggaaatgagagaggagaatgaataaggcacgggacgccatgggcactgcagggacagtcagtcaggatgacacttcggcatcatctcttccctctcccatcgtattttgttcccnnnnnnnnnnnnnnnnnnggtaatgaaagaggccttgatttaaaggtttcgtgtcaattctctagcatactgggtatgctcacactgacggggggacctagtgaatggtctttactgttgctatgtaaaaacaaacgaaacaactgacttcatactcctgcctcacgaaaacccaaaagacacagctgcctcacggttgacgttgtgtcctcctcccctagcggggtaccgagctc

SEQ ID NO: 8101 - DNA, 159 bp, Homo Sapiens
ttacctgaaacacaccaaagggcccctttctttcttctgaggattgcagaggatatagttatcaatctctagttgtcactttcctcttccactttgataccattgggtcattgaatataactttttccaaataaagttttatgagaaatgccagtgtgc

SEQ ID NO: 8102 - DNA, 607 bp, Homo Sapiens
gatggccggacgccaagaagcttagtatactagtacacatacaggggtctgacctacctcaggtggaacggtgagcagggaacatgtcggagtccttcagagaatgtgatgtgaggttggatcaacagtgtgggttcctgtcctgtttccccttcctctttggggctgaggaggaggttaaaggccaaatgctgtttcccaacaccccaaagtctgcacacgtctcatgaatgcatcacatttctgtcatatggatattagccattccgaaatctgtgtaatcaacttcacattattcaagttacaaatcactgtgtccatagaaaaactgtgctggtatttgctggacaaagggttgggccccttttatttttacctgccacccagcatctcccccacctgccccttctgggtgacacagccggtaaacggaatcacgtatggttctttctgtgggtctgtggcacagcaggaaaagccccgtgccgccagcaccttgtggaagaccacacatgggtggtcccacagcatgggaccaggctggcctgagggatgcccagttgtaacaatgctgctgtcactgtctcattaaatatacatcctttaa

SEQ ID NO: 8103 - DNA, 426 bp, Homo Sapiens
gagagagaagggagacagaaagaattacggcgtgaataggcagtttcatgttgttgggagaacttagcagaaatcggtaccttggtcattacaaagaagcacgttcaaaggaaaaaaaagacaattgcacaaggaggctttttacacggggaggggaggggcatggggggctcagccgggcctttgccgctcgccctcacagggcgagggagcctttgcttaaatccttttctttccccccggcccccaagagaagggaaggagatccacggtagctcacacacagaagctattacgagatactaccactagcggggactggcgcggcgggggacgctgcggtgggaggcccggctcctggccccgctagcggggccagagctctctcgggcaggggcgcgcggcggcggcgcggccgggacccgc

SEQ ID NO: 8104 - DNA, 232 bp, Homo Sapiens
ctcagcccacgtgttctcccccacgtggggtagcagcaggacagacagtgaatcacagagtctgccctgagcagaggctgctgtccctgggactcctagccatggtcagactgtacaaaacggttttccagaaatgaaatgtaaatccatttttatactgaaaatgttactgaaagtcacttttatgagcatctgccttaataaacagacattgattcccttatcagaaaaa

SEQ ID NO: 8105 - DNA, 756 bp, Homo Sapiens
cgggaaaaaccccctttttataaagggttataaagctgaacacggcccctaccctgctccgctccgagttcgggcagcgcaattcaccactctcccaaagccggaccacagctgggtgaggggtgggacaaaaagtaggagcagccccagcatgcagggcaaaaccccaaagcctcgggcgaaggcatcgcccatcatcccccttaagggaacagcgagaggcggcccaaagctcttttgcggggacgaacacagccaaggtcaccctccagcccggtctgtcccatgtgcaggtgatggggggtacgataagcagcaatgagggcccaggaagacctcagtctcctgggggcccatcctaaaaaatggcaagggcagcaaagtatttccatcctgctcctacaatttaaaaaccttcttttttagtgtcaaaatatagcgttgaggggagctggacgctagggtcttcaccctaacgcaaagcaaaagccgaacggaacgggagcaagcgaacagaacaggagcaagcagcacacacaggccagtgatgtgcaagaagcggagagaggtgagccggctgcagcactgggcgagaactgcgggtgaggtaagggccacagcctgagctgctcatctattgagggggctagggaaggttgcaggggttgagggtccaggcccaacctttcacaccccgcagttggcccaggctctgcctgcttgggacttcgccgagtgtgtatcctgtagagtccg

SEQ ID NO: 8106 - DNA, 388 bp, Homo Sapiens
  misc_feature (28)..(28): n is a, c, g, or t
  misc_feature (48)..(48): n is a, c, g, or t
  misc_feature (52)..(52): n is a, c, g, or t
  misc_feature (55)..(55): n is a, c, g, or t
  misc_feature (60)..(92): n is a, c, g, or t
  misc_feature (211)..(221): n is a, c, g, or t
cctggagggtaactggggggccaccatnaccccttctctttccagaancagntgnttctnnnnnnnnnnnnnnnnnnnnnnnnnnnnnnnnngaggtggcccttgtttacagtgaggactcggccactgtgtctctgtttcctgaaatataaactgtagcgaccccagactgtagagatttttatgtgtttggatacatctgctgtgtggnnnnnnnnnnnctacaaaaaccctaattttgtacatactgtatttttactattgaactgtattctagtggctgttcatgctccaagactttagttaccgagacatgaatactatccatgtaataagcacttgcctggaataaaatataaaactgaaataaacctgcactgaaacctga

SEQ ID NO: 8107 - DNA, 456 bp, Homo Sapiens
gcttgtgttgaattcagcactctagattctctctgacattttcctgtcttttgggaaaaaaaagcagatattccaaaaatggcagaaatctaatttttgtaaactttttcatctataggattgagccaaaaaacatacatactattttaaagaaaggtaccatctaattcttttattaaagatagctacttatgaaatgtcttaacagagtttcaagattgcaaagtagtattgcatagctggttttcttacatgtgatgatggaggagagaggaagacccagacttaggcatgtagtgaaatatgtacagtttctggcatcagtgtactatttatagtctatagcatacattacttgcaaatgggaaaagtattttataattatttttgtacctcaaaataattattatattctactgtattatattcaaattaaagtttattatttgattctta

SEQ ID NO: 8108 - DNA, 370 bp, Homo Sapiens
  misc_feature (59)..(59): n is a, c, g, or t
agctgatgtatagccctgtatacagtgtagatactatttttgtaaaaacacaaggctanaattaatgaacaagaatactgaatatttcatcattaaaaatttcttgtatttcttgtgcattaatctgacgataatttccctgtatattatgttcatttagctgtttgtaatttttgttaattagatcaggttgtctgcatttgttggtgtaagtgaacatcatcacagttatcctgagttgagtttaagccaaatacatgcatagaaaagggtcttcctattaatggaagaaggtaatttttaggatgtgtattatttcagttttgtatgtttaacttttattaaataaagtgtttttaaaatctcaatt

SEQ ID NO: 8109 - DNA, 188 bp, Homo Sapiens
gggtctcttttatggtttagacacagcaactgaccagcattaatgtcaaaataaagatcataaggctgacagaatagaccctttgtggcaataacaaattattcgtaagatctaaggtcatgccagcgcaagtgttatgtcatgcactcctacacttaaagaataaactatgttctaactgccacaag

SEQ ID NO: 8110 - DNA, 617 bp, Homo Sapiens
catgtctcctgattaaattcatgttctcttataaccacaacggctacttctaaagctctaccactccacatagggcaagtcagacagctccctactcctggcgtatctggtgatagacactgaacagtacaggctaatttgtctcttccatttcccattgctgataccataactctttctgtactcctttagtttactgtccatatttgatttctgaaacaaccatctccacaccctgaaaatattagtatagttaacctcctatccattgccttcaaaggtttgcctggcagtaatacagttctcttaattagcaaacacttctttgaacttgactctttcttagaagcaatcactattcctttgacctgaagattacacattacttggggatttacagacatctgcaatactggtatcgtattcccttccttcaagtatttactaaatatccactagacgcctttgtcttaaagacatgagctaaattaaatatacatcttactaatacgtatagctttagaatttttaggcattaaaggcttgctgctctgctgtattcaatctttctgcaggcatggtccaatttgctctgtaatgcttatactagggaggac

SEQ ID NO: 8111 - DNA, 462 bp, Homo Sapiens
acagatcaaatctgcactgtgtctacatataggaaaggtcctggtgtgtgctaatgttcccaatgcaggacttgaggaagagctctgttatatgtttccatttctctttatcaaagataaccaaaccttatggcccttataacaatggaggcactggctgcctcttaattttcaatcatggacctaaagaagtactctgaagggtctcaacaatgccaggtggggacagatatactcagagattatccaggtctgcctcccagcgagcctggagtacaccagaccctcctagagaaatctgttataatttaacaacccacttatccaccttaaaactgaggaaagtcgtctttacatctaattttattcttgtgtgttataacttaaacctatttctatttttgtttgttattgcccttataagggtgtccatctccaagttcaataaactaattcatttaa

SEQ ID NO: 8112 - DNA, 263 bp, Homo Sapiens
cggaagggaagggggcacaggggcctgccctcttcctgatacctgaaggcagtggggccgggagagaaacagagcaggtggcgaggagtcccggaggcttcctccaaaggttctcgggcctttccccgagagttctggggagtttccccaggacagctggcattgggggcagccttggaggcatgggtccccaccaaggagtgttcaggatctgctgacagaatcagagcagggacaagatgagggacctcagggagggacag

SEQ ID NO: 8113 - DNA, 1333 bp, Homo Sapiens
  misc_feature (117)..(117): n is a, c, g, or t
  misc_feature (1049)..(1077): n is a, c, g, or t
  misc_feature (1112)..(1124): n is a, c, g, or t
  misc_feature (1251)..(1275): n is a, c, g, or t
tggtcgtcctccttgggttcgggtgaaagcgccttgggggttcagtgggccatgatccccgagctgctggagaactgaaggcggacagtctcctgcgaaaccagcggactgaagatnttgttcagatcatcatcatccgtggtggtgatgatggtgatggtggtggtgatcacgtgcctgctgagccactacaagctgtctgcacggtccttcatcagccggcacagccaggggcggaggagagaagatgccctgtcctcagaaggatgcctgtggccctcggagagcacagtgtcaggcaacggaatcccagagccgcaggtctacgccccgcctcggcccaccgaccgcctggccgtgccgcccttcgcccagcgggaccgcttccaccgcttccagcccacctatccgtacctgcagcacgagatcgacctgccacccaccatctcgctgtcggacggggaggagcccccaccctaccagggcccctgcaccctccagcttcgggaccccgagcagcagctggaactgaaccgggagtcggtgcgcgcacccccaaacagaaccatcttcgacagtgacctgatggatagtgccaggctgggcggcccctgcccccccagcagtaactcgggcatcagcgccacgtgctacggcagcggcgggcgcatggaggggccgccgcccacctacagcgaggtcatcggccactacccggggtcctccttccagcaccagcagagcagtgggccgccctccttgctggaggggacccggctccaccacacacacatcgcgcccctagagagcgcagccatctggagcaaagagaaggataaacagaaaggacaccctctctagggtccccaggggggccgggctggggctgcgtaggtgaaaaggcagaacactccgcgcttcttagaagaggagtgagaggaaggcggggggcgcagcaacgcatcgtgtggccctcccctcccacctccctgtgtataaatatttacatgtgatgtctggtctgaatgcacaagctaagagagcttgcnnnnnnnnnnnnnnnnnnnnnnnnnnnnncccccgtttctttgttgagctgtgtcttgaaggcnnnnnnnnnnnnntttctacagtagtctttcttgtttctagttgagctgcgtgcgtgaatgcttattttcttttgtttatgataatttcacttaactttaaagacatatttgcacaaaacctttgtttaaagatctgcannnnnnnnnnnnnnnnnnnnnnnnngataagagaaactgtatgtgcgagggcaggagtatttttgtattagaagaggcctatt

SEQ ID NO: 8114 - DNA, 173 bp, Homo Sapiens
agggatgcatagtaattcattatattacaatcagaatcaaataattttgtttaatatttgcttctgaaactggtgcaccatttagctgttttgataccataaacaagtaaattttataaatgtagatatatgagatctttcagttattttgattgactcatttataaaatgta

SEQ ID NO: 8115 - DNA, 302 bp, Homo Sapiens
ctagaggatccccccatggttggcccgcacgtgggtcgccagctgcttcgacttcgcctacatgggcggttcgatgggctcggtggtcggcgagcgtttcgccctgggcgcggagaaggcgctggagcttggctgccccttcgtcagcttctccgccagcggcggcgcgcgcatgcaggaaagcctgttctcgctgatgcagatggccaagacctcggcggcgctcggcaagctgcgcgccgcgggcctgccgtacatcttcggtgatgacccacccgaccacgttgcgcctaacatgggta

SEQ ID NO: 8116 - DNA, 306 bp, Homo Sapiens
cccatagtacggatgcatcctcccataagaaagcactgttctgattgtgttactataatttagtttgcatttcctagtgtattagatagaatcatagaatatgtacttttttgtctggcttctttcactcagcataattatttagagattatgtagttgtttgcataaatatttcattcctgtttattgctaaataatatccaattgaatggctatatcatgatttgttgttagccatttgaattttttccagtttttggcttttacaaacaaagctgctctgaacatttgggtacaagtttttac

SEQ ID NO: 8117 - DNA, 752 bp, Homo Sapiens
gggtcgtctagaggatccctagctggtcgcaagtcatgtcggattctgaaagttacggtcagtctgggggtgagcagcaaagttattctacctatggaaatccaggcagcaaggtatggacaagcatcacaaagctattctggctatgggcaaacgactgattcctcttatggacagaactacagcggttactccagttatggacaaagttattcacagtcctatggtggttatgagaatcaaaagcagagctcatatagccagcaaccatataataaccagggacagcagcaaaacatggaatcatcaggaagccaaggtggaagagcaccttcctatgaccagccagactatggtcaacaagattcatatgaccagcagtcaggctatgatcaacatcaaggctcatatgatgagcagtcaaattatgatcagcagcatgattcctatagtcaaaaccagcagtcctatcattcacaaagggaaaactacagccaccacacacaagatgaccgtcgtgatgtgagtaggtatggagaagataatagaggatatggcgggtcacagggaggaggtagagggcgtgggggatatgacaaggatggaagaggtcctatgacaggatcaagtggtggtgaccgcggtggcttcaaaaattttggtggtcacagggattatggacccagaacagatgctgattcagaatctgataattcagataacaacacaatctttgtgcaaggactgtgaac

SEQ ID NO: 8118 - DNA, 1438 bp, Homo Sapiens
  misc_feature (1418)..(1418): n is a, c, g, or t
cgggccgagagggcgcagacgtggcctgcgctctgtggttcgtctctgcgctgtcatgtggtcgcctgtccttgctctcattatcgtggtggcgtctgattcgcgatgttcttcatcatttcccttcgtgggtgccctgttttgtcactggtcggtgcatctctgcgttgtctgcttcccttactcgcctagttgactgtgagtgcgtttgttcctcctcgtatcatgctgtcgctgggttgtgtgtactttccgtcacgcctgtgcccagcgggccgcctctcctgtggtcccactgactgccgtcgtgtggttgccttggttcacacgatccagtggggtcggccagtgagttagtgggtccctgccccctgtgctattatccgggcttggtccgagcccagcgtccgcccatgtaggagccgcatgacttcatcacacgtcccatgtagctgcaagggcagcccacgcatccttccggtccacgtgcaggttcacgatgtaaagcttcggcctccggctaggggtcttggtcatgcaccagaggcgtgggtacttcttgtagaaccttcaggctggaccctagacacaggatggtgtctgctcttgctggcagccctcggtcgccgcttcccagttcagagactgccccaacgtccccctctccccaaagtagcacaatggagtcccacagctgggtcccacacttgtgacaggtccggcctgtctggtgtctgtggagggcagtgcgctccgtcacatcgaacacccgcacgtactccctgtagggaacgcaggaggtacagacttcaatgtacatgttcccgtggagctcggagatggccgtgcgcggcagcccactcctcaggtggagcccgtcacagttctgagacaccacatgctgcaccagcttctgctcatgcagacgggtgatgctcatgtgggtgagggttggctcggcctcgctcaggtcggcagcactaacgcttctccctttctgaagcagtgtccacactccattagggccccggtagtctgggatagacgctgccgtgctgattcccgcgcctgtgtagacgaccaagtatttggcgttccggacggcgctggccagctcccggaccttcccccgcagctcctccgggtcgtcgcacacctcctcctgccgccgcttcaggccctcgcgccgccggctccggccctgcagctccgttaccaggtccgcgctctcggccagcagccggccctcctcggcgctgcgctccgccgccgccttcctcaggatgcgcgacacctggcggaggcgctccctctgctgctcctcccgcaacctccggacccgctccgccgctttgcgctcggaacggctcagacccccggctgccatccggagaattccggtccggtaccgtcagttnttttttttggagagtgggcg

SEQ ID NO: 8119 - DNA, 414 bp, Homo Sapiens
  misc_feature (125)..(246): n is a, c, g, or t
tacctgctagatgaccatcactgcaatctccgcctcctggattcaagagtcttgttgctcagttctggcagaaggtggtgtttttacaagatgatttctaggactacaggcatgcaccaccatgnnnnnnnnnnnnnnnnnnnnnnnnnnnnnnnnnnnnnnnnnnnnnnnnnnnnnnnnnnnnnnnnnnnnnnnnnnnnnnnnnnnnnnnnnnnnnnnnnnnnnnnnnnnnnnnnnnnnnnnnnnctgagccactgcgccaggcctggttttctggtttcaaaccacaatagacattgctggagaatcaagctcatagtttctttttactctgcatgatatccctccaaaagcttgtctattctcatgacttcatgacagttcttgccaatgattgcagtgataggtaagcag

SEQ ID NO: 8120 - DNA, 896 bp, Homo Sapiens
caagcatagtgaaatagaccggttcaaaagcaggctggtacggtcggatatccgggatatcgtcgacccacgcagtcgacggacgcgtgggcggacgcgtgggcggacgcgtgggcggacatggagaccgagacggcgccgctgaccctagagtcgctgaccaccgatcccctgctcctcatcttatcctttttggactatcgggatctaatcaactgttgttatgtcagtcgaagacttagccagctatcaagtcatgatccgctgtggagaagacattgcaaaaaatactggctgatatctgaggaagagaaaacacagaagaatcagtgttggaaatctctcttcatagatacttactctgatgtaggaagatacattgaccattatgctgctattaaaaaggcctgggatgatctcaagaaatatttggagcccaggtgtcctcggatggttttatctctgaaagagggtgctcgagaggaagacctcgatgctgtggaagcgcagattggctgcaagcttcctgacgattatcgatgttcataccgaattcacaatggacagaagttagtggttcctgggttattgggaagcatggcactgtctaatcactatcgttctgaagatttgttagacgtcgatacagctgccggaggattccagcagagacagggactgaaatactgtctccctttaactttttgcatacatactggtttgagtcagtacatagcagtggaagctgcagagggccgaaaccaaaaatgaagttttctaccaatgtccagaccaaatggctcgaaatccagctgctattgacatgttatcatacggtgctacttttactgactggtttacctcttatgtcacaatgttgtatcaggtggtttccc

SEQ ID NO: 8121 - DNA, 476 bp, Homo Sapiens
gctgctgctgaccatcactgcaatcaagattatgagactgttcaactcctctccttcaaaattgagagtttatctacgtaagtcactaaaaacattaaggggatcaggaagtatcacataataaaaaaatgtttggagcttcaagctttccccatgtaaataggtaccaccatttcacacagctctctgaagtgctcaagttgctgaaatgaatgtacagaagttatcttgtttctggagattataggtaaacattttatgatacctgaagggtcaattcgtaatcttcaataaagtgctggtttcttcgtgcaagcctcccagcctcctttacaaaatcaaaaacaagagaggtactacagcaaattacctgattagctatctttcaaaattaaattggttctgatctggatgttgtcaaaaaaatatctaaagcctggggaagattgcagtgatggtcatgctagcaggaccgc

SEQ ID NO: 8122 - DNA, 466 bp, Homo Sapiens
cctggttgctcaggtctgcctggggtttccattgcagacgagggggagactggcatgttctccttgatgcaccatccggggtcaccagtatgcgacttactgaagtgcaagatgataaagaggaggaggaggaggagaatccactgctggtaccactggaggaaaaggcagtactgcaggaagaacaagccaacctgtggttctcaaagggcagctttgctggggactcgaggacgatgcctgatgaggccctggagatcagtcaggcccagctgttatttgagaaccggcggaagggacggcagcagcagcagaagcagcagctgccacagacacccccttcctgtttgaagactgagataatgtctcccctgtaccaagatgaagcccctaagggaacagaggcttcttcggggacagaagctgccactggccttgaaggggcagacaaggatggcatctcaga

SEQ ID NO: 8123 - DNA, 230 bp, Homo Sapiens
gtgggagtgtcccgggagggagggtcggaggagtttgtgaagaggcggtccgggggtgaggaggtctctgatgcggtgagatctgtgaagtgggcggcttgggctggggagtccgggatgcgagtatagtaggtagtgtctggggggtggtatgaccaggataggggaggctgctggatgggagacagtggatgaggaataggtgagattgcagtgaagggtagcagcag

SEQ ID NO: 8124 - DNA, 1136 bp, Homo Sapiens
  misc_feature (32)..(33): n is a, c, g, or t
  misc_feature (35)..(35): n is a, c, g, or t
  misc_feature (156)..(156): n is a, c, g, or t
  misc_feature (633)..(646): n is a, c, g, or t
acaaactgcgcaattataaaatcagcacccanntntatatatatataattttatttaaaatttagatccctattcccacactctaataagctgtataatttttgtttagaatttttctgcaaacatactacaataagcctcttttatttggagacnaaatacagtggcattactggaaggaatatcacaacattacatttttatcttaaaggacaagcaaactttcagggttgataatgggataagcatgtttgagactggttaccttctggcagttcactgcatctggatatttctgaaaagtatagagaagctcttggattttaaaaatatcttaaaatacttttagatgaaaaaattgtaaaagttctgcttataagtttacttttctccacaattacaatatttaaaacaaagttttgttgattgacgttttaagcatttaaatttagaatgctaaaaacaattctatccgacactttcttcagggtaggggaataaatacatccttaacattgttttctggatgtaaacagaaatccagcagaggtcatcattatttagtacaacccagtaaataaatgtaagagaattcatatctgtaccaaatgcctcttcagattgttattttgnnnnnnnnnnnnnnaaaaaaaagcatgaaataatcgattcaaaagccaactaacagcgcataaataaaatatttactttctaagaaaaactgtagcttatcatcaaattgtttacttgtcctttacgtttattcaggcaaacaaaactgcccctcaatgcacttgatcttggtaagcataagcatgtcatattctccttagagaaaaatctgtacagaatttcactgtatctaccacacttttaaaatttcctcttccacttagaaaatgacttcaccacagatttaattgtgtactggtattaaaacattgacactccaagaactgattcatccataattgaagctggatcaaagaaatcaggcttcagttctgttctctctcgtctgttctttgatggtggcaaatctatatccatggtgtcaaaatccattccctcattaagatcctcaatcctcccttctgaggacatcataacatcttccacaattggctcttcatcat

SEQ ID NO: 8125 - DNA, 1249 bp, Homo Sapiens
tctagtaatatgaacagtgttaaaaaaagcacgcttggtacggtcggaatccgggatatcgtcgaccacgcgtcggctgggcgcctggcgagtggactgttcgagcccttccgctgggacccgggccctggctccggccccgcgatgggagctgctctccgcgggctgagcctgtcagcatcctcgacgcaccctggtccctgaagtcggagaagagcccctacccacccacacccccttgccccattttgggtcgcctgggtcctcagtcctagcggatcctcagtcctagcggccaccgggtctgaaaggagcaagacgatgatcctggcgtcggtgctgaggagcggtcccgggggcgggcttccgctccggcccctcctgggacccgcactcgcgctccgggcccgctcgacgtcggccaccgacacacaccacgtggagatggctcgggagcgctccaagaccgtcacctccttttacaaccagtcggccatcgacgcggcagcggagaagccctcagtccgcctaacgcccaccatgatgctctacgctggccgctctcaggacggcagccaccttctgaaaagtgctcggtacctgcagcaagaacttccagtgaggattgctcaccgaatcaagggcttccgctgccttcctttcatcatttggctgcaaccccaccatactgcacagtgcatgagctatatatccgtgccttccagaagctgaacgacttcccttccgattcagggaccagggggaagagggccaagtaatgcccaactggtggccacgcctgcttgggatgacccccaagggagggggggaacccttctttgggagagaggctttacgacaaaacccggacagtacctcttaaaaggtatgcatgaagatttaccgtccgattccaccgggacaaaaaaacactgcaactaggaagggcttgcgcaaattcaaattggtatgaccagcgcgacttcacgatggggggggcgaaaggatggcaccggaagcgcagtaacatatcatcggacagaaagggtggggtcaactccggacaccgcccacaaaataataagtgttcatatacgcagcaaacacattgtacccaccaccttgttcgccgaaccacctagtgtactggtatgaacgcaaacgacggcggtggcagctcagggagggttacttcgtggacattggctcgtagaacgtatgtgctcataataggcgtcgtgtgcccccc

SEQ ID NO: 8126 - DNA, 1090 bp, Homo Sapiens
agcgatggtgctataacccgtgtttataaaaagcaggctggtacggctcggatatcccgggatatcgtcgaccacgcgtcgccgaaacctctcccacaacagcccccagctccggccaaccaggaccagaattcttcccagaataccagactgcagccaactccacccattccggcaccagcacccaagcctgccgcgacccccacgtcccctggaccgggagagtcctggggtagaaaacaaactgattccttctgtaggaagtcctgccagctccactccactgccccctagatggtactgggcccaactcaactcccaacaatagggcagtgacccctgtctcccaggggagcaatagctcttcagcagatcccaaagcccctccgcctccaccagtgtccagtggcgagccccccacacggggagagaatcccgatggcctatctcaggagcagctggagcaccgggagcgctccttacaaactctcagagatatccagcgcatgcttctctcctgatgagaaagaattcacagcgagcacaaacggtgcggggaccgcagcagaatcctggcgtattcagatgggcctcagcaaacaaaccacgaaggtgccacatacaggccatgatggcccaatcccaaagccctaggtaagggacctgggacccggacagacgtgggagctcccatatagccctcaagcgacatagagatgtaccattattctccagatgacactggttccaccttctatgaactcccagtctgggaacataggcaccgaacacttgacatatgactcccgagcagatagcgtggctgaactgcgcaggagtacatggaagagaaagcaaggcacccggaaccaactggtgaccaaaatgatacatccaagactgaagggaccaccacaaagggccccacgggaagggcacgagaacaccaacaaacaaaaagaccctaatcagcgggaccagagggatagcgacaagaaaggacaaaagcaaatactgccgacggcacagcaccgacaaacaggaacatgacccagcaaaggaacaaaaagaacaaccacgagcacacacg

SEQ ID NO: 8127 - DNA, 1241 bp, Homo Sapiens
actatgtgaatatagaccagtggttaaaaaagcaggctggtacgcgtcggaatcccgggatatcgtcgagccacgcgtcgaccacgcagtcgacaccgcggaggaagacatatgtacgagtgtgtcggtcagaaggaacacctgagaaaccgctttatcatcctgatgtatgtactggcagtattaagtttatccatcaagaatgcttagttcaatggctgaaacacagtcgaaaagaatactgtgaattatgcaagcacagatttgcttttacaccaatttattctccagatatgccttcacggcttccaattcaagacatatttgctggactggttacaagtattggcactgcaatacgatattggtttcattatacacttgtggcctttgcatggttgggagttgttcctcttacagcatgccgcatctacaagtgcttgtttactggctccgtgagctcactactgacgctgccattagatatgctgtcaacggaaaatttgtctggcagattgttttgcagggttgtacagtggtgacgtgcacactgtgtgcattcatcagcctggtgtggttgagagagcagcatcagtccatggcggcagcaccaatttgcttggcagcatgctgccccaaacgttcaatgctgcggggcatcaccaaaatgaggctccagcaggaggcacatggtggccgacaaatgttcgcctgctgcatcagccttgcttaagccaccaggctgacgaaccgcagggttgggggcaaaaaccctgatgcccagggatgaccaggcagacacacgacgcagcgaggcacactgccgaggaagcacagacgccacggggagaggaaacgaaatgcggcaccacagcgtacaaacgaacgccacaggatgaaacacatcacattgggcactgcgccaacaacgggggacaccgcaacacgcgcgcaacagacgccctgcaacatctcgacaccacaaatggcgatagagaacaacggcaacgggactaacggacgcacgtgacccggcggcacacgcgatccacagctgcagccggacaactacaaaagcacagccacgagccagacaccagatcaaaagaagaagagagccaacacacaaatagcacaaccgtccacaacgcagagccgacacacggacgaacagcccacagcaacaaatccacacacgagacccaaagcagactctaccaagcagtgtacactaacaccgt

SEQ ID NO: 8128 - DNA, 507 bp, Homo Sapiens
gcaacccctttgcgtttcatatgtaggcctactggctttgtgtagctggagtagttgggttgctttgtgttaggaggatccagatcatgttggctacagggagatgctctctttgagaggctcctgggcattgattccatttcaatctcattctggatatgtgttcattgagtaaaggaggagagaccctcatacgctatttaaatgtcacttttttgcctatcccccgttttttggtcatgtttcaattaattgtgaggaaggcgcagctcctctctgcacgtagatcattttttaaagctaatgtaagcacatctaagggaataacatgatttaaggttgaaatggctttagaatcatttgggtttgagggtgtgttattttgagtcatgaatgtacaagctctgtgaatcagaccagcttaaatacccacacctttttttcgtaggtgggcttttcctatcagagcttggctcataaccaaataaagttttttgaaggccaaat

SEQ ID NO: 8129 - DNA, 497 bp, Homo Sapiens
atgctatttggtttaaaaaaattattgcaatctcaagttaatggaatatttttaaatcccacattcagagtttaaaacactggttttcaatgtgttttttagtgttgtcacttgtttatagataaatatataaataacctgtttggatcctggtcctttttaactgttccttggtaattctgagcatttatttgatgacttaatatttttcactacctttggagaacagatgaacattattcaccatgaatggatctatactgtgtggtcatgagttgtgtatacttccataacactgtatttttcttctgtcagtacccttaggatacactttaaaacaccttaaggtctgatgttatggcaacaaactactttttcaaacctaaataggaaccatgtaatttctcaaaagtgattgaacagtttgcccacacttagtttgttggtcttatgtaaaacattggctcaaaataaagtacacactgatttattttaaa

SEQ ID NO: 8130 - DNA, 477 bp, Homo Sapiens
ccacacatcatgttcactgagtttactaccacagttttagtgcaacaaaatatctttgaaaagccactctacagtaattatggcaaggctcattaatatgcagaggtaaagatttcatttgtatagaaacttagaaaataatgtttgaaaaggaaagccattccatcaggctaaatattttttgtatattaaaaaatatatataaatatttcttgaattagttttatagtcaattttgatgcagggtcattgagtggggataaattttgagaggtatatgttaaacaaacatcatacttgagattatagtcttaggtaaacatttaatacacaatgtcaaggtagttccctttttaaaaaatttttgtaccaagtaagtcatacatttaatgttgacatttcttcttacctgtgtgcctcacaccaataaagtactctgcattaaaatttaaatcttgagacagtagtccagcattg

SEQ ID NO: 8131 - DNA, 423 bp, Homo Sapiens
gtccaaaagctttctggccttacatattttattataaaaattctcaagtctggtaatcttctatgtcagagctagtgatttcaaaaggtttcacaattccccaagacaaaagtgattttcgttcattataataaggttaagtgatatgtgattcatagcaattttgatgtgaagaagggaaggacatcattgacttaataatagtatcagtcggtgcaacagttggcaacatgtgccttcacactttaccataaagagacgggtttgagggtttgccttctaaagtctgcaacttcaagaaaaaaaatcgacactgtggattgactttcccggtcactatataaagcaaataaacttaaaacactttgtaaccatgtatttactctgccaggtgcctatattccaataaaatgttcatccttg

SEQ ID NO: 8132 - DNA, 540 bp, Homo Sapiens
ggggaacaaaaatctggacccagctgaacatgtcttcctgagtcagtgcctgaatctttattttttaaattgaatgttccttaaaggttaacatttctaaagcaatattaagaaagactttaaatgttattttggaagacttacgatgcatgtatacaaacgaatagcagataatgatgactagttcacacataaagtccttttaaggagaaaatctaaaatgaaaagtggataaacagaacatttataagtgatcagttaatgcctaagagtgaaagtagttctattgacattcctcaagatatttaatatcaactgcattatgtattatgtctgcttaaatcatttaaaaacggcaaagaattatatagactatgaggtaccttgctgtgtaggaggatgaaaggggagttgatagtctcataaaactaatttggcttcaagtttcatgaatctgtaactagaatttaattttcaccccaataatgttctatatagcctttgctaaagagcaactaataaattaaacctattctttca

SEQ ID NO: 8133 - DNA, 1227 bp, Homo Sapiens
ttatttgttttccaagtagatgataatattcaaaagcaataatgtatatgatatctataaaggaagcaaaattaagtcatacactgattccactgtaaacaatctgtccagaattccagacaccttcagcaaactttttctgtaaaggcctgatagcaaatatttttgtggtgggttgaatttggcttatgggttatagtttgctgacacctagtttagagggtgtgtaaaactatcttcataactttgagatttttataaaattttacatgaaaatatactgataaattatatgcacatattttctaccagtagcattatagtggcatcatagaagaatatttaccaatgatggggaaactgtaaaactacagtatcaaggcatacaacttaaattccacttggaagattgtaaagtgtcaaagtattttaatgataatttaatttgggcttttgaaatgttcttctacaaatgaaaaagatgtttaaaaacgttacaagggaagctatgccttctgaagtctatccttagttgaaacagaaaataaacacaaaggtacaagatccttaaattattttgaaccacagaggttgaaattgttttgtgatcttcagcagaaataaaatctgtacatgattttcttttatgccttttagtttacagtctttattagcaatttcagtgaatttgtagagcatagtaataggtatttactgtccacttatatatatcagcatctggtcatgcacgaaccattaattctatatttctatttcaataattctaatatattatttctataaatgtaatatctgtatgtggcaaagagcctttcttctcaagatcctgaaaagctggttacctgccctttgagtgccacagtcctgaactgcttgttcttgacatcttgcatattacttcagagttccccactgtgcagactctcaggtattaactgtaaaaaactctttacatgccattattatctgtaatctctatctcttctactttaaattaatgtttctagaattaataggttaaatacacatacacacacacaactatgcctcagaaaagttaggcttttacaaataaaaagaataagattagaattaacaagtagagagaataacggtaggcagagtcagaatcaggaataaatatcagtgaatcaaaagaatgaaaaatattatgtaataaaaattagcaatgtaatgtaaacgccg

SEQ ID NO: 8134 - DNA, 971 bp, Homo Sapiens
ttggcaggaaactgtgaaggaactagcccctcgtatgtgatgtgacattcatgctgtcagaagatggcagtggaaaaggggcagcactgaatcactgctgtggccaagaggttacagcaggcacagtaaggagaactaggaagcccctggagatgtggacctgatgcatcttgcgatactgaacagcttttcctctggcagatcagttggtcagagagcaatgggcaccctccgtggctgacctcaccgttcgtggtatggccgaaagagaaccccaggttctcggggtactcttagttatcttgtactggagttctgcagtgacatttacatgacatctctattcgggtatattcgggccaataatggggccaacttatgaaaatcaaaagctgtctgtcctgcagtagatcccctttcaacacattgttcagagtgaggctcttgagctgtcaactctctatggctttcagtcttgtggctgcgggacgttgcgaaatatatagaatctgcccatgtggctggcaggctgtttccccattgggatgcttaagccatctcttataggggattggaccctgtacttgtggatgaacattggagagcaagaggaactcacgttatgaactagggggatctcatctaacttgtccttaacttgccatgttgacttcaaacctgttaagagaacaaagactttgaagtatccagccccagggtgcagagaggttgattgccagggagcactgcaggaatcattgcatgcttaaagcgagttatgtcagcaccctgtaggattttgttccttattaagtgtgtgccatgtggtggggtgctgtctggggcatctgtttttcattttgcctgtggtttgtgttgcaggtgttgatagttgttttaaggattgttaggtataggaaatccagtaaattaataaaaaaattttgattttccaataaactttgcaaaaa

SEQ ID NO: 8135 - DNA, 505 bp, Homo Sapiens
cctagttttagaagtttcaatagcatcattagtgatctgtgttgtagaacatgagggtgtaagccttcagcctggcaagttacatgtagaaagcccacacttgtgaaggttttgttttacaaatcacttgatttaacacactcaggtagaatatttttatttttactgttttatacccagaagttatttctacattgttctacagcaagaatattcataaaagtatccctttcaaatgcctttgagaagaatagaagaaaaaaagtttgtatatattttaaaaaattgttttaaaagtcagtttgcaacatgtctgtaccaagatggtactttgccttaaccgtttatatgcactttcatggagactgcaatacgttgctatgagcactttctttatccttggagtttaatcctttgcttcatctttctacagtatgacataatgatttgctatgttgtaaaatctttgtaaaaaatttctatataaaaatattttgaaaatctt

SEQ ID NO: 8136 - DNA, 485 bp, Homo Sapiens
gtatactctgaagtcaatgtgcatgggttaaatcccacctctgcttcattttatttgtgtggctttggacaagttcctaagccctctgtgtcaggcccctcattaacaaaaatggagtttatgatggcatctacctcacatggttattgtgtggttgaaattagttcaaatctgtaaagtatgttgatgagtatctggtacttggcaaacactatataattgttagctttattattatgtgttgtttgaaggggaaaaaagtttttgtagattggagaacaccatgtaagagctactaagctcaccaccttcccatccaattattactcctctaaatgaatactacttaaaagtgatggagcttctgtttgtttattgaattgctaatacaaataaatatttgactataacttcttatactcattttaattttaacctgaaatgtcattaaattatgctgataaactttgaataaattgtgatac

SEQ ID NO: 8137 - DNA, 745 bp, Homo Sapiens
  misc_feature (487)..(583): n is a, c, g, or t
  misc_feature (587)..(587): n is a, c, g, or t
  misc_feature (593)..(593): n is a, c, g, or t
gggagtcggagtttgagccccggaggcagagcggctgccatggccaagtacctggcccagatcattgtgatgggcgtgcaggtggtgggcagggcctttgcacgggccttgcggcaggagtttgcagccagccgggccgcagctgatgcccgaggacgcgctggacaccggtctgcagccgcttccaacctctccggcctcagcctccaggaggcacagcagattctcaacgtgtccaagctgagccctgaggaggtccagaagaactatgaacacttatttaaggtgaatgataaatccgtgggtggctccttctacctgcagtcaaaggtggtccgcgcaaaggagcgcctggatgaggaactcaaaatccaggcccaggaggacagagaaaaagggcagatgccccatacgtgactgctcggctccccccgcccaccccgccgcctctaatttatagcttggtaataaatttcttttctgcaannnnnnnnnnnnnnnnnnnnnnnnnnnnnnnnnnnnnnnnnnnnnnnnnnnnnnnnnnnnnnnnnnnnnnnnnnnnnnnnnnnnnnnnnnnnnnnnnaaanttggtncggcccgcctgggccctaaaaaaactttttcaaaactctttggtggtgcccccgcggcccccaaaaagaaattttaaaacacggttcttatgtggggtcccgcgggccaaacaggggaacagggaacaaggggctttgggtatctctccccc

SEQ ID NO: 8138 - DNA, 532 bp, Homo Sapiens
  misc_feature (430)..(450): n is a, c, g, or t
tccagaagcttggttctactataagcaacagctccttcatgggctgagaaggggaaaccaggatctccccaaccaagggcctatacttttatttttcaactctattaactgaactatgcttggagagagccctgaatcctttaactttaatgccatcttaggcctggaagttagagtgagggaaatgagcttggcttctgggactgtgtcaagttgaattttctgtcatttaatttcagatcatagctcatcatcagtgaagtccaagcccaccttacttgtaactattaacctttctaaaagttttcatcgccttggtaaagctccagaaatggacaatgctagtgactgcacaatattgtgactgtacttaatgccactgaactgtacactttaaaatggaaaatttatatgtatttttaccacaatnnnnnnnnnnnnnnnnnnnnnctttaatgaaaggtggaaaataatttaacttataatgtgaaaatacaatgtgaaatgtacaataaatcatatttaaggacaa

SEQ ID NO: 8139 - DNA, 210 bp, Homo Sapiens
atcgccgtttttattttttacaaccgcgactccacccccaacttcctccagcccagctgggcttcctttgttggagtcaactgttgatgcttccaggccaaactggcttcctctcctcctctccccacctttgccattcttaagtattgaatgtactttgtataattttagtggaattgttattgagaataaaatttttacaatcataaa

SEQ ID NO: 8140 - DNA, 858 bp, Homo Sapiens
  misc_feature (705)..(705): n is a, c, g, or t
  misc_feature (825)..(825): n is a, c, g, or t
ggtaaaaaataacctttaatagttatggtcaaattacgcttcacttggataacctcaaaatgtagtctgagtttttttgtgcacacttcacaaatcctgggggaaaaatcttttttccacgttatctgaaaaactatatggcgaagataccgctgaaaaataatttgttttatgaaattcctgaaaagctaattttgaattttttaaagtaactacctcccttttgtgtcctaatgtccttccttcaaagctgcttatagtttagaaatgaaagatgtcatgtctcatgctttgactggttttcggtggcatatttgatgtatttgccaagtggcattactgactttacagtaactgttacattattttgtactatattgctttatgtggttcaaaaatagtatatgccatattgaaatatgtaatcctcatgttgtgaaactcatcatgtaatacaaatgaaaatcattacttaataacttacaatttatccatatgtagtttcaatatgattgtgtctatgactgtaaaacaaaactgaaaaaatatgtaatgtatttctgttgaaagcgtgaatgtactaattttttcctaatctttgtctagaagaaagattctatgtcattcattgtacagctgctctggggtgttacacatttaaagtacaatccacagtttgtttgaaagtcagcctctcggcttttntttcatgtgactgctgacacttctccagtggtctttgcataatgaggctggattttgtggctcatcgttcattttaacaattgaaaagtctcatttggaacccaaagcatctaaaacccncctgttgggtgactgtgtcttctgtaaagccaa

SEQ ID NO: 8141 - DNA, 1033 bp, Homo Sapiens
  misc_feature (250)..(279): n is a, c, g, or t
gcgccacataatcaacagaaagatggggctgtcccagccgtaagtcaggctcgagggagactgatcccctgaccaattcacctgataaactctagggacactggcagctgtggaaatgaatgaggcacagccgtagagctgtggctaagggcaagcccccttcctgccccaccccattccttatattcagcaagcaacaaggcaatagaaaagccagggttgtctttatattctttatccccaaataatnnnnnnnnnnnnnnnnnnnnnnnnnnnnnncaggagagaaaaccacttaaactgcacttttctgttccgtttactctgtttacacattttgcacttgggaggagggaggctaaggctgggtcctcccctctgaggtttctcaggtggcaatgtaactcatttttttgtcccaccatttatcttctctgcccaagccctgtcttaaggcccagggggaggttaggagactgatagcatgtgatggctcaggctgaagaaccggggtgctgtttaagtccctgcttttatcctggtgcctgattggggtggggactgtcctactgtaacccctgtgaaaaaccttgaaatataacactccatgcaggcccagctgttgagggttttcttgatgaatgaatggggtaccatacatggttaagataaagccttgggctccggactttatctgaggtgtctggagaagttctcctgcccctccacttttttgcatctactctcactaaatgagtataatgtcaagccccaactttctaaaattataggaataaatggtagcagatacatccttctaacttgttatggaggactataaatgaagttactaaaaacaatagactgaaatttttagtttaaaatatgcaagcctgaacaaggggaccaacattcccaagaaactggaacccagtcagacatatgatcaactgcttaacgtgtatgccatgtatgtcatgtgtcattcctttcccccaccccctccctagtggaagtgcttgcctactcccct

SEQ ID NO: 8142 - DNA, 489 bp, Homo Sapiens
tgctgctacccattcactgcaactcgggggggacgcgcaggtcgcgagcctaccaactcccccaacgaccctccatattggaccccaggaagccccctgctcccggccatatctcatcaccacgcgacaccttccaactccaggcccgaacttcccttcaccccgtcttctcccccacgcctcagcctcatcaacgtcacctccacccaccaaccccttccttccattccccggactccgcctctcgcccccgaccccgcaccagctggccaccggaaccaccactactccagccgtctcatcacgctccggccaccacccggtccaactcgccctccccgggagcccacctcgccccacctctcgccagcccctaacggtcagccgagaccgcgcacggacctacaccatgctatgcctccacagtcccccgcactcgaggtcgtccaccactccctacccccctccattcagcagcaaccattcgcg

SEQ ID NO: 8143 - DNA, 606 bp, Homo Sapiens
tatttgaatgtctaaagtgcaaaatactacatcaagtgctggtaaggatgtggagcaacaggaagtctccgttgctggtagggaatgccagtggtacagccactgtggaaggcacattggcagtttcttataaagctaaacgtagtccatactatccaacaattgcactcctcggtatttaaataacaggaagatttatgctcgcacaaaaacttaactacacacgtttatagcggctttattcacaattgtcaagacttggaggccaaccaagatgtcattcagcagatgaacgatataaacaaactgtgataaacccaaacaatggaatatgctaaaaggaagtgagctctcatagccgtgtaaaagacaagcaggaacctcagattcatactgctatgtaaaagaaccagttgaaaaatatacacactgtatgattccaactaggacatcctggaaaaggcaaaactatagagacagtaaaaagatcagtgactgtccaggtcttgatggggctgagggagtggtgagagagagggaagaatagctggagtccacggaatttttggtgcaggtgaacagtctgcgtgattgcagtgatggtca

SEQ ID NO: 8144 - DNA, 636 bp, Homo Sapiens
tttactataactctacttgtagcatagtagatctataggcaggctccccagaaacagaccctaagaacaactactaatggagggagaactctaaggagaatcctataggagatggagggaagcaggatagagctggggaagaagctgggccagaatacagctgcttcagaactctagtctcagcctgatcccatggagaactcaagaagtcatgagttgcatcacagaggctgttgcacccagaggtgggggtggggggtgtctgttagatcaccacatcagttagtcattggtctcagcttgctcccctcctccctccaccccctggctcccattccctgacaaggcagctctgctcagccagtgacaatctgatggaagaggagattaagcatgatccattagcagtcacccctgcagcatttgagggatgggtgggcagacgggccctggcttatgatggttcagcttatgatttttctactttacaagtggtgtgaaagcagtatgcatttagtagacaccacgcttcaagtacccatgcaaccattccgttttccattttcagtattgaataaattacatttattgtacagtattcaatatgtcatgttcacttactgtgtgtcactcaac

SEQ ID NO: 8145 - DNA, 254 bp, Homo Sapiens
tctcaaaagattaaaaataattgtgctccaggccctgtgtagaaaaattggaaattatggaaaagcagaggaaacaacttggtattaagcagtatagtgtggtgactcagagcaaagtcgcctcagcggtctgaggcaggttacgtcatctctccgtgcctcagtttccctatgtgggataacgtagtacctagtgaatagcggtgacttgaggaataagtgagttaatccttagcaaggctgttaactacgct

SEQ ID NO: 8146 - DNA, 575 bp, Homo Sapiens
tgtgctgcgggcaccaatgtagtgtaaaaccatctatgtgggcatttttgtggcacaagaaaatctcaatctgataccaataaatgtgtgttaaagaatgtcagactgagagtaatcatggcaagtcgagccccagagaaaactatggcctctctaatgggttttcttccttctagtgtatattcagccatcgtgttttggtatttaatatgattcgcctggtaagagatgttttttggctgcactaaattgtgtataagagtgaaagatgtgggggcaaccatgcagaaggtataaaatgtgggagaaatgatttcggattgtacatcgtggcgcctgttttattgggactctattctctgtaaataggtagactaaaatgagctagactctggtatttttgagagatgctatactctgtctaaggaatgcagccctccagatcatggttatacctgtttctgtaatactccaagctcatttatcaatgctctcatatctgcagatcgagctcgtagcggtccgcctcatattctattctgcctcacaaaatctaacacgcgtacttacagccg

SEQ ID NO: 8147 - DNA, 692 bp, Homo Sapiens
acggaacgagtgggaacgaaaacagagagacttacaagaacaagaatggaagaaacaacttgaattagaaaaacgcttagagaagcaacgggaattggagagacaacgagaggcagaaaggagcaaagacatagaaagacgagaggcagcaaaacaggaacttgaacgacaacgtcgctaagaatgggagagaattcggcgacaggagcttctcaatcaaaagaatagagaacaagacgaaattgtcaggttaaaactctaaaaagaagaatcttcatcttgagttggaagcactgaatggcaaacatcagcagatctcaggcagactccaggatgtccgactcaaaaagcaaactcaaaagactgagctggaagttctggataagcagtgtgactgggaaattatggaaatcaagcaacttcaacaggaacttcaggaatatcagaataagcttatctatctggtacctgagaagcaattattaaatgaaagaattaaaaacatgcagttcagtaacacacctgattcaggggtcagtttacttcataaaaaatcattagaaaaggaagaattatgccaaagacttaaagaacagttagatgctctggaaaaagaaactgcatctaagctgtcagaaatggattcttttaacaatcaactaaaggaactgagagaaacctacaacacacag

SEQ ID NO: 8148 - DNA, 339 bp, Homo Sapiens
gtccttggtctgtatcaggaaggcagccatggggctccgggagagggtctcagcatctgcgatgtcaatcttgagtaaggctgtggtgctgaagtgatgtgggagccccggtccttggcctgcacctctagggaccataggcagtcccttccaggtgtgatgttgtgcagggcatccagggagcggatggaattcttgagccagatctcccccgtgtgggaattgatgtcgaacacgttggcgggctctgcatgggtgatggaatagtccaccaggttggtgggttcctctgcatcctcgtctatggcctcaattttcactggggtccctagcaccatc

SEQ ID NO: 8149 - DNA, 291 bp, Homo Sapiens
accttaaaccttttacagaatatgtgtataggattcgctgtatgaaggaagatggtaagggatactggagtgactggagtgaagaagcaagtgggatcacctatgaagatagaccatctaaagcaccaagtttctggtataaaatagatccatcccatactcaaggctacagaactgtacaactcgtgtgggagacattgcctccttttgaagccaatggaaaaatcttggattatgaagtgactctcacaagatggaaatcacatttacaaaattacacagttaatgcca

SEQ ID NO: 8150 - DNA, 557 bp, Homo Sapiens
cattcatgatacaggcaaccaaaattaaacattaaataagaattgcatgaacagtgctcatctctagataaaagagattatatgtgcttgctcgttcattatgtactttgtacttttctcgtttctttccaggttttctataatgagcagttataacttataattagagaaaacccattttggttattttttagctagttgtatcgacgtctgtagcataaatccactttgaggtgttcactatgatcctttgaaatttttataataaaagtctatgctaaaagtttttattggccacttttttaatctttaaagattctattgactgctagttttcatctctcactgtaacctcatctcccacctacccgtatcagaatcactatcagagatccgtattaagcgtgtcaagctctgacaaaacattaacatcagctttatcactaaaacctctaagatacccgcactcacgtgcactcacacacactcctcaaagccagtgatctctaccctggaggaataatctcttgggcagcatggcatccacctaaaagtac

SEQ ID NO: 8151 - DNA, 518 bp, Homo Sapiens
gcggccgccacccagaggggacgcatcctatcctcatatgtgctcaagacagtgctgctggcagtgctgctgcgcaagggggcccctgggcaaggctgggacgaggagcacctgggaaggtgtttggaggagttggtgcagttccttagggactgcctgctgcgacgccatacgctcttccactgcgtcctgggccctggtggggcggctgccgaggtgggtcccctgcccaaggcactgagggaagccgccccagttgacctcctggccgctttcgacgggcacgcccgggaacttgcagcagcgcggttgctgtccacgtggcaaaggctgccccagcttctccgggcctacgggggtccccgctaccttgccaggtgccccccaccccggagtcagcgcacccagggcttccttgaaggtgaaccgtaaaccctgacagcacccccacctgaccaaatgctcctaaagcctttcccactgggtgggggtgggaatggcggtgaagcagttaaatg

SEQ ID NO: 8152 - DNA, 827 bp, Homo Sapiens
ggagagggggtctggctatgttgcccaggcgggtcttaaacgccggggctcaagcaaccctcccgcgctcccggctgagattacaggtgtaagccaccataccgcaacctcaatgacacctttctgatggtctttacacagtcggtgatgtcggggggccccccggcccgggactcaataatggcatagcattttcctagcagtaacagtatgagcagctccagccattccattaaaagtattagttctgcttggagctgaaaccagtggagcctaagggaagacaggtatgtctttcttcttcatccaagcaccctaaggacggtttagttacatccatagatgcagacaacataacacctgtgacttacttgaattgggataagccattccagaagtagcttatcctagacttggaaataagatttttttcaccactaacttccatgcttcagagatgacattcaaagccagattcccaagtgcctgatcatacctcccagtctcaggaagatatttgcttaccccttagaccaagaatcttaagatcttccccagctatgaagcctatcttggaatgggaaaccatgaaatttgtcttttaaaagaaagggaagaaatagccttacagcccctgttcctccaagtgcacatttagccttaaaatcctgggagtcgggagacaccgtggagtcctaacatccacagtgtctgctggtcgtggtcagaaggcagtaatgcaagagtccttttgtgaagagtgtttctatgtagagatgtttatatttaagtagttcttttataaataaaagcatttctaatggcaa

SEQ ID NO: 8153 - DNA, 780 bp, Homo Sapiens
agcggaccagaatgtgtaaacgacctagaacagaggagtattaaaagtaatgctgtgctgcattatttaagactatcagcaaattatttgatagattgttcttacaacttgtattctgattacagaaccatcatgagtgtggaataaatactggattaaatcctttatcctgggtcttggcttttcccccatttgttaaatttttttagcatatttatattgtggaaattgatgaaacgtcagtagagtcacactttgtgtacagggatgtcttagtgcccagatgacaagtgaattttggagaaatgcatagactgggattgggcatgtggtaatcaataatctttattagaatacttgataatggcagttccctttgtcagtcgttgttacatgtgtcatttgattactttgttccatgtcaaagacgtttattgggataccttttacttggacaatatgttagcattttttaaaatttggacttgaaattctttaagataattcacccaattctttttagaaaagaaaatagaggcccaaagtaatgatgtcagtgctagggctaaaactcagtattctgacagtgtagtgaacctggcacgcacattgaggtttgttttatctcactggttatactggccaactaatgcgcactcagaagccaccttgcaaaaatgttaaatggagcaaacgagtacacttgcaagagtcctccatatgtgggcttaacatatgtaccactccattttagaaaaatctcattaaatgaattcttct

SEQ ID NO: 8154 - DNA, 127 bp, Homo Sapiens
tgaagaggggaaaccagaataaattatcttttggaaaggacaatttcttgtttggccatttgtgtataaggttggtaacattagaggctgtgagcttgtgttacatggtaataaagccaatgaagcg

SEQ ID NO: 8155 - DNA, 657 bp, Homo Sapiens
  misc_feature (75)..(75): n is a, c, g, or t
tcagctccgccagcgttgcctccaagcaccgccgcggaagaacaaggccagcccgcggggaacagcgggggaacntggggctggagcagctgctgggggcacgggacccttggcggcgcgggccggggagccagctgagcggcgtggggcggctccggtgtcggcgggtggcgcggcgcccccggagggggccatatctaacggggtttacgtactgccgagcgcggccaacggagacgtgaagcccgtggtgtccagcacgcctttggtggacttcttgatgcagctggaagattacacgcctacgatcccagatgcagtgactggttactacctgaaccgtgctggctttgaggcctcagacccacgcataattcggctcatctccttagctgcccagaaattcatctcagatattgccaatgatgccctacagcactgcaaaatgaagggcacggcctccggcagctcccggagcaagagcaaggaccgcaagtacactctaaccatggaggacttgacccctgccctcagcgagtatggcatcaatgtgaagaagccgcactacttcacctgagccacccaacctaaatgtacttatctgtccccatgtccccacaccagcctgttttcataataaactttattgtgacagcc

SEQ ID NO: 8156 - DNA, 635 bp, Homo Sapiens
  misc_feature (622)..(622): n is a, c, g, or t
caacccaagctggccttgtgttgctggttcctattcagtatttcctggggattgtttgctttttaagtaaaacacttctgacccatagctcagtatgtctgaattccagaggtcacatcagcatctttctgctttgaaaactctcacagctgtggctgcttcacttagatgcagtgagacacatagttggtgttccgattttcacatccttccatgtatttatcttgaagagataagcacagaagagaaggtgctcactaacagaggtacattactgcaatgttctcttaacagttaaacaagctgtttacagtttaaactgctgaatattatttgagctatttaaagcttattatattttagtatgaactaaatgaaggttaaaacatgcttaagaaaaatgcactgatttctgcattatgtgtacagtattggacaaaggattttattcattttgttgcattattttgaatattgtcttttcattttaataaagttataatacttatttatgataccattagtaatgtttcttgcctaaagtcttataaagtgtatgaagcaatttgacagcattatttttaagcacaagcgaagattctttgaagtttaatggtattcntggaaactcctaa

SEQ ID NO: 8157 - DNA, 426 bp, Homo Sapiens
caggtgtattgagctcctgcttttctaacgtacaaaggtaactggatagagaaacggagtgatcgccctcacctggccagggtgtgctccgagaccccagcaggtgccgaagccgcggatagtcccgaatcctgtccaggcggtgttttttcctgtacgtacctgtgatcaagtctgagatgtgacagcaaaactgacagaacttcgtgcttccctcttcaaaatgtcacagatgggcactgtgttcttaccggagatcttagcaacctcggcatctggctgtttttcttataggtcaggagtttccaccttttcccttaaaggaagcgcttggcagcttctctggtgtgtctgagtcgccagcatcaccactgtcctgttctggggccattcttaagtaaaataaaagcttcttggacccaaaaa

SEQ ID NO: 8158 - DNA, 1755 bp, Homo Sapiens
  misc_feature (1003)..(1035): n is a, c, g, or t
  misc_feature (1257)..(1368): n is a, c, g, or t
  misc_feature (1579)..(1629): n is a, c, g, or t
ggggacacggggaagagacagagaggagggtaaagtgagaatcctgcccgcaccacaggtctggactgctaaccttgaatcctggtttcttaaattctgcctccgcttctgactgaggaccactggattttgaggaaactttggtcttgtggtggtgaggaggtgatgttctggaaggaaggtacctagactttgtggtccctgccaggaagtggagagtggaaatgtggaatgcctcacactcctcaactagaattcccgtactgattagtcaacagtggaaaatctgaagagatgcaagcaggaaagaaattaaaccaggcctgaggagcgatgcgacaggcatgatggaggtcgagtcctcctactcggacttcatctcctgtgaccggacaggccgtcggaatgcggtccctgacatccagggagactcagaggctgtgagcgtgaggaagctggctggagacatgggcgagctggcactcgagggggcagaaggacaggtggagggaagcgccccagacaaggaagctggcaaccagccccagagcagcgaagggaccacctcgtcttgaatctgaccttgtccaagaaggctggacgagagaccttctgtcccctcccagagggggaaccctggcactggcccagcagcctcttctctgagctccatgtcccagataaaccaggccagactgagaaggctccccagaggcctctgtggcctccactccgggaaagccctctgcccacacccacaggcttcacattcccaccaccttcgcaccgtgcccaggtacactttcaagacactgtaaccacaagatgttatttattgagctggcgccgggacttgggcggggcctgccctacagtgagcagcccacacaggaacgctcctctcgcgagcggcccgggcagggaccctgtcccaacaccaacacctcctctccagcccaatcttctgggtccagacctgcttgtcccttttttagaaaacacnnnnnnnnnnnnnnnnnnnnnnnnnnnnnnnnnccagcagatatggagagagctgacaatcaattcacattttttaagccattttagctaaactgtcattgtgcatctctgaggttccctcatggagctccacagatccatttttagggaagggattttggctcaaaacgatctgaccacctctgccctgtccaccaggataagtgacacctaggacccaggaaataaatgccgatgatttgctgaaacaacaannnnnnnnnnnnnnnnnnnnnnnnnnnnnnnnnnnnnnnnnnnnnnnnnnnnnnnnnnnnnnnnnnnnnnnnnnnnnnnnnnnnnnnnnnnnnnnnnnnnnnnnnnnnnnnntaacgcaccagaggggccacccacaaacgagcaccaaacacaagagcaatggatgaaaaaagaggggcccccacaaacacgagagcgcgctacataaagacagcaaacgagagcgagcgcattacaaacacgcgaaatcgacaggaaacaacagacaacagcaagaacgaacctgcgcggaagaaccaagacaaccaccagaccgaggggnnnnnnnnnnnnnnnnnnnnnnnnnnnnnnnnnnnnnnnnnnnnnnnnnnngcacgccacgagaaaaacaacaacacaatagaacgaacaacagaggaaccacaacaaagagacagcacagagcccgaccagaagcaaaacatcgacacacgagaaaataggacaaacacaatacag

SEQ ID NO: 8159 - DNA, 455 bp, Homo Sapiens
tagtgaatttccatctcggaataaactttttgaccatctaaaggccacaggtcatgcaagagcaccttcatcatcgtctttaaacagcgcaacaagtagtcaaagcaagaaagagaaacgtaaaaacagatagagattctgcctgtgcttttgtttgactgtctctagattttgaaaccaaaaaactgaactgaaatcatctaaagagttaaaatttcagtgatctgcaattaattacattgtggaagattattttttatcttgtaaaaacacttttttggtttaatatatatttttaaaacatttcactagtgattgaattctacttttgccatctgaattgacttgaatgtcttaaaacaggtaaatactgtaaagtgtgtattcttgatgtttattggctcatgtggacagaaatgtacagggagaattacattattttaacacaaaaaaaa

SEQ ID NO: 8160 - DNA, 548 bp, Homo Sapiens
  misc_feature (47)..(47): n is a, c, g, or t
  misc_feature (68)..(68): n is a, c, g, or t
tcccttccagtgcagttgacagtcccagagtgggagaggactccagngctcagccaaggagctccggnagacctccgcccagaagcccccagcctgcggagcgtgtggacccagccctgcccctggagaaacagccgtggtttcatggccccctgaacagggcggatgcagagagcctcctgtccctctgcaaggaaggcagctacctagtgcggctcagtgagaccaacccccaggactgctccttgtctctcaggagcagccagggcttcctgcatctgaagttcgcgcggacccgtgagaaccaggtggtgctgggccaacacagcgggcccttccccagcgtgcccgagctcgtcctccactacagttcacgcccactgccggtgcagggtgccgagcatctggctctgctgtaccccgtgggtcacgcagaccccctgacagtgacccctcggccccctttttgagtcctcgggcccagaaatcgtatcccaaagcccctcccatggcccttgaaaaataaattaggttttttgtttggaaaa

SEQ ID NO: 8161 - DNA, 783 bp, Homo Sapiens
  misc_feature (92)..(92): n is a, c, g, or t
aggcccattgtaaacctagcgaggccaccgccctttaggggtccacagtgcccgtaagtgcaatgctggggctcgagtccaggtcacgtggnacggagttccgggcccggccccggggcagccagctcaactcaggctaaatgctaccgagagtgacgacggacgcagcttctttctgcagtgccactctcgaggtggacgccgagttcttgcacaggaacagtagcgtccagctgcgagtcctgtatggtcccaaaattgaccgagccacatgcccccagcacttgaaatggaaagataaaacgagacacgtcctgcagtgccaagccaggggcaacccgtaccccgagctgcggtgtttgaaggaaggctccagccgggaggtgccggtggggatcccgttcttcgtcaacgtaacacataatggtacttatcagtgccaagcgtccagctcacgaggcaaatacaccctggtcgtggtgatggacattgaggctgggagctcccactttgtccccgtcttcgtggcggtgttactgaccctgggcgtggtgactatcgtactggccttaatgtacgtcttcagggagcaccaacggagcggcagttaccatgttagggaggagagcacctatctgcccctcacgtctatgcagccgacagaagcaatgggggaagaaccgtccagagctgagtgacgctgggatccgggatcaaagttggcgggggcttggctgtgccctcagattccgcaccaataaagccttcaaactccctaaaaaa

SEQ ID NO: 8162 - DNA, 1184 bp, Homo Sapiens
  misc_feature (696)..(772): n is a, c, g, or t
  misc_feature (776)..(777): n is a, c, g, or t
  misc_feature (780)..(780): n is a, c, g, or t
  misc_feature (910)..(929): n is a, c, g, or t
  misc_feature (1027)..(1036): n is a, c, g, or t
attagggtgtcatttacagaaaaacaaggtgaaatgagagaaatgcagcagctttcaggtggacagaaatccttggtagcccttgctctgatatttgccattcagaaatgtgacccggctccattttacttgtttgatgaaattgaccaggctctggatgctcagcacagaaagtctgtgtcagatatgattatggaacttgctgtacatgctcagtttattacaactacttttaggcctgaactgcttgagctcacctgacaaattctatggtgtaaagttcagaaataaggttagtcatattgatgtgatcacagcagagatggccaaagactttgtagaagatgataccacacatggttaattggaaaatactacctactggtttgggagatgtatatagtaatatgattctcatacccaggaactgtaaatttaaacctaaatatttggccaatagttttcagacttaaagcatcatagtccttttatatttgtctttgtattttataagataccctgtaatgtcatgtttgtactgatagtttaagaatttaatttcctgtacaactttttgtaaaatgttctgctcctattttaaatgtattgaaacatgctaaatattctttcctaattattttatcacttatactaccttttttatagcttcaattaaataatcggttttatgactannnnnnnnnnnnnnnnnnnnnnnnnnnnnnnnnnnnnnnnnnnnnnnnnnnnnnnnnnnnnnnnnnnnnnnnnnnnntggnnggncccttgggcgcccccatagccttttaaaaaatttttttaaacttttctttcgggcgggggcccgaaaaggaaaaaaactgtttccaaggtgtttccgaagaaaaccggggcttgaattcgccctggaatnnnnnnnnnnnnnnnnnnnngggggtcaccaaaatttctgaaaaaatccgaagggggttccgggggtcttccgggggtttccaagggggttccaaagggaatttaattcccaattttnnnnnnnnnnggggaaatgtttggaaattagtggagaaattcttaaaaactttccgcccaagggaaaaccccttcaaaaaaggttgaaattacacctgaaattccccgccggttatcaccctctctggtacaccctttggcaacaataatttttcccc

SEQ ID NO: 8163 - DNA, 426 bp, Homo Sapiens
  misc_feature (389)..(389): n is a, c, g, or t
tagtttgaacaatatttaatctctgatgcttcagaaggcactttgagatcttgaagggccttagggttgagtctttgatggtgactatggctccttagggtgctgtgtggatgtacaagagcactggctaaggagaggtggcagcatgcaacaagggtaagaacctcagctctttccctaaatggcaggctgacccggggttagtcacttcccttccccagcagcactgcgtcagagcttctctgaggcccctcttacctctgatattctattaagactggcagaggatgtattgtgtgggttttctatcactggaactgagaaaaatttaaaactacctgcatcagcacagagaagatctgaaacggttcttgggtgtttataaagcncccgggctgggctcccatcttgatgtcagcccagccc

SEQ ID NO: 8164 - DNA, 519 bp, Homo Sapiens
catgtatctccatcctcccctgctccagccagggaggactgagggagtgccccgagacccacgcacatgttggggcttctgggccaagagtactttttatataactaatttctaaatccaaaagctcaaggaatagacagtgttctgtgacatggattggtttgaaggagttacccaccatcccagcacgataatgtcatctcccaagttggatggcagcacgatctggccctagggagcttcctgttcccagaagtcattgtcctgggctatccagatgtccctagtaaatcttgcttccttctgcaatgttagtaatgccttaagctgacagttgctattttgcagaacagttttcctctttgcttagctagtaacttgcctctgagcctgggctgatctgagaaacaggtgtgacaagagcatgaaccagaggtgcacctggggcagttccctaataaaactggtttgtacagtcatggtgttggggtgatcagaatggaagcccttttcaaaata

SEQ ID NO: 8165 - DNA, 539 bp, Homo Sapiens
  misc_feature (35)..(37): n is a, c, g, or t
  misc_feature (44)..(44): n is a, c, g, or t
  misc_feature (49)..(49): n is a, c, g, or t
  misc_feature (52)..(52): n is a, c, g, or t
  misc_feature (473)..(494): n is a, c, g, or t
tcttcctttttatatatcccatttattcccttagnnnttccttnttgtnttntttgggaaaccagctcatgtttaattgtgacattttaaaattgtacaggtattttgacatctgccccccacatttagtctctcaaaatgacaggaaaacaaccaatcacaggtttaatacattgaccccttcagttcctatatgcagcacccaatattcctttgaaatatgaaatagacctggcagtggccaacagtaaatttctgcccgctgcctcccaccaccaacggagttgaaaagttcaggtttagtgttgttgtagtggcacttgtccagaattggtacctccccatagttgggggactttaaatgtaccaatgaaaatagctttttccccttcaaggggaagaaagaaaatcactcctcaaaacccagcagatccggctgtgaggtctttcctcctatctcatctcttcaggcnnnnnnnnnnnnnnnnnnnnnngggggggggggcaggagagcccaaaacttacccgggtttcaaaaa

SEQ ID NO: 8166 - DNA, 675 bp, Homo Sapiens
aatgaggagcacactgggaaaaggaaatcgcagactcgtatttctcctgaacgtggagcatctagataaaacccttcccaccatgaataatctcatcagccaagataagcgtatcagctctaaccctgtggccaaaataatatatggtgacccagtgaccttcctggcccacctgccccggaaaagtgtggtccattgctctaagatttggagctgcaggaaaagaattacagttgagtacctccagcacattgtggaacagaaaaatggcaaagaaagagtgcccatcctctggcatttcctgcagaaggaagcagagctgaggctggtaaagttcctgcctgagattttggccttgcaaagggatctagtgaagcagttccagaacgtccagcaagttgaatacagctccatcagaggcttcctcagcaagcacagctcagatgggttgaggcagctgcttcacaacaggatcacagtctttctgtccacatggaacaaactgaggagatcgcttgagacgaacggtgagatcaacctacccaaagactactgcagcactgacttggatctggacactgagtttgagatcctcttgccacgccgacggggcctgggcctctgtgctaccgctctcgtcagctacttgattcggctacacaatggcacgtggat

SEQ ID NO: 8167 - DNA, 602 bp, Homo Sapiens
  misc_feature (169)..(177): n is a, c, g, or t
cctgccactgattactgaagtcctgccattaattgctgaatgtcttcagttgggccactgagcttgtctgaatctgttcccttttataaaagagttactacatcaaaacaaagagtgaaatccaaatttgtcaaactgtatgtattaaacatgtccagttttttggttnnnnnnnnnttgcactggctttgagggaaaacacacagggtgagggaattgggctaaatgacttcttacaggcccctttctgattctttaactttgaaaggcaagccatattgatccagttgttatagtgaactcatggtaatggtttgtgagaacaatagagattttcatttctatgtagatgagttggtatgagaatatatggaatttttaagggactgtttaaatctttgatttgtagactattaaatataccgtatgcataaagtaagcctttagctctaaggtaaagacgacacgttttcggtttgtgactacaaataggttaaaaatagattttaattttattaaaaatataatttaatgcaggttgtttgaagcatctgtcttcatatgatggcattagaacaccttggtataataaaaagttacca

SEQ ID NO: 8168 - DNA, 562 bp, Homo Sapiens
gccagaatgtattttaaaaaggtcgtcttacactgcaaggatgtacattaaacatcacaattaagcatgtcaagagagttttgctcctcttcctcatcaaggtacacttctcaggttagcttagccctgaaccactgcagtctctttgagactcttggccattattgtctgcgtgcaccttttttgacaattatagtctactgccttgtgacgtttggtgtagtcttgtgtaacatttcttgtgtatttgacatattttctcaatggtactggcaactagaaagaactgaaatacaggcatcatccatttaacttccacaagccatccctaaaagcagacattctgcatgcaaactttcagagccttttactcctttatctcccctgatactcagccaaaggccaaaaggcgaatactctgttatatcacatagaaaaatgatatgatagctactaaccacaaattcccaaccaatttcccaaaaaagttattatttatttatttgaaggctatcaagtgaagcagtggcgtggaaaaggacaaagaaatctacttattgta

SEQ ID NO: 8169 - DNA, 641 bp, Homo Sapiens
  misc_feature (316)..(373): n is a, c, g, or t
ggggtgtggttctagcaacgagcggtggcgggggttgtgccggtcccactggcaggcgggcaagaggggagtccgggcggcggccggcgtgggagccgggggaccaccatggtaaagaagcggaaaggccgcgtcgtgatcgactcggacacagaggacagcggcagcgacgagaacctggatcaggagctcttgtccctggcaaagcgaaagcgcagtgactctgaggagaaggagccgcctgtgagtcagcctgcagcctcgtcagactcggagacgtctgacagtgacgatgagtggacatttgggagcaatnnnnnnnnnnnnnnnnnnnnnnnnnnnnnnnnnnnnnnnnnnnnnnnnnnnnnnnnnnaggccaacaaaactgcctcctcaggcagttcagacaaagacagttcagctgagagctcagcccctgaggaaggtgaagtgtcagactctgacagcaacagctcctcttccagttcagattcagactcttcctcagaagatgaagagttccatgatggctatggagaagacctcatgggagatgaggaagacagggcccgtctggaacagatgacagagaaagagagagagcaagaactgttcaatcgcatagagaagagggaggtgtt

SEQ ID NO: 8170 - DNA, 185 bp, Homo Sapiens
aactcatgtgtcttcaataatcacttttgccagttgattcaatagccaattattgaaatatgggaaattctatagtctatgagctttgaaatcagagactcaggatttatccctaggacccgctctgtaggccaattgtttaaatctccctacacctcagtccccttgtatgtaaaaaagagtta

SEQ ID NO: 8171 - DNA, 251 bp, Homo Sapiens
agccttgtccctggggaagatgagtaccccatctgtgtcctgatggagaaggctgaccagagccttgctagcctgccttctgggttgcccataacctgtcatctctgccaaaagacatacagtaacaaagggacctttagggcccactacaaaactgtgcacctccggcagctccacaaatgcaaagtaccaggctgcaacaccatgttttcgtctgttcgcagtcgaaacagacacagccagaatcccga

SEQ ID NO: 8172 - DNA, 370 bp, Homo Sapiens
aaggatccctacgaactgtgaaaggcgctggtccacaagtggctagtggctgtaattcatgtccagcagctagtttttttagaattctggttatcatcggggaaatcaaaaggctgtgcatgggagttagagatggtgcttcccgcctgccccattcgattttgttctgcactgtaattagcccagttttgctcacttgcttgcttgttgtaattgcggcaagaagaattgtttctgtcgccagtaaccagcttgtacccaggaggagacataggcgagaggggagcggttggtgaggagcagccattgaaataagcatatttttgagacccacagtctttggcagggctcagcgcaccactggtcgcat

SEQ ID NO: 8173 - DNA, 944 bp, Homo Sapiens
acctgcgcggggatatgagccagaagaacttttaggccgctcaatttatgaatattatcatgctttggactctgatcatctgaccaaaactcatcatgatatgtttactaaaggacaagtcaccacaggacagtacaggatgcttgccaaaagaggtggatatgtctgggttgaaactcaagcaactgtcatatataacaccaagaattctcaaccacagtgcattgtatgtgtgaattacgttgtgagtggtattattcagcacgacttgattttctcccttcaacaaacagaatgtgtccttaaaccggttgaatcttcagatatgaaaatgactcagctattcaccaaagttgaatcagaagatacaagtagcctctttgacaaacttaagaaggaacctgatgctttaactttgctggccccagccgctggagacacaatcatatctttagattctggcagcaacgacacagaaactgatgaccagcaacttgaggaagtaccattatataatgatgtaatgctcccctcacccaacgaaaaattacagaatataaatttggcaatgtctccattacccaccgctgaaacgccaaagccacttcgaagtagtgctgaccctgcactcaatcaagaagttgcattaaaattagaaccaaatccagagtcactggaactttcttttaccatgccccagattcaggatcagacacctagtccttccgatggaagcactagacaaagttcacctgagcctaatagtcccagtgaatattgtttttatgtggatagtgatatggtcaatgaattcaagttggaattggtagaaaaactttttgctgaagacacagaagcaaagaacccattttctactcaggacacagatttagacttggagatgttagctccctatatcccagcccacgtgcggggccctctag

SEQ ID NO: 8174 - DNA, 1020 bp, Homo Sapiens
  misc_feature (380)..(388): n is a, c, g, or t
ttttcagagattcctgaggccagtggggaaagggattttccaacagaaaccattaaatgtggccctgaacgcatgtatattgatggctgggtaaaaacacccccctatgacccctttaaggaggttcttggatcagggatgcagtaccacttgcagtcaaatgaattccttcgaaatgtatttgaacttggacccccagtgatgcttgatgctgcaacgcttaaaacgatgaagatttcccgtttcgaaaggcatttatataactctgcagccttcaaagctcgaaccaagagctagaagcaaagtgtcgagataagagagcagatgttggagaattcttctagattttcagaacttgaagactattttctaatttctannnnnnnnnctatttcaagtgtatttaaactctagacacagtttttatcctggattaacttagataacttttgtagcagtggttatattgcttataatttaatgtacaatactattgaaactggtgagttctgattattaaatattctctgtaaatcagtaaacatgtataaagtatttgtaatgtttggtcataatttatttatgaagacagcaaaagactgatttcatgatggggaaaacaattagccaaagtttaatttcttacactgtggttgtcaagaatactgatttactataatgatatatacatgcaagatatttaacttaatatcttagacaagagttctgggtacaattttgggatctagttcccctggaaaagctgctgtatttttaatttttaatggaatgtagcttttaaaatcctgtcactggcatcaacaaaaggaattataccatgagaccttatagctgtacttaaaagccattcagttcagctattgggagttcatgatgaattagcatatgccagaaaggttgctaaccttaacatctgagagcagtaacactgattttatctgctgtatgagactttgtgcattttactttgaaataaagatttttttccacactgaaaaa

SEQ ID NO: 8175 - DNA, 1231 bp, Homo Sapiens
  misc_feature (1009)..(1066): n is a, c, g, or t
caagaacatcatccaccgagatctcaagtctaacaacatcttcctacatgaggggctcacgggtgaagatcggtgactttggcttggccacagtgaagactcgatggagcggggcccagcccttggagcagccctcaggatctgtgctgtggatggcagctgaggtgatccgtatgcaggacccgaacccctacagcttccagtcagacgtctatgcctacggggttgtgctctacgagcttatgactggctcactgccttacagccacattggctgccgtgaccagattatctttatggtgggccgtggctatctgtccccggacctcagcaaaatctccagcaactgccccaaggccatgcggcgcctgctgtctgactgcctcaagttccagcgggaggagcggcccctcttcccccagatcctggccacaattgagctgctgcaacggtcactccccaagattgagcggagtgcctcggaaccctccttgcaccgcacccaggccgatgagttgcctgcctgcctactcagcgcagcccgccttgtgccttaggccccgcccaagccaccagggagccaatctcagccctccacgccaaggagccttgcccaccagccaatcaatgttcgtctctgccctgatgctgcctcaggatcccccattccccaccctgggagatgagggggtccccatgtgcttttccagttcttctggaattgggggacccccgccaaagactgagccccctgtctcctccatcatttggtttcctcttggctttggggatacttctaaattttgggagctcctccatctccaatggctgggatttgtggcagggattccactcagaacctctctggaatttgtgcctgatgtgccttccactggattttggggttcccagcaccccatgtggattttggggggtcccttttgtgtctcccccgccattcaaggactcctctctttcttcaccaagaagcacagaattctgctgggcnnnnnnnnnnnnnnnnnnnnnnnnnnnnnnnnnnnnnnnnnnnnnnnnnnnnnnnnnnccttgtcgggccgcctcggcccttcaaaaagttttctagacctttccgtttgggcgcccggggcccaggaaggtaaagtggaccatgggccaatagcttgttttccctaaggagaacccctgggtcatggaactaagggggttttggaatttcctccccccaaat

SEQ ID NO: 8176 - DNA, 678 bp, Homo Sapiens
gcggccgctctggaagcagcctagtgtccccgttcagcagcgccacagctgcgctcccgccaagtctgaatctgaccacacctgcttccacctcccaggatgccagccagtgccagcccagcccagacttcagccatgatcggcagctcaggctgttgctgagccagcccatccagcccatgatgcccgggtcctgtgacgcaaggcagccctcggaagtcagcaggacgggacggcaagtcaagtacgcccagagccagaccgtgtttcaaaatccagacgcacaccccgccaacagcagcagcgccccgatgcccgtcctgctgatggggcaggcggtgctccaccccagcttccctgcctcccaaccatcgcccctgcagcctgcacaggcccggcagcagccaccgcagcactacctgcaggttcttgggcacactctatagccatactggacaggaaccaggtgccccgtgtaggcatcgtcggtcggtttgccgtcagagatggcgcatctcgctgcatcccccgagagtacaccggttgctctagccacctgcggcccgcccatctgcgctagctggccttcacgctcttgatcgtctttcctttgtattggagaaggactgggtcagagatctgttggagagagagaataaagagatagtttaatcattt

SEQ ID NO: 8177 - DNA, 922 bp, Homo Sapiens
  misc_feature (302)..(311): n is a, c, g, or t
ggtccctgcaggtcatgaggggcctatgcctttactccttttaaacaccagcacccgtcttttccccaacctaaaaccaaccaccagcatttcactacaggaccaaatggaaaccgagggaaccctgggtcttgggaagaacaacaggaaaccaaggtctgacctagggttccctcccagtcttcacatcactctggcctcatcaccaaggtgacagaggacacaggggagggggaaaacccacacacactccttggaatgggtcctgttatttatgcttgctgcacagacatattagaagnnnnnnnnnngctttgtattattcttccacatatgctggctgctgtttacacaccctgccaatgccttagcactggagagctttttgcaatatgctggggaaaggggagggagggaatgaaagtgccaaagaaaacatgtttttaagaactcgggttttatacaatagaatgttttctagcagatgcctcttgttttaatatattaaaattttgcaaagccctttgagctactgccttagtctacccactgtccttttgttatgaggtagaggatctcatgacaccatacacacaaacccatcattgcctgtgaatgcacgtagggccagaattccccagttcccgctcctctgagggttgatactgctgggaatgccaaccactccacaagcagagggaagccccctcagggagggttagggacactcgtggcagcctgtctagcagcctgggctctctgaaagtccctaacttcctgaggggtacgcaaatactgttctatttcactatcagaaatgttctcatctccagtgacagtggagacagggggtacagggcagatccgcttcggagacttcaacatgcagggtggcaagagaagggcaggactggccggccgc

SEQ ID NO: 8178 - DNA, 577 bp, Homo Sapiens
ttacatttatgggaaattttatagtttgcataaacaaagtataaacttaaggcacagtgaataactatattgataaacataaactagccactattggacaagtagcaaaagtaaaattcaagaaacaaaaccttcataagtcactacttccttttgttacaatcataaaattttctgggtaaactctagatactagtacctctagggagacaggattcagaagatcacttttagacacacctatcttcacttgataaccaaataaatatctgtgagtgagaggtactatctcgaatgaagttaaaaacaaattagaaggaaaaggtcaggttagcatgttttagaactattggtaaactataattcatgggacattatataatcaaaagattaatattttaagcactaagttataaagggtttacacccatgaataaaaagattaccatcacttactatgaaccaccattccatgaatccatgtagctgaacactcctaatgaaaagtttaattatccttcaacctgtagttgaagaactcagttcatgttcattgacagatttccattacagaccc

SEQ ID NO: 8179 - DNA, 418 bp, Homo Sapiens
gtacattcataccgtgagtgctactcagcaataaaaaagaacaaactatgggtacaggcagcaacttataattccagagaattatgctgaatgaaaaaggccaatttaaaaaggttttgtaccaaaagattccatttatataacgttcttgaagtgacataattatagaaatggagaacagattagtggtggctgtgttaaggagggggtgaggatgggagagaattgggcgtggctgtgagaaacatgagggatccttgtgatgatggaaatgttctatatcacagctatcgatgtcagtatcccagttgtgatattgtgctatagttttgcaagatgttaccactgggggaaattgggtgaagggcacatggaatctctgtattatttcaactgcatgtaaatctacaattatctc

SEQ ID NO: 8180 - DNA, 575 bp, Homo Sapiens
agtgatagaataaagagattttaatgagttatcactttttcagctgatatattcattttaatggcttttttgaaagttcctttttcatgaacacacccgagaaatcttaaatagacactttgcaatatttaagaacctaatgctgtttaattttggtacagcttccacattgcatgttcactttagtatttgcaatttgatatatttcatggtggcaaaaaattaagctctgttttgggacattttaaaatagaactatccttgttcgatagcataggaaaatgttctggtgattgtcagggtctcctaatatttatctcaattcttttataagtctatggaaattatttaattattttaaaacgtacacacttttcttgtaaatatgtcacatctgagttcaaaaaaattactttgaataccttaatatttgctgcatttttttccgtatatataacatgtcttctttcagaatgggaatatatgtgtgcctcccaacatttactgttaaagtgtgttatctttatatgtcaaactggttgaacactgtaatgagaataaactgcccagagttt

SEQ ID NO: 8181 - DNA, 336 bp, Homo Sapiens
gcgctaatttctgccaccacagcattttaagtccgttgagaactggggatataaagatacatccgactcagccttggctcccaccaagctcagccgggtagaaagggcacccccacagcaggagtcataaaaatctcttgtaataaccggtagcccttacatcaacaatatgtggtgatcacttagcaatgttttcagctcataccactactctagacaagaaatggacgacggaacaaacgctctggacataaaggtcgatcctgaactcaccgactatcatttcactcggcgcccccttaaaatccaacaaacaagtaaaaaaacggccgggcc

SEQ ID NO: 8182 - DNA, 603 bp, Homo Sapiens
accggattgagaagcacggtgggaacagggaaggcgggaaagaacatctgcctgaagaaatcaggcacagcttcacagaggaggtagccattgagctgagacttcatcaatgattaggaattcaccatgtagacgggcaggcaaagggtgtttcaggcaaagggaacaacaggtacaaagacacagaggcccaaggggcacttcaaagaagcaagtaaagaggtttttcttgagctgaaggtgcagtgaggaatagtggcagcatgaggccagacagacaagcagggatcagatcaagaagagccttttgaccattcttccatttattcagcaaacagttactgagtgcttactaggtgccagtcactcagctaagtgctggggctgtaacgggaaatcagacaaacacatccttgctctcatggaacttacattctagtagagaaatagacaaaaagccaacaaataaataaaatacagacttagaaaatgtctacaaaagaaatagggtgctgaggcagaaaatagtgtcacaggcataggcggtagttagggttattagcaaatgcctcttggaaaagatgtaaactcacactgcgggat

SEQ ID NO: 8183 - DNA, 273 bp, Homo Sapiens
gtgacacccttcaggttcgggttctcgtataggacgttgtgataaatgtccaggaaaaactggagggagtactggtacaagaagtgtatctgcttgagggactccatggtgaagtagatgctgctgcaggcggtggagagcgggaggtactgctgggacacggtctccacctcctgcatgacaatgtccgtctcctcaactttcctggtgacctctgcagcctctctcttcaggttctccagagtggttatgatcgtgtcgtcatccaaaatg

SEQ ID NO: 8184 - DNA, 471 bp, Homo Sapiens
tgcgctgggatatttaggggacctctttccttcaggaccacacccttctaggtgaaagcacaaacacttgattactttgcattccatctgcaaaaacaaatttaggttctgaatatggtgaaaaacgaagaaaggaaaatataaaactctgtattttatatacagtaaggaataatggaggctgataatgatcttgtgatcagctaagacaatgtcagtaagcaggtgaggtagggtgctttctatgggcaaaagggtgaatatcttgaatgaccagaaatgactcgaagagctgcattactatcatggtagcatgcatgaagtgatacatctaaacctttgctaacctaacattattactctcaagctttattatcctcaaggcttaaatggctgtagctgtttaatttaaaagcaaggcttaaaaaatagaggtactcataattccctttccatatcccgcgcagtacg

SEQ ID NO: 8185 - DNA, 344 bp, Homo Sapiens
tccgtacattgtcctgagatatgaggatagcgccgaaacggcggccttcttcattgatcataacacaaagactacaacctgggaagatccacgtttgaaatttccagtacatatgcggtcaaagacatctttaaaccccaatgaccttggcccccttcctcctggctgggaagaaagaattcactcggatggccgaacgttttatattgatcataatagcaaaattactcagtgggaagacccaagactgcagaacccagctattactggtccggctgtcccttactccagagaatttaagcagaaatatgactacttcaggaagaaattaaagaaacctgctg

SEQ ID NO: 8186 - DNA, 419 bp, Homo Sapiens
tgtgaaaggtcgatgatgtaggcatccaagatggaacggtagagtgccaggacacgggtgaggttaacagctagctgcttcctcccctcatgagagaggcctcgggcggagatgcccggcatcccggggtccagcagggagcgcggggagcgagaacgcagtgaacagggatccagggtcagtactacgcgggtccaggacccggacggggctcaactctgcaggcagaacaggaagagttttgggtccagtctccgacgctgcctttccgggatccgatgctggagtggaagatttgaggcgccccccagacgtcacaggtcgcgacctttcacagtgagaaggtgtcagcgtcagagacacgtagggcggggtaacagtgcagtgacgccacaaaagcgtgccgactgtcatatccg

SEQ ID NO: 8187 - DNA, 296 bp, Homo Sapiens
atcagtcggtaccgtactgcgctgggatatacactgcaagaaaatcaaagctataagaaatgtccatgaatagtagccataaggcatcagagtgataaaattcctgtccctaggagggaatattggagtttgccagagaaacagaatgggagagacagagaggtttattgtaggaattggctcatatgattacggaggctgagaagacccacgatctgccatctgcaagccggagaatcaggaaagctggaggtgtaattcagtcaagtccaatggccagagaagcaagtgtactg

SEQ ID NO: 8188 - DNA, 392 bp, Homo Sapiens
  misc_feature (225)..(225): n is a, c, g, or t
  misc_feature (232)..(232): n is a, c, g, or t
gatctgcggcggctcccagatgatggtcgtcctcctgggcgcgacgaccctagtgctcgtcgccgtggcgccatgggtgttgtccgcagccgcaggtggaaaaaatctaaaatctcctcaaaaagtagaggtcgacatcatagatgacaactttatcctgaggtggaacaggagcgatgagtctgctcgggaatgtgactttttcattcgattatcaaaaaactnggatggntaattggataaaattgtctgggtgtcagaatattactagtaccaaatgcaacttttcttcactcaagctgaatgtttatgaagaaattaaattgcgtataagagcagaaaaagaaaacacttcttcatggtatgaggtttgactcatttacaccatttcg

SEQ ID NO: 8189 - DNA, 310 bp, Homo Sapiens
gcaaaagtactgagtgttggcgagaggatggctagagtaattaagaaaaacataagaagggaagagaaaatttgaagagataaatttttcatggtgtctaccgtggcaaagagccttaacaaagtctccttgaaaagcatgaactcacccgtggagcaagtgtggggtgctcggagcacccaagagtgttgttcctgcctttgattatgggtagaggcttaggaatcaaagaccaggaattaattgtcccctggaaggcaggttcctgtgtctccctccagctttttagtatatcccagcgcagaatcgg

SEQ ID NO: 8190 - DNA, 1144 bp, Homo Sapiens
  misc_feature (635)..(650): n is a, c, g, or t
  misc_feature (782)..(795): n is a, c, g, or t
ggtagcatatgttttttaagacttaagcatttcatgctttaaaataccttcacaagtgaacattacacacagaagttcatttggttttcctttgttttatggtgcatatagcaataaagacccccctccaccctgcaacccccatcccccaccgggcctttgtccctgccttggcttttctccccttctcattctcctctcccctttcctcactgaaggctgtgagttgctttcaatgtgacaacactatgatgtcatttggaaggatttgccaggacagactgattctgagtcctgggtgccgtatgtgtatgcggcagtgttgtcaggcgatcttgtttgaagctctatgttgccataattaccatcaagtacacactgttggcaaaaggctaacacctgactttagaaaatgctgatttgagaacaaaaggaaaggtcttttttcactgcttaaagtggggtcactttgatacctttgcggtcatgtctgtgtctgatgagtgtagaatctctggatgtgcactgtcagtcatgtgtccaccaggcctcgaatatcatatgggaaatgtcatagttaaaaaacgtacagccagggcccgtgttgctgttaatagtgtgaaattgtcatgttnnnnnnnnnnnnnnnncaggaaccaaatgtgaccttgtgcatatattggtagctgaaaatcttcaaggctactgatgggtggccccttaatcttgtctttgattgctgtgtgcagggaaaggtgtccccgtttgttcatgctgttttnnnnnnnnnnnnnntatttgcaagaatactcattttgacataataggtcctcttgtcagagatcctctaccacagacattaatagctgagcaggagccacatggattgattgtatccactcaccattgacgatggcattgagcgtagctagcttatttccatcactacgtgtttttgagcttgctcttacgttttaagaggtgccaggggtacatttttgcactgaaatctaaagatgttttaaaaaacacttttcacaaaaatagtcctttgtcattacattatttactcatgtgtttgtacatttttgtatgttaatttatgaatgattttttcagtaaaaaatacatattcaagaaccta

SEQ ID NO: 8191 - DNA, 911 bp, Homo Sapiens
gatctagaggatcccatgcgcgatgcttcatcaacatcctaatgtcagaacagacaccagtcacctcccaaacggggacgtggggtaagagaggctacggggctgaaggtggggagcctggagtctactaccagggcctctattcccgccctttgcttaatgcatcctagcaggggtagggaacatggtggtgggtatggctggagctcacaccacgaagcgtctggggcctgatccttctggtgacacttcacttgtcccattggttaacatcggggtgggtctattacttactgtgatgactgctgtctcagtggggcatggtgtcgatccacggggtactgtgataaccaccatggatacatgttggtggcccactgggtactgtgaggactgctacatggatggatgtgattggctaatccactgcatggttggatggccaccatctcggttggccctttgggtgtgatggtgatagcatttcagtgacatcttctttggccccccccattaggtgctgtgcccacttcttttttggtgtacttggcacagtaggtgccaagttggccaccattctgtgtaacaccttttttggcccattgggtgctttgatggacatcatactgggtaggtgacaacgtcagtgggccaccatgtgccatgatggctgctgcagccccgtgttggccatgtcgtcaccattctctctggcatgggttgggtaggggatggaggtgagaatactccttggttttctctgaagcccaccctttcccccaactctggtccaggagaaaccagaaaaggctggttagggtgtggggaatttctactgaagtctgattctttcccgggaagcggggtactggctgtgtttaatcattaaaggtaccgtgtccgcctcttaa

SEQ ID NO: 8192 - DNA, 717 bp, Homo Sapiens
tgttgttaccgtgtgccaatgtgtcccatgtgggttgtgccaggtagagaaacaggaagtcaatcatctgtgacagtctctattctgtcgttttgctccttggtatttgattggcactatatttagctgaagcctgttcactgtttaaaaccggaggtatcttcaaaggcatggagacctggttccagtaaatgtcccaccagtggggtatagaaagcatgctcatgaccctgccgtgtcgtctgaggtacccgttcttatcctagtggttcaggaagagaaaacgcagtttgcactttcaagacagcttctctaaggctggcatgttatctccttgctttgctttttgccgttttaaaatgtgtaattgttccagcattccaatggtcttgtgcatagcaggggactgtaaccaaaaataaacatgtatttgtgtaattggtttgaagaagtcttgaatagctctttactgtcttacttggggttgataagatttgagtgtttgcaattttttactaaatgtagctccaaagtcttaaatggcttgtttgttcttaaactgttaattgatgaaactgtgcataagtttacaatgtactaacttattttgcttattatatatagtgttttattggaaattgtaaccacacacttcagcatgatgaaaataaagattagtgtttccatttaaataaatgttttatcctcccataaaat

SEQ ID NO: 8193 - DNA, 524 bp, Homo Sapiens
atgacagatctcggctccgatggtaacataatttagaatacatgctctcaaatgacaaaacatcaaacggtgagaggagggaccaacaatgaacatgatcttttttaaaagggggtaacagaagatagtaatctttatataattataaactcctctgcataccagtaaaatgatttgggtttagcctttcaaacatcatctaaacagaacaaagcaagacagagagggaagttcactgctgtgggtttgcaatagaagggcatctgttcgtgcggcagatgctgcagggctggctgctgagaacagctcctttgatgtgcatgatggtggtcttctcggctacagtacaagtgctatgtgcatcaagtataaagatacaagcctttaatcacatagatcagctttttagcttttgtaaatttaaagatagcaaaaaggataaataaggcactgtacttttaaaagagcgaaaactgcttggttccaatgtttaaaacccaaggaacgaccagaatataatatac

SEQ ID NO: 8194 - DNA, 506 bp, Homo Sapiens
agtcctcactgtcctgttttcttaggcactgagggatctgagtaggtctgggatggacaggaaagggcaaagtagggcgtgtggtttccctgcccctgtccggaccgccgatcccaggtgcgtgtgtctctgtctctcctagcccctctctcacacatcacattcccatggtggcctcaagaaaggcccggaagcgccaggctggagataacagcctcttgcccgtcggccctgcgtcggccctggggtaccatgtggccacaactgctgtggccccctgtccccaagacacttccccttgtctccctggttgcctctcttgccccttgtcctgaagcccagcgacacagaagggggtggggcgggtctatggggagaaagggagcgaggtcagaggagggcatgggttggcagggtgggcgtttggggccctctatgctggcttttcaccccagaggacacaggcagcttccaaaatatatttatcttcttcacgggaaaaaaaa

SEQ ID NO: 8195 - DNA, 603 bp, Homo Sapiens
gagcaagggaaggtagcctggatgagctgagtggagccaggctggcccagagctgagatgggagtgcggtacaatctggagcccacagctgtcggtcagaacctcctgtgagacagatggaaccttcacaagggcgcctttggttctctgaacatctcctttctcttcttgcttcaattgcttacccactgcctgcccagactttctatccagcctcactgagctgcccactactggaagggaactgggcctcggtggccggggccgcgagctgtgaccacagcaccctcaagcatacggcgctgttcctgccactgtcctgaagatgtgaatgggtggtacgatttcaacactggttaatttcacactccatctccccgctttgtaaatacccatcgggaagagactttttttccatggtgaagagcaataaactctggatgtttgtgcgcgtgtgtggacagtcttatcttccagcatgataggatttgaccattttggtgtaaacatttgtgttttataagatttaccttgtttttatttttctactttgaattgtatacatttggaaagtacccaaataaatgagaagcttctatcctt

SEQ ID NO: 8196 - DNA, 378 bp, Homo Sapiens
  misc_feature (78)..(86): n is a, c, g, or t
aagtccctttttaggtcctttagggatacatatcccggagcagaactactagatcacatatggtaaggtttgaatgtnnnnnnnnnaaattcgtatgttgaagcaaccaccaacgtgataggtgaggctttaggaggtgattatgtcatgagagctccatcctcattaatggatttagtgcctttataaaggggctcaagggaaccaattacctcctttttgcccttcgattcccttccaccatatgaggacacagcaacaggccccgtcctagaagctgagactgggccctcaatagatgataccagtctgccagcacgctgatcgtgggcttctcagtcttcacaactatgagaaataaattcgtacttttaaatt

SEQ ID NO: 8197 - DNA, 550 bp, Homo Sapiens
ggcacatcaggatgcccctcggagagcatgtgcacgtgtccccacctgagcgagcgtgtgtgtgtgctcctctgcgtcccaggtttggacgtctagggtttggtgtgcctgtcttctgccctccctgagcccacagggtcagtcaatgtatcttttacgtgcctctccctctgccttctctcacagtgcccccggctccagagctcaggggtaggggttctcctgagggtgcaggggatccttctcatctcctggaccctccagggcactctggtccctattccccagctcctaggcagctgagccgggtcccttaggggaggtgaccaggagctttggtgcagggagctcttggtggggcaaagggctggacccctgccaggtctgtggacatggttatatgcccgggagaggggggtgcagggccccagggatggcccccaatcccacctctgtttattctgtaaactgcaacctataaataacctttagcattcctattgtaacaaaattaatttttatgaaataaattatatttcctagtctaata

SEQ ID NO: 8198 - DNA, 429 bp, Homo Sapiens
ggtcgacctctgaggatccccgctactgcgcgggatatggacatcagaaacattctccttaaacagttagatcaacaggctatcatctcaggagaatccatttactggagccagaaacctactccatcatcgaacgccagcccttggtctgagcctgcggctgtagatgtggaactcacagcatatgcattgttggcccagcttaccaagcccagcctgactcaaaaggagatagcgaaggccactagcatagtggcttggttggccaagcaacgcaatgcatatgggggcttctcttctactcaggatactgtagttgctctccaagctcttgccaaatatgccactaccgcctacgtgccatctgaggagatcaacctggttgtaaaatccactgagaatatcccgcgcagtacgggggatcctcta

SEQ ID NO: 8199 - DNA, 345 bp, Homo Sapiens
acaggcgtgagccaccgcgcctggccaaaataaaatgtttttatctttcttcacttagaactatgtaggccttttcttgttctggtaaccccccacagtgtaattggtgctgaaaatagtttcgtgcctgaggtctgttgtcactcactcactttctgacaattaggtgagccacttgaggattttctggcctgaagttataaaaacttggcatctgtcctaaggtaattgtaaaggcaaaatgaaagcattgaggtgaatttaggttatatggcatttatctggtaaagtgtttcagaaaagctagaatgaaaatgtgatgtaagggatagcaagtgtaggttg

SEQ ID NO: 8200 - DNA, 372 bp, Homo Sapiens
aaggatccccgtacttgcgctggattcacagggtcctgcttggaggcacaagagggcgggcgcacagggcacttctttatggccttctgaccactgcaggtgctgtaaaagctgtagcggttctgggtggtcttctggcccttgctgcccagcgtgcccttgcgcagggtgccccgtgggtcacagtagaggtcgggctcactgcggctcgccttgattttctgcatgaagcagatgtcgctgcctgcgccggtggtgttacagctgccccgggggtagtgccggctccagttctccatctggctgtaggagctgaagcgcctgttgtcaggctcccgcttgagggttccattgtagatcggatatcccagc

SEQ ID NO: 8201 - DNA, 223 bp, Homo Sapiens
ggttctgtctattcataccaggtttgaaaaatcctactgtcgctaatggattgggcagcaaagagatgttcaaagcatcagccaccacctgaaaattagtgattaggtcaaatccctttatggtatctgtcagattctcttgagcctctgaggaaataagatgtagggcatttctgatgtgactcagtgggaaaacttcatggagatatccagcgcaagtacg

SEQ ID NO: 8202 - DNA, 304 bp, Homo Sapiens
tgtttatgagccgcaggtctcctttgcgctcttttgttgtgttcaggtctagctcaggaaaaataaaaccgcaagcttttcctctgcccgggcgccatcagcgtggggccaggactggcggagagggccagggcagcaggggagaagcggggactatctcagggctgagatcacccctctaaaaccaggcggagcagcacctgccaagtcgggctccggctcggcactgggcaccccggcactccctctctgccgggttcccgggctgcgcgccccgctggggtggcaactctgctcataccga

SEQ ID NO: 8203 - DNA, 412 bp, Homo Sapiens
ccgctgggattgcccagctgtgtccagccagggtggagaagcgcatcttccttctgattcagtccgtcctggcttcgtctgctgatgctgaccactcaccatcatctcaaggcagcagtgaggccccagcgtctcagccacccccccaggtcagaggttctgtcatgccctctgtgattagagcacatgccatcattagcttcggcttagctgtgcttacagcacgaggatctggcccagaagaggattccagccctggtggcgatagctcaaagtgtgtgcggacctggctgtccgggaagaacgtccatcattgtgatgtgcgatctctgcatatcggtacagcatcatgggtggccgcgtatgttcccaatgagctcgcgaatgtgtttgaaggacttcgacccatttc

SEQ ID NO: 8204 - DNA, 367 bp, Homo Sapiens
cgtacctgtcgctggatatggacaggacagtgggagaagggtgccacagagcaccccagaggctcaggcattgaaggcctcaactgatgtcttcaggtgaagacacaggtggggctgcaagtaggactcactgaacatctaagattttccttcccttcatgccttttctctgttggttctgtgaatgctaacagccaggctcacagctcctaggcaggagattgaaggactctactttcatgaaaatgacctgtccaaaagacaatgccagttgggactttctcacacgtagctctgctggtttaacctgtagcgaaatttaccaatcagaggctctgcgcatggacacagcttctactgagtgttt

SEQ ID NO: 8205 - DNA, 409 bp, Homo Sapiens
cttgaggatcaccactatcgtagaaaccctcatgcctaaatttagaatattgtattgtgtagcaatacaaaacattcaaaacaaattaaatagtttaacttatgtgacaggcagataagcatttcaaaagcataatgaagtccaattatgtagtgcataatgtagacaggagaagaatctaacattatgcagacattttctaaataaaagctccctgtaggacagctatatataaacatgggtaaggtaagcgcagactagttctgtggaaccttttgaaatcaagagtctaaaacacaatacatttttcaggtaggcaccaagttatcctaaaaaattttcatgtcggttattctgacattgttttttcatcagatactcacatcaacaacacatgtgatttgccagg

SEQ ID NO: 8206 - DNA, 875 bp, Homo Sapiens
  misc_feature (95)..(104): n is a, c, g, or t
tggggaaataatgtccacctcaatttaactgataaccaaagatgcttttcacatcaaagaaatgatcaaaaaggctgtgtcacattccaaagccnnnnnnnnnnttaacaagaatgcaaacacgatgaataatgtaccactgccaagactttgccaacagtggagcttcagcgacgctgtcctgtgaagcggccctccatttgcccggttcctcttccagagccaagtttctgtgccatgccaccccttggaggaggtcctcttccatcacgatcacgcatcattccaccacccacaattccacgtggaccaccgggacctcgatcattgcgcctaatatccctgcgatcatcaccaccacctctggtttctcgctctcttgcagctcttgtttttttctcttccacatttaaacgtacttcccctcgaaacataatcggttttgcaattaagattctctgaactggttcagagtcatcaaaaaccacaaaaccaaaatttggaagctttcccccaacacccttggtattgatgcgaagttccacaacgtttccaaaactcatgaagaattcctttaggtcattttcatcaatatcatgtggcaagttaccaacaaaaagttgatgactatctggatagcgaattattctacggttgtcagagtcattctgttccatatctcctctgcctggtcttggtcctctaggaggaaaaccaggtcgttctctaggtcgttgttcacgcacacgaggtggctgagattgaacttctggtttagcttcgactcttggctttggtggttcttgtggcagagaaacaggttctgccggaggaggagtagtagatttctcctctaggtgatcgtggggttgtaa

SEQ ID NO: 8207 - DNA, 367 bp, Homo Sapiens
aatgtgcctaagaaattttctctgaggctttagcaatggaaatttgattgcccattgtataagaacaaattgatttcctatccacctgattatgttctctggttagtttagccattttgaacttaagatcatatgaccttagtgcttttggctaaacatacagaatactacttgtatgcagaagagaattagttgattacatgtttcaaccttttagggtgataaatacatgtataattgtttacatacttaaaaggaaaaagttgagtaaatttcttgtcatatagtggctctacgtaatgtagcctgtattaatgtgaaatatttaccagaatattcaataaaaagatgaacagtctttaaaaaa

SEQ ID NO: 8208 - DNA, 440 bp, Homo Sapiens
atttgtagaaggagcaagaatattgaccttactatatagcacacgaaacaatctatgctgtatcgtgcctgctcaatccttaaagttaacttctaatgatagtaaaagaccttcctgctgcctttaaaatgcagcttgtgctagtaacatgcatgtgtcaaattgaagaattagacatagatgactagatagaaagtaattttgtaggtaattttagagttcaactccacccagctttcagtgaaggaacctttcaaataatagatttttgcttaccatagagaaaagatcaaatgacaaagcaaatattgaccattaagctggaatatggtgataattgaacagttgtataaatgaagtaattgaattgtacacatacaatgggtgaattttatggcatgtcaaagtatacctcaataaagctatttttttaaattgaa

SEQ ID NO: 8209 - DNA, 446 bp, Homo Sapiens
atgcgctattatctagattcagtgttacattttcgatgtttatcactcagtgggtttttattaatatgctgattaagttatttactgggccagtcattgtgctaaatagttgctcttttgtgtttcattgccttgatgtttgagtgtaatctagcattttaatacagtgtttattttgcatgatctttaacaaatgttttaagcaattttaaaaaggcaggatgttattgacattatacactgaagtcttaacattttaacatttatagtgcttatttgcaaaattgtataattaggaattatttcagagacaatgttttctttttcaggtgagtagttgccgcgtaatatcattggagtacattctttatactgtttgtgaaattaatactagcatattaagtgtacaaatagatttagaaaacaataaaaaattgcatgctaaa

SEQ ID NO: 8210 - DNA, 439 bp, Homo Sapiens
tcagttacccatttgtgtgtgtgtgattccacttagaaattcttaaaaccagatttttctttcattccgtttggatgtctacattccttatcaaaggatataaatactgtgtatgcttttgaattttatttttaggaaaattctgaagccagctatcacaggtttgttagctaataatagtattttcttttagttgagttaggtttttcccccatctcctgtagagcgaatttacatattgtattgggtaagtgttcactacttttcctgattaagggatctgtgctggggaacaaagcttttgcagtaccttatattgtagttaaaattttatttaacatatccttcagtgagctcatttcacactgtagcctcttccttaaaatttgtggtgctcctgtaacagtaagaactaattctgaaataaaagacatctcct

SEQ ID NO: 8211 - DNA, 521 bp, Homo Sapiens
  misc_feature (412)..(454): n is a, c, g, or t
  misc_feature (461)..(471): n is a, c, g, or t
gggggccttccccttgggaactggcctcatcacactgggagttggtgcttcttgtctctgggtctccagagtttgccccgcctgtgcacacctcacattccagactctagccatctcggcaggatctcctggctccttgagtgcccaggtgccaccaagaggaagggccttgtgggatacaccttgcagaatagggatcggtgtgccccgctgcgaggggccccccatgggggctgtggcccctccgcaggcaggacatcccaacccctggctgggactgaaccacccagagcggagcggctcccttttcagccttgtgagtcacctggcaggccccagctgggctggctgtccgtgtccctcagcctggctggtgattccttgcaggccagaaatgaagagtccctgtagnnnnnnnnnnnnnnnnnnnnnnnnnnnnnnnnnnnnnnnnnnnctcattnnnnnnnnnnngtccctgtggagtgtacttatttattttttgattaaagggaagtaaaatg

SEQ ID NO: 8212 - DNA, 499 bp, Homo Sapiens
aatcaaagtgtggtcccaaaacaagccaacagctgtatatctcaaaagttaacccaagacaactctgatatttaggttatttgttgagactcattggtactgactggcaagtattctgctttaaagtatcatgtattaaaatgtttagacagcatgtgttttaaagtgataaatgcaaaatgttaagtttgaaatggttaacagtaaattattatgttagtttccaggcacttgaactgtgctacaagtaggggaaaacctactttaaagtatggtaaatgtgtgttttaaacttcctatcaagtgacatacttcatttgattttttgtttaagaagccatggtacttttttcttgagttactttggatatgttttttcaatgccatctgaagattttgtaattgagtagcagtaaatatacagatttacaatgttttaactacagttcatgaatagctggttgtgtaaaactaataaaaaactagactttcacatgta

SEQ ID NO: 8213 - DNA, 1558 bp, Homo Sapiens
  misc_feature (1053)..(1117): n is a, c, g, or t
gggaacgtcaccgagcggcgccgaggccccgggttgagcgggaggcgcgatcggtccggtcggtggctccccgcggcggggccgggcccgatctcgggcgggaaccgaccgcagagccggtagcgggaaggatgaccacgctcacacgacaagacctcaactttggccaagtggtggccgatgtgctctgcgagttcctggaggtggctgtgcatctcatcctctacgtgcgcgaggtctaccccgtgggcatcttccagaaacgcaagaagtacaacgtgccggtccagatgtcctgccacccggagctgaatcagtatatccaggacacgctgcactgcgtcaagccactcctggagaagaatgatgtggagaaagtggtggtggtgattttggataaagagcaccgcccagtggagaaattcgtctttgagatcacccagcctccactgctgtccatcagctcagactcgctgttgtctcatgtggagcagctgctccgggccttcatcctgaagatcagcgtgtgcgatgccgtcctggaccacaaccccccaggctgtaccttcacagtcctggtgcacacgagagaagccgccactcgcaacatggagaagatccaggtcatcaaggatttcccctggatcctggcggatgagcaggatgtccacatgcatgacccccggctgataccactaaaaaccatgacgtcggacattttaaagatgcagctttacgtggaagagcgcgctcataaaggcagctgagggggcacctgccaccccactgatgcccaaactgtcagactttgggggatccccgcctagggcagtgctgcatggctgccctgattccaagtgctcttatcgcctctgtgtgtggatcgcccgccccagcccggggccgctcaggtctgcttggaggatgcctcccccaggagggcagtgagggatgccgcaacctcgacttctcagcctcctggggttccgccggccaacactgtctgtctcaaatactgtgctgtgagttgtttcaataaaggggccccaaggnnnnnnnnnnnnnnnnnnnnnnnnnnnnnnnnnnnnnnnnnnnnnnnnnnnnnnnnnnnnnnnnncaacgacataagaagaaaaagataagaaagaagataacaagaaattaaggtgacgccgtgatcgagtgacacgtctctttcgacgattggccagacggcacactgggcgtcgaccggctgacatgatcgatgccgaacacgacacgattcgcaccgactgacaagcagcacactagccgcacagcacccagaagataagcaggaggggaggagacgacgctggcagcccgggacagcgcgcagggggggtgccaactccgagaagcgtagcgccacgcagtacaccgacgccggtcagcgcggccgacgcgaggaacacccgctcactgtgagtcgcaggagtgtgcggcgacggacaacaaccatcgcagggggcaggataagcaccgactagcacgaatgccgtgcagcgcacgcgggcgcgtgtgggaggaggcgccg

SEQ ID NO: 8214 - DNA, 650 bp, Homo Sapiens
aattcgggagtctgttcccttttagtgccacgcgttgaatagttccacatactttcagaagagctcagcagggccctgcctggtctcccgagcatcatgagtaacgtgtctgctcagactctgctgacaccaaagtattttaaacaaataaaaggtcttggggaattctgtttggctacctgggcacgccagtctgcaccatgtgctcctgcggcgcatgagtgactggcgtatttagcccgtcacatttcattcgctgaaggaaaggcaagagagttgaaacatttttcttacttaaaaaaaatgatctttgtgaagaacatagtgagttcgtttgtcttcagtcaacagcggctgaaactgaccactgagaaatgggtgtgggcactgacagttctcccccattatttggccaggaattgagcttggcttggcaaagttccttttaccctgttctgttcatctaaatgcagacatatttaaatcatattcaactagttactaatgacctcaagttgtattccctggcaaaatggactttctcaaaataggactgcacgcttggtgtactttaaatgttaatgtttaatttaaaatttttatttaagaggattaaagccctaatgtttattttcctactttctgaaagc

SEQ ID NO: 8215 - DNA, 382 bp, Homo Sapiens
taccctgttctcccctgaggccccgttcctgggaggggcacccctcaactgtcactttatggactgtctgtgcaattacgtccaccaaagacccgtgttgggggtactgaaggagaggccctgggggaccctctgaagcatttctgcctcactttatgtcatctgcttctcccctgttggggctaaggaaggagataggtggctcctaaaagaggaggccatcttctcacccaccccttcctctttggcacagctactcctggctgggggtggggccttgggggtttgggctgggcatccatggtcactgcctcagcccagccaggctgtgcctttgactttaaaataaaagtccacccagtgctgtgtgtggcaaaaaaaa

SEQ ID NO: 8216 - DNA, 336 bp, Homo Sapiens
cgaggaaaagagaaatcaatcagaaaagcaactataccaaaacagggttatccaagtgagcttctctcacttccttagatggacttcagcttataggatgacacgagatgcgagtaagaagctatttgcgcatttcagctgcgtgacttgtgtctgcgttgctttcctttctttcttctgtggactgagaatgctagtgcctttgaatttgtctttacaggacctgagggtcttttgatggtaagagaatgaatgatcattgctgccttgagttctgtgtgatcgtcaggcctcgcctcaggatggcaattgtagcctgagatgacgtagcccaag

SEQ ID NO: 8217 - DNA, 586 bp, Homo Sapiens
  misc_feature (297)..(345): n is a, c, g, or t
gagagaatgttctacctccaaagtagggaaattgcaaagagaagtttttctagtcagagaccagtagatcgtcagaatcgacgtggcaacaatggtccacccaaatcaggaaggaatttctcaggtcctagaaatgaaaggagaagtggcccaccatcaaaaagtgggaagagagggccatttgatgaccagcctgcaggcacaactggggttgacctcatcaatggcagctctgcacaccatcaggaaggagtacctaatggtacaggacaaaagaactccaaagattgtactggnnnnnnnnnnnnnnnnnnnnnnnnnnnnnnnnnnnnnnnnnnnnnnnnngtggatgctctatcacagtttgatctcaacaattatgcaagtgttgttataattgatgatcatcctgaagtaacagtaattgaagatccccagtcaaatttgaatgatgatggttttactgaagtggtatccaaaaaacaacaaaaacgtttacaggatgaagaacgccgaaagaaggaagaacaagtcatacaggtctggaacaaaaagaatgccaatgaaaaaggaagaagccagactt

SEQ ID NO: 8218 - DNA, 582 bp, Homo Sapiens
tacgtgggctgggataaccaggtcttgcaagtccagtgctgtctccaagtagccacgctcacagctgagaacaccttagaggacaatatcgacttcttacagactaccaagcccccagtcatccagggaaattcagagaccaattgactgccaggtggcaaatccacatgtgtactgcggtctttagagatcatttagagcttgcacacatctgtgtcttcttgtgggaaacctctaggtattctgtctgatcagcactgtgaggaagttggtgggaaaaggccactgataagaacaaacaatgggcagaaggaagcacattgcaataaatttccccagagagagttcctttacattccattcaccaaaaacctctctggaactgtcaggttcagaatatcaaccaagaccatatcatttagaatccattgggatgtagaggtgactcgattcctaaaagaagcctctctcccatgaaccacgatgtacgttccacagaggcggaaaccgccgtaggttagcaatgcattttagtctttctctccattcacatttactgggagcacaccacgtgcatattgg

SEQ ID NO: 8219 - DNA, 1048 bp, Homo Sapiens
cacacaccacaagaaaaaaacgaggcgcagatgacaaaccggggttaacaagcaggctggtaccggtcggattcccgggatatcagtcgacccacgcgtgcggacgcctgccagaaaggtcacctatcctgaagcccagcaagcctgaaacagctcagccaagcaccctgcagagtggaagctgcagatgcctccaggagcaacgggtcgagcccagaagccaggatgcccggagcccgtcgggccccagtggcagcctggagaatggcaccaaggctgacggcaaggatgccaagaccaccaacgggcacggcggggaggcagctgagggcaagagcctgggcagcgccctgaagccaggggaaggtaggagcgccctgttcgcgggcaatgagtggcggcgacccatcatccagtttgtcgagtccggggacgacaagaactccaactacttcagcatggactctatggaaggcaagaggtcgccgtacgcagggctccagctgggggctgccaagaagccacccgttacctttgccgaaaagggcgagctgcgcaagtccattttctcggagtcccggaagcccacggtgtccatcatggagcccggggagacccggcggaacagctacccccgggccgacacgggcctttttttcacggtccaagtccggctccgaggaggtgctgtgcgactcctgcatcggcaacaagcagaaggcggtcaagtacctgcctggtgtgccagggccatcctatctgcgagctgcattctcacgccacactgggaggcgccgcccttcccgaagaccaccagctggctcgaagcccatcgggaccttgaggaccggcaagtgtccccgtgcatggcacggaccactgcagactccatctggccgaacgcagcaagagcggcaatctggtaacctctgcacggtcccaggaggccaagacctctagcacgtgaaacgtgcagacagccaggcccaaaggaacagacatcgccggacaacgacgcgcgacgccacgccactgggccgacgatacc

SEQ ID NO: 8220 - DNA, 397 bp, Homo Sapiens
aaaataaatcaagtgtgatgagtgttatataagaaaggggaaatagcaggcttcagtgtggaacataggagagtgggccttcattccctccagttgagggccaaataaggcatccctgaggaagagacattaagctgagatctgaaaggtgagcctgaataagttaggtgaaggagcatgagtaaagggaagcatgaatagcatattgcagagcctctgagatgccacatacaggatgactacgagaacctcagtatgcaggacaaagtgactttttggacatttttaggtttcgcatttttattttaagaacagagggaagctaatgaagtgtttaaattagggagtatggctatggcctgatactctgaatggagtatggagaattgattagaga

SEQ ID NO: 8221 - DNA, 543 bp, Homo Sapiens
acagttttcaaatattttactgaaaatgcatattgtacaattaatgtataatgacacaccagtgtgagaaacctccataggtatcatttccacaaatatgctatgaatatagagttcctacacaaaactatacaacttaccagatgtaattcctgttacgtaccatactcacaatcgtcttgaagaatatggagaaaaagtgctgagtgacaaaaacaggagccatgtgtgattttaataaatggaaaacacggcatttcagctcagtggtaaagcagtaaaccaatcagatgcttagctatcaagtaatcatgtgagaggaaacagaattagatccttacctcatactatatgttggcagctaacactgtagcagtggtatatgaatcacataaattacctccaacaaaatgtattccatgtattagaaaaaaggaggtatgcctaacattgtgtacgtcccaaaggtgaatttgcaggtcacgatatgacagtcaggaacatacatttattgttcatgtgattctatgcttaactattacc

SEQ ID NO: 8222 - DNA, 413 bp, Homo Sapiens
aatctttggcagcatagaactgattgtggtcctccgatgcatttctggtgtcgagaacttcctttctcaacctccccttcccccatagccatccccacaagctgtcccatcaaggaatatttcaggtgtaaactgaatatgccacgaggcctcctcttcatgaagtgcttggttggcctacgtatgggtggcaggctggacacagctgaatcgtctttctgggtcaccctgtaacccaagtcccctttcccgttctctcccaacgctacttatccgcaggaattggatgccggctggccccctgatggttcctggcctaggggctgtcatggcagagggaagccaccaaggtgccattgaggattggtgtctggctctctatgggcaagagcgccaggggacacacagtggga

SEQ ID NO: 8223 - DNA, 479 bp, Homo Sapiens
tggcacatgatggggtaccctgcatgcattcagcccactgatatctgcacgtctggcaacaatcctctgaggcaggcgcaaagggaagggctcagctcccagtcgcgccacagcctgcatcacctcatcccagaggcggagcagcggctcagggctctccagagtacgaagatttgcggtcggcacggtcagaatgatgttgtccgtggccagctctccccagggccctggattctcctggatacgcctcttccactcctccagggtggtctcccccagcttgtagtatggagcatgcacagcccccttcacgggacaggcacagaacccagtttgctgttctgaggcacaattatatagaggagtccaccccagaggcacgtgatcgattttgtgggtttgtccaagcagcaccggttaattacgagtgggcctcggaaaagcttgctggccctggtcaggtcatctgtgtggcagcc

SEQ ID NO: 8224 - DNA, 392 bp, Homo Sapiens
  misc_feature (321)..(342): n is a, c, g, or t
ttctatgcatgtaacaaaatatcatgtgtatcctataatcacaaatattaataaaaaaattttttaaagcaatagtttaaaattcaataccatatctcataagctgctctgaccagctagagcaggagttaggaaattaacgcctatgggtcaactctagccaataacctgcaagttaaattgaaatttttattgagataattgtagattcatgtgcagttgtaagaagtaatacagaaaaagcccttgtatgcttcgcccagtttctccagtggtaatccacctgttttacgtaatctaccaccatgagctaaaagcagnnnnnnnnnnnnnnnnnnnnnnggaaaagggtttttctctgttgcccaacctggtgtgcagtggtgcaatta

SEQ ID NO: 8225 - DNA, 872 bp, Homo Sapiens
tttagacttaactcaagtatttaatagcttcacaaaaaattcctaataaagagcttattctgcataattagaaaagaaagacaccaagccatttaaacataatttatgtacatttatgactttatacaattatagcaaagattgttcttgtgtctgtaagtacatcaacatcaggcacttctcagagtatcggaacaagaacgtggaatctgcactgttactaaactcgggtagcgaaatgcaggaggcatgactacgtcctgatgggacttacatggccacccctggccacactgccaggctgtgcccacctcaaggagaggccaactgtaatgccaggttggtctgttcgcataaaccacaatacattttttttaatgaatgattattcccaaactaaaaccagaaaagaaacttctcttttaaaattagttataaattaagaactcttaggagcttgaatgtaagaattttaagttggggctggggttattggtagcatatatccagcagttgaacaagtccaatttgtatatcgttggagaatgatttccattttaagcatccttatcctcttcttgggatgttccattgatttactgctcactgggatacatgtgctcatttagactttgtcagtttgtcaaagcagaactttccaagtaatacatctattacctaaatatattccatacgtctatattacggaaacaatacatctttatatttaaaatatctgaatagctctataatacaatatgcttttaataacagtacaaaccagagaaataatcaacaaggctgcaaggtgatacattgcacattcacaagcagcatgtacatactgatatataccatactcagaagtcaga

SEQ ID NO: 8226 - DNA, 441 bp, Homo Sapiens
ttcacaaaggcagggtaaactttaattcaggttgacaggtgggaaaaaaacctaggatttgcttccaagggtgtccaaatgaaaaaaccatccttcagggaggggcaaaaagggcaaaagggtgcgggtgccctgctggcaaaatagggcgaggagcaggggcggagccacacagtgcaaaattgccagggcttctgccaggttcagcaccaggtccaaagcctgctgggccagacatgttgacaacagcaacagcttggacctcaccaggaaatccagtcctagaaccaccccatgaggccaccagaaaataaaccaggcccacaggatattcatccaggggcctggccccatacccaatgccttcttcagccccttggctccaaacaaacccaatggcaacaagacaaagatggcaagacaggctacagtgtgtgtggc

SEQ ID NO: 8227 - DNA, 430 bp, Homo Sapiens
cagacagacagacgtattccccaaaaagggataccccaggccgatggtgttcagcccatttagcagctgaaaaaggaaacagtgcacaccaatgggaggcagcctgcgtagccctcatcaggcaagacagactgaatgcaggagtgggtgattagctgctccttgaacttgaggctgccttggcagcaggggcacagcaggcctcaagagcccctaattgtctcagggttcaaaggaagacactgacctttcccatcccggtagcttcagggaagatcatagttaataacgtctctcaacaaatgattacttctttgtttccttgtggcttattgtctgtctgagtcaacgaatacacagacttactggattatagaagagaaaattcacatctgccttgttaatataataaatataattacagcccctt

SEQ ID NO: 8228 - DNA, 440 bp, Homo Sapiens
gaaattcacagtccattaaattcttcccctctcttcttttagcaaacttgtaacatccttttatatcctttcttaacagaaggaaattaagcaaacaaaccagtcttttgccttttctttctctgtttcactcccccttcttattttatttatttattgaattgccatatacggccagttaaaactgctgccggacagtaacatatcccggatgagggtttcgatgggggttttacctaccaaacggacgaaaaacaattgctctatgactgaggaggagacggtgcggagggaagggaggcgaagcaaaagctttccgaatctcgtcggctggttggggtactggctcctaacgtattcttccaaagcacactgagacttttcctgcaagctttccacatgggctacatcagagagaccacaggcatctggaagaaagt

SEQ ID NO: 8229 - DNA, 1049 bp, Homo Sapiens
  misc_feature (99)..(99): n is a, c, g, or t
  misc_feature (518)..(564): n is a, c, g, or t
attctgggtagcgggatactcacgaggaaaggctggcccaggggtgtatatatgctggggtactggggcaaaacctggaaccacgtttatgtatgctgncggtgtctgggggatatcaaatctctgaaaaggaagatacgtacagtatcctgtgaccaaatgggattgagcccaataagttggtttcacatcctcaagacaccggtttggggggaattacaggagactcgcttgtaatttgcatcctcagagcctggtttaggagaattagaagagacccctttgggttgcccatcctcagaaacttgtctagaagaattgtcggatactggtttggccttcacatcttcacaagctggcttgggagaatttgcagacacaggtttgggtttcacattttcaaaagctggtgctgaagatgaatctgacactggtttagactttacatctggtttaaattccctagcagctggattcagttgtagtttaactcgtacatactcccctgcttttgaaannnnnnnnnnnnnnnnnnnnnnnnnnnnnnnnnnnnnnnnnnnnnnnagccgtgatgcaaccttcttcagtgcaatacagttgtcaatcacaacaaaacgagggcatcccaagagaaaaggttttaaacctcctgctttttctagtatctgtcgagtttcttctgggaaaaactcatattctgcagagaacatcttgttactcatgtccaagggaccatgttcctccaaaaactgagagaagtaatcatatagagttgaacatttttgttttgggttcatgtcccatagcttcttattgcggacaacatattcgttactgtgttggtcatagagagcttcgaattcttctacatcttgccgaagatggtcaggcactgcaaatgggcctgcagaatctgaatttcgattgctatggtcttcacttgaagtgatgatctcattatttgaagttactgaagttgttccagacccaactaacataggctttgaatcccttggcttctttttcttgcttttgtttttcacttgggt

SEQ ID NO: 8230 - DNA, 561 bp, Homo Sapiens
  misc_feature (108)..(119): n is a, c, g, or t
catggttctttccagtttatttcttttaggaaataaaattatttattttaaacagttccattgtcgtttctgaaaactacggtattctcagaagttgtagcagcagtnnnnnnnnnnnngttgttctataagtgattggggcagatttaactgattttgttaaaccaatttgtaagttactgcttctaatattacacttctaaaaagctgaatttatactcatgtcctaaaggagaatatgtggtaataaagtatatttgttaagtaactaattgaaataggcttggttttaagagttccagtatataataatcacaaattgaaacctgacagtatcttgggagttccagtaatgtcacaaattagtgaataagcatgccagtgtgcaagggtaatgtaaggattgttagcctatctaaatattcaaaattactttaaaacttaagtatgttttctgatttttaagaattcagaagtgttctgtaatggattcagatgtttcatttgtagtataatgaaatgttaacaaaaaaataactttttcattaaaatatttttaga

SEQ ID NO: 8231 - DNA, 1512 bp, Homo Sapiens
ggaattcccgggatcgcgggccttgcggctgcgttttcatctgcttccttgtgagtcaggtgggtcctgggcccaggaaccggcccggagccgtggacgccctacagctgagaaggggacccaaggggtcggccgcggccaaggcccctagtgacctgccgccccagctcacgctgccgacggcagctatagacattctgcgtcaggtccgggctcctggacttcgcctttcccgagccctggaggtggggagaaaaggttcaccaatttttaaaatccaaatatatctcatggtacagtggaagaactggccagagagtctggaagtttgggttctggtcctggctgtgccactgactcactgtgaccttgggatcttgtgctgtgaagacatttcccaagtgcttcatgttagccagcaaatctgacccacaaggcctggaaagaggtgattgttaggttgcgcagaggtggtcttatccagctcagcttcccctgggacccaccgtgggacctgaggcagaactggggtggacttggcctcctccatggcacaccggctgcagatacgactgctgacgtgggatgtgaaggacacgctgctcaggctccgccaccccttaggggaggcctatgccaccaaggcccgggcccatgggctggaggtggagccctcagccctggaacaaggcttcaggcaggcatacagggctcagagccacagcttccccaactacggcctgagccacggcctaacctcccgccagtggtggctggatgtggtcctgcagaccttccacctggcgggtgtccaggatgctcaggctgtagcccccatcgctgaacagctttataaagacttcagccacccctgcacctggcaggtgttggatggggctgaggacaccctgagggagtgccgcacacggggtctgagactggcagtgatctccaactttgaccgacggctagagggcatcctggagggccttggcctgcgtgaacacttcgactttgtgctgacctccgaggctgctggctggcccaagccggacccccgcattttccaggaggccttgcggcttgctcatatggaaccagtagtggcagcccatgttggggataattacctctgcgattaccaggggcctcgggctgtgggcatgcacagcttcctggtggttggcccacaggcactggaccccgtggtcagggattctgtacctaaagaacacatcctcccctctctggcccatctcctgcctgcccttgactgcctagagggctcaactccagggctttgaggccagtgagggaagtggctgggccctaggccatggagaaaaccttaaacaaaccctggagacagggagccccttctttctccacagctctggacctttccccctctccctgcggcctttgtcacctactgtgataataaagcagtgagtgctgagctctcacccttcccccacaagccgccacaacctctagaaggggtaccgagct

SEQ ID NO: 8232 - DNA, 447 bp, Homo Sapiens
attcgttgttgttttattgttaaaagtttattatgcaactctggaggtatagagggcatataagctatgggacatatgctgatcacaggctatattcatgaagttacttttgaccaacctgaaaactgataggattttgtttgtcatttggtaatttctactgcattcttaccatccttctctcacaaattttgatagcttgaagatctttttaattataattttgttgtatttgtttcctaggagcaagtgttcctgctgccagttctttcctctttaggcgtggttgagaaaaagcagaaactttacataaagctgtatttcttaatcatctttaatttgaaacttaagaaaatgaatttattctgttatatttatgtaacttatttcctggaagttatatctactagttttgtttgataataataaaattagctataccttgaa

SEQ ID NO: 8233 - DNA, 473 bp, Homo Sapiens
cctactgcataattaaagctactcgctaggttttatattaaagttaaaaattgctgggagttaccattataacattataacattaaaacataaactactagaaatagatttacatgtttggtgtgtaagaacagtaactttttttagtaaaagattataaaaaggcatggaagtgtaaattcttgcctagggttaaagaattgttttaaattagataagataaagctaaagttcaaacaagtggtggaaggattgtaaaaattaatcttgcaaaaattgcatgggtgaatatattgactaaattcaaaagggtgttacatggtttttctgtaaattgagcattgaaataaaagcacaacaagatactcttaaggcactaatctgctctttagcaaaatttatgaagagttacaaaaggtttttacttttttacatttctgagtcattttggcaaaataaataacttatggtaa

SEQ ID NO: 8234 - DNA, 694 bp, Homo Sapiens
gataaaatggaccagttgctacagatgctgcaaagtacagaccccagtgatgatcagccagacctaccagagctgcttcatcttgaagcaatgtgtcaccagatgggacctctcattgatgaaaagctggaagatattgatagaaaacattcagaactctcagaacttaatgtgaaagtgatggaggccctttccttatataccaagttaatgaacgaagatccgatgtattccatgtatgcaaagttacagaatcagccatattatatgcagtcatctggtgtttctggtcctcaggtgtatgcagggcctcctccaagtggtgcctacctggttgcagggaacgcgcagatgtagccacctccagagctacagtcttcccccggagcagctgtcttctctcagccaggcagtggtcccaccatccgcaaacccagcccttcctagtcagcagactcaggccgcttacccaaatacaatggtcagttccgttcaaggaaacacatatcccagccaggcgccagtatatagtcctcctcctgccgctactgctgctgctgcaactgccgatgtcactctgtaccagagtgcaggacctaatatgccccaggtgccaaactataacttaacatcatcaactctgcctcagcccggagcagccaacagccacctcagccacagcaaccatgaggcc

SEQ ID NO: 8235 - DNA, 848 bp, Homo Sapiens
aatctgccacactccaggttgatagaaactcaaatctaaaggaaagccaggtgaaaacctgtatctacaagaaagagtaacaacagaaatggcagataatcgactatattttaaagatgtttttaatgtgtaattgtcttaatagccaattgactgatagaagctaaaatattgacattgtagtgagctttataatgtacaaaatataaaacatataataacaatatccaaagaatggggcaggacaggaaaatggaattagactgttgtaaggtttttacagttttgaagtatgaaatgggaagtgtgaagtatgaagtatcaagtgtgaaataggaagtagaaagtgtgatataaggagtgtgaaatgtaaagtgatataatattggctctagacattcataagtgaagcaggcaaacctggtgaacagggtgttcctggagaccttggcgcccctggcccctctggagcaagaggcgagagaggtttccctggcgagcgtggtgtgcaaggtccccctggtcctgctggtccccgaggggccaacggtgctcccggcaacgatggtgctaagggtgatgctggtgcccctggagctcccggtagccagggcgcccctggccttcagggaatgcctggtgaacgtggtgcagggggtcttccagggcctaagggtgacagaggtgatgctggtcccaaaggtgctgatggctctcctggcaaagatggcgtccgtggtctgaccggccccattggtcctcctggccctgctggtgcccctggtgacaagggtgaaagtggtcccagcggccctgctggtcccactggagctcgtggtgcccccgga

SEQ ID NO: 8236 - DNA, 861 bp, Homo Sapiens
  misc_feature (312)..(362): n is a, c, g, or t
atcgctatgtactttgtgcaaaagggtctggctgtcccttgctgttttcatctctgccaagcctattgtgcctctggctgctgtatgtgtgcgcgtgcacgtgtgtgtgtttcatctgttcattcactgcacaagatatttattgagtgcccactacgtgccaggcactgttgctgagttcctgtgggtgtgtctctcgatgccactcctgcttctctgggggcctctttctgtgcttctctttgtccccaaattgctacctctttgtcagtctgggtgtctcaggttctgtgtgtccttgtgtgcatttcnnnnnnnnnnnnnnnnnnnnnnnnnnnnnnnnnnnnnnnnnnnnnnnnnnntggtgtctgtcctttgccccctgtgccctctggattctctgggtctatgtaggcccctggtctgccctgggctcatcagccttcctgacctcctcctgccctccccttcactccctccctggctctgccagtcggttcccacggagccatttttagctctgatcagcatgggaatgtgcctcggcctccaaggggctttgtcctggtgcccccgcccctggtcccaacctgatcccacgagggagttgggacaggaggattgatggtgctccccttcctgccagcgtcagaggccctggagaggggctgtccatggcagctggtctttattcctccctcatgagcacagggtcgggagggtccccattcttggaagaggttgagaagactcctgggcttcagcctctcccaagaagtggggaccccagagtgtgcatgagggaggataaagacacgaatgtaagcctgagggcagaaggggggcagggggacaaaactg

SEQ ID NO: 8237 - DNA, 413 bp, Homo Sapiens
ttagatacagcctctagctcttcagatctgtacatgcagtatttaatttcctcttaaacatgttatgagttctacaaagacaatagtgaaaaaggaaggagtgagatatatgtaaagtagcaaatatgttccttggtttggttaacatcatggatgaccaaaataataaggagctatgactggagtcaggagaagttagtgtaataagctggctacacagaaccccactacttaccagggcatggattgaagaagattgtctactcaaatggcatttagacattagaatgtctgggaaaatatttctcaaagacagcaaaaacctctcaaactgaggagcaacatttattcttactaagcagatcatcaatgtatcatgtgcttggcactcaaggatcttccaaaacagagga

SEQ ID NO: 8238 - DNA, 1009 bp, Homo Sapiens
tgtaacggatcaggtttacagctcttcagaaaataggttgacaaccagtctgtgtcacaataactttgttccttttactattctaggatactatgaagtgtatgttaagaatcagaattatacaattaaaaaaatttatactcagtcaactgtttctcagaacatgccatttttctactacctaacaaactatagctcaatgtggcttttaagacaatgaagttttagaatgaaaaaatgcaacacggcactttcctttggttaagaaatttaatttagtactaaaggtttaaagcagagtgttctgtatgttttatatctattcctaaatacaaaaattttcttccaggtaactttaaaattaatttgaaacataaagttccttcagaaaatcaagagtcctgattgaacaagggaatcatttatttatcacctataattgacgagaagtctgactggaaagtattttaagattaccaaagtgttttgaaaggatcttcccttagacaatctcatggttaaagaaaattgtccattctcctatttagtcctgtggttctctacattagacaaaggccaccgaatatcacacatggagaacttgatgctcagcttccttgtaaaagcttgtagccttaatcagcttatacacaggataaaaacaagtagacaccggagatgaccttagtggcaaaaagcgacatgagacaatggtacagtaacgaaggtctgtacccaaaagtgtacgttcttatccttctggcacttgaagcgaaatctttagccactcggcctgacacctaattggataatttatgtcaatttatatggatacaccttcctgggttttcttttgattagagaattgcaaaacaaaaacattaggaaaccattactgtggcagaaagtctaaaaccagatgacataaaccatacctctggttggttgcatcagatcccacatcaagactaaaccaaacctgatccgttacaccgtgatcctctagatc

SEQ ID NO: 8239 - DNA, 761 bp, Homo Sapiens
ctgctgtctgatcttgaggatccccggtgtaacggatcaggtatcagtgtggagatccagagaggctgcctgccttactaaaaggaaggagtagtttagaggaaatgggcaggagtaagctgagaatgagttgtcagaagtcacaagcccttagagaagggtggcaagaaattagcccactgataagaaaaaggctgaaacaccaatgtgctgccctctaaagtgagaggaacactcagagccagctacaggcaggaggagccctgaggaagaagttgggaatgccgtgaagactatgtgggccatctctccagtcaagggagaaaaggagcccaaaaggggacggcaagccagaagaggcatcggctctgcacaattgtcaccagagtaacttctaaaatttaaaattgggattcattccctagggtgtacagacgggctacaggtgtctgaaaatgttttgctgtcagaagcaaaattgtttgtgtctaggtatttttctggggagagtctctatagctttcatcagattctccaagggaggtctttgcaccataaagagctccaccgagactcaccaccgacatacttggaggaagatattataattatagaggacacaacccatttactgaataatctctcagataagctgatcatcatctaacagagaagaactactgaaggagctgaactaatgctgtcttgggaaatgcctggttccttctcccttcgttataaatctttttggcccggttgat

SEQ ID NO: 8240 - DNA, 371 bp, Homo Sapiens
gagcgatccccggctgtaaaccgtgatcatgtttcaaatgtacggatctatgccagttaacctcaagagccaaggcagcgggagacatggaagctgcatgataacgttgtttaagacaatgggtgatgggcagggcaccatactgggcaagttgttaggggccaaagcactaagtgccctacacattcatggtgtgtgaaatgaaaaaattaatgggaactcatatcaagttgtcccatcaatgctctaagaaggatgagtctcctccagcccaacagattgctcattctggtttacatggggttgaggaggcagaggcgtgctgtcctgcctagaactccaaaatatcatgaactaattaaagaatcact

SEQ ID NO: 8241 - DNA, 744 bp, Homo Sapiens
tagttaacagggagggcctattgagggacctgaacatagtgctgttaatggaaaatgacttgattctttcacccattcgattaataaatctttatggagcactgtttagattctaggatatggtactgcacaaaaaagagaaaaacaattcctgccaagtagattgaagctttcattccagtgaggggagtctagctaggaacaaaacaaatgagtgaaatatttagcatgttagaagaggttatgtgccaaggagcaaagcgaggcagaactgaggggtaaggaaggggtccaacgttaaacagaatcatagaggaaggcctactaaggtgatgtttgatcaaagacctgaagacggtaagggaccaagccatgcagctacctggggaaagaggattcccagcgaaggaaacagcaagtgcaagggcctggaggcaggaacacgggtaggatgtttgaggaggctggtgaagctagagtgaaatgagcacgggagaaggtcagaagggaaatgcgggaggggaggcggtgggcagactgtgcactgtaagatcattataaagccttgacttttactctgagtgagaaaggaagctatcagagaatgttgagctgagaagaatcttgataagacaggtttaacaggctcactctggccgctctgtcgaaaacagactgtaagaaggcaggggtgaacctgttaaacctgatccgttacaccggggatactcaggatcagctatg

SEQ ID NO: 8242 - DNA, 285 bp, Homo Sapiens
cccacctcatttactacacatttttctctctgactgtgttccagccacagtgatcttagtgattttcaagcatatcaaatttgttcctgtgtcagagcccccttctccctggccaagccctcgccaccagatgttctcccactggttcctcatcaggtagctcgtagcttgcctggtatctcaaggaagccttcctgcctataccgccgcatctgaagaggttactgtgtccaccctgtcttgggttcttttccatagcacctatgtcactacctgaaatactta

SEQ ID NO: 8243 - DNA, 402 bp, Homo Sapiens
tgcggggaatgggcacctgcatgaatgtggtagagaaaatggctctgctcagagggaagatacgcatagcaaggcagggaccagaggaatcacaggcgcctggagagcagccgggcaccgcctccagggacctgccggcttccctcagtcctccaggggcccagcactcttcctttaggccctgtgagcgtcccttgtcaggatacattctctcattttgctgaagctgatttgattgggtgtctgtttctcgcagccaaaagagctctgaatgaggaaagtgcttctgtgctaactccccgcgtctcctgaatttcagtcattcatgtacccgcctcgaaatttttgcaatatctgtgtaccaactgtccatttacttaataaagaagttttctttaaatt

SEQ ID NO: 8244 - DNA, 552 bp, Homo Sapiens
  misc_feature (399)..(410): n is a, c, g, or t
cccccggacagatgggggagctttcggaacccccactgggtcactgtggcaaaagtggttggtgtttccggctccttagacaggaactcactgaagaatcggacattttttgatatgctggcaattcattgttacagcccatcatcccagccatcaatccagggacatggggcccgtgcccacggtgggaaggaggaggaggaagctggctttgttctgacgttgggcttcttctgctccaccagtactttctgtgggggaaataggtaaagaaatggctgttcagatgagaagatgtgtcagtaaacttttgctacagtgatgctgcaaaacaaatcactggtgactttcagtggcacacagcaataaacatttatttagctcagggattgacaatcnnnnnnnnnnnnaaagggccaaatagtaaatattttaggtgtttcaggccatacagtctctgaactctgaacttgtagcacaacagtagccttagatgctatgcaaatggaggagcatgactgtgttccaataaaactttatttatggacacta

SEQ ID NO: 8245 - DNA, 183 bp, Homo Sapiens
caaaagcaccttaacaaccaattgcgatgctgtcctgttcctttttactcacacccttctctcctttctcgtccccatgctcccccacctcagtgctccgtgctgtatgcgtgtgctctctgttcttgtatactcaatataagtgaaataaatgtgtttgatgctgaaccataaaaaaaagaa

SEQ ID NO: 8246 - DNA, 518 bp, Homo Sapiens
gcacaaaacaaaaatttattgggagaaagatggctgatgggaggcaagatctggattcaggaatcctcaattttagctctcgctctgtcaccaaaaccctccgtccctcccagagcctcgaggagtttccccttgtgtaaaccggtatcgcgtcccttccagctctgacatcctgcggttctagaatacccattgattgaaagagctgtggccaaacaggaaggacagagcaagagccgctgacaaaggattctgccaagacagaatcccaaggtcacaggagagaggcttggggcagtgaaagccctctcgggtcttggctttggaagtgtggactgtaccagcagatgggcccttgggaagccaacagggaacaattcaaggctggagagaaaaagggccacctttgacccagcagaaggcagaggcgggagaggagggtgaggacgtacaaggagcatcgcaggcgaggaaacaacggccaggacctaactgtggtgggaactgcctttgtctcc

SEQ ID NO: 8247 - DNA, 429 bp, Homo Sapiens
gccgtgcatttgaagctggagctggggcaccgcgcccaggtgaggaaaaaacccaccgtggagggcttcacccacgactggatggagttcgcacgcggtccggagcacagtaacatacagcactttgtggagaaagtcgtcttccacttgcacgaaagctttcctaggccaaaaagagtgtgcaaagatccaccttacaaagtagaagaatctgggtatgctggtttcattttgccaattgaagattattttaaaaacaaggaagaacctaggaaagtccgctgtgacctatgacttattcctgcatctcgaaggccatccaccagtgaatcacctccgctgtgaaaagctaactttcaacaaccccacagaggactttaggagaaagttgctgaaggcaggaggggaccctaataggagtattcatac

SEQ ID NO: 8248 - DNA, 535 bp, Homo Sapiens
ttcagcacataagtcccgacaggcgttgtgatagtaggcactgtcatgatcacagaaatgcaagcttctggtaccatgatcctcaacttagaggaggaagaaaccaagacagagagcttaactcacttctctcagggaaaattaggagttgagcacaggacaggaaatgggctttgccacttttagctccaggcttttctaaccagacttgatttcctcatgttctagaaagatcactaatggtcaagtggaacaagcactacacgactaacccctattggggtttttaacttaagggaggctaatttttaatttaaactgctcgagatatgagttctgcaaaaggtggtccgcatccttggccctctggacattatcactaaattgcttgtgcctgttaacaagaatactgaccagaatgctcttcatgtagcttatacagttggttcacttcatgcggttcttgacatgtttatttctacccttaatgcaatgaaatgtttcattaataaaaaaccactttatataaaaaaaa

SEQ ID NO: 8249 - DNA, 453 bp, Homo Sapiens
  misc_feature (270)..(302): n is a, c, g, or t
tggagatgaatatggttaaaatatataactactgctgcttgagaatagcaagagtattgttttaaaacatattccacccaacttgagagttcttttaaaatgattggccatatgaacatttgtaatcttgccattaggtttggacctgccatattttgttttattctgtgatcctaactagttccttttaataggctaaaatatttatcaatactgatcagactttaaagaaattactttgtaaacctgctgactacctgtatgtattgnnnnnnnnnnnnnnnnnnnnnnnnnnnnnnnnngagattataaaagatgaaaatattgaatccttataatattttaagttgcagaatgtatgttaaaaagtgacttgaatgagatgtatttgtatctagaaattttatttctttttggaatgagattaaaatacattttgaaagttcaaaaaaa

SEQ ID NO: 8250 - DNA, 538 bp, Homo Sapiens
tttttagttgtaaaataatttactaaaggcactattgttaaacatcaaactaataacttgttgccaataaggtacatcgttgtaaacataacaaaattttaagagatacatggctaataagcaaacaatacaatttttagttacagctttcctacttacaagatcatgtcccttccagccattacaagggcatacagtgatgccattgctcccaacagttacctgggaagggagcttggagctcctaattggtttgagatcatgactgccaaggtctttaaaagctccaaaagtcttcactcataaaggtcaattctaaaattgctgggtttagaaatcaagatacttgctttatacttccacatcaaaaagatacggactcaaccccaaaggagctagctggagggcccagccctgacagtatgtccaggcatgaactggcgagctctgctgctagccacagcatcacagagaatggagacattagtcaaatgtggctactgaacattagcaccataataaacatagctcatacagc

SEQ ID NO: 8251 - DNA, 422 bp, Homo Sapiens
ttttacttttaaagatatttaatgatgtttttcaaatcagtacaaaaatttaaatacaaaaatgatttgctattgacaagtctcaaatctgtcatgggaactcaaacaagttaccagtctgttcaccgttcattgtattctataaaatatttgataacagtcacccactacagacattcttttcccctgtgggatgtcatactgcattaaaactctgtatttacataacaataatatgagtttggtccatttcacatggaagaattctggttaattttgaactaaatagggattatagcacaatccctagactttagaacacgtggttgtttcatctgcttttacactaatatgttaacatgttgtgcagcactcaaaagggaaatacaggcacatagataattatttaaaactctttttta

SEQ ID NO: 8252 - DNA, 385 bp, Homo Sapiens
tcttactaatcagaagagagctggggtagaagccccatgtttgtattccatgaaacacgtcgggttggagtaaaggcaaaaacagctagacacaccaggtgtgtctgtttgacatttataagctggcactcatcaacactcctgtttctcctttctctgggacgtgtggattaaggggtgtgagttgtgggaagaattgccctcgtacctcctggatttattatttttctcaaataccaaccagtaagatcccaaataacttgagaaaaattgtttcctgatctgtccacttctggtgtcaaagattttactcatcttcttagtacattctatgtattttatatgtataattttatacaattaaaaatagatttttgtctagtga

SEQ ID NO: 8253 - DNA, 504 bp, Homo Sapiens
gtaaattttagaagtttctgctctactaactgtagatatttatgactctgcgagttatctatttttataaccacctgtggtccattgttcattttaattcacatttcttatgaagtatggtaacagggagggagacacctagattagcagctcaatttgtactacttcagccaatctgtgaatgtaaaaactacactgttgccttgctaggatccaccctcctataatatggaacaaatatctgaatgaaatccaccctaggagacggagtcaaactaaacttgtggtttttcatttaacttttgactacagcatggccccatggcatccacaccaagagggtgttgtgatgaggtgccggtgtgcaaagggaactttagtttttccactggttcttatctgctagccttttacatacatgtgtactatatttgtttatagactgtaggtggatatataatttaaaagcttgatttaataaacatttaaccccctaaactggca

SEQ ID NO: 8254 - DNA, 577 bp, Homo Sapiens
acacgaactggatccaaaaaccattcaggccaagtgaccctgacatgtgacatctacctcccgacctaccaccccactggctggttccagaacgtctctcacctagaccttgcctcccctcctctcctgcccagctctgaccctgatgcttaataaacgcagcgacgtgagggtcctgattctccctggttttaccccagctccatccttgcatcactggggaggacgtgatgagtgaggacttgggtcctcggtcttacccccaccactaagagaatacaggaaaatcccttctaggcatctcctctccccaacccttccacacgtttgatttcttcctgcagaggcccagccacgtgtctggaatcccagctccgctgcttactgtcggtgtccccttgggatgtacctttcttcactgcagatttctcacctgtaagatgaagataaggatgatacagtctccataaggcagtggctgttggaaagatttaaggtttcacacctatgacatacatggaatagcacctgggccaccatgcactcaataaagaatgaattttattatgaaaaaaaa

SEQ ID NO: 8255 - DNA, 614 bp, Homo Sapiens
cgaccctgccctccaagatgctggtgatagcagcagaaaggagtactttatttgagggacaacagacttcacttccctgaatgcctcccccatctccatcaggaaaaatacaccccatcgcccagcacccctgctgataccaccagacagagagagagagcacttgattcttcccgagatagccacctggaaacactaggtgcctgcccagggaggaacggaggaggactcgcgctacaagaggccactcccagggacccagggaggcgatggccaccccagaggccaccttttgctccacggaggtgggagaaaatctgggcacatggggccccctgggcagtgcaggacaacatcagctcactggcaggaaagtccttgttgagggtgagggggtgctggggtacccgggggctggggaagcaaggaaataagtcatctgtatgctgactggggataatggcatcaaatgtcagtccttgacatttggggggaacagcaggtgccagagctaaaaggtacctttgtctgccattgatccagctcagaacgattggaaataaatttgaaatgtaacctacagagaaacaaaccacaccaacaaagaaccctgt

SEQ ID NO: 8256 - DNA, 386 bp, Homo Sapiens
ttattttatgtgtgattctaattaaaagaacccttaattttcacatttgcaccatggaatactatgcagccataaaatagatgaaataatgtctttgcagcaacatggatgcagttagaggccattatcctgagcaaattaacacaggaacagaaaatcaaatactgcatgttctcacttataagtgggagctaaacattgagtacacatgcacacaaagaggggaatgatagacaccagggcctaattgagggtggagggtgagaatcgaaaaactacctatcaggtgtatgcttactacctgggtgatgaaatcatttgtacaccaaaccccagtggcatgcaatttacccatgtgacaaagctgcacatgtacccccgaacct

SEQ ID NO: 8257 - DNA, 577 bp, Homo Sapiens
cgcatggtatctttctgttgtgtgacttctacaaatgtaattttaaatgaaattaagttaacatggattcattacgttcctggccctgtagacacgtgtaagattatttaaaattctttcatttttttctgcctcttactatacgactgtagtgcaacaaatattttaaagcccccttttcttctttattttcattagttgtacattgatttcagtgtcaacacatttaaagattcaattcatgttgcacagtggcttacatgaacgtgaaactgtgatataaggttttctttcatactcataattagcccaaaacagttgccaaactttgccattgtgctcctgcatttgtgtttgagctgctatatatttgtggaaattacactgaaagttgactaagagactattgaaaaagcatgaataattaaatatacatgtgagagacatctcatctgctgtattttacttagtgaatattgttcactcttccgtgtctgatgtcttgctgaatgctgtgactcatagtttacttttgttcaaaatagtttgcactttttgttaataaaatcaacttgag

SEQ ID NO: 8258 - DNA, 468 bp, Homo Sapiens
gcctcttcctctgccccgcttcggccgcctcccgcctctcagggtcggggttgtctgtccccttcgctgtcacatcctccgcacccagcgcttggaaggtgctccatcacggtgacagacaggtgccaagcaggctggcgtctgggaggaacttcggagccggctctccctaggccccgagcttggccgcatccgtccttactctggtgaccctgggcaggtcactgactcttcgggcgctttggcatcctcgtttgaaaggggctgttatcctgcagccttgctggtcggtgagggtgagggtgagagggatctgtgcacctagcaccgtgcatggcacgtggtaggcgtttggtacatgggaatcgctgttggggtgtcacctccccagaaagttctcggcttcagtaagcgcgtcccctgccaggcgccctggcaatgcagaggagtcaccgagctccgcctttg

SEQ ID NO: 8259 - DNA, 454 bp, Homo Sapiens
agatttggtatctgtttctcctccttaacgcccattttcctacccacagcagcaaatgacaacgtgtctgtccaggtctgtccccctgctcatcccaggatgccactcacatttttttcttcttgttaccttgaccacgctgtacagtaacatccaagagcccattctacagtgggtggttttggtctttttataactttttctcaaagtcactgatgtttgttcctgttaaatgtatagcattgtaatgagagcccatcaaatcctgagtgtcagtttgttgtccctattgtagatgaaatagtgatgtagcaaaaacctagtaaattctgaatgcttttccacgtagacttatctggaatgtgaacacaactctttggttaatagtaaatgcttaactgtagtcctgagtaggtgcatttctgtctgtctcaataaattttactttgtctgc

SEQ ID NO: 8260 - DNA, 784 bp, Homo Sapiens
gggaacgtctactgctaaggggttgggacaagaagagactccgtgagatcagcagactcgtgtttaaggagagaatgcctgcctgcaacactcatggagagggacacttcctggccccacctgctaaatacctccaaactctgggcaggcgcctgcattctcaacacaggacttcccttaacagtttccggatcagtgaccaccaccacgttcaggtttctgaatgcagacccaccacgagggatggattccacccgcccgccctgctgcagatacatgcggcacagcaggcacgtgcctggagagaacagctcctgagcacagcacccttggagccctcaccccactcacgatcctcaccagtgctgatgatgccgtcatgctgctggcctgagacagtatcccagctacaacaggacgacaccgggttcaggaatatgtggctatcaccttgagcactgacagtggccttccaggctagttgccttccaaacgcaggtagccgacctgcaggagggcctacaaacgggcccagcaagagctgggcaacagctggcttgtgaaatgagacaccttgaccaatatgctttgggtggacggtctcctacatgttcagtggaggccaccaggagcatccatgagcggggaaggggtccacacccttacatggcaagttgatacgatggggtgcttggtggatgggccatggaggtccgtgagctggaactgggcacacgccatcccagaggctcaggatgccctgtgacagaagtctgtccgctac

SEQ ID NO: 8261 - DNA, 1028 bp, Homo Sapiens
cgggtgcgcggcgtggagcggcagccggtctggacgcgcggccggggctggtgggctggtgagcgcggcgcgcaagatctccccgcgcgagagcggcccctgccaccgggcgaggcctgcgccgcgatggcagagatgggcagtaaaggggtgactggccgggaaagatcgccagcaacgtgcagaagaagctcacccgctgcgcaggagaaggttctccagaagctggggaaggcagatgagaccaaggatgagcagtttgagcagtgcgtccagaatttcaacaagcagctgacggagggcacccggctgcagaaggatctccggacctacctggcctccgtcaaagccatgcacgaggcttccaagaagctgaatgagtgtctgcaggaggtgtatgagcccgattggcccggcagggatgaggcaaacaagatcgcagagaacaacgacctgctgtggatggattaccaccagaagctggtggaccaggcgctgctgaccatggacacgtacctgggccagttccccgacatcaagtcacgcattgccaagcgggggcgcaagctggtggactacgacagtgcccggcaccactacgagtcccttcaaactgccaaaaagaaggatgaagccaaaattgccaaggccgaggaggagctcatcaaagcccagaaggtgtctgaggagatgaatgtggatctgcaggaggagctgccgtccctgtggaacagccgcgtaggtttctacgtcaacacgttccagagcatcgcgggcctggaggaaaacttccacaaggagatgagcaagctcaaccagaacctcaatgatgtgctggtcggactggagaagcaacacgggagcaacaccttcacgggtcaaggccagaccagatgacaaacgacgccctgcaaaaagggaacaaagagcacttcagactccagatggctcccctgacgcacaaccccgagattcagagtcaaccacgagccagaaccggcgagggggccagaccgggggcaccatca

SEQ ID NO: 8262 - DNA, 649 bp, Homo Sapiens
tcatctagaggatccctttcgggggcggtgctccgctcactgccctcaggcactccacggtcatgccaaggcccccagaggcgctgctgctggtggactgtgttgcggcggtgcgtcaggtctgagaggctggaggagcgcgagtgctctgtgctgtagccggagatcttggactgctggctggcatagctggagttgcgggagtggccagagtggaacacctcctcagggctggacaggttctggtcgggttcctctggcagccctgagctgagaatagtgggccgagccttggggggccgggacccagtcagggagttggtgctgctgcccccactgctgtgccccaccacccttacacgtcagctgcagggaggaatcctggcctgggatggagatggacttggcagtcgatggtggcgtcttgaagcagggatctccagagagcaggaacataccaatggtgaccttaaggatggagttgtcctggcgagtgttcttcgtgtcatatccctcgagcaggcagcagcgcaccggtggagcccgagcccgaaaactcggccaggttcaagtcagcgaagcccagtttggaataagccttcccgcctttcagctccttgcgcacagacacgcggaagacacaggggtc

SEQ ID NO: 8263 - DNA, 1073 bp, Homo Sapiens
ggggcacagccgccggggcggagcacaggcacgaaaccgccggggccagcagggcacggcagactgggtcgcagtcagcgtccacgtgccgcctcacacgggcactcctgcagtccatgccgacgtgtggcccaccttcactggctctccgtgggccccagacacctggggcagcccgtggcacgcagacttgggcactggtgctgaagagggtcatgccctccggacagaagcagccttcggtgatgggccggcctccggcagagccccgaggctggcgctgtcattcccgtagcagtaggaggggttgctcgggccgcagggctggtacaccttgtcggctggcaaggtgaatgggcacatgtggcccggtccggcctctccaatcgatgcagatgtcgtgggacgcgcagagtgccgcgtacagctccaggctggagcacaccacatccaggtccgtcatgtggcaccggtcaaagacgcagccctcatagaacagcagtggggggatcacagtgtggcacggctcaaagaccttgctcagaatcagctggcagatgggtgatggcaggcacggagcaggcggtgtggtgggcccgaccgtggtagacccaactgtggtgggcccgaccgtggtagacccaactgtgtgtgggcccgaccgtggtgggcgtcgggtgaggccggtggcaggctggctggtcagggatgctcacgttccagaggccggacatctcggagcaggaagcgaccaccgtccccctaggcgtgcggcactcatccttcctgtcgttggtgcaagtgccgcactggccctcggtgttgttggcaaacttgctgaagggcacctccacggagaagatgaggccggagaacatgacctggactcccagctccgggatggtcgcgtacatcttgacgccgatgcgcgagaccacgatgccgtttttccgaagccgggctgcgacgcgtggtcgacgatatcccggaatccgaccgtatccaggccgtgggcttttgttgttaaaaccgccgccgggttgtactgagtgtgactcacgtagtgctgtggt

SEQ ID NO: 8264 - DNA, 961 bp, Homo Sapiens
ccatgggactatagaacagtctttaaaaaagcaggctggtacggtcggatttcccgggatatgtgacccacgcgtcgccacgcgtcggttatttgatgtgctaatttgggcaacttaatttacattctggcagtcggtgtagataactaaaagcccagttaagtatttctaatttcaggctactgaggccatgcttgggatgttgtttgaaagaaagaaaaaatacacttgacatatttcacatttctgtaccttcatctttacttccaagtaaacccgtggatgatttgatgagggataaatgaacctatttcttttacacacataccaaggacatgcttgtggctaaagtgagttgataatgttgtgcaaaggatagttgtcaccaactcatttctttatggtccataatgaaataaaaattttgtatactgttaattctgtaaacagatgcatgttcaaaagatctatgatggtcttgtaatcttaatctaatatattttagatattcttaattttttccctcttggggaacacatttagtatagtgtagaaaatacttacatgacattttcatataaggttatataacttttcatacataaacatgaaacttgtcgtagaaaattctttaaaccaaacatttaaatctaggacttcaatttaatttgttccttgaatctattcatgtgggcctttaacaaaatattcaaaaaaacccatttgctaatatagcattaaacatacttgggtactgacagactcttgagtgtctatattaccaacttgtatcctattcttctctcggatgtggtgcactaaatccaacatggctttgcaccatttaagccattttccttgatttgcccccactccataagtcacgcgcttgcccacctcgctctacaaaaccaccaactcgtcacctcaaacgtccgcagcacgaacggccacaacaacg

SEQ ID NO: 8265 - DNA, 1033 bp, Homo Sapiens
  misc_feature (34)..(34): n is a, c, g, or t
  misc_feature (66)..(66): n is a, c, g, or t
  misc_feature (843)..(925): n is a, c, g, or t
aaccccccgacccgcatcagtgtaatatgaccanctgcttacaaaagcaggctggtacgcgtcggnatatcccgggatatcgtcgacccacgcgtccggtgatctggaatggcccagatcccttacatgtcaaactgcaaaagaaagaaaacacgccaagaaaatgagaaaccagcctaccaatgtgactctgtcctctggcttgtggctgacagaggtgtaaagcaccacagtggaggtgaaaaacctttccaagctcaaaaacaagagcctcatcctggaacttcacgacagcggcaaaccagagtcaaaccccattctctgcctgaccctgaagtgaatgagcagtcttcctccaaagggatgtttagaaaaaagggaggatggaaagcaggtcccgagggcacgtctcaggagatccccaagtatataactgcttctacttttgctcaagcacgagctgctgaaatcagtgctatgttaaaagctgtgacccaggaagtcttcgaactcacggcttctcacgactctgcacggccactgcgacgaagagccatgagccacaacgtcaaagccttcccagacggttacggagatgcccagaaagaggccggacgaacagccgtacctcagacgacccgaacactcccccccactacacgccatcaccgctcacccactctcgacctgcaccccggacccccgcacccaaccgccgcacacaaagacgaacatcggcacaccactcacctcgccacgcccagcggcccctacggtcagacgtggggcactgctggggagaggccactcgccacagcacgagccgctcccgaccctgacgannnnnnnnnnnnnnnnnnnnnnnnnnnnnnnnnnnnnnnnnnnnnnnnnnnnnnnnnnnnnnnnnnnnnnnnnnnnnnnnnnntccgcacccggcgtgacgccgccccacaccgcccacccacagccgccccataccaggccgcctacgccggccccaggcacgaacggccaagccccaccgcccgcaaac

SEQ ID NO: 8266 - DNA, 1023 bp, Homo Sapiens
tcgatagaatatagccagcgtgacaaaagcaggtggtacccgtcggtatcccgggatatcgtcgaccacgcgtccgcgttacgctgtggggatttttcccaggctatttggagaagaggtgtatagaaatgaaagaagtagcttttcctccttcgacttcttggcagaagatgcctccactttaatagtaggacactgggatggaaatatgtcactggtggatagacggacacctggaacttcttatgcagaaacttacccagttcttctatgggaaaacatcaagaactgttcatgtccgacccagtgcatagacagtcatttatatcactgccggattgcagggatactcgatcatttcatgcatgcaaggcgattgaattccgaggagcaagtcaagcctttgcatattctttgtactgcaacatcacaaagagcattgcttccgcctatttttcacctcttactggtaacagagtggtgaccacatgtgctgatgtaatctgagaattttgacagcagctgtatatcttctaagattcccctcctcaccaccatcaggcacaacactttcactggccgatggctgaacaggtaccaagccatgtgggatcctaaacaagaagactgatgtactatacttggcagcatgccccatccacggacgggtagaaatctcaccatgagacaggataaccaggttgcattctttatcggtcggagaatacctctgtctctgtagtgtctccatgaattgccatgcacccaacctcggtatatggttggctcgcgaggtaatctccacgcgggacagatcacatgcttttatatgtaatgatcctcaagctgcatgagtcaatcggtcataggcacactcaatcttgttccaagtgaccccatgtctaccggagcctagtaactcggcatgccatacgctgtgcattatgatggtaagtgtcgttacattcttagctattatcaacactagctcttattactaagactataagcagagtgagtcca

SEQ ID NO: 8267 - DNA, 501 bp, Homo Sapiens
gcccggtcattccaccatcaaggagcactcacttctccaaatgacgcaaccagtcatctaagatgaaggccaaaaatgaaaccctctgacctgtccaaggtctgtatcttcagcatctctggcaacagaggttcagtctaaataacatcctctcttgaagttctcatttgtaccaccagctacttcagagtgaagaaagaaagtgtctttcgccactggttcttaaggagtggatctctggtccacatctcccaatgctgcttagcccaggaaatgaagacagctgacaacacagaggaacattaacgaaaagaacaaaccccaaacttgaaatgcataactgggactgctggaatgggccaaggcataccacggcaggtcactgtcaccagaagggcgcctgtgttttagaagggagtggccaacaccgtctggccaccctggaaggagccaacgtgacagctaagaacactagacaagcatcctagccttctcacccat

SEQ ID NO: 8268 - DNA, 995 bp, Homo Sapiens
acgatagtgaatatagaccagtgttaaaaaaagcaggtggtacggtcggaattccgggatatgtcgaccacgcgtcgggcggcgctggtcgtatcggggcagcggagcagggcggcgagacggcctggcagaggtcgggcccctcggggccgcgtggccaatcagatcccccctgagatcctgaagaaccctcagctgcaggcagcaatccgggtcctgccttccaactacaactttgagatccccaagaccatctggaggatccaacaagcccaggccaagaaggtggccttgcaaatgccggaaggcctcctcctctttgcctgtaccattgtggatatcttggaaaggttcacggaggccgaagtgatggtgatgggtgacgtgacctacggggcttgctgtgtggatgacttcacagcgagggccctgggagctgacttcttggtgcactacggccacagttgcctgattcccatggacacctcggcccaagacttccgggtgctgtacgtctttgtggacatccggatagacactacacacctcctggactctctccgcctcacctttcccccagccactgcccttgccctggtcagcaccattcagtttgtgtcgaccttgcaggcagccgcccaggagctgaaagccgagtatcgtgtgagtgtcccacagtgcaagcccctgtcccctggagagatcctgggctgcacatccccccgactgtccaaagaggtggaggccgttgtgtatcttggagatggccgcttccatctggagtctgtcatgattgccaaccccaatgtccccgcttaccggtatgacccatatagcaaagtcctatccagagaacactattgaccaccaagcgcatgcaggctgctcgccaaagaagcccatagccactgcccgctcagctaagtcctgaggccttatctgggcccttgggccgccagggcagcctaagacctggagcactggatatcgaatcg

SEQ ID NO: 8269 - DNA, 988 bp, Homo Sapiens
tggtacggtccggtacccgggatatcgtcgacccacgcgtcgggagcagacgatccgctagccacattaggcgctcggtctctgcgtccggcccctcccgtgcctcagagacttgcgctccccaggcccgagcccctgtcggcccatcctcgagcccgtgtggctcgcgaacctctaactccagccgctgcagccccctcccaggcccggcgtccccgagccccgcgggcgccgcgcctgcccttctttggctacgctgcagccgcggtgtcggcgagtcctcccgggttgcccccgcgggcgtcagagggagggcgggcgcccgcgtggtgacggcgacgcctgcagcccaaggagcgctccactcgctgccgccggaggggccggtgacctcttggctaccccgcgtcggaggcttagatggctcaggcgaagatcaacgctaaagccaacgaggggcgcttctgccgctcctcctccatggctgaccgctccagccgcctgctggagagcctggaccagctggagctcagggttgaagcttcgagagaagcagcaactgctgttgagcaagagaaagaaattccttctggaaatgatccacagtatccaaaaatagccaggacatgaggcagatcagtgaccggagaaagagaagaattaaatctgactgcaaaccgtttgatgggaagaactcttcacgttgaagtgtcagtagaaacattagaaaacccccagagcagaatccctaagcatgccacaggattatgcgaccgggcactacgttcttgtgattgggaaaggccagcagtatttaatgtgtctacagcactgtcacctgggtgccatggccatgaccactttcaacctagatggtggctcaaacaagaattcacagttaactgtcaacataacttgcagccaccaaattaggggtcacccgcagtgacctctccatacacagggaaaccccactcgaccccgaaca

SEQ ID NO: 8270 - DNA, 405 bp, Homo Sapiens
  misc_feature (278)..(278): n is a, c, g, or t
tacaggacttatcgtaccgcacgctaagcgatggcatcttccacacggcgcttctttgtacagaggatgatgcggttgaagttggcgtagatgactgatgaccccaggcgcttgaactccagcgatgagctgcaaggaagagcttctttcatcatgttgtggagtgtgcggtgcaggccaggggtcatgaagcagagaggatggcgaccgaagccagcggtagaaagtgcatcaccttggttgtctgcatagactgttgtggtactggggtgatctcncttcaccctagcccacgaccatgctcttcaggatccccttccattcatttgtgcgtatgaccacaaaggcagcccctctgacctcagtttccttatctgaaaaacagacaataaacgctccccgttc

SEQ ID NO: 8271 - DNA, 550 bp, Homo Sapiens
gggagagctaccatgagcaagcggaaccaggtatcgtacgtgcggccagccgagccggcgtttctggcccgcttcaaggaacgggtcggctacagggagggacccaccgtagagactaagagaattcagcctcagcccccagatgaagatggggatcacagtgacaaagaagatgaacagcctcaagtggtggttttaaaaaagggagacctgtcagttgaagaagtcatgaaaattaaagcagaaataaaggctgccaaagcagatgaagaaccaactccagccgatggaagaatcatatatcgaaaaccagtcaagcatccctcagatgaaaaatattcaggtttaacagcaagctcagaaaagaagaagccaaatgaagatgaagtaaatcaggactcggtcaaaaagaactcacaataaacaaattaaaaatagtagcctcctttcttttgacaacgaagatgaaaatgagtaagtgtaaatattttgaatttagtctactttgaaagtatatggagtgttcattaaaatcacattttttcctatc

SEQ ID NO: 8272 - DNA, 405 bp, Homo Sapiens
gccgtctgcaagctgggttagagagaagccagtagtggctcagcctgagttcaaaaacctcaaaactggggaagctgacagtgcagccagccttcagtctgtggccaaaggcccaagagcccctggcaaccaacccactggtgcaagtcctagattccaaaggctgaagaacctggagtctgatgtccaagagcaggaagagtggaagaaagccagaagactcagcaaacaaggtagacagtgtctaccaccacagtggccataccaaagaggctaccgattccttcctgctacctggatccctgaagttgccctggtctctgcaccttctaaacctagttcttaagagctttccattacatgagctgtctcaaagccctccaataaattctcagtgtaagctcc

SEQ ID NO: 8273 - DNA, 457 bp, Homo Sapiens
ttgcatatggcaaggccaaggggccaggcttgttgcacgtaagcgcctcccgcagaaaccagtgaggccggagttccagaggaaatgatgtagggacagaggcagagggcctccaggaggcaccagccccagagtcttccctagaatcagactttaagcacaagcagggagggaaagcacttgggcagtgcccgtccctgcatacctggcctctgctggaacccacgcagggacaggacacttctttatcagcaatcctgttcctctcctgggcagcttcaacctgaacatcctccttcaccttgagctaaaatgggtttcttgtcacccttgcccatcaaacctggccttgccctcaggaaccacacaggacaagcctaatacttccttcttgtggcaacactttagcaattgagacctggctgtcaggtcctccaaataaacatttgtgactgcg

SEQ ID NO: 8274 - DNA, 471 bp, Homo Sapiens
gtcgccctctgtcccctgctctacctctctgtccttgtctggctctcccgtcaccctccctgcctctgtctctcttctggcctgagcctgggcccagccacctcctgaccggagggaatcggtgacggagcggggccaagggaggggtccggagggagtcagggatggagggcagagggagtggatgtgggggtttgaggacgtgtgacaagctccagcaggggtgggggccgggctgagggtgggggtgcgaggcggtcactcccatcgtgcccctggccgtccctccactcacccacacctggcccagtccacgttgaggtccaggactgggaaggaccgggtgagtgcaccggggacccaggccaggtgccccccggagcctgctggggtggccagagcaggagggggtgtgtttcctttttgtgggtgttgcatgcaaatcaagtggacaagaaaaaataacaaaac

SEQ ID NO: 8275 - DNA, 430 bp, Homo Sapiens
gggaggagggcggaacccggaaggcacggcgctcagctcaggaccgcgcgccgtggtctgaggtccgcggcagggtcccgcatggcggcgcacaggaagcacgtgtttgtggagaaggtgctgcagagactttttcctcctgttccaagtggccaaggaaagagggaaccccagacgctggccgtccaaaatccaccaaagaaagtgacctctgagaaagtgagccagaaacatgctgagcctttgacagacactggctctgagaccccgactgcccgacggctctacactgccagcgggcctcctgagggctacgtcccctgttggccggagcccagcagctgtgggagccccgagaacgcctccagcggggatgacacagaagatcaggatcctcatgaccagccaaagagaagaagaattaggaagc

SEQ ID NO: 8276 - DNA, 457 bp, Homo Sapiens
  misc_feature (206)..(385): n is a, c, g, or t
  misc_feature (392)..(394): n is a, c, g, or t
ggaatgtagccccttattttgccagtgtgaagcagataccctgcttttctttacagtagcggagtcagcttaagagctttaaaggtcctaaacttcaaaaacattacagtgccccatcctccgccttaatgtaattcaaaatacaaacaatactaaactgtaaaataaatgtaacaaagtccaataaagtttttatttttttctcnnnnnnnnnnnnnnnnnnnnnnnnnnnnnnnnnnnnnnnnnnnnnnnnnnnnnnnnnnnnnnnnnnnnnnnnnnnnnnnnnnnnnnnnnnnnnnnnnnnnnnnnnnnnnnnnnnnnnnnnnnnnnnnnnnnnnnnnnnnnnnnnnnnnnnnnnnnnnnnnnnnnnnnnnnnnnnnnnnnnttttttnnncccctcggcccccaaaaaaaatttttaaacaactttttttagggggcggcggcccccccaaga

SEQ ID NO: 8277 - DNA, 154 bp, Homo Sapiens
gggagctattaattaagaaaatagtttgttccttggtgagaagactcaatgtaaatatgtcagttttctcctgacttaagtcttcaacacaggcctaataatattgcagtggcaaatgattgccacgggcaggaggggatttggggaagtggta

SEQ ID NO: 8278 - DNA, 600 bp, Homo Sapiens
gaccgcaacctcatggtgtacatgtacctgcccgaagccaaggagagtttcgggggcatgcgcctgctgcgtcgggcagacttccacgtgggtgcccacgtgaacacgttctggaggaccccgtgccggggggccactgaagggctcagcaaaaagtcggtcgtgtgggagaataagcacatcacgtggtttgccaccctggacggcggcatcgggctgctgctgcccatgcaggagaagacctaccggcggctgctgatgctgcagaacgcgctgaccaccatgctgccacaccacgccggcctcaacccccgcgccttccggatgctgcacgtggaccgccgcaccctccagaatgccgtgcgcaacgtgctggatggggagctgctcaaccgctacctgtacctgagcaccatggagcgcagcgagctagccaagaagatcggcaccacaccagacataatcctggacgacttgctggagacggaccgcgtcaccgcccacttctagccccgtggatgccgtcaccaccagcacacggaactacctcccaccccctttttgtacaaaacacaaggaaaaacattttttgcttgaata

SEQ ID NO: 8279 - DNA, 1074 bp, Homo Sapiens
cctggtacgcctccggattatcccgggatatcgtcgaccacgcgtcgcacctcccggcagacctccaatcccaacggaccaaccccatcaataccaaaccaccgccagagtggggtccccacgtgaccctgacggatgcacagactcgagtagcttccccatcccaagggccaggtggggtcgtcgtcccccaaacgctcagcgatgaccgcctgtacacacagcatctgggaccttcactgcaaaggactgttcatgacatggagcaattctggacagcagcagtatgacatttatgagacgatggttccacccaggccagacagcctgacaggcttacggagttcctatgctagtcagcatagtcagcttgggcaagaccttcgttctgccgagtctcccgacttgcacattactcctatatatgaggggaggacctattacagcccagtgtaccgcagcccaaaccatggaactgtggagctccaaggatcgcagacggcgtagtatcgcacaggttcaggtatcggaaatctacaaaggacatccagccaaggaagtacccttacataccaaagacatacatcatgctctgaagcacaacagactacctacgcggagccctacaggcctatacaatagcgagtgcaagagtgcaattaatcaccaggcttcagcatgcaggtgccggctggatgacatgggcaccaaaaagaatcacacatcaatacgacaggcatacagaaggacccagaggagctggcctggcgtgatcctgagtagccaggaaggccattcccatgctacagcaaccagaacccaaagagaacagggagaagtggaggggcccttccgtggacaagcctggagtaccttgggcgaccaaccaacagtcgaatgactggctgatgcgataggaaataaggcgaaatatacagcataattggacatgacacttctgtgaccaaacaaaatatggaacgacgaaaggaaaagatgaaggtgacataatgaatgaactgatgtagtgaaggtcatcgagtgaacatagtaatcgaaaatatggcggcaacc

SEQ ID NO: 8280 - DNA, 1034 bp, Homo Sapiens
tcttagtacatatgaccggttaaaaaagcaggctgtacggtcggttcccgggatatcgtcgacccacgcgtcgggagaagtcagagacaaatgggatactgtttgtggcaagtctgtggagcggcagcacaagttggaggaagccctgctcttttcgggtcagttcatggatgctttgcaggcatggttgactggttatacaaggtggagccacagctggctgaggaccagcccgtgcacggggaccttgacctcgtcatgaacctcatggatgcacacaaggttttccagaaggaactgggaaagcgaacaggaaccgttcaggtcctgaagcggtcaggccgagagctgattgagaatagtcgagatgacaccacttgggtaaaaggacagctccaggaactgagcactcgctgggacactgtctgtaaactctctgtttccaaacaaagccggcttgagcaggccttaaaacaagcggaagtgtttcgagacacagtccacatgctgttggagtggctttctgaagcagagcaaacgcttcgctttcggggagcacttcctgatgacacagaggccctgcagtctctcattgacacccataaggaattcatgaacgaaagtacaaagaaaacgcgagtggacgttaactcagcactagccatgggagaagtcatcctgggctgtctgccacccccgattgcatcacaaccatcaaaccactggcatccaccatcataccgagcctcgacttccacgcaggtcctgacatgggctacagcagcaccagcagccgtctgaaaccgggccttgacagaccgctggctaccgcgaagacccgcaacactaccggctggatcccgcggcccgcgaccacctcatcacaggacacaggagccaaccgcacactgacgacgcaacccacacgaccaaaactgtgacgcaacacaccacacccatggccgccccactcccagaacacccccccgctagcgcccgaaaaccacaaccacacacacaacgagaacaactcg

SEQ ID NO: 8281 - DNA, 953 bp, Homo Sapiens
ggatatcgtcgaccacgcgtcgcagccatggccaagtacgtcaagatcctgtatgacttcacagcccgaaatgccaacgagctatcggtgctcaaggatgaggtcctagaggtgctggaggacggccggcagtggtggaagctgcgcagccgcagcggccaggcggggtacgtgccctgcaacatcctaggcgaggcgcgaccggaggatcgccggcgccccgttcgagcaggccggtcagaagtactggggccccgccagcccgacccacaagctacccccaagcttcccggggaacaaagacgagctcatgcagcacatggacgaggtcaacgacgagctcatccggaaaatcagcaacatcaggcgcagccacagaggcacttccgcgtggagcgcagccagcccgtgagccagccgctcacctacgagtcgggtccggacgaggtccgcgcctggctggaagccaagccttcagcccgcggatcgtggagaacctgggcatcctgaccgggccgcagctcttctccctcaacaaggaggagctgaagaaagtgtgcggcgaggagggcgtccgcgtgtacagccagctcaccatgcagaaggccttcctggagaagcagcaaagtgggtcggagctggaagaactcatgaacaagtttcattccatgaatcagaggaggggggaggacagctaggcccagctgccttgggctggggcctgcggaggggaagcccacccacaatgcatggagtattatttctctactcgtgtatgtctttcggatccccgacccggcgggggtgtggtgctggtaaaagtcctgccctgttgggggccaacgccctcctttgcaacgtgccacggccgccccccagatttcccaaccgcgctgttggtcgccttgtccttcttggccgctctcggggcctttgcccgccggggcgcctcc

SEQ ID NO: 8282 - DNA, 487 bp, Homo Sapiens
  misc_feature (46)..(46): n is a, c, g, or t
ccataggactatagaaccagttttaaaaaaagcaaggctggtacgngtcggaatcccgggatatcgtcgacccacgcgtccgaattcagaaatcactacaagcagcattaagactgaagttggaatattctgttgaccataaaacctgatatcattctgtgtatatagaatgtaaaaggaatattacagtgttaactgccatatatgtaatatacacaaactcaattagcattgtaatggccaaatgcattcccccatgcttttctgttttcaaaaaaattgaaaaacaaatcaactcttatccccaacagctgcctaattttaggagtctgaccctccacatctcactggtgtgggtgcatggggctgtggagtgggtgtcagtatggatgtgtctgaatgtgtgaggccttggaagggactctttctgcagatactgtaaatacaagtaccattttaataaagcatgtacaataaaccaaaaaaa

SEQ ID NO: 8283 - DNA, 1720 bp, Homo Sapiens
  misc_feature (999)..(1031): n is a, c, g, or t
  misc_feature (1033)..(1081): n is a, c, g, or t
  misc_feature (1137)..(1146): n is a, c, g, or t
  misc_feature (1186)..(1201): n is a, c, g, or t
  misc_feature (1243)..(1251): n is a, c, g, or t
  misc_feature (1292)..(1303): n is a, c, g, or t
  misc_feature (1494)..(1494): n is a, c, g, or t
  misc_feature (1688)..(1688): n is a, c, g, or t
ggtctgtgcggtggttgtggagtacgagaccaaggccggccgcatcaacaagggcgtggccaccaactggctgcgggccaaggagcctgtcggggagaacggcggccgtgcgctggtgcccatgttcgtgcgcaagtcccagttccgcctgcccttcaaggccaccacgcctgtcatcatggtgggccccggcaccggggtggcacccttcataggcttcatccaggagcgggcctggctgcgacagcagggcaaggaggtgggggagacgctgctgtactacggctgccgccgctcggatgaggactacctgtaccgggaggagctggcgcagttccacagggacggtgcgctcacccagctcaacgtggccttctcccgggagcagtcccacaaggtctacgtccagcacctgctaaagcaagaccgagagcacctgtggaagttgatcgaaggcggtgcccacatctacgtctgtggggatgcacggaacatggccagggatgtgcagaacaccttctacgacatcgtggctgagctcggggccatggagcacgcgcaggcggtggactacatcaagaaactgatgaccaagggccgctactccctggacgtgtggagctaggggcctgcctgccccacccaccccacagactccggcctgtaatcagctctcctggctccctcccgtagtctcctgggtgtgtttggcttggccttggcatgggcgcaggcccagtgacaaagactcctctgggcctggggtgcatcctcctcagcccccaggccaggtgaggtccaccggcccctggcagcacagcccagggcctgcatgggggcaccgggctccatgcctctggaggcctctggccctcggtggctgcacagaagggctctttctctctgctgagctgggcccagcccctccacgtgatttccagtgagtgtaaataattttaaataacctctggcccttggaataaagttctgttttctgtnnnnnnnnnnnnnnnnnnnnnnnnnnnnnnnnncnnnnnnnnnnnnnnnnnnnnnnnnnnnnnnnnnnnnnnnnnnnnnnnnnccccatgtgatatccgaaattcgcaaaaaaactaactaaacctaccctttgggcgnnnnnnnnnngccctcaaaaaacgtttctttaaaacatttccgggttggnnnnnnnnnnnnnnnngtgtaggtaaagggaaactggggccccacatcccgtctcccnnnnnnnnncccggggcacaagaacaaaggggcttgtggatccccccccnnnnnnnnnnnncccccccgccgcgggaaacacccgacgccttttctagacacaaaacccccagaagggggagtctcccgagaagggacttcttcacgggaaccccctaccacacgagagggactccccaacaggcgaaatccccgcatatacacacaaaatttaaaagccccccctggcgccgcgggcccatcttttttctnataagtgctcggtggcggcggtaatattcccctttatagcacgctattccttcgccctggaccagcgggtataatgcccctcttccgagaaaagccgcgcggctgcgacgtagacaacccctcaatatattcgccgccctcgtgggaggcaacacccacccaccaccctgttgatccacagcaatcgtcttggnacgaatatataacactatactgtcgcccgccc

SEQ ID NO: 8284 - DNA, 1147 bp, Homo Sapiens
  misc_feature (162)..(162): n is a, c, g, or t
tcgtcgacccacgcgtacggtcggagagtatcctggagctcctgattaacagtcctacgttatctgtaatagagagtcagcctggtaccttactgagaaattcatcagctttttcctaccaaaggcagacatctaaccgttccgcacaccctccaggggcanatccaaccatcagcacagccagtggtgacaaccagttggcatctcggcagcaacagcatgtgtccatggccacatgctcgcagcacaggcaggcatccagggcatgcagaagcaccaacgttcaggcacagtctagaactagcaggtcatctcagtgcagtcattatctgaacaccactagtagcatgtctccaggccatgacaggcacagacctggtggccattctagcaggaccagtagtacgggaccctgccagtgtctgtccggaagcagagaccctccagtctcttactgaactccttatggctcagcctagatgcgtgcagatccagaaagcctggttgctgtgggggtggtcccggtggtgatggactcgcgagagcactgtgcaggagcaaggacctggcagtacactggaccagctgctgctgcagacccatccggcatccacagtcataaacacatctggggacgacagacaggtactcgacctgcgccgccaactcactctcctcaccacccgaaagccaggcaacagagccgacattcaatcaggctaaacaaaatcggtccaaagaaaagacacaccacgcacccacacacaacaagcaagctacactatcaacacatggcaccgaacgactccggcaccagccctcggacgactgcaccaccagaaacagcatcgcccctcaaccaccgacggacccacgacagacaaaccaaatctcggagacaaacacccaccaaacgaaaacaccccaacaagcagcgacgaaccacgcggcgtggcggggcacagcgaagaactcacgaccgaacgcgcaaaggacgacagaacgaccaacgcacagcaaaaggacagacaaaacgaaacagagaaacgacaaaggcgacgacgacaccacaggcaagcaaggaaggaggaaaacaacgaaacaacacggagcgagaacaggatcacagccaacacagagaccaaga

SEQ ID NO: 8285 - DNA, 495 bp, Homo Sapiens
  misc_feature (148)..(157): n is a, c, g, or t
gtttctatagtcactttgccagctcaaaagaaaacaataccctatgtagttgtggaagtttatgctaatattgtgtaactgatattaaacctaaatgttctgcctaccctgttggtataaagatattttgagcagactgtaaacaagnnnnnnnnnntcatgcattcttagcaaaattgcctagtatgttaatttgctcaaaatacaatgtttgattttatgcactttgtcgctattaacatcctttttttcatgtagatttcaataattgagtaattttagaagcattattttaggaatatatagttgtcacagtaaatatcttgttttttctatgtacattgtacaaatttttcattccttttgctctttgtggttggatctaacactaactgtattgttttgttacatcaaataaacatcttctgtggaccaggaataccctataaaaccccactctaccccctctagaggcaaaaagaaaaaggaaaatat

SEQ ID NO: 8286 - DNA, 687 bp, Homo Sapiens
  misc_feature (91)..(91): n is a, c, g, or t
  misc_feature (140)..(149): n is a, c, g, or t
  misc_feature (153)..(153): n is a, c, g, or t
  misc_feature (171)..(171): n is a, c, g, or t
  misc_feature (177)..(177): n is a, c, g, or t
atggcagaagctcaaccagctgtggccttttcagttcacggtcactcggacggggattgacctgcggctgagccatgaagctcttagacanatctatctctctgcactccagcctgggcgacagagcgagactccgtctnnnnnnnnnngcanaaacaaaccaacaacaanagcccntgactgtccgtcaagcaggcagcggggatgtagctctctctgccctgggcaagaatagcacttcccgttaaaagccagcagccggcgtcagtccctatcagagccagctagatcatgcactgttgaccactgagcaatctgtgttacactagagttcacagggcattttgagtgtagacgtgagtgcttaaacatatttgggtttctctctcaggttttaaatgtttcaaatgtaattgttgctcatcagtgcagttatcaatgcaattttatattccttgaggggagaaagaggggtcttattgtacatgtccaaggggggtgataagagtattatctgtttaatttaattggaacaaaccattgtcttaacgcagccatggtttgaatttgttatcttgggctgaccggtgcatgtaaatacagtatgctctttggatgtaaatcttagaaatgcagtgtgaatgtaggttatcattaataaaacattaaccccagtctactaaaaaa

SEQ ID NO: 8287 - DNA, 347 bp, Homo Sapiens
caaagatgacttccaggtggatattgctctcttacggtgttggggatgccagaacaccacttggttttatttttctaagtgcatgtgatgtgatagagtgtgtggggctctgtgtccttccctgggagctggcattccagcgggcccctctctttacctttgttgggggaaggaggcaagagagaaattccttcttcccagccagagagggcagaagcagaccgtagcccattggccttatgtgcgtgtgtgcgtgcgagtgtgtcactgctggtgggccggagtgatgtggtgggagggaagccgggaatgtatccttttcagacaaaattaaatattttgaaata

SEQ ID NO: 8288 - DNA, 689 bp, Homo Sapiens
  misc_feature (429)..(449): n is a, c, g, or t
  misc_feature (550)..(569): n is a, c, g, or t
aacctggtttcttacaggtggttgtctggggtgggtggagtggcgacaggataaagctgaaggactatgcaaatgaggaagtaagtcagggcgggctttgagaaggggacccatatcctacaggcaaaaagcaggctaggtgaccttgggaccctacgctaagggagggaggctaaaggcggccaggtttgcagtgcgggaagatgagcaggccagtgggaggaggggcagggcagggctgtagttggtgactgggtgttcattttagctctaagaaaaaaaatcagtgtttcgtgaaggtgttggagaggggctgtgtctgggtgagggatggcggggtactgatttttttgggaggttatgagcaaaaataaaacgaaacatttcctctagatgatacctcgcccccaaccccctctccgtagtctnnnnnnnnnnnnnnnnnnnnngcaactccaacacccactacctcccctcgtccttctttgatttatctacttccatgaccgccatcccgttaaaaattttttggtcacccttcgcccccctnnnnnnnnnnnnnnnnnnnncctcccttggggccccgccggggcgccagctggtgtaagggaaaacggggcctatatagtgtggttccctagaaaaacaccgggggactagaaacagacggggttgggttatttcccccc

SEQ ID NO: 8289 - DNA, 960 bp, Homo Sapiens
aagcatagtgaatataacccgtgattcaaaaagcaggctggtacaggtccggattattcccggagatatcgtcgaaccacgacgtccgaccacgcgtccggtttgagcccctcctcagggtggagcagctcaacctggagcgggagaagcacaaggtcttccttcgattcagtgaggaggagatctccttcccacccacctaccgctatgagcggggttcccgggacacatatgcctggcacaagcagaagccaactggggtccggaccaatgtgccctcatggtgtgaccggattctgtggaaatcctaccctgaaactcacatcatctgcaattcttatgattgcactgaagacatcgtcaccagcgaccattcccccgtgtttgggacatttagaggttggagttaccgtcccagttcatctccaagaaagggctctcaaagacttcagaccaggcctacattgagtttgagagcatcgaggccattgtgaagacagccagccgcaccaagttcttcatcgagttctactctacctgcctggaggaatacaagaagagctttgagaatgatgcccagagcagtgacaacatcaacttcctcaaagtgcagtggtcattcaagccacgctgaccacgctcaaaccaattctagctgatcatcgagtacctgcaaggacagcagctcctgctcacagtcaagtccatggatggctatgaatcctatggggagtgtgatggtagcaactcaaatcccatgatcggcagcagggacaaacagttctgaccttcatatcccacgatgggaagagacaggaaaatatcagacagctccatgcacgttaggttgaccaagacagctggaaacaatgaaagattcaacagtggataacatgaaaagaacgagaagagcacaggacagaaccctggataccaggggacagaaccagcagaacgaac

SEQ ID NO: 8290 - DNA, 685 bp, Homo Sapiens
  misc_feature (585)..(585): n is a, c, g, or t
gaggatctacctcatgctctgacccaccatgttgtcaaatactggagtcactcctcccacagccaaggaggtttatcccaggcccagaattccatcaaactctgcagggagcaaaggtctggcctggctctgtgacactctctccaaactgcttgccaaccacgaatagtccttccacagagacttggtcggctccaatgatcccggacaagctcccggttccatactgaatggagaaagattgacctggctggctgtatgtgctggactgggaaggctggaacctgctgtgcgtcttgcaggctgggctagtgcagtacacagaggggacccagaggttggaggagccagcgtcgaagatgacagtgaaagtctgtggtggggagccaatggagatagtgccgaagtattccatatccaagtagttgatgaggggttccttggcactcttggcccattgagcaggactcggtgaactggatcatgtccaaattatgggatttccagaactcagagagctggctccgtgcccgcagcttcttcttgagggacggatgcctcctgaggggcaccctgtgaaggganccttgggcctctcccagctccaggagcaccagcagcaaaagaaggagcgttttcattgtgagtccgaccagcagcttctcccttgccccctcctttcttc

SEQ ID NO: 8291 - DNA, 1199 bp, Homo Sapiens
cacaacaaaacaaaatcatagactatagacacgtggttacaaaaagcaggctggtaccgcgtcggattataccgggatatcgtcgacccacgcgtcggccgcccttctccgctggttcccggaagaccgccgacggacaagctctcccgtggcgcggtgcgtggggtcgtgtgctatggaggaagccgcggaacccccagcgtccgtccatggcgtggagccttgcggagctggctgggtggctgcctgctggtgtcagcattgggaatggtaccacctcccgaaaatgtcagaatgaattctgttaatttcaagaacattctacagtgggagtcacctgctttagccaaagggaacctgactttcacagctcagtacctaagttataggatatcccaagataaatgcatgaatactaccttgcacggaatgtgatttctcaagtctttccaagtcatggtgaccacacctatgagagtcagggctgacattcgcagatgagcattcagactgggtaaacatcaccttctgtcctgtggatgacaccattatcggaccccctggaatgcaagtagacagtactcgctgattctttacatatgcgtatcttagcccctaaaattgagaatgaatacgaaacttggactatgaagaatgtgtataactcatggacttataatgtgcaatactggaaaaacggcactgatgaaaagtttcaaataactccccagtatgactcagaggtcctcacagaacactggcagccatggcccacgactagccgacaaggacgagggaacactcccgatcgcgacacaaagctgggcactgagctgagcccgaacggagcaacaaacccagccccacacggccccaaccaggaaggaaggccgaaccacgcacagacacacgacccacagagcgcacgcaacaacacgatgaacgccagatagggcggagtacacacacactacttaacgactccacccaaaagaaacttatcacaccccctagaaacatagaccccccaccccaaaccttctgtaacccaaaccaagagacccaacaattaattatacacaatcatatcagcaactccagccacaccacgcatcatccaacccaggtagacacaactacaaccgtaacaaacatcaccctggcgacagacgcacacacccaataaaaactaaaacaaa

SEQ ID NO: 8292 - DNA, 849 bp, Homo Sapiens
tggagatgtcagctaaagggcacacttccatgatcttcatgccagtgggcacacttccagtgaaggagacttggccacatcgggatgctgacacagaaactggcctgtggcagcccctccctgcaccacattgaagagcccaggaggtacaccagcctcactgtagatttcagccagtagcaatgcagaaacaggtgtaaagggagaaggtttaaagaccatggcattaccacaggctaatgctggagccgacttccaagaggcaatctgaaaggggtagttccatgcttcctgattcccacacataccccaagtggttctcttctggtataaccaaacgatccacctgggagctggatgtgttcaccagccatggatgcagccaagcccgcataatactccaggcactgccaggaaatgtcgatgtccaagcgggcctcaaagatggacttgccattgttgatgcactccatagtagcaatttcatcctcccgttcccttattatcctggcagcctccaaaaggattcggcaacgctccatgccagatttttgactccatattttaaaagcagcctttgcattttgaacagccaaatttacttccttttctcctgaacatgtgaaagtagctatcactcggccggttgctggctcgaaagctttctcggtaccggaggcgtccgccggctccacgcgggccccgccgcggtaattgagcggctgcgacacgacgaaggtgccagtgctcatggcggcgacaggagagggccgaagactgcgaagaagcggggagagcgccgccagtcgacgcgtgggtcgacgcaatcccggataccgacccgtacca

SEQ ID NO: 8293 - DNA, 728 bp, Homo Sapiens
gggaacactatagaacagtgtgtacaaaaaagcaggctggtaccggtcggattatcccgggatatcgtcgacccacggtccgaggactgcagcggtggggaccgcaagaaattagaggagctgctcatcaaaactaagaaggagaagcccaccttcatcccttatttcatctgtgcctgcaaggaactgcccggcaagttcctactgggataccagccccggggtaaacccaggatagaatatgtaagcggtgactccagagggattccggtaccggggccagatcttcccaaccgtgaatggactgtttagatggtttaaggatcactaccaggatcctgtaccaggcatcacccctagcagcagcagcaggacccggacacctgcctctatcaatgctaccccagccaacatcaaccttgcagatctgacacgggctgtgaatgccctgcctcagaacatgacttcacagatgttcagtgccattgctgcggtgacaggccaaggacagaaccctaatgccaccccagcccagtgggcctccagccagtacggctatggcggcagtggaggcggcagcagtgcttaccacgtattcccaacgccagcccagcagccagtggccacaccactaatgacccctagctactcctacacgaccccaagccagcccatcaccacccctcagtaccaccagctccaggcagcaccacccacagtcggccagg

SEQ ID NO: 8294 - DNA, 992 bp, Homo Sapiens
tgtaccgtcggtttcccgggatatcgtcgaccacgcgtcggctagagccggagcggccgcggagcatgcggaggcagcatggtcggggcgctgtgcggctgctggttccgcctgggcggggcccgcccgctcatcccgttgggcccgactgtggtaccagacctccatgagccggtcccaggtagccctgctgggcctgagtctgctgctcatgctcctactgtatgtggggctgccaggcccccctgagcagacttcctgcctctggggagaccccaatgtcacagtcctggctggtctcacccctggcaactcgcccatcttttaccgcgaggtgctcccactcaaccaggcacacagggtggaggtggtgctgcttcatggaaaggcctttaactctcacacgtgggagcagctgggcacactgcagctactgtcacagaggggctaccgggccgtggcccttgaccttccaggttctgggaactcggcaccttcaaaggaggcaagcacagaggcagggcgggcagcgctgctggagcgggcgctgcgggacctggaggtacagaatgccgtgttggtggagcccctcgctgagtggccactatgaccctgcccttcctgatgcgaggccacacaccagcttacatggatttggtgcccaatacgaacccacctccacccagaaaatacacccaggagcaaatcttggggctgtgaaagactccaaacccttatcctgtatggagagctggaaccacattcctggctcgagagtcactgcggcagctcccgccacctgccaaccactctgtggtgaaagctacgcaatgcagggcatgcctgttacctcccacaagcccgcaagacttccacccttgtttctgctttgcctttccttgaacatctaccttggaacttaacccatccccagtcccagaccctggcttgaggcttggaccagtctggaccggcacccttccctgaaccag

SEQ ID NO: 8295 - DNA, 880 bp, Homo Sapiens
  misc_feature (675)..(675): n is a, c, g, or t
ataaaccagttgtaaaaaaagcaggctggatcggtcggaatcccgggatatcgtcgacccacgcgtccgctccaccacatagaatctgcagttttgaagaggcaaagggttggataggatcaatgagagaatgccacctcggaaagatgctgtacagcaagatggtttcaattctctgaacaccgcacatgccactgagaaccacgggacgggcaaccatactgcccagtgacccactacttcccagggactctcacatctcgggccccaaatggacagatcacccgaggagctggaggggtcggccaagctgactgtaaatttcacagtctctctgaagaaaccattgtgcttctgagaccctagcccccttcctggatggaggcttgagggccctgggacatgtgctatctgataagattgggtcatcgctgccaaggtggagagcagtgagcaaggggcttggggcaatttccagtggagggcatccacacctccattttatgcttgtggttcacacatttaagtttacaaatcagatttcttttccccttcagtagaattagatttgtttttcaatcatgatttcaaatgcaatcctaagagctaatgtggacttttctttttccatgaaatgtctttaaaggatgaattagcatggtcttaaaatacatnttctgaggttactagctgtattttgatttgtgagcaaaatggcgagaaaccagttggatttttacaaaatgttgacctcacgtctatagttctaaatggggtaatctgggactgtctgggattttcaatatgaagctatctatttcggagggctctatgacaatccaataattaggtttggcgatttaaattaccgagttaggac

SEQ ID NO: 8296 - DNA, 1210 bp, Homo Sapiens
  misc_feature (98)..(98): n is a, c, g, or t
  misc_feature (608)..(616): n is a, c, g, or t
gccaacctcggagatagtcgggcaatcttgtgtcgttataatgaggagagtcaacaacatgcagccttaagcctcagcaaagagcataatccactcangtatgaagagcggatgaggatacagaaggctggaggaaacgtcagggatgggcgtgttttgggcgtgctaaaggtgtcacgctccattggggacgggcagtacaagcgctgcggtgtcacctctgtgcccgacatcagacgctgccagctgacccccaatgacaggttcattttgttggcctgtgatgggctcttcaaggtctttaccccagaagaagccgtgaacttcatcttgtcctgtctcgaggatgaaaagatccagacccgggaagggaagtccgcagccgacgcccgctacgaagcagcctgcaacaggctggccaacaaggcggtgcagcggggctcggccgacaacgtcactgtgatggtggtgcggatagggcactgaggggtggcgcgcggccaggagcacgcatggtattgacttaaaaggttcattttgtgtgtgtgcacattgtgtgttttgtgtactcctgtgggactcccatggttgtaaataaaggtttctcnnnnnnnnnctaggacctcgttatattccaatatttatattcttgtcggccgccctcggcccccgtaaaaactttctaaaacgattcctttggagccgcggccccagtagggaacgggaaccctgggccctatgctgtttccctacggaaatcccgggccatggactagtggtttggaattcctcacccacataaaaaaacggtccgggcgggaaaactggagcgatcctgtaaaataatccccgaaggggaccttcgtgcgggtccgtcactgggcattctactccgacaaggaagctccgattcccgagccccaaatatccaggaattagcgcccccgggcccgtgggccacttcctttcatccaataacttgggctacgacattcgactttaaggcacattttctgtcccaaaactggcggaaagcccctgtcaatatatattggcttgttggaattgtactcccttggtaaatccgtacccggtgggggcagttctcgtgcgaatatatttggattattctctttcgcgctccccttaccaatacacttattgcgcaccctgctggcgcccacataaaactggtgtccgatctcggtac

SEQ ID NO: 8297 - DNA, 1422 bp, Homo Sapiens
  misc_feature (523)..(567): n is a, c, g, or t
  misc_feature (570)..(579): n is a, c, g, or t
  misc_feature (582)..(584): n is a, c, g, or t
  misc_feature (587)..(607): n is a, c, g, or t
  misc_feature (611)..(613): n is a, c, g, or t
  misc_feature (615)..(618): n is a, c, g, or t
  misc_feature (620)..(620): n is a, c, g, or t
  misc_feature (627)..(627): n is a, c, g, or t
  misc_feature (630)..(728): n is a, c, g, or t
  misc_feature (745)..(745): n is a, c, g, or t
  misc_feature (763)..(763): n is a, c, g, or t
  misc_feature (820)..(821): n is a, c, g, or t
  misc_feature (846)..(846): n is a, c, g, or t
  misc_feature (888)..(890): n is a, c, g, or t
  misc_feature (926)..(927): n is a, c, g, or t
  misc_feature (992)..(992): n is a, c, g, or t
  misc_feature (1077)..(1077): n is a, c, g, or t
  misc_feature (1105)..(1105): n is a, c, g, or t
  misc_feature (1135)..(1135): n is a, c, g, or t
  misc_feature (1215)..(1215): n is a, c, g, or t
  misc_feature (1241)..(1241): n is a, c, g, or t
gcccgccacttagtttttgccaatcccacctttttatccattagaacactctttttaatcttccgtgaacccatatgtatgagataaatcgggcctggggctgggccccgctgttcactcaacagagtatttcccttggccgagatggaagttttgtcccaatagatgagcttgctgagcatcaacaaggtgacatttttctgctgcccatttgtgtcctggagacggtggtaccctgaaggcagaggccagctgccgcaagacagcaatgacagtccacctgccgacctgattcctgcatcatggaataaccacatggctaccttctatcctctgttcccaaatggtggtggcacttatcctgaagtcatcaatgatttccctttgaaactactttattttactaatttaaactattttgtactgatgtagccctgaggtagttcatgaaaatgctgtgcactcattccatggaataaatgttggaaagctgatcttttctgatataaaatgttgaatgatnnnnnnnnnnnnnnnnnnnnnnnnnnnnnnnnnnnnnnnnnnnnnaannnnnnnnnnaannnaannnnnnnnnnnnnnnnnnnnnaaannnannnnanaaacccnaannnnnnnnnnnnnnnnnnnnnnnnnnnnnnnnnnnnnnnnnnnnnnnnnnnnnnnnnnnnnnnnnnnnnnnnnnnnnnnnnnnnnnnnnnnnnnnnnnnaacaactcaaatagggngcacaccacacggaagcnccccaagggaactgcgcgccgccccgccaggcgcacgcggaaaacccacaaagcaannaagaggagaccgctcgtggggggcnaccagcaaaccagtctacccaacccggcccctccttggagannntgtgtataaaagcaccattaacggggaggcccgtanntgagaggaggaccgcccttggagccgcgcccgcttttattccgccagttccccggcgcccccgcntcgttgattgcaaaagcagtcgcgacagacggacgtcatggcgagcgtcacgtttctcgtcaaaccgcccagcgccggtgcacgncttcccgaatcggaatacaccgttccgnacatgccaagagagtaccaggccggcggancccgatgaagctgatagatccccaaatgcggctccgccgcgcaccgctagtcttgtggtcgcaccaccctattggtagtnctcacaacacacacacccgcgcgccnccatacacatgtggtttggtgtcggtagagggaggaggtgacatcataaaacaattattgtctcacaacatagacaagagtagtcgggtcacatagtgaggattttggctactgaacaacatgccccacgtcgagatactgaaatattctgcgttcgatgggtagcggagcgactgcgact

SEQ ID NO: 8298 - DNA, 609 bp, Homo Sapiens
gggggggcggggcctgagtcagtctcgccagctgccggtctttcgggggctccgtaactttctatccgtccgcgtcagcgccttgccaccctcatctccaatatgcctggtccgacccccagtggcactaacgtgggatcctcagggcgctctcccagcaaagcagtggccgcccgggcggcgggatccactgtccggcagaggaaaaatgccagctgtgggacaaggagtgcaggccgcacaacctcggcaggcaccggggggatgtggcgattctacacagaagattcacctgggctcaaagttggccctgttccagtattggttatgagtcttctgttcatcgcttctgtatttatgttgcacatttggggcaagtacactcgttcgtagattcagttacatccatctgtcatctgaagaaggaggaaaaaacccaacatttcttggaccaaaagtatagtgactatctgttcatgagagaaattttctgtaagcttgctgttttacaggggatttatcaataattgattttgaggaatcagtttttttctatggctaataaactttttaattcacttaaaaaaaagtagacgcgcccgcgaattt

SEQ ID NO: 8299 - DNA, 388 bp, Homo Sapiens
  misc_feature (293)..(338): n is a, c, g, or t
gggaggacccaacttctcttaccgccatggagttcgacctgggagcagccctggagcccacctcccagaagcccggtgtgggggcgggccacgggggagatcccaagctcagtccccacaaagttcagggccggtcggaggcaggggcaggtccgggtccaaagcaaggacaccacagctcttccgactccagcagcagctccagcgattcggacacggatgtgaagtcccacgctgctggctccaagcagcacgagagcatcccgggcaaggccaagaagcccaaagtgaannnnnnnnnnnnnnnnnnnnnnnnnnnnnnnnnnnnnnnnnnnnnnccccactgaagggccctggacagggctcattaaaccttcctctctgcctt

SEQ ID NO: 8300 - DNA, 595 bp, Homo Sapiens
  misc_feature (289)..(331): n is a, c, g, or t
cctccctccctgtctgcctcctgccccttccttctgccaggggtgatcctgagtggtctggcggttttttcttctaactgacttctgctttccacggcgtgtgctgtgcccggatctccaggccctggggagggagcctctggacggacagtggagacattgtgggtttggggctcagagtcgagggacggggtgtagcctcggcatttgcttgagtttctccactcttggctctgactgatccctgcttgtgcaggccagtggaggctcttgggcttggagaacacgnnnnnnnnnnnnnnnnnnnnnnnnnnnnnnnnnnnnnnnnnnncagactgtctgcctgtcctggggtggctaggagctgggtctgaccgttgtatggtttgacctgatatactccattctcccctgcgcctcctcctctgtgttctctccatgtccccctcccaactccccatgcccagttcttacccatcatgcaccctgtacagttgccacgttactgccttttttaaaaatatatttgacagaaaccaggtgccttcagaggctctctgatttaaataaacctttcttgtttttttctccatgg

SEQ ID NO: 8301 - DNA, 421 bp, Homo Sapiens
agttattaaataagaaaagtcaaagtattaattcttaccttctattatcctatattagcttcaatacatccaaaccaaatggctgttaggtagatttatttttatataagcatgtttattttgatcagatgttttaacttggatttgaaaaaatacatttatgagatgttttataagatgtgtaaatatagaactgtatttattactatagtaaaggttcagtaacattaaggaccatgataatgataataaaccttgtacagtggcatattctttgatttatattgtgtttctctgcccattttctttaaattcattaactgtatatatgtaaatatatagtacttgtaaatagattccaaatttgcttttctattgggtaaaaaataaatttgtaataaaatgtgtgactatgaaaaaa

SEQ ID NO: 8302 - DNA, 345 bp, Homo Sapiens
tacattacgtgcagcacaatagtaccgatcagttaactcagcgctgaagggcttgttttatgaaaggtactattccttctttcacattaactggaaacctctttttttacctgttgttcacaactagttttcttattgactgtattggactgtctcttcttgtagagactgattttggccaacatattaatgcatgttttatgcaaaacacaaatatgatattagttgcttttaaggagttctggcattgtatgtgcatttttgtagaaattgttactggacttataattacatacttaactctgatcaggtttctgtaaaatttaaataaaaccaatacaaaat

SEQ ID NO: 8303 - DNA, 693 bp, Homo Sapiens
ggaagcatggtatcaacgcagagtgccattacggccgggggagacaagatggcgctgcgggcgatgcgggggattgtcaacggggccgcacccgagctacccgtgcccaccggtgggccggcggtgggagctcgggagcaggcgctggcagtcagtcggaactacctctcccagcctcgcctcacatacaagacagtatctggagtcaatggtccactagtgatcttagatcatgttaagtttcccaggtatgctgaaattgtccatttgaccttaccggatggcacaaagagaagtgggcaagttctggaagttagtggttccaaggcagtaattcagggtatttgaaggggacttcaggaatagatgctaagaaaacgtccctgggaagtttaaggggggatattccccgaaaccccgggtgccggaggatatggctggggtcgggtaattccaaggggatcggggaaaaacccctttggaccagagggccccgggttggaactggggccggaaaaacttccccttggaaaaaccaggggggcccgtcccaattccaaaccccctccaagggcccgcaaaccctccccccgagggggaaaatgggtttccccaaacatggggtttttttccggggcctctttcaatgggggaattggaaaccagggatttgtgcctaaggggggggcccac

SEQ ID NO: 8304 - DNA, 634 bp, Homo Sapiens
  misc_feature (94)..(94): n is a, c, g, or t
cttccagccatttttttagttagtaaaaatcctattaatgtgaaccagccaggaataacagtgttatttctattggatatggtttgggcttctnttgtcaaatctgtgtcggctgccccctgatccttccattatcaagttttgaagggtgttggggaaattatggcagctgctagggagatcagggaaacactgatgtaacctcaaagcctctcaccattcctcttggcttggaaaggctttattttttcatatacatttctagaaatattgctattctaccttagtatttcacatttgtagttcaaacaagcgattgtccatctgttgcctagagctatagtacatgtgtgttatgaatgaaatatgacagcatgttccatacccctgctttagccatctgtgggaaaccagcaaactgaaaaagacacctctgcaaaatgtgcctcaagtccatttcttgggatcgctcgtttggtgcactctcgtgggagacaatcagagaacaacatatacttgtgccttattttcaaagaatctatttacactactatgaatattccactgaagagtcaatgatgtaaatgataaccaccaaatctcaaaaatatactcaccaaaaagtaaaaaagta

SEQ ID NO: 8305 - DNA, 779 bp, Homo Sapiens
  misc_feature (710)..(730): n is a, c, g, or t
gggacgggcaagggccgccattttgactgagcaaccctagtgacaggagccgaagcagcagcgcaggttgtccccgtttcccctcccccttcccttctccggttgccttcccgggccccttacactccacagtcccggtcccgccatgtcccagaaacaagaagaagagaaccctgcggaggagaccggcgaggagaagcaggacacgcaggagaaagaaggtattctgcctgagagagctgaagaggcaaagctaaaggccaaatacccaagcctaggacaaaagcctggaggctccgacttcctcatgaagagactccagaaagggcaaaagtactttgactcaggagactacaacatggccaaagccaagatgaagaataagcagctgccaagtgcaggaccagacaagaacctggtgactggtgatcacatccccaccccacaggatctgccccagagaaagtcctcgctcgtcaccagcaagcttgcgggtggccaagttgaatgatgctgcccggggctctgccagatcctgagacgcttcccctccctgccccacccgggtcctgtgctggctcctgccccttcctgcttttgcagccaggggtcaggaggtggctcgggtgtgggctggagaggcagaagccctttcctgttggtgtcccagcacatggagccccttgggctgagcaccaagaccttgaacnnnnnnnnnnnnnnnnnnnnnccaaataacagttgggagaaatattcatgaaattctgggggtgggggtg

SEQ ID NO: 8306 - DNA, 1152 bp, Homo Sapiens
ttgcatggatatcttatgtggggtgtcaccagcttcgcatcacctgtatgcacacctggcattcttccacatgctcagagatgtgcgatggctgccaccacaccatcagaggccacggcatccacgtcaatctccttagcctcctggatgaacttggagatgaccacgggatgctctttggagacgctgctgcgctgctcaggaagcgctccaggtctccatccgtgtaggccacattcatagcagcaccgctcagcacataggaggggcgcaccacacaggggtaccccacggtctggcagaattggcgagcagactacaggagtcagggagcttagctgagttgttcacactttcccccaagcatcatccagcctccgggtaacccaccaggtcccagcccacctcgaggtcactgagctccctccactgaggctggctgatatcctatggtgtcaaggagccgggaaaacttgaaacggttctcagccgagtcaatggcttcaggggaggtgcccagcacccggcactgtctgccgatgctacgccatggccatgttgttgggcagctgtccacccatggataggtatcacaccttcagggttctcgagctcatagatgtccatcaccacctcaaaagagatctcatcaaagtagagtcgatcacacatgtcatagtcggtgctgactgtctctgggttatagttcaccatgatggtcttatatcccatctttcggagctgctggatgcagcctacagcacaccagtcaaattcaacgctagagccaatacggtagacgccagagccacggactaggacatgaggtgttcgaaaggtgaggtcatgggtggtgccccaatacgttaggtataggaaatttgtctgggctggccactcagctgcaactgtgtcaatctgtttcactgctggacagatccccagttcctgacgcagcttgcgaacagccagctctgtgctcagaactgcaagggcaatctgtttgtctgagaagccaagacacttggcctgttgcagcaggtctggcggcaaaggctgtccacggtgttgttctagcagctgggcatgtgcgatgatacgcttcattcggtgcaggaaccagcggtcgatgcgtgtgagctcatacaggcg

SEQ ID NO: 8307 - DNA, 817 bp, Homo Sapiens
  misc_feature (758)..(758): n is a, c, g, or t
  misc_feature (783)..(783): n is a, c, g, or t
tcaggacgttagtggcgacgggtctgccgccagtagccgcggggcccagggacgcccgttggcctgcactggaacgcacagacggcacccagcaggtaggcatgttctcaggggtgcctagcaagggctctctcagggtacagctgggagaagcggccgagggcccagatggggaagatgttcctgtagctcgtgtaggagatggcacaggacttgttgaagaccccagcaatgttgtcctgcggccagtcgccattggggagctgtttctcaagtagacaccggactcctctctcctgggcctcgatgtcaggatgccgaacggccatcagccccatcatggcccagcatgtgttatggatctgggactgggcactctgcacataacgccgctcctcgcaggactcaaagtcctccccccagcctccgtctgccatctgccgggacagcaggaagtcacaggcccgggagacctctgcacaggcagtcccatctcggtaggtctgccccatacaggcgaaggcctccaggccaaaccaggtgccgtaggtgaagcaaactccccaggagccttcccaggagccatcggccctctgctgccgccgacagaactctaagccctgcgtgagggtctcccggatctccgctgccctgtgctccgggaaacgcttgtggaaatacttaagcgcctgcatcacggctgaggtgcactccacataggtgtagtcaatcatgatgtccccgaagacctccgaggngttcagcagctccagcaagtgcccnccacgcttggtctcataggtggcgaacccctcat

SEQ ID NO: 8308 - DNA, 678 bp, Homo Sapiens
gaggattacttcggacttcagaattggatttggctcatttgtggaaaagactgtgatgccttacattagcacaacaccagctaagctcaggaacccttgcacaagtgaacagaactgcaccagcccatttagctacaaaaatgtgctcactcttactaataaaggagaagtcattcaatgcaacttgtcgggaacaaccagcgccatcatctggcaaatttggcattctcccagacaggtggttatcgatgcccatcatgcacagttgcagtttgtggatcactgattggctggaggaatgttacacggctgctggtgttttccaccagatgccgggtttcactttcgctggagcatgggcaaaacttggtgcgcatcgctattacccaaatgcatgcgccaaatgccgaccttggaacacatcaatcatgtacgacacatgcagccaattcatttatcgattaattcacttcctatttgctccactctctgttcccaagaaaactggaggtgaacacatcaaatatttcaagaaaaaataatataggcaagttcactggaagaactttcaaggtcctgcttacaaaaaggaagctggaacaacaacttgatccctaaagtaaggcataggcaacgattatctgcaccatactgcaaaagtaattccaatgatcaccg

SEQ ID NO: 8309 - DNA, 654 bp, Homo Sapiens
ctggggtccatcctggggcagctggcggtcatttacatccccccgctacagagggtcttccagacggagaacctgggagcgctagatttgctgttttaaactggattggcctcatccgtcttcattttgtcagagctcctcaaactatgtgaaaaatactgttgcagccccaagagagtccagatgcaccctgaagatgtgtagtggaccgcactccgcggcaccttccctaatcatctcgatctggttgtgactgtggcccctgccgtgtctcctcgtcaggggagacttttaggaggccgcagccttccatcaccggatcagtttttcctcttaggaaagctgcaggaacctcgtgggctccagggacccaggcccacatccatccaggttcccgctggctgtgggacagacagggaggggcctgtacagaaacaccacactgtttattaaatcacaatgatttttattaaccatgtctaactacgtatctgtgccacagcttgcagtgaggcaggccactcgtggcagatacaaggggctcctgagaggcagtgggtaggatggtcacactctgcccattgccctcctggaggcctcatttcctcatcataaaatgagggacttttaaataaagtgctatgccggggaaaa

SEQ ID NO: 8310 - DNA, 732 bp, Homo Sapiens
cttaaaaaacgttgatgctgtgacagtgcaaacagcatggatttatatggctcgacttcggcatgggcacatacatagttaatttttaaaaaccatttatacagatgttactgataaagctcatgtaacaaatgaatgaaaatacaaagaatatcaaagctaaaacactctgtaataaatacaaatacaatggaaaatgataaacacttggtttttaaagtcagtctgagagaagaattattacataaagtgaactaattcacatctagaatataaaacaactcagctattgggaacaatcatcctaactatgttaaataccacaatagggcacccgttgactggtacgcttagaaaacaagcagaaggagccactctcccaaactaaggatggtgggaacagcctctaactcccaacaatccaatcagtccaatgcacggggaaattcaagagcccagatttagtggttggtaaagtaaagcgaattactttggtttttggaaaagaagagaatctggtgctccggactggtaaatactgaaagaaaaaaggctgggtaaaaaacccattcggggcaacaaactatgtgcaaacaaatgtcctctatacctatacactatgccctatttaaaaactaccgcaagatacaggccctctgaggcaagacttacctctctgtactgctatgagccctacaaggaatcctgccataactaagctcctgatggaag

SEQ ID NO: 8311 - DNA, 687 bp, Homo Sapiens
  misc_feature (51)..(65): n is a, c, g, or t
tggcgtacgcctagctgttacccctcgagggatactctagagcggcgcccnnnnnnnnnnnnnnnacattccaaaactttaatgtcaattaagcagccttttcacttgatataaactcacatacccaggaacactgtgggctcagaacattatttcacaagcaggtattgctggcacgttgtttgtgtcacatttagattccgattaaatgacatcatttggttcctcagatcctgacatacacaatgaaagtatttgaaagttacataaccagttgcacttaatgagtcatcctttgtcaatattagaatgagggaaccaggatatgactaggaagagactcaaggggtaaaatctgaagattctgtcccatacctctgcagaatcatggacccccacagaggacttaggggaggggctcagaagcaaagggctgttttgaaaatagtttgattttgacacaatgatttgcagacaagcccagccaccggggagaaaagatatgagaatgaagaagttccaaatggctaagatgaacatgaacttctaaacagaatgaaagctctaggattatgtccacctttaagaagtctgcgtggtgatatctggctttagaggcaggtaatgtctttggacacccctttcttcaacagcaagggggttacgccgaaaaacaaaagacgccac

SEQ ID NO: 8312 - DNA, 1117 bp, Homo Sapiens
cgtggtctctcggatgagccgagttctgtagagcgatgtggagtttagtaatagcgctccgggggggccccgttaggtttacaaagcggtgaatacctcttcggaaggtttgtcggacagattggtatggcgtagaagggtggaccgccgagatggagtgggttgtggcgtctaactcgtgggtggtgtgcagtgggtaagttgcaaaaacttggtgccaaaactgcagcatgtatacgtcggatagcagcgcaaccccgtctgtagtagtaatgcccagattgggagtctgggtttggaatctctttgaagacgagtatagctcgatatccgggcctcgcgtggttttaataggggacccacaacttttggaatatcctacgtggtggtgttggcacggaagcttgagacgtggcacccatgatcacctatagttgttagaccactggggtatctgtccctgccagtgaatgtcacctggctcacgaggtgaatttgaggtaggccctgaaccacgaaaaagatctgggaatggatgtgttgttgaagctgtgtgtagaataatggtgtgtgggtgaacatgactgctggccagaatgaatgttgcaactgaatggccatagacttaaaatatagcctatggaatactgtgattgaaggttgaaggcctgccgggttcttatttgtgcatgcaagtttagacacgggtaaagaatgtataaactttatttgagatgagatacacgtattgtaaaaatatgaacctcattctagaattgcttttaaaacacagcaaaagcctatttgtagtacaaatgtagggtgggtagttgttttaaggtagcaaaatacttcaagattttctatctttttaatttttcatgaagacagaagaaatactttcaccccaaccaatgactgtaagatcttgagagtatgttcttactcatttctgtaattgcagtagtgtagtcatctgcatataaatttaataaatgcatgttaaaatttaagccgaacgcctcttcgtcctctcagagtctgtcacagtttctttgtgtaaatgataaaaaagtttgaatttaatcaataaaacttaaaaatcacaatatcaatc

SEQ ID NO: 8313 - DNA, 814 bp, Homo Sapiens
gcttgaaggaggcgcaacccggtgttcgaaccagcagtgcagaatggggtaatgttccagggaccagggggggaagcaatgtgggaggccagtccagttctggggcccaccgcctgctgagcggccccgctgcttaagtgcatgcatgactgcccccagcctggtgccccactattaccacaccttggggtttaaataatccaggtgtgcccctccaagtcaccaagagatgtcctgtaatattccctttaggtgaggcttgtaaggggttggtatctcaggtctgaatcttcaccatctttctgattccgcaccctgcctacgccaggagaattgaggggagacatgcttccctgcagctgaccgggtcacaccaaggcatgctggagtaccccgcctatcaggtgccccccttcccaaggcaggcgtgccgagccagcaagaggaaggggtgctgtgaggcttgcccaacggagcaagtgaggccggagaggagttcaggaacccttctccatacccacaatctgagcacgctaccaaatctcaaaatatcctaagactaacacaaggcagctgtgtctgagcccaacccttctaaacggtgacctttagtgccaacttcccctctaactggacagcctcttctgtcccacagtctccacgagagaaatcaggcctgatgagggggaattcctggaacctggaccccagccttggtgggggagccctctggaatgcatggggcgggtcctagctgttagggacatttccaagctgttagttgctgtttaaaatagaaataaaattgaagact

SEQ ID NO: 8314 - DNA, 873 bp, Homo Sapiens
cagaattctcagcctctgcacagccttagtactccctgagaaattcagtgttggcatatcctttccacaaaaatgagaggaaaaaggaccagtacctgctagtgactgatacatttattagtttctaacaaaaaggcatacatggtaggcagagtagaaatactaacagaaattagtttatcttgaaaccaattttagtcaggaagacttcttcacagagaatgagctgaatatataaatcccaaatatatcacaccatatatgtgatatatttacacctaaatatatcacaccctccttttgggtcacagactattccaagaagattaaatagataacgtttaatttggaggcattcaagaatgtccatcctaaaactgaaagtgaaatggctcttagagaaaaatgggtttgatgagaagattgatcttagcctgtctcagacaaattgggtttatttatttttacttaacgacccatgtgatagtatagttgcaagctatacttcatttaactacaatcattactcagaggacaatcaccttaagaggcaaattaagttttaaattagcacagaatttataattacccaatcagcattgacatagatgccatcaggtatgcaaagattaacaaaattctattaccaaccttagaggaaaaaaacttaatgacatacagaaatactggcaaatttaagctagaattagctccaggacattttatcttattttcacattaaaagaatagattactagatatcagcagaaatgctgttaaagctattttttactaatagttgttcatattaatgaaacaaaagatcaatagtctctgagctaaatttcacaaaatgaaatcagtgtcttctga

SEQ ID NO: 8315 - DNA, 405 bp, Homo Sapiens
  misc_feature (106)..(130): n is a, c, g, or t
gggtgaaatcaacgtgcttctttattttttaaactagataggctcattctactgtcttctccagggctcttctatgaaacagttacaaacctacggccaggccagnnnnnnnnnnnnnnnnnnnnnnnnntctgggcctgaataagaattttaattatgtactaataaacagggaaaaacaagttcttaagagaaagttaaatagttaacagtgacctttacagctattttggtgaactacagcaaagtagtgtgtttcccttatggtattattatgaatcgaatgtctgagctcttcttactttacctacagttattttggtgaattatttctaattttatatcaaaatgtttagctttccttctacatataggtaacaagctctacttgtaattaaaagaaaa

SEQ ID NO: 8316 - DNA, 507 bp, Homo Sapiens
gccagacttatgactttgttttcaagcactgtaatgtgggatggatggttagaaacaataatatattagggtttctgtttaaccctttcaggactgaactgtatctccttttgttaattttcccctgtgttgtgataaatgtttgccagcattcagtactgtgttggtccagatgtaggtttatatgctcatttttagcttatttcttgtaccttgcagcatgctctacgcattcagtccttaaggggtttattttacaaactgtgcgcctgtaaggtttattagcaataagatagaaaattgagcaagtttataccataattttgtagaaaaaaagaatctgctcagttccatatttcatccgtgaaaaacttgcaatacgagcagtttcaaggaataaataaaaaggaaatgtaaaccattgtaaaagtcttctgtcgaatgtgcctgatgcatgtattatcgtcttttatttcagaatacttcataaagataaaattaaattcc

SEQ ID NO: 8317 - DNA, 242 bp, Homo Sapiens
  misc_feature (80)..(90): n is a, c, g, or t
gggggaacggggaagggggagcaacttgctctttcatatgagttggtcatagcatgtaagaaccaatcttgaaatatcgnnnnnnnnnnnaatggcttataatgtatttctagaaatactttgtacttaaaatgataacagtttgtatctttttgtccatataaagatactttataaataaaaaaattagcattgtaaataatgttaatatgtatttatacaaaataaatttacaataatat

SEQ ID NO: 8318 - DNA, 721 bp, Homo Sapiens
ggtctggttcctcagtgagctggtgactggcaggtgactccctcagcagtgtatgccctttctcagcatcctaggtccatcccaggcctggaggctgacagttgggaatccagcttcccccacaccttcccaaaggctgctctgagcacctccacaccccactgcctctgtccccagcaaactgaatccggttcctctccacttttcaatactgaaagattaaaatggggaggttgcagggagcagagcttttccctagcacccactttcccaaaccagtctctgcagaagccccagagaatctaactcatgcctgtccagtctacagcaaaaatatttattgagtgcctgttgcatacaggcacaatcctaggcaccggcaaatacagacaatagaccaaagtccctgccctcgaggagctttcattctgatggagagaaaacataataaacaagcaaaatgcaccacgtgtccaatgggggaagtgctatgagtaaagggggaagggatgggagggagcaggggcgaggtgtcaacacagggtggctctgcagctagctgggcacctcactgttccctttgctcagcacctgctgtgggccaggccttcagtgaccctggcctttggtggcagaaaaaacacaggaccaagatctcaagagtttctcatctgcttcttccactgacatttcatccaccaagcaaaattcattgacacca

SEQ ID NO: 8319 - DNA, 398 bp, Homo Sapiens
gcatatcaaaattatatccatctttcagaacccaaattcagtgttatttccaaagtgttccaacatctcccactcaaaatgaatctcctccctagtactcccattgtttagtacctaattgttcttaccagtttgtcttagagctcagtcattcctacacagcacttttcttcattatactgctaatttcattacactgtaagagtggggacaagctgttcttcttgtataccagaaagtagtgagtgcactgctgtgaagaaagcaggaactcaaaagttaagaattttgaatgagcctataaaatgtgtctaataaataataatgttcattttcaaatctcaacaattaaatgtttaacaaataacacttgaaataaatgtttattagaaaaaccc

SEQ ID NO: 8320 - DNA, 640 bp, Homo Sapiens
gaagaaaaacatttaatttttattttcaaaatgttgccataaacatacatacaacactgaatttgatcccctccattggctgtctgtgtgccaggaagcacttgtgacagaaaacatatataagcttagggtaaaagtttataaggaatcaaaatatcttccaaaaagagggggtaggggcaagaggaatcaataagtttaaaaatcataactttcattttataaaaaatagtttgaataattttcttataaatctttaatgcttacaaaagcaggaaatacatttaaaatagtctttttaacacagattcatttgtacaatgtggtcataagaaaaataactaaaatgacatttcagtagtctatattcttttctcagcaaattccacataaaatttaactaatttacaattcaaaataagattttaactgccaacaatgtcagactagttgtggttagtacctgaatatcaagctcttctccattttatatattgtaccaaaattttaaatacagctcagcagtgataggtactaataacaatacctgactacatggttaccacccgtgactactgcattgcagcttaaaacatgctttggtcagtaaatttaaaagatatacatcaaataacaaggc

SEQ ID NO: 8321 - DNA, 542 bp, Homo Sapiens
aggcccagcacgggttccatctgctgtggcagcggagcttctccagtcccctgctggccatggctcacgtggacctgaccggggatgggctgcaggagcttgccgtggtctccctgaagggcgtgcacatcctgcagcacagcctgattcaggcctcagagctggtcttgacccggcttcgacatcaagtggagcagagaagacgtcggctacaggggttggaggacggggcaggtgcagggcctgctgagaatgcagcctcttaagcacccatgcacccactcttcccagacctggggcgactcatggcgtgctcacctccagccgctggtggggggtgtcctgaaggacaggatgctctccccagacctccccagggtggtgaagctgtgccctggggccccagctaacccactcctctctctgtacgtcaatgtccctatttgaaagcagggatgatcccattccaccctgtccactctggatgagaattggccacctgatggttatttatacgtccagaagaacatcatttcccagtt

SEQ ID NO: 8322 - DNA, 733 bp, Homo Sapiens
  misc_feature (62)..(62): n is a, c, g, or t
cacccatgatacaggtctgggagaggttatatccctacgttaactctgccaagaagaggccncttctttgcacttgcttctcatttggctattcttttcctaaggaagtccattctcctctgtacagacagctgagtcacccagtctacttagtacctggttgctgcctctgaccttttcagcttgataccctgggctttagtgtaaccaataaatctgtagtgaccttacctgtattccctgtgctatcctgtgggaaggtaggaatgggctaagtatgatgaatatataggttagggatcttttggttttaaatcacagaaaacctaattcaaactggcttaaaataaaaaggatttattggttcatgtaactagaaagtccataggtagtgctggctccaggtgaagacttgacccagtagttcagtatgtctctaaataccggactgacttttttctcactgttgcatcttctgtaggaccatttaagtctgggccacttaatggctgccagcattcctaagattacacttttccccatttatgtccaatcagaaaaagaaggcatctttgtaccagaaatctcagcaaaagccctaatattcacactgattaggcctgggtcacatgtccaccctgaccaatcactgtggccaggaggatgatacatgctaatttgcttattctatatcatggacaacacctttggggaaaagggtgggggtcagcct

SEQ ID NO: 8323 - DNA, 478 bp, Homo Sapiens
  misc_feature (46)..(66): n is a, c, g, or t
tcgcgctaagctgttaccctcgagggatactctagagcggcgcccnnnnnnnnnnnnnnnnnnnnnggtgttccaataaaactttatttacaaatcaggctgtggccagatgtggcccacaggctgtagttgttggacctctaccgtagaccatcatgaggcctggggttcttcgagaacaagaactccttggttgattccccagggtacggcagggccttgggaacctgggtgggttggggagggtctcaaaaggctccttcctttggcaacctgacttcttggaagctcaggtttagctgacgccccagcactgggccaggggggctgaggcaggagatatggggaaggctaggagtggccgtgaagccattatcccatcttaggcgacaccgacctcctaggcgccctcaagagccaagcagtgttgcgacttttcgtggtaggcaccggaactccccgtgggaatgctggtttt

SEQ ID NO: 8324 - DNA, 175 bp, Homo Sapiens
cgtaatatcttcaaatcctgaactaaggatttagtcttggctccaagctggtgccacaaaggatccagataatggcggattgtctaaaacaagaataaaatttggtattgctaaaatatgttaagtatagttattcttaatacaaatcatactttcaaaaggattatttcctgtg

SEQ ID NO: 8325 - DNA, 318 bp, Homo Sapiens
aaaaaggtatttttttaaagacccaaccaaactgaggattttgttatacatatctgtatcaacacctatatataaactcttcttcttacctgaaacactccttcacccggtttgggcactaactagatcattttcaaaggaacaaacaggaaggagcaagctggcactccagggtgcatctgagctgagaatttagaagacctcattcaagaaagtaaactgagcattgatgggaaagcactttgcgcgaagtaacatcctctgatgcagtcaacctttccaaagtgttctgaatggacgcttcatgttttggtccca

SEQ ID NO: 8326 - DNA, 229 bp, Homo Sapiens
cactgcccaacaacaccagctcctctccccagccaaagaagaaaccactggatggagaatatttcacccttcagatccgtgggcgtgagcgcttcgagatgttccgagagctgaatgaggccttggaactcaaggatgcccaggctgggaaggagccaggggggagcagggctcactccagccacactgaagtccaaaaagggtcagtctaggtataagcctcgttcgt

SEQ ID NO: 8327 - DNA, 565 bp, Homo Sapiens
caagagtttctgagtgttgcaggctcatggagtgtcacacaactctactgtaccttcaataatgaactatgactatgaacttataaaaggagaagcactggatccaaagcatgtatgcaacccagaccatatttcaggctaatagactcgtcagcttgctaaaatccatgctattcatgcacacaatgcgctggatccccaaatctaatcttatggataaagatgggaaagtatttctctctcattcccacaggatttgcagatgaagacataaataaaaggtacctaagtgatatcccaagctctcagattctccaggaagagatgacttggatgaaggagattctttccaaactgggctcacctgttgtgctttgccataatgacctattgtgtaagaatataatctacaatgagaaacaaggtgatgtacagttcattgattatgaatattctggatacaactacctggcctatgatattggaaatcatttcaatgaatttgcaggtgtgagtgctgtagactatagtctgtatacagatagcagactacagagtcagtggc

SEQ ID NO: 8328 - DNA, 549 bp, Homo Sapiens
tttccgccagtgctagagtattctctatactttgtattaattattcctactcctatacagagctttatgtttgttgtaggtccctttattttaaaatccgtgaagaaactggagcagacataaagaaatgtaatttaacagttgacggtaggattttggaggacttgctaacattttaaattggttagcctacaaaacaggggaaagtgacttagttcatgtttgtggtgagtttttgagactggatttaggataactgctctatatgtggagaacattagaacaaagggacctgaagttatatttcagtgtcttagcgaggatttcaggaactgcttggtatgaagagttgtgtcagggtgagtctgttgtacttccccagctagaacaagtcatctttcatcattttcatatgtttggctttgtttctgtaggtctctatcccttagtcttcatactgttttaaatgcttatttacttatccttattccccatttaggctctaagcactaagtgggtactgcaagtgctcaaaaattttggttgcta

SEQ ID NO: 8329 - DNA, 261 bp, Homo Sapiens
tcaagctggaaagagctactacctcatgctggaaagggctactacctcaagctggaaagggctactacctcaagctggaaagggctactacctcaagctggaaagggctactacctcaagctggaaagagctactacctcaagctggaaagggctactacctcaagctggaaagggctactacctcaagctggaaagagctactacctcaagctggaaagggctactacctcaagctggaaagggctactacctcaagctg

SEQ ID NO: 8330 - DNA, 469 bp, Homo Sapiens
actaaaccatcaatatcacgatacactcggccagtcagacgatctcattcaccaccatcatgactaccatcatattctccatcatcaccaccaccaaaaccaccatcctcacagtcacagccagcgctactctcgggaggagctgaaagatgccggcgtcgccactttggcctggatggtgataatgggtgatggcctgcacaatttcagcgatggcctagcaattggtgctgcttttactgaaggcttatcaagtggtttaagtacttctgttgctgtgttctgtcatgagttgcctcatgaattaggtgactttgctgttctactaaaggctggcatgaccgttaagcaggctgtcctttataatgcattgtcagccatgctggcgtatcttggaatggcaacaggaattttcattggtcattatgctgaaaatgtttctatgtggatatttgaatggtgtaggttc

SEQ ID NO: 8331 - DNA, 1252 bp, Homo Sapiens
catcgttgtccactgaaggacattcaattcaaaccatccagcatccaccaagtaatcgtgcagtcgacagagacatacagcaccccagctctgttagccccatctgagtctaatgctaccagcactgccaactttcccaacattcctgtggcttccacaagtcagcctgccagtatactggggggcagccatagtgaaggactgttgcagatagcatcagggcctcagccaggacagcagcagaatggatttactggtcagccagctacttaccatcataacagcactaccacctggactggaagtaggactgcaccatacacacctaatttgcctcaccaccaaaacggccatcttcagcaccacccgcctatgccgccccatcccggacattactggcctgttcacaatgagcttgcattccagcctcccatttccaatcatcctgctcctgagtattggtgttccattgcttactttgaaatggatgttcaggtaggagagacatttaaggttccttcaagctgccctattgttactgttgatggatacgtggacccttctggaggagatcgcttttgttgggtcaactctccaatgtccacaggacagaagccattgagagagcaaggttgcacataggcaaaggtgtgcagttggaatgtcacaggtgaaggtgatgttgggtcaggtgccttaggtgaccacgcggtctttgtacagagttactacttagacagagaagctgggcgtgcacctggagatgctgttcataagatctacccaagtgcattatattaacggtctttgattggcgtccgtggtcttcgacagatgcagcagcaagcgggtattgggcaaagtctgcagcagttggccccaagcacagccttggtcccgaaaaatccctgggccacgatacacgaagggggaaaacgcccgacgtaacaaggcttggtaaccacgcgacgcgtgggcacattggtgggttgaagaacccctcgtgacggcgaaatgaccaaccccgacgagaggactatgtgaaaagggcgtggacccggttaccccagacaacgggaccaaaaaacccttgctgggagtaagaaaaagcataaacgggacaccacacgtcactaagaaagtgtctccacacgagcgggcgaccgcacccattaaatagcggcgatcacgcgcggcgccaaccaacactagatcgagggcgacacaaccagcgagtagtgtgaagaaccgg

SEQ ID NO: 8332 - DNA, 439 bp, Homo Sapiens
taatacgcaacatgatgactaatagcaagcctcacaaacctagccctacccccatccatcaatctaatcggagaattattgatcattacagcatcattttcactgatccaacatcacaattatactcataggaataaacataataattacagctctctactctctctacatactaattattacacaacgaggaaaatacacccaccacattaacaacatcaaaccctcattcacacgagaaaacgccctcatagccctacatattctaccactactactactgaccttaaaccctaaaataatcctaggacccctttactgtagatatagtttaataaaaaccctagatggtgaatctagtaatagaaaattaaatattcttatctacggaaaaagtttgcaagaactgctaactcaggcttccacacttaaaaatgtg

SEQ ID NO: 8333 - DNA, 361 bp, Homo Sapiens
aaatttgagtttctgtagtttcatctttttttggtatcgaagtcaggtttttctgggcagaaaaacaaagagcaggaaagagagagacagagagaaagatgtgtgagaaaagacaaccagcaaataaagaatcaccaccatagcaaaataaaacataaattgaaagaaggtgccacttggcaaatgtactgcacgggcgtcaattccatgccagagggaggatgaattagggatgaaaaggaggagataaggaagagttacaaggtgggcaaacccagggtctagcatcgtttctcaggggaaattcgctgtcggggaaaatggagcactcccacatctattagaaaatgaagaaatcccc

SEQ ID NO: 8334 - DNA, 441 bp, Homo Sapiens
tctcccaccttcagctctggggaggcatgctctgggcctctggagccagggctcaggcccccaactctcctccttgcccctgcaccctcggacttggcctggccagaagggatgggggcaagaggaaggcagccaggggctccagcccatgccctcacagatttggctctcgagttggggagcgaagggctgggggaggacactgggaaccgggccagccgtggccctgcacttcccccagggagcaccaaggctaggcgcggcttcaccgcggggctgggtcgtggccagcttcgcccctgggtctgaagacctctgggcggcccaggccaaccttgccctgccgccgcacactcggctgccttctcatacccaggcttggggatttccaggtcccgttcccctcgtggcctggctgccagtcctccagcacccctcact

SEQ ID NO: 8335 - DNA, 1359 bp, Homo Sapiens
  misc_feature (1242)..(1242): n is a, c, g, or t
aactgttgcagtttttactctatttattttgttccccatgtttatgaaagtcctgcacagtttcaaaggcatggtaaataatatatcaatgtttatgtagtctgttacagaaacagctatagataacattatccagtgaagagcaaaattcaagctttagaaaatattcatgcatgcaattttgacatatctaaaaataggtttttgtatatttatggtgggaggtggttgggaacttttaacaaaatggggtgttaatttttgtacagtctgtgggcatttacacatttttaatgtattaaaatttggtaattatgtgtacattaaattaataaaagttacttctagttatgatttgtgaattccctaagaccttggatttttttaagtaactttatatcagaaatgatactgcatctttatatttttaaaattgtattgctgctcaagaatggtaccctcttgtcaaaaaggcatacattcataattgtacattcagcattgtaaataatcttatgaaaccttttttgattgaagctattcaaaataaaaattttattgcatgaactaccaaacccccccacacaacacgaacactatctgtcccgccgccctggccactctagaattatttcagaccatttcttttgaccccccgcatcccccaacgtccgcggcacccggccccctagtttgacttccccaagaaaaaacattgctcaatcgatcccgggccttgtactttccccaccagataacaaaaatccgccccgcgcgggctaaaatacccacgccggttcccatacattatacccccgataatgccccacctcgcccgcatgggttctccccaccctggcgcactacctatatacacaccgcggggtacgttctcacctccatagttagaccccctatttcatatcccctcatcttgctattctcttcgctacttatcgcgtgctattctagtcgcatctttagccagtcgtaaccgtggttgcgccccagtgtgacatattgacacgactttttcttcatgtcgcatagagaatcgtcctgaaccgcccgtattcagacgagcgcgcggatgaacttattattgtatcaccccatcccaacaacccgaccctatcccgctatatatacactcagcacccgcccacggatccgtccaatctgcggtcactactacacccaaccgcgccgacttagcttagtcgccactaaacacaccccacncagccgcgctattatcacccaccccaccgcgcgcactattatactcgtcgccgcctcgccggtctcatgtaactccacgccggacccccgcgggtgaatcacctccgacccccctca

SEQ ID NO: 8336 - DNA, 876 bp, Homo Sapiens
ggggggcgattagcttagtgagcttaccccgccggagcgggggagcgctagaggtagttgggtagagaagccagcagggggcagcgtgggacccatatcccagccccaggcggaccagaggtggaaggcgcggcgggcgtaggagggtgggctggcgtgttttctcccagcccaagggagtcacagtgccttagaagtggcagaggtgagggtcaaagaacggggtccctgggctggcagagaaggtttgtgtccctgttgaggagccactctgccagtctttgctggtccataggcgtgagagtttatttttgtacaaggggtgagggtggggggcactgtacccttctagccccatcaggggccctgtagacgtcgctatttttggtacgattcctgtcatccctattgcagagtcgtgtccccaataaacaggtgtcttgaggcacagggccctgtgtctgtctgcctacctatgtcctgcttccctctttgggtccttctgtcaggaaatagtcacctcttcagacacttagttatcacccaaagagtttgataagaaatgcagaatattgggttttacccccaggtttcgatgcagtagctctgatggggcccaagaattagcatttaacaaacagccaagcaagttctcacgcactgtggcctgaggacctcattttgagaactgctggactgtgctggatcccagtttgtctgtgaccagttcagcctcaaggagtaggtgcagtgtgggagaaggagcttcagagagtgtgtggaacctctgggagccactgtggaggagacacattctcccaggctcatacacagtcagctagctctgggcctgggaggggtagaggggaccttccc

SEQ ID NO: 8337 - DNA, 1644 bp, Homo Sapiens
  misc_feature (796)..(876): n is a, c, g, or t
  misc_feature (888)..(897): n is a, c, g, or t
  misc_feature (1014)..(1022): n is a, c, g, or t
  misc_feature (1502)..(1511): n is a, c, g, or t
  misc_feature (1553)..(1561): n is a, c, g, or t
gaggatcccctgaagctgaaggtcaaagaatagagagaaagggacccgctgtgctggtggggtacactgcagaggagtaagtcttgtgtcaaagcaggaatctgatcagaggttcagaattggaagtacaatttcattgcttttgcaatttctacaaattaattttaaagtgtcagaaaaaggtgacggcaaggacatgcattgcaatttgcagggggaattgtcaagtgaggacttcatcacatatgacacgagagaaaagtaagagctggttctaaaatcaaaagctgttgttcatcctgaattgaattttctgaatttgggtggagcagagtcgctttgaagccttgttccgatctaattctattgtattgttgatgataagtgttgacattgggtagtgtagaagcaacaagcatgtccttgtagtacaggtacagtgaaggatagaacacactttcgttgataccaaaatttaaatagttatgttacttctgtatccagtgtcctaaagttttaggattagttttagttttttgtttgcttatatgagcttagcgtaaagaatatttttaaacttcgtgttttgtcatcagcatcttttctattaagaggtaaaatgtagtcctgtttgactcttgacaatccagtgtgtttgatcttaggtctcatgatctgagtgcataccctctccaggaaggaaactgcaccagtgtctattcctgttaaatagcaacttttagtctcagcttgtttcgttttgatgtcaataaatagtaacagcattcaagtgtgnnnnnnnnnnnnnnnnnnnnnnnnnnnnnnnnnnnnnnnnnnnnnnnnnnnnnnnnnnnnnnnnnnnnnnnnnnnnnnnnngtgaagaaaaannnnnnnnnnaaaaaaagattccaaaaaatttagtgtgggggcccgcccccaaaaaggtagggaaacggggcctaagcctgttccctagaaaacccccgaacaagacgagggttgggtttccccccnnnnnnnnncccccgcgggacgccctgtgctttcgaaaaaactcaagcagggagtccgggaggccatttccgggactcttcccccgggaggccccaggcggaggcccgaatataaaaattacggcccccgcccatggccgcatgacgcgggggacggggtggggaaatgccataaaaaatttccccgcccgaacagtgggagcccctccgcacaagacgggactgtggaaacaaccctggaacaccctggaggggaaaaagaaagccgccctttggggcgccatgggcggaattagactcatggcgcccgcggggcgtaaaacgcggcggggctaaaaaaacctgggcttctagcttgggcccccccactaaagactaaagattggggggaaacctcaccgcgggggttggggcgtggcataaaaaaactcgtattccccaaaatacccccctttaagggaaacgcggcacaggtctttccccgtggannnnnnnnnnttcttgagcaactttgtggtgtaaaaattgggcgggaaatcnnnnnnnnnatattctctcccaaacgcagaaaaaagagttcctattggcccccagcaaaacggggtaaacaaggggggaacccctttcccgg

SEQ ID NO: 8338 - DNA, 941 bp, Homo Sapiens
  misc_feature (854)..(854): n is a, c, g, or t
aaacaacaggctacaattctcaaacgactaaatgctgccctggagtaatcattaaagagccaaaacccaggacatgagcccaagagctacctattttgtcacataaggagcagttcaaatatacagagctcttaaaaaacatatctaataaagcaaactcaaaattaaacacattctagaaaagcgggcctggcctgagatcctatattgactgctccagcccaagctgaagctaatcctgctgtctcccatccacaaaattccttctagcttggctgggtcctccttcattgttgccctaactgggaaatggatgacaatggccagaaaggaggggaccagggaagcttcatttcctatagaaattttttcagggaattcaagatcgacacttagatgctaaggttagcttcagagctgccaaggctctggctgactggaattctttcagtcccaccacaccaagaacctgactgctacttggatagagaaatgaaaggacaggggaaggaggggcatactattaagatcaataagaagcatcgctgggcctatatagctaattagtctagctccttgaagtagctctaggcataaaccaaaactggctgaactgtgacacacaagaacatgggaataaatgaacatcagataccagacactctaaacagtggtcagtcacttagtagggctcaaatctctgaggttgctcttaagctatgctaacataagccttttctaatccaaagaccagaagagacttttaaggtcaagtgttctgttgctgcaggctggaaagcatccctgccccctggcagcaaggccctacaaaggggccagtaaagaactgctgngtcaggtcctcctggctgctggctcagagatccagggagggaggtaccaacaagttgaggtggtaaaggagaagacattcaagcaga

SEQ ID NO: 8339 - DNA, 859 bp, Homo Sapiens
gggcagcccaccaagcacgaccgccatgctgacctccgcatccatggctacgttgacgaggtcatgacccggctcatgaagcacctggggctggagatccccgcctgggacggcccccgtgtgctggagagggcgctgccacccctgccccgcccgcccacccccaagctggagcccaaggaggaatctcccacccggatcaacggctctatccccgccggccccaagcaggagccctgcgcccagcacaacggctcagagcccgccagccccaaacgggagcggcccaccagccctgccccccacagaccccccaaaagggtgaaggccaaggcggtccccagctgaccagggtgcttggggagggtggggctttttgtagaaactgtggattctttttctctcgtggtctcactttgttacttgtttctgtccccgggagcctcagggctctgagagctgtgctccaggccaggggttacacctgccctccgtggtccctccctgggctccaggggcctctggtgcggttccgggaagaagccacaccccagaggtgacagctgagcccctgccacaccccagcctctgacttgctgtgttgtccagaggtgaggctgggccctccctggtctccagcttaaacaggagtgaactccctctgtccccagggcctcccttctgggccccctacagcccaccctacccctcctccatgggccctgcaggaggggagacccaccttgaagtgggggatcagtagaggcttgcactgcctttggggctggagggagacgtgggtccaccaggcttctggaaaagtcctcaatgcaataaaaacaatttctttcttgcaaaa

SEQ ID NO: 8340 - DNA, 1399 bp, Homo Sapiens
atccggaaacgccactcctgggatatatcagtgaagatggagaaacaagtgaccaacagttgaatcaaagtatggacacaggctctccagcagaactatctcctactactctttcccctgttaatcatagcttggatttacagccagttacttactcagaacctgcattttggtgttcgatagcatattatgaattaaatcagagggttggagaaaccttccatgcatcacagccctcactcactgtagatggctttacagacccatcaaattcagagaggttctgcttaggtttactctccaatgttaaccgaaatgccacggtagaaatgacaagaaggcatataggaagaggagtgcgcttatactacataggtggggaagtttttgctgagtgcctaagtgatagtgcaatctttgtgcagagccccaattgtaatcagagatatggctggcaccctgcaacagtgtgtaaaattccaccaggctgtaatctgaagatcttcaacaaccaggaatttgctgctcttctggctcagtctgttaatcagggttttgaagccgtctatcagctaactagaatgtgcaccataagaatgagtttcgtgaaagggtggggagcagaataccgaaggcagacggtaacaagtactccttgctggattgaacttcatctgaatggacctctacagtggttggacaaagtattaactcagatgggatccccttcagtgcgttgctcaagcatgtcataaagcttcaccaatcaagtcccatgaaaagacttaatgtaacaactcttctgtcatagcattgtgtgtggtccctatggactgtttactatccaaaagttcaagagagaaaacagcacttgaggtctcatcaattaaagcaccttgtggaatctgtttcctatatttgaatattagatgggaaaattagtgtctagaaatactctcccattaaagaggaagagaagattttaaagacttaatgatgtcttattgggcataaaactgagtgtcccaaaggtttattaataacagtagtagttatgtgtacaggtaatgtatcatgatccagtatcacagtattgtgctgtttatatacatttttagtttgcatagatgaggtgtgtgtgtgcgctgcttcttgatctaggcaaacctttataaagttgcagtacctaatctgttattcccacttctctgttatttttgtgtgtcttttttaatatataatatatatcaagattttcaaattatttagaagcagattttcctgtagaaaaactaatttttctgccttttaccaaaaataaactcttgggggaagaaaagtggattaacttttgaaatccttgaccttaatgtgttcagtggggcttaaacagtcattc

SEQ ID NO: 8341 - DNA, 405 bp, Homo Sapiens
gggggacagtagaagcctggaggaggagcttgagtccagccactgtctgggtactgccagccatcgggcccaggtctctggggttgtcttaccgcagtgagtaccacgcggtactacagagaccggctgcccgtgtgcccggcaggtggagccgcccgcatcagcggcctcggggaatggaagcggagaacgcgggcagctattcccttcagcaagctcaagctttttatacgtttccatttcaacaactgatggctgaagctcctaatatggcagttgtgaatgaacagcaaatgccagaagaagttccagccccagctcctgctcaggaaccagtgcaagaggctccaaaaggaagaaaaagaaaacccagaacaacagaaccaaaacaaccagtggaaccca

SEQ ID NO: 8342 - DNA, 700 bp, Homo Sapiens
  misc_feature (613)..(623): n is a, c, g, or t
gcgttaaataatagttttaaataaaaatttcaaaacaaaataaaatgaattgtttctatagtattactttttactataaacatgcattaggtacataggcttgttggcttacgtaacaacaaccatgtataactttgtttctgtggaaaaaaatgctttcagaatctgaaactaaattagcaagtggtcttttagaacacaatcacactaatttagaagcagtctattttagtgtctaaaaggcaggaaaagcaaaattgggagttcaggtatgcttctgatgcactaagaatattgttctaataaaacaaatagtatttttatcctcttttctctaaccagtgtccatatttgccaagaactacatccttttaacacttcaattctcctttccttatcttctttcttccaaatttctcctttcccaaagttcatcttcttgccccatattacaataaaaaaatgaaatcactgaaattattttcaaatcttaatatgccaaaaaaagtaacttcgtacttatcaaatagcatagtctctgaaagcaatgactattttttgcaaaatagtgtgtactgaggctaggcagtataagaaataccatttcacagtnnnnnnnnnnntagtaagatgaataatcataccatcgaactgtcttcaccttcagtcattagttcatcatcagaagatacagatatgg

SEQ ID NO: 8343 - DNA, 838 bp, Homo Sapiens
gcctcagggcggtttgaaagatcggcgcgcaccgcaggagcaacggttggtcctgcggctgtgatgtcggtgttgaggcccctggacaagctgcccggcctgaacacggccaccatcttgctggtgggcacggaggatgctcttctgcagcagctggcggactcgatgctcaaagaggactgcgcctccgagctgaaggtccacttggcaaagtccctccctttgccctccagtgtgaatcggccccgaattgacctgatcgtgtttgtggttaatcttcacagcaaatacagtctccagaacacagaggagtccctgcgccatgtggatgccagcttcttcttggggaaggtgtgtttcctcgccacaggtggtggaaggctttagggccaccatggcgcagcgcctggtgcgcgtgctgcagatctgtgctggccacgtgcccggtgtctcagctctgaacctgctgtccctgctgagaagctctgagggcccctccctggaggacctgtgagggtggctggcccctgggctgccccttctcatggcttcgtgctgactccataaacattctctgttgaggatgtccagtcagggcttgacaggcccaggctcagcccgccgtggctgggaaggttccctgcagtgccagtgctgcagcagggagagctgggcagaagcagcgagggggcccagctggcgagactgtagccccctcccactcccacactcactcttgcagagcctgtgtctttaagcagctggcgtgttacatctccatttaaggtttcctttgaacaaaaggtctgtggctaaaaaaagtttaaaaatctaaaaa

SEQ ID NO: 8344 - DNA, 165 bp, Homo Sapiens
ggatacagccacttctaagcatatttgaaagaaacatggaaggttctttgtattgggatgtttttcaaaggtaaactttcccctgtgtagtggaaagagcatccctacaaaactacagacagaagagataggtcctaatattggctactactaatctagagtttg

SEQ ID NO: 8345 - DNA, 614 bp, Homo Sapiens
gttcttagccttcaggaaaaactacactggctttaaacattttttaaatatagtatctttaaattccccagcattcctccattttgtaaatttcctttttctgatttcagaagtaccacattgtaaaactgaacattaaaaaacaaagaaaacaaccaacaaaagggcacaaggacccttttggtagtgaggggtatgtttattgtctagattgtggtgatggtttcatgggtatatgcgtatgtccacacttcagattatagacataaaatgcgtacagttttctgtataacgattatatctcagtaaagctgtttaaaaaacactaaacattagaagaactccagtatgtgaaagacagaaaggagaagagattcccctcagtaacattcccctgccccaaggttatcgctgtggaacagctgcctgtgcagccttgtggacctcacataaggacttctatacaggaggcactataggtaaattctgaaagccaaatttggaccatactatcacaagcgacaccattcacctttcaaacagtggactttcacccaaggtattacagatttaaatgaccattaaaattacctggcagttgtgtacagttccat

SEQ ID NO: 8346 - DNA, 601 bp, Homo Sapiens
aatacgatcgagctcggacctaaaccatgcaaatatccactgaattaagcactgtgggaccaaatcaaactcacaaacacttcagttacactaaccttacaaagcatcacaaagaacttatgaaaaagatccaagttaaccaaatgtctaaaatatatgaataaaaccaatttagtcattacagagttgtttgtgttggaagattttccctcgtttgctgcacagtttttgtaaataaaatgctgacaggaaaattagaaggaaaattaaattaaaatgtaatgtaattttgaaactaaaatacgctctcctttcttctttttaaaactgtagtttggtgttttgctttgtttaaagatttgctttcccctaagtatgttaaaatatgcccagcaatgaaatcactttgggagtttcagctaggtttaagaattcctatatttgagctggaatcccttcaggacactgtctataatgaaaatgtctctattataacaccttgatcaggaccgaggagagaaatccctactaggaagagagagtggcatctggtatgatgcaatagattggtggatatttgcactggtttaggttcaccctg

SEQ ID NO: 8347 - DNA, 749 bp, Homo Sapiens
  misc_feature (625)..(637): n is a, c, g, or t
atatgaactttagcagtaaaaagaacaaaatttaaaattactacatcaatgcagaaagacacaccacaagaaatggagcagactagaagtgcagttgatgaggaccggaaaatgtatctccaagctgctatagttcgtatcatgaaagcacgaaaagtgcttcggcacaatgcccttattcaagaggtgattagccagtcaagagctaggtttaatcccagtatcagcatgattaagaagtgtattgaagttctgatagacaaacaatacatagaacgcagccaggcgtcggcagatgaatacagctacgtcgcgtgatgtcgctctcctccagcgtggtgtaagaagatcattgccatcaccatttggtgtgttcctgtgggaaaaagcaggactgtgcctccataatttggtcatttggcagcccctgttttcctgctgtttacaacatcaccaggtgccacgtcatgagcgtcaaagaaaatgcctagagatatttcaagctcatgtcattatgacatttcttaaaactttattaaaagaatgagtgaagtattgctgaaaagtggaaattcggttgggtaccatgctttttctccccttcacgtttgcagttgatgtgtcnnnnnnnnnnnnnaatgtatcttaaaggacataaaatttaaaaacttaaatattgtaatatgacagataacctaataattgtatctacattaaaatgacaaacatgatactactgcttgtcaaat

SEQ ID NO: 8348 - DNA, 336 bp, Homo Sapiens
aacttaatgaacctccacttaaagacaacaaaagaaaatcagaaaccaggcaaatccaagggtaccaacgttccacttctctaaaaagctcttcacctgtctgctatttattgtgaaagatcagacaatgagtcggtgtgtaacaagcccctcacccaaatggccccagtccacaagcttcaggggtaatggtggagcttatcgtctgtccacaccaaccattttacaaacagaaaacattcaatccaaaaatatgatgccctggacaagacaacaaaaatcaatctgcagatatgaaaatcctgaaaggagatacatgtagcacctgtatggtat

SEQ ID NO: 8349 - DNA, 561 bp, Homo Sapiens
  misc_feature (58)..(58): n is a, c, g, or t
  misc_feature (261)..(507): n is a, c, g, or t
aaatttagaaacagaatgatcagatgttcccgcagtttcatttgtgggtacctaccanaaagaattagaagccaggagtggaagacagatttgtgtacacccatattcatagcagcattagtcacaacagccaaaatgtggaaagccaacccaagggttcgtggacagatgaatgaaaaagcaacactgcagttcctttatacaatggaagactattcagccttaaaaaggcaggcacttctggccagtgcggtggctcannnnnnnnnnnnnnnnnnnnnnnnnnnnnnnnnnnnnnnnnnnnnnnnnnnnnnnnnnnnnnnnnnnnnnnnnnnnnnnnnnnnnnnnnnnnnnnnnnnnnnnnnnnnnnnnnnnnnnnnnnnnnnnnnnnnnnnnnnnnnnnnnnnnnnnnnnnnnnnnnnnnnnnnnnnnnnnnnnnnnnnnnnnnnnnnnnnnnnnnnnnnnnnnnnnnnnnnnnnnnnnnnnnnnnnnnnnnnnnnnnnnnnngagtgaggctccatggaaacccaaaacaaaacaaagtcaaacgaacaaacaaac

SEQ ID NO: 8350 - DNA, 598 bp, Homo Sapiens
taccgaggtgatacctaaacattcaaatatccacagtatgacacgtgtagtggtttcccagatatagccttaatactgtaccaagggatggtggtttccctttcttgccaccaaaccacatttcagtcaaagctcctttaatcttttaaatagtttcccacagataccctttttcttttctctgatagaatggggcattggtctggcatttagaacaatatacagtgcactttaaatgcttcaggccttgaaaagaattattcccaaaggcctatcacagtttacctgagggaaaatgtacaaaacaggcactattcacatatccattatgctactggttagacaggaagaatgaggaagttttccaatagcggtatcatcttgtggacatcatcatgagcttcatatacccattaacaatgcggagatcgcaccagaaacacatgaggccctggccaactgtggtatgttaagatcaaactgtaggaaaagtaaatacttactgtagaaaaatgtccaccacttatttagtctactgatagcatttcctgcaagagagaagcgtgtatttattcggggatatttgaatggttcaggg

SEQ ID NO: 8351 - DNA, 488 bp, Homo Sapiens
  misc_feature (50)..(97): n is a, c, g, or t
  misc_feature (229)..(302): n is a, c, g, or t
  misc_feature (312)..(321): n is a, c, g, or t
agtccttagcattgatcagaattaatctttggccaggtgcagtggctcannnnnnnnnnnnnnnnnnnnnnnnnnnnnnnnnnnnnnnnnnnnnnnnagcccaatttgagactagcccaggcaacatagtgagatctcatttctactggaaatgaaaaaattagccaggcatggtggcatctgcctataatcctggctactcaggaggctgaagtgggaggattgtttnnnnnnnnnnnnnnnnnnnnnnnnnnnnnnnnnnnnnnnnnnnnnnnnnnnnnnnnnnnnnnnnnnnnnnnnnnctgtctcagnnnnnnnnnngaatgctcaatcttctccccgaccacagccttcctcaagtaagctaaaaacaaacatcctctacattgtttgagtcaaatattggctttatccttgacacctcactttctttcctatcccatagtcaattggtctagaaataaaaataaaagtttccccagaattaa

SEQ ID NO: 8352 - DNA, 451 bp, Homo Sapiens
ggaaccctgaattacgcagacaaactatctacacaaacgcctgagccctactaataacattaattgccacatccctaaccgctgcctacagcactcgaattatcttctttgcattcctagggcaaccacgtttcccacccctagtcctaattaatgaaaataaccccctactaattaactctattaaacgccttttaatcggaagcatcttcgctggctttatcatctccaacaacatcccaccaataacagtaccaaacacaacaatacccctttacataaaaataacagccctaatcgtaaccatcataggattcatactagccctagagctaaacaacacaacctactacctgaaatttaaatacccatcacaaacatacaaattttccaacatactaggatattatccctccatcatacaccgcctagtgaatatttgccatggtta

SEQ ID NO: 8353 - DNA, 549 bp, Homo Sapiens
  misc_feature (55)..(109): n is a, c, g, or t
  misc_feature (128)..(128): n is a, c, g, or t
  misc_feature (133)..(153): n is a, c, g, or t
aaacctggaattccagctacttgggaaggctgaggcacaagaatcgcttgaaccnnnnnnnnnnnnnnnnnnnnnnnnnnnnnnnnnnnnnnnnnnnnnnnnnnnnnnntgacaagagcgaaactccntctcnnnnnnnnnnnnnnnnnnnnngtcccccagggcccatgtccacccagccgtctctctccctcccggccaatgttattctttcctcataagcccttccagagcacaaacacacaagcacgtatgtttgtcttcttttctcataaatggtaacaagctctgcttgctgttgtgcagcttctcttttcacataaaaatacaccttgaagattatttcttatgagtacgtaagatgggcacctgagtagtttgctgttacagaccacgtaggcaatggccgcctgcacagattatttgcacaggtgggagtatcattagatgtttctggaagtgggatggctgggtcaaggtgaatgtgtgtttggaattttgaaagataaagtcataaagataagtaaaaacacctggcatcttggctca

SEQ ID NO: 8354 - DNA, 1373 bp, Homo Sapiens
agaaatatccgttatcccctacaataaatcaaaaacaccattaaacctaaaaaagacccaccaaaattcaatacaataccacaaccaactccaccacttacaatcaacccaagtccaccataaataggagagggcttagaagaaaaaccaacaaacccaataacaaaaatagtacttaaaataaatgcaatatacattgtcattattctcacatggaatttaaccacgaccaatgacatgaaaaatcatcgttgtacttcaactacaagaaccttaatgaccaacatccgaaaatcacacccactaataaaaattatcaacaacgcattcattgacctcccagccccctcaaacatctcatcatgatgaaacttcggttccctcttaggcatctgcctaatcttgcaaatcctaacaggcctgttcttagcaatacattacacatcagacacaacaacagctttctcatcagttacacacatttgtcgagacgtaaattacggatgagttattcgctatctacatgcaaacggagcatccatattctttatttgcctattcatccacgtaggccgaggtctatactacggatcctatatattcctagaaacatgaaacattggagtagttctactatttaccgttatagcaacagccttcataggctacgtcctgccctgaggacaaatatcattctgaggagctacggtcatcacaaatctactatcagctatcccttatatcggaacagacctcgtagaatgaatcttattctatatcctattcgaagcaacactagtacccaaacaaaaacaccattaaacctaaaaaacgacccaccaaaattcaatacaataccacaaccaactccaccacttacaatcaacccaagtccaccattaaataggaaagggcttagaagaaaaaccaacaaacccaataacaaaaatagtacttaaaataaatgcaatatacattgtcattattctcacatggaatctaaccacgaccaatgacatgaaaaatcatcgttgtacttcaactacaagaacctcaagaaccaacatccgaaaatcacacccactaataaaaattatcaacaacgcattcattgacctcccagccccctcaaacatctcatcatgatgaaacttcggttccctcttaggcatctgcctaatcttgcaaatcctaacaggcctgttcttagcaatacattacacatcagacacaacaacagctttctcatcagttacacacatttgtcgagacgtaaatcacggatgagttatacgctatctacatgcaaacggagcatccatattctttatttgccttttcatccacgtaggccgaggtctatactacggatc

SEQ ID NO: 8355 - DNA, 554 bp, Homo Sapiens
ggggtgagggataaaaagctacaaattgggttcagcgtacactgcttgggtgatgggtgcaccaaaatctcacaaatccccactaaagaacttactcatgtaaccaaataccacctgttccccccaaatctatggaaattaaaaaaaattaaataaagtgtgcaagtgctggcgaaggccccggaaggagccccacattggtgatggcaacgcaggtgacagcactttcttcttccccagtggggctggtggtgcccattcctggctgccccactctgagtctgaggaggaaccaaggctttcctggaaatgcaggggctgccatcggcctgtgggcttagggtcccaaacagggagagcccattgtttgtcatttctcctcagtaagcagaaagctctaagccctgaagcctccggtaaacgtcagaacatttggacatctgagtccattgtccccaggtctcataattttcctacattaaaaatccaataatgcattttgtggaaaatttagaaagtacagataaacaagagaataaaaaacatgaatttta

SEQ ID NO: 8356 - DNA, 543 bp, Homo Sapiens
ccaactaggcttccaagacgccacttcacccatcatagaagaactcctacactttcacgatcacaccttaataatcgtattcttaatcagctctttagtgttatatatcatttcactcatactaacaacaaaactgacacacactagcacaatggatgcccaagaagtagaaacaatttgaacaatcctacccgctattattctaattcttattgcccttccatcattacgaatcctttatataatagacgaaattaataacccagccttaaccgtaaaaaccataggacatcaatgatactgaagctacgagtacacatgactatgaagacctcacctttgactcatatataatccccacatcagatcttaaacctggtgaaatacgactactagaagtagacaatcgagttgttctgccaatagaaataacaatccgaatataagtgtcctctgaagacgtactacactcatgagctgtcccatccctcggtataaaaagcagatgctatcccaggaacgactcctacggactaccgtggt

SEQ ID NO: 8357 - DNA, 406 bp, Homo Sapiens
tgcataatagtgaatgcttgtctgtaccattgaagttacacatttcactgagttgataccagcagatttttttcagggaaaaataatccaatctcataactacagcacctcaccacattctccctctcctaacagtgtagagacttagatttaattgcacctttcctttcaatagttatttctggtgggatgttgaagaaagctagtgggcaaaggattccgcttgaacagacactggtgataggctcccaggcttggaggtggcttgctttctgcactgcagtaaaaccacgagagggcatctttggctctgggattaataattcatctgtcttctctgacctgtgaccttttctctcctttctcttaccctttcccggtagtgtgaagtgagggggtctctaac

SEQ ID NO: 8358 - DNA, 634 bp, Homo Sapiens
ccggactacagtgtgttgcagaaatagagagaagaggatacatcaaagaatatttggaagcacggagctagacctaagatggatgggctgcaggggagatatctgaggaataggcaaggaaggagatttcaaggacaacttttagattcgggactcgaatgatcatgtagatgatgaagatgtaatttataagactaacgaaaactagggaggtgagaggagagtaacaactaggatgctttgggctacagaaagtccaggcttaatgtgctttaaatcttatgaaaatatgtcatttaacataactaagaggtacatagcagtgcaggatccaagtgctggactttagggctctgagtccactgttctgtggttctcttaactctgccctgttcagtaggggtctatcctcaggcacaacagctgcgacactttcacgtatcaatacatttttagacagaagtggccatcttgaccactgtctccttcctataagtgaagaaagattttctaaaagttttgcagaagtctttactcagttcttatttgcagaatataactatccccaaccaactgtatgcaggaaaaaaagagatcttcatattttcttgtatcaatcctagtgctgtgtggt

SEQ ID NO: 8359 - DNA, 595 bp, Homo Sapiens
atgagagcaagttctgacaggactacctggcagtgatgcctaactattcagtatcaacgtaatcccacggtgccagaccgttgatgggcaacagctggaagttggttgccattggggcccaagtgcagcaggatggttctggtcaaatacagatcataccaggtgcaaaccaactgattatcacaaatcgaggaagtggaggcaacatcattgctgctatgccagacctactccagcaggctgtccccctccaaggcctggctaataatgtactctcaggacagactcagtatgtgaccaatgtaccagtggccctgaatgggaacatcaccttgctacctgtcaacagcgtttctgcagctaccttgactcccagctctcaggcagtcacgatcagcagctctgggtcccaggagagtggctcacagcctgtcacctcagggactacctatcagttctgccagcttggtatcatcacaagccagttccagctcctttttcaccatatgccaatagctactcaacttactacctaccacctagctacatgggtattatgtactttactaccagtggatctatcagggaccaaact

SEQ ID NO: 8360 - DNA, 479 bp, Homo Sapiens
agctacaaccctaccctggcagggacctgagagcatctcaggaggggcagcgcatgtgtgcatgtgctgtgtgagtgagcacacccgtgtgcacactcatacacatgtgcacacacacgcactctccccactcaggggcctggaggtctggctgagcccctggggaaaggtgagttctttcatctccctcctccaggtcggagtgcctggagtcaggtgtcgaggccacattgctggctgccccctctttgtagctcctataaagggcccacacctggtggatacctggttgagcgtgtggtctctgccccagcctgtccttgtcacgatcacaggccttgcttttgtaacaatgatgaccccggcctgtctcatcttctgaagaggaaaagtcaaagtgttgctgtggctccatatttcaactaaaaatatatctgttggagaaagaaattaacaataaagaattttcataggaaaaa

SEQ ID NO: 8361 - DNA, 915 bp, Homo Sapiens
  misc_feature (499)..(507): n is a, c, g, or t
ggcaaattggccaaggagaagcacaagggcgctgagtgtcccttgaaaatgcaaaaccagtgtggcggccgcactgtcttcccggacatccagaagccatgtaaagatgaatggggtaaaaccctgggtgcgatggaagtcactctggccctggagaagaacctgaactggacccttttggatcttcatgccttgggttccacctgcacagacccccatatctgtgacttcctggagagccacttcctagatgaaaaagtaaaactcatcaagaagataggtgaccacctgaccaaccttcacaggccagccggcctccaggccgggctgggcaaaaaggttcaccctcaggcacacgggagcctaccgaacccagcgacatctgaagagccccgctctgcctaagcctctccctccagccactaggcagcttttttaaaccaactctagagccctctcccaagccttagaccaaatggaaataaagctttttaccgcnnnnnnnnncccgggcacataggcaagcgagggaaagcaaggagaggccacggaggccgtgttcggacagccctgtggcactcaaaaacgttgccaaaaaccgtctcccttgcacacgcgggccccccgtaacgccaaggcaagatgtgggccaaatgcctaggctcgcgaggaagagagcccggtgtcatggccgcaagagtcatgagggctccgcaacggcgagaaaaacacaaacctaccgctcgggaggcccaccactggacgcgtggcgacgggtccgactcactcacatcacggtcagcgttgccttcctcgtgccatcactctacgaccgggcgacgcatacgacgccacgcgcgccgaggagattgtgacggggatgcgaggcggtagcctgcgcgatacacgcgcgca

SEQ ID NO: 8362 - DNA, 361 bp, Homo Sapiens
  misc_feature (153)..(204): n is a, c, g, or t
tgaatctcaagtccagaccagtccagagttcaagacccagcctgggcaacatggtgaaacccccatctatacaaaaactcggcaaggcatggtggcatgcacctgttgtcccagctactcgggggctggggcaggaggatggcatgagcccannnnnnnnnnnnnnnnnnnnnnnnnnnnnnnnnnnnnnnnnnnnnnnnnnnntgacagagtgagacccccatctccaaaagaaaaggctatcaatacaaaagtttatctaaattactgtacagctatacaatggaatactctacaaaatggagagatccataagataaagcaaatgaataaagcaaaatgcatgtgttgacaaaaaaaa

SEQ ID NO: 8363 - DNA, 1759 bp, Homo Sapiens
ggaagagtggtatcaacgcagagtgtccattacggccgggtggcgccccggttcccggtccgactgggcacctctcctggccaggggtggagcggccgcggggcggggggatggcacaaaagaaatatcttcaagcaaaattgacccagtttttaagggaagacaggattcaactttggaaacctccatatacagatgaaaataaaaaagttggtttggcattaaaggaccttgctaagcagtactctgacagactagaatgctgtgaaaatgaagtagaaaaggtaatagaagaaatacgttgcaaggcaattgagcgtggaacaggaaatgacaattatagaacaacgggaattgctacaatcgaggtgtttttaccaccaagactaaaaaaagataggaaaaacttgttggagacccgattgcacatcactggcagagaactgaggtccaaaatagctgaaacctttggacttcaagaaaattatatcaaaattgtcataaataagaagcaactacaactagggaaaacccttgaagaacaaggcgtggctcacaatgtgaaagcgatggtgcttgaactaaaacaatctgaagaggacgcgaggaaaaacttccagttagaggaagaggagcaaaatgaggccaaactcaaagaaaaacaaattcagaggaccaagagaggactagaaatactggcaaagagagcagcagagacagtggtggatccagaaatgacaccgtacttagacatagctaaccagacaggcagatcaatcagaattcccccatcagaaagaaaagcccttatgttagctatgggatatcatgagaagggcagagctttcctgaaaagaaaagaatatggaatagccttgccatgtctgttggacgctgacaaatatttctgtgagtgttgcagagagctgctggacacagtggataactatgccgtcctccagctggatatagtgtggtgttacttccgcctggaacagctggaatgccttgatgatgcagaaaaaaaattaaacttggcccagaaatgctttaaaaattgttacggagaaaatcatcagagactggtccacataaaaggaaattgtgggaaagagaaggtactgtttctaagactctacttacttcaagggatccgaaactatcacagtggaaatgatgtagaggcttatgagtatcttaacaaggcacgtcagctctttaaagagctatatattgatccatcaaaagtggacaatttgttgcagttggggtttactgcccaggaagcccggcttggcctgagggcgtgtgatgggaacgtggatcatgcggccactcatattaccaaccgcagagaggaactggcccaaataaggaaggaggaaaaagagaagaaaagacgccgactcgagaacatcacgtttctgaaagggatgggctactccacgcacgcggcccagcaggtactccacgcagccagcgggaacttggatgaggccctgaagattctgctcagcaatcctcagatgtgggggttaaatgattccaatcctgaaaccgacaaccgtcaagaaagtccttcccaggaaaacattgaccgattggtgtacatgggttttgatgcactcgtggccgaagctgcgctgagagtgttcataggcaacgtccagctggccgcccagacccttgctcacaacggagtaagcctgcctcccgagctgccgctgtcgccagaagactctttgtctccgccagccgg

SEQ ID NO: 8364 - DNA, 907 bp, Homo Sapiens
  misc_feature (406)..(406): n is a, c, g, or t
  misc_feature (413)..(413): n is a, c, g, or t
  misc_feature (418)..(418): n is a, c, g, or t
  misc_feature (425)..(428): n is a, c, g, or t
gtttggggaagaggttttcccacatttccggacaggaaaggctttaagtgaaatttggcaacccaggttcttgccaattaaagtggccaagggccgggggcgctaaatttaataaattgagggttcggcctggggcttccctttggaaaggatacccagaaaaaggaccttcaggaaaccccccttttggagttggttttcagaaacggctctgggttgccccccgggggggttttttaatttggtgaggaatgccaaagcccctaggtccatggcccagggatctccctaggggaacacggtattgacccatgtttcactggacctaagtgggccccgcggggccaaaacgaaatggtctagaaaagcttcttcgagggggccgagggcggcccgacaaggaggnttttaanggggngcggggnnnngggaccgtgcccagatcagaatcgcctcgataatcagtggccggggacaagcccggcctcgtctatctgatcaattcatcacttctgagcgccgggccccgcagggccagctccgggacctcggggaccacagcgtggccgccgcctaaggggcctcgctgcacagcgccccgagggggcttcgcaggaggagagcttttcatttcgggtcggcccggcggggctggggtcacgatccgatcaaataagatcaaagtgtaagcgggaggaggggcgcaggggtgggcgcacgcactcgcctaacacgctccaagcgcgcacactcacacactcacgcgtccactcacactcaccctgcacgcgcctcacacccaggctagaccctccatactcacccaggctagaccctccatacacacccacgctagaccctccatactcacccaggctagaccctccatacacaccccaggctagac

SEQ ID NO: 8365 - DNA, 701 bp, Homo Sapiens
  misc_feature (469)..(471): n is a, c, g, or t
  misc_feature (475)..(475): n is a, c, g, or t
cgagggcagaagctcctattggctgacagccccggttcccccaacatgttcccgttcactctgcccccacccccaaaggctcagcctctaaatctcagactccaccacctcttaatggctcagtccccttcaccccatttccaagtgcccccaggactcctgggccctgcttccctgaaccctgttctccaaaaccctgccccaggctaagggtggccagagaaggtcaccatgtaccacacaccaaagaagggggtcggcccaggggtgggcgacacaggcagcttcttcggcagcctcacggcagcaaccccagccttcccaaagcagcaggcgcctccaggctggggcccaacctagaaggcaggggtcaatctaacaaaaccctaacgttgacttttttccctggtggggcttcttctgtaacatgacttgcgaatatttatataaaaacgagtgttacaatgcnnncccnttcccccgcccacccgaaaacaccatggtcggcccgccttcggccccctcaaaaagcttttctaaaaccattccgtttggcggcccgggcccccagtaagtaaaatgaacctgggcccaaaactggtttcccaaggaaaaacccggggccattgaacaaagggctttgggattccccccccaattaaaaaaccgccccggggcgggaaaccccgggcgggttcttg

SEQ ID NO: 8366 - DNA, 501 bp, Homo Sapiens
tcagcagcagtgactgaggctgatgctgagatcagtggtgaaccagacactctactcaagctgcccacactctagtggtggggacaaacaagtaaagctgttgataaacagggcagtggaggacataagtccattggcagagctggaaaggaacgagtgaagttcctggtcacagagagcagagactattcccttcaccctctgaccttcagttatggagaggagtgtttaggggtgtggttgtctacctggaatgggatgagaagctctgctgcccaaagtgtttcctgtttcagggaaagatttctatggctggctatgaggaatggggactgcaaacctcttaagagttgtaggaaagtcagggcagcagacagtggaccagtcttgtgtttacccctcagggatgctactgatctcaaggtcttgccaggtctcacaatctccattgggactgaaaacccagtggaggtaagataataaaaataaccactttgaatc

SEQ ID NO: 8367 - DNA, 523 bp, Homo Sapiens
agactgtgaagggcttgaaagtgatcagttgtttcctgctcaaatggacccttcagtgccaaccctaccggccttggtccactttcagattcagatgaaatcattgcagtctcccggattaactaaatggatgagccaaattcactgctgacattgatgcccaggtgttcaagtcaaacctccatgatcacagttttaagatgtggttggcaacatgctgccttaagttctctaaagtgttcaggctgtgggatgagaagtgataggactttggagcaaaggctgtcctgactcatcctgaaaactggaaaatggggtacatttcacagctccagtagcttccatgtcttaagaacgagaaatcacttcattatggttataaaacagtaaaggatggataacatccttcaaaaccccaaccacaagaattgccaagagaaagagtgatttttaaatttttattcatttgcttatattatgatctttttgtaattacagaataaaagaaagactcagtaacacc

SEQ ID NO: 8368 - DNA, 582 bp, Homo Sapiens
  misc_feature (29)..(29): n is a, c, g, or t
  misc_feature (222)..(222): n is a, c, g, or t
ttgaatagtggaggacaatagtttcaganagttcgtcaatttaaatatttcttctggcaggacaactatcctaagtgatatgtgcattatatcagaatgcacataattccagtgtatcacattacctgtaatgggtaagtgtggtaggcagaaatgtccacttcaccctacaacaccagagatgtcactgtcctaatccccccagaaacatgttgacatgtncaccttaccatggcaaaaggaactttgcaaatgtgattaagattttgagatggagattatcctagattacctggatgggccccagtcatcacaagcgttcttatgagtgaaagaggcggggggcagaggagtcgggtcagagtgatgtgatgtgcaaaagactcatctggccattgctgcctttgaaaagggaggaaggggaaccacaagccaaggaatgcaggcggttcctcttctcccataggcttccagacaaaaagcagctctgccaacatcttgactttagcccactgagacttacgttgtacttctgaactacagaactgtaagataataaatttgtatggctttaagtcccta

SEQ ID NO: 8369 - DNA, 488 bp, Homo Sapiens
gggaaaagcattttaagatagtgacaatctgagtgtttgtataaaatgtaattctatgcgtttcttatgtgatctaaaaattcaatgcaaatatcttttatttgggtagtttggtctacatattttatgctctagcatgtgcaatatatcttggtaaagcacgatgatacaaatctggtgccagtgttatatttggcataacatattggtaacagcataaaatatggttggatgatttcagtgggatttggtctataaggtttacttatgtaaatgggagtggaatgactctggtaaatgtcatgactgtaaaaatggggaaaatgacttttagttcagtgaatgactttgaaacaatctgaatcttctcaagcacagtttaatacttttgcaactactgaatgctctaataacgtaatgaagtacttaactgtaatatactatggaaatgcattcagatggttatttttacaaataaaaacggtaca

SEQ ID NO: 8370 - DNA, 460 bp, Homo Sapiens
ccaaagaattgatctgcctagacccactaacactggtaccagataagctgtcctggggcccaaggacagcttatgctggcaccagtgcctccaaggggccctgaggaccagcccacctggcattccagtcttcaacaaaacgtcactactgcctccactaacaatgacatcctaacccattagggaaataacagacccactcacagatgagtaaattatgtagagactacactactgcatgcacccagaatcaaagccaaagtgcctcacccaaccaatactatagatacatcttcaggaaaaaagtcctcccctatgaaagcaaatgttaaaatttggaagaagtaattgttacaccagatgcacaggtatcaacataaagacacaagaagcatgaaaaagcaaggaaatatgatacctccaaagaaacacagtagttctgcagcaacaatttccaatg

SEQ ID NO: 8371 - DNA, 574 bp, Homo Sapiens
  misc_feature (317)..(317): n is a, c, g, or t
cagggtggattctgagggcttccctctggagaggaagcatgtgatgagaggtgtagacagggtcaggctgggacagaaggaaggaaaggggcagagctggggggagggggaggaagcgatcatatggggagtgtctggcaagagtagactggccagtctagggagtgcagcggggagaggggaaagggagaaagtacagaagaccagatgaaggagaggaggtaagcgagaaaaaatggaaaggggagccggaaatggaggagagaggacaagcaaagagacagaaatgaagacatgaggaaaagctgggggaagcnaggagaggaagggacgggatgtaggagggggaagaaaaatcggagatgagacaaaagaaatgtgtgggagacgggtagagacgaaatgcaaggggcgtggttttggtttttctccaagacctggagacatcgacccccatcgccttctgaagagagagggagggcgggcactgggggtcaggagagtctccagcaggggaggggaattgtttggactattgttcttcaggattggaataaaacaatcttaatttgga

SEQ ID NO: 8372 - DNA, 393 bp, Homo Sapiens
caggtaaattattagctcattctaaccccccttacctccccattaaacttatgctctacacacccttatgaccgccttgccaaaccccaagaaacaaagcaagagtgtacaaagtacaataagcctaacttacactaaacaacatgttaacaacacaaaacaacatattctaataaaacacttacttaaattacgtgctacgaaagcaggcacctacccccctagatttttacgccaatctaccacaaataaatttaaaattacaacacaataacctcccaaaatataagcacctatttaagcatacgcccacaatctgaatatagctcatagttaatgtagcttaaattatcaaaacaaggcactgaaaaagcctagagtggcctcctacgg

SEQ ID NO: 8373 - DNA, 480 bp, Homo Sapiens
  misc_feature (239)..(239): n is a, c, g, or t
cggcacgagggtttgtgagggtcgcctcttagaggtgttgcagtaggtgggatccgaccgctgtgtcttaccaagctgtgctgttttagattcagtggtcatgacgtaatcgtgcccacatattgctgtagaaagaatgtgatgtgtgtgctcctgggtatctctgggtggtggccaatataacactgagataaaggtgataatggctaatacatattgtgtctatcatgttccagtcngcttgcctaacattaactcatttagttctcataacaaactctttgaggaggtacttttattatctctatatatgtggaaactgaggcatgggagtttgatttgcctgaggttaaaccgctgggaagtgtccagttggtattgaaaccactctcaaagttctctagtgttagaaagggctaagtgggcaggaggcagccgctcatacttgaaatctcagcacttcggtgtgcagaggtggaa

SEQ ID NO: 8374 - DNA, 494 bp, Homo Sapiens
tgtgaataggggtccatggagaacaaatgtggagtatgaaaccgtgtgagaacaagtctgtgagaatgagtgcggacaagtgtgaaagaacaagtgagagagaacgagtgtgtgggaaggacaaaacgggtgtgtgagacaggaggctccaaagcccagtctgaggtccacatgagggcaccgtggagaagccaccagcagggcccgataaaggcctggctttagaaggcgcctttggaaaagcaactaaaatcagcgtgcccctccttcccaagggacacgtgcctcaggatgctgggagcctcgcctctggaggactgagctatttcaggaaactgaaaagccagtggaacaggcatttccaaaggacaggaagtcacctctgagctgttgcggcttttctacgagaagcagaacgtgtacggcactccaagatcggaaaacaatgtcaggtttcaactggaatgacacagatgtataaatcttgtgtcatg

SEQ ID NO: 8375 - DNA, 536 bp, Homo Sapiens
gcccagtcaacccaaggcagcactaaaatgttcaggtctgattacaaaggaggagttcaacaaccctgcctgcttttactcactttgaaatcagctttgctcttcctgcctgcttgtattctctttatgacagggtataaaggacctaaaagagcaagaagaaccttgggtctcttttgagccatatagtttggtccaaatagttcttgtctgaggaatccaaagccaataaccagataataaatattacagaaagccttacgcttttttcagtgattgctcttgtaggtgaaatagagtacggagctgacagtgtcaagccccaaaccaaaacttgtgtaggctcctatcctaagaggcccaggccaccattaaattgaatattcatgttttatacattttatttatgcatatattgtgaaatatacatatcttatatttcacaataaaagttttaaagaatgttacttgcccaccctagtggccaggggataagaccattaccagaaggtggacatgaaagcttactgagcaga

SEQ ID NO: 8376 - DNA, 634 bp, Homo Sapiens
  misc_feature (23)..(23): n is a, c, g, or t
ctgagaggacccctgcaaacggntggcacccaaacatctggattggcaaattagtggcaagaaggggcagcatctggactggtcagaattgatcttaagtctactgtcatttccagatgcattattttacaactgtatccttggaaatatatttctagggagaatattattgaagaaaatgttaatagcctgagtcaaatttcagcagacttacaagcatttgtatcagtggtagcaaatgaagccaaactgtatcttgaaaaacctgttgttcctttaaatatgatgttgccacaagctgcattggagactcattgcagtaatatttccaatgtgccacctacaagagagatacttcaagtctttcttactgatgtacacatgaaggaagtaattcagcagttcattgatgtcctgagtgtagcagtcaagaaacgtgtcttgtgtttacctagggatgaaaacctgacagcaaatgaagttttgaaaacgtgtgataggaaagcaaatgttgcaatcctgttttctgggggcattgattccatggttattgcaacccttgctgaccgtcatattcctttcgatgaaccaattcctcttcttaatgtagaattcatagctgaagaaaagccca

SEQ ID NO: 8377 - DNA, 362 bp, Homo Sapiens
actgcccctagcctatactagttttaatacatacacaggtattaacagtaatgaaataaagcaaaatggtttctccccaaacaaggaaacaaagttttaatacattccaataaaaggaaatgttactatcaatttttttgcacagaaactgtaacactatacttttctcaaaagaagatgatctttctgaattacaaatatacatctaaaaattattaagatttaactaaaaggtgagtaaattttgataacatcttaaaaccatttacttagaaacaaacaatttcactttaaatataatactaccaatcagaacataaaataaagcagtataagtcaccaagaaatctgaggtaattaac

SEQ ID NO: 8378 - DNA, 320 bp, Homo Sapiens
aggagactctccaccaagatacagctttactactgtggagagagttatccaagcaattggaaggtgcttttgcacttgtgtttaaagagtgttcattttcccgggcaagcagttggcacaaggcgaggtagccctctgttgattggtgtacggagtgaacataaactttctactgatcacattcctatactctacagaacaggcaaagacaagaaaggaagctgcaatctctctcgtgtggacagcacaacctgccttttcccggtggaagaaaaagcagtggagtattacttagcttctgatgcaagtgctgtcagaga

SEQ ID NO: 8379 - DNA, 576 bp, Homo Sapiens
aatttatcagcatacagacttcctcacaatatggagacatagaaaatgggaaggcttctaaacaattttcagttgccccaactgtatgagtttcacaaaattccattctcttctgccaagtgatattattccattccttccctcgtgtatcttatctttattattgaattttccctcacaatccactgttaaaagaagaaagtatcacacacgtgggttcttttggctatggaagtgtccttgagatcactttttgcacgtgactcagctgaagtgttcaaagcacatggaaatcacttgccagtgacaggtggacgttgtatgtgttttctctctcctaaggatgcctaaactttcttttcttcacaggtaaagtcagtgataaatcttttgtttgctgcatatactggagatgtgtctgcacttcgaaggtatgtttacaggatggattagcatgcactttacagatatttatgaagttgcttctgggcgagcagccattttaaggttaaagtctcacttttctttccctttgataaaaatgaccccaacaagaataaagtttattaaattaaa

SEQ ID NO: 8380 - DNA, 380 bp, Homo Sapiens
tgtagaaaagaacgttaattgtttaaattatagtttaaattttcttttgaaaatgaaccctaggtagataaaggaatctccttggcttctaactgcttttggtggtggagacaccacctgatgtcacccacggacacgttttcatccacctgtgaccagggagcttcagggagtgccatccgtttccatgggagagccccgccaaagtcacttagtggtataaacaacgtgcttctatgtaaaccccggtaacaaaaaaatagttttctatcaaatacagtatcaaattgtcatttcatgtaaacacagtgattcctggtgaagaattgaggccaaagtaccacaaaaaatggccacgggattgatccctgcttgaaaaa

SEQ ID NO: 8381 - DNA, 362 bp, Homo Sapiens
gaaatgccatgcgcgcccctccgaggacggggcagcgtgtttgaagagtcaccatggtagtgatattttatgagcatgagtcacttgtctgtttttcagggagcgctttgctcggcccatctcttttagtacatttccatttggtgtggtttggctgctgagtgcagtgtggcagcaagttacttaaaaacatttcacaaaaagccagattccccaacgctggcatacctgtggaccacatagatggctgtaattgcaaacagctgcccacccacccacggaacagtgagaggtcattttaaaacatgtcaaaaatagcctgaaccaggagaagctgaaacatttgttgattcaaaaatatt

SEQ ID NO: 8382 - DNA, 428 bp, Homo Sapiens
attttgaaattttgatgatatatcgcaggtagaaaatggatctcttcaactatgatatccacggcatagttaccgatgctagatatgccacggcttgtttttacttaacgaatgtaactctctatcactgctaaagttactgttttgtaagtaggaaaagcagcatcttgacctgtctttccaggcccttctctggtcttggcttcccatgttggccacagggactggggaaagaagctggggacagcacccctgccatgtaacgcatgctaatttcattatgtgccatcatcagaatgggttggtgatttcagaccatcagcaaagtctaaacctccaccgatttaattaacttgactgaaaatcagactcaacagaaaataaccctatcattagaaaaaattagcgactaaaaaaaactgctgcca

SEQ ID NO: 8383 - DNA, 581 bp, Homo Sapiens
aggcaacgccatgtaaatttcccatcatttctctctgcagcatttttaaaaagacatagagctgaaattttagtcaatcctaaaaatattttgtaattatctgcccagatttgcatttgggtagatagtgctgtagaagatatatcttgctttaagatagctgccactgattattttagtctattttaatcaacttattgccttgtaatctttcctttttcattctctaaatttctgaaattccatctttcgtgttccccaggaaagactagtaagatgtgtttttattaacaagacttactatcctcatttcaccatgacataagttgggctttctgttccaatttatcctacttgaatggtggacacttccacctgagtatttgtcattttcacctcaaccccagcacattaaaacaatcccttcttagctctttaaaagaagcttctgtctccagccttttcctagtcagtatcacatcttttgagcccggtatgggcattacagtttcagctctcacctcaagtcaacctcttctggttcataaagctctgccacccgtttgcaggggtcctctcag

SEQ ID NO: 8384 - DNA, 466 bp, Homo Sapiens
tcggtacccgcaaacggttggcacgtgtacgcacgtgtatgtacgttatgtcccgtaaccattgactgaatagcaccttgtttggattgtcgtgccggatcatgagttccatgaagtccagctacaattgatttgactgtgttagggcctttgacggccatggctgagtctaagcatccccaaaaattaaaaaataccaaatgtatgaaacctcagttatgtgtgagcatgggctgattagtcattagtccatcgagatgtcttatttaaggggaaagagtgggcgattttaggtgagatggtcctgaagtaagaaccagatgcctgttaaagttcatcaatagaaacccccacggtttatggaaccggagcgagaagagggatccctgccaagcgggttgctggtttcacgcggcatggtagttaagctcgtgatctagtggtggtgatatgcatgttgactgga

SEQ ID NO: 8385 - DNA, 812 bp, Homo Sapiens
  misc_feature (565)..(653): n is a, c, g, or t
  misc_feature (667)..(667): n is a, c, g, or t
  misc_feature (703)..(721): n is a, c, g, or t
aatgaaacatttaaatgacatctatgaggaagagccatttaattttcaaatggtctataatgagtttcagaagtttgttcaaaggaaagcacattccgtttataattttgaaaaacctgttgtcatgaaggcttttgaacacttgcagcaattagaattaataaagcccatggaaagaacttcaggaaattcacagagagagtaccagctgatgaaactgcttttggataatactcaaattatgaatgctctgcagaaatatcccaactgtcctacagatgtgaggcagtgggcaacatcctcactaagctggttatgaatataaccagtgacttcaactttggcatttcattcatacttctgtagagaacggaaaactattgtccattaacatgatatgctaaacattctataaacattcttgtatttatgtgagacttgcccatctactgtcttggctgtgtcttgccttttaatcatgaacagttacatgatttataatttcactgattgagattactttgtaagtagctgttcagaagaataaaatatgactgttttaggnnnnnnnnnnnnnnnnnnnnnnnnnnnnnnnnnnnnnnnnnnnnnnnnnnnnnnnnnnnnnnnnnnnnnnnnnnnnnnnnnnnnnnnnngagccgacaaaaanaaacccgttttgttgcgggccccctccggccccttnnnnnnnnnnnnnnnnnnncctcttccttttgtggggcgcgggggccccccaaagagaaaagggaaaccgggggccaaaaggtggtttccccaaagaaaaaccggggccc

SEQ ID NO: 8386 - DNA, 741 bp, Homo Sapiens
ctggcacctaaagacatttccttctggttgttgctctttaaaaacaaaataagcccctgaacgtgcttgcaggccagtttgtgtgcctgcacttgacgaattaccttgaccaacgggccaaaggcacagagctccaaggcatcatctttccttaaaatcctgagtgtttattaaaaagggacatggtctctaggtatcttattacatttgtatttcttacatttgaaatatcctaaccgctcccttcggtttcttcttaagaacatttacatctaattatttttcgtgcaagtcttgtaggacccacatgttttcctagctttggaaatcgatttttttcattcctcttatgaggatttccctatgtcagtaaacattaactttctatttcttccatttttgctcatttgaaacccctgctgcttctagatctatttctttgcacttgtataactttgaaataaattcctcatcccttagactaagagagtgggtgtctgtgaaaattgttttctccttcataatacctaaattctagtttgtcagtaaaatatttgtgtttggttaacaagctcttatttaagccattgagttagtataatctttattacctttgaaaaaccagagagctgaattttttgtcattctaagttgtaagtaacactgcagtcaagtcttctgatgaaatttccatatatcaaattgaaaataaagcaaaatatatttattactcataactaa

SEQ ID NO: 8387 - DNA, 488 bp, Homo Sapiens
gcggccgcaggtgatatacatcttcccctccagcgtcgcgcctgcgtgggcatacacctccctcttgagtggggccacgtatgcccaggagttggtggcagggtcgtagcgctccacagcattcaggtcattgtggtagtcacggcccgccacagcgtagatgtacctgcctacaacacacacggacaggtcggcgtgctcctgctgcagggactggatctggaaccagcggttgtgccgtgggtcatacctccagcatcgggactctgctcgaaatccttggacattgttgtcccctccaatcaagtatacgaagttgttgagcaccgcgatgccctggttggacatgcggggggccagggaggcagtgaagtgcttccactctcccagtaaggggtttagatacttggcctggtcgctgaggacagtggacggcgtggagtgaatgcccccgaagcccacaacgcactggaagtccgaccgcagct

SEQ ID NO: 8388 - DNA, 454 bp, Homo Sapiens
ttggcaaagggcctctgcaatcccagagacaagcaacagtgagtcctcctcacaggcaaccacgcccttcctccccaggggtgaaatgtaggatgaatcacatcccacattcttctttagggatattaaggtctctctcccagatccaaagtcccgcagcagccggccaaggtggcttccagatgaagggggactggcctgtccacatgggagtcaggtgtcatggctgccctgagctgggagggaagaaggctgacattacatttagtttgctctcactccatctggctaagtgatcttgaaataccacctctcaggtgaagaaccgtcaggaattcccatctcacaggctgtggtgtagattaagtagacaaggaatgtgaataatgcttagatcttattgatgacagagtgtatcctaatggtttgttcattatattacactttcagtaaa

SEQ ID NO: 8389 - DNA, 1163 bp, Homo Sapiens
  misc_feature (710)..(710): n is a, c, g, or t
  misc_feature (718)..(730): n is a, c, g, or t
  misc_feature (1017)..(1036): n is a, c, g, or t
  misc_feature (1136)..(1136): n is a, c, g, or t
ggtatatttggccatcctagtcattcctacttgttacagatcagtgttaattcagtttactctattataggaatactgggcacaaatgtaatcagccccagagtgctttaaaaattctcttaaataaacataatagactcgctagtcagtaaagatatttgaatatgtatcgtgccccctccggtgtctttgatcaggatgacatgtgccatttttccagaggacgtgcagacaggctggcattctagattacttttcttactctgaaacatggcctgtttgggagtgcgggattcaaaggtggtcccaccgctgcccctactgcaaatggcagttttaatcttatcttttggcttctgcagatggttgcaattgatccttaaccaataatggtcagtcctcatctctgtcctgcttcataggtgccaccttgtgtgtttaaagaagggaagctttgtacctttagagtgtaggtgaaatgaatgaatggcttggagtgcactgagaacagcatatgatttcttgctttggggaaaaagaatgatgctatgaaattggtgggtggtgtatttgagaagataatcattgcttatgtcaaatggagctgaatttgataaaaacccaaaatacagctatgaagtgctgggcaagtttactttttttctgatgtttcctacaactaaaaataaattaataaatttatgtccccnccaccttnnnnnnnnnnnnnaatcccatgcccgccgccctcggcccctcaaaaagtttttctacaccatccgtttggcgccccgggccccagtacgtaaatcgaaccttggccataacctgttttccaaaggaaattccgggccccataactagtggcttgcgatccttcacccaacaaaaaaaccccccgggccgccaacctaagcggttccgaaacaaatcccagaatggcagctcttgaggccctttcactggcctcctataaacccggaagttccaacgcgagcttcaatattaaaaatttannnnnnnnnnnnnnnnnnnnttaatcggaaaaacatggtcggaaactcctctaaaggccattcgctctccacctcgtaaactccccccccaataggcactgaatgaacctcttaaattgnccccgcggctattaaccacccttgtta

SEQ ID NO: 8390 - DNA, 485 bp, Homo Sapiens
gcggccgcgggtgaggcagggccctgcctggagtacctgctgcagcacaagatcctggagactctctgcacgctgggcaaggccgaggtgggaggccctctgcgcgctgggccaggccgaggtgggaggcctctgcgcgcttggccaggccgaggagggaggcctctgtgcgctgggccaggccgaggtgggagaccctctgagtgctgggccaggctgaggtgggcggtgggcagagggcagcctggggctccctggattccaggcctttctgcctatgctcttcccagtcctgacactgaaagtggcagttcgggcgagaggagcaaacaggacgggcactgcggctgtctcacttagaacactccaccatcccagcgctcctgttcccagttcactccacaaagatgggcctgccatgtgccaggctctgctctagatgctggggacacagcagggattcatactgacaagagccaggcatg

SEQ ID NO: 8391 - DNA, 400 bp, Homo Sapiens
tttattgaggaaaaggaatgggaggcaaatgcctgctatgtgaaaaaaacatacacttagctatgttttgcaactctttttggggctagcaataatgatatttaaagcaataattttttgtatgtcatactccacaatttacatgtatattacagccatcaaacacataaacatcaagatatttgaaggactctaattgtctttccttgacaagttgattttgcaattgtggtaaatagcaaataacaatcttgtattctaacataatctgcagttgtctgtatgtgttttaactattacagtgcatgttagggagaaattccctgaatttctttagttttgtattcaaacacctacccccctcgatacaacacacaccataaatccataaaaggtttaa

SEQ ID NO: 8392 - DNA, 832 bp, Homo Sapiens
ggggaggctttcgggacggcggcgggaagatggcggcctccaggaatgggtttgaagccgtggaggcagagggcagcgcagggtgccggggaagctcgggaatggaggtggtgcttcctttggatcctgccgtccccgccccgctgtgccctcacggacccactcttctgtttgtaaaggtgacccaagggaaagaagaaactcggaggttttatgcctgttcagcctgtagagatagaaaagactgtaatttttttcagtgggaagatgaaaagttgtcaggagctagacttgctgcccgagaagctcataaccgaagatgtcagcctcccctgtcccgaacgcagtgtgtggaaaggtacttgaagtttattgagttgcccttgactcagagaaagttttgtcaaacatgtcagcagttgttgttaccagatgactgggggcaacatagtgagcatcaggttctgggtaatgtgtccattacccagttaagaaggcccagtcaactcctttatccactggaaaacaagaagacaaatgcccagtatctgtttgctgatcggagctgtcagttcttggtagacttactttctgccctcggattcagaagagtactgtgtgttggaacaccaaggttgcatgagctgatcaagttgacagcatcaggtgacaagaagtctaacattaaaagccttttattggatattggattttccgtattcacagtttttatatgggaagataagcttttgcccttaatataatggtttaaccatcattttcttttaatgggaaagacatgccccttgaaggtatggcagagcactttttt

SEQ ID NO: 8393 - DNA, 820 bp, Homo Sapiens
ggctaggtagcgaggctgggtggtgaattcggcacgaggctggggaaggcgattggcatcgatctctccatcccttccgaggcccgacttcggcacgaactgagctgatcctgccccaggaatagtcttagaagaaagaagagtagtgaagaagttctcactgcagaagattgtgaaaatgtctatcatctggtttattcagctcaccggccagtagcagtagcagctggagaatttctctacaaaaagctcttcagtcgtagagatccagaggaggatggaatgatgaaaagaagaggaagacaaggtccaaatgccaaccttgttaagacactggtttttttctttctagaaagtgagttacatgagcatgcagcataccttgtggatagcatgtgggactgtgctactgagctgctgaaagactgggaatgtatgaatagcttgttactggaagagccacttagtggagaggaagcactaacagataggcaagagagtgctctgattgaaataatgctttgtaccattagacaagcggctgaatgtcatcctcccgtgggaagagggacaggaaaaagggtgcttacagcaaaggagaagaagacacagttggatgataggacaaaaatcactgagctttttgccgtggcccttcctcagttattagcaaaatactctgtagatgcagaaaaggtgactaacttgtggcagttgcctcagtacttggttgggcatttttgccctggcgagtgaaaagcttgggggcctttggacgatccgaattggaaagccccgtcgggttggggccgtctacact

SEQ ID NO: 8394 - DNA, 786 bp, Homo Sapiens
tttgccagtggcggtctttttgatccagtcacttttcaagtggacaggcccctaatcctgggcgagggcaacaattcctatgtgttcccgggagttgctcttgggggtgtgggcgtgtggattgagccagatcacagatatattttcctcactactgctgagggtatagctcagcaagtgtcagataaacacttggaagagggtcggctttatcctcctttgaataccattagagatgtttctctgaaaattgcagaaaagattgtgaaagatgcataccaagaaaagacagccgcagtttatcctgaaccgcaaaacaaagaagcatttgtccgctcccagatgtatagtactgattatgaccagattctacctgattgttattcttggcctgaagaggtgcagaaaatacagaccaaagttgaccagtaggataatagcaaacatttctaactctattaatgaggtctttaaacctttcataatttttaaaggttggaatcttttataatgattcataagacacttagattaagattttactttaacagtctaaaaattgatagaagaatatcgatataaattgggataaacatcacatgagacaattttgcttcactttgccttctggttatttatggtttctgtctgaattattctgcctacgttctctttaaaagctgttgtacgtactacggagaaactcatcatttttatacaggacactaatgggaagaccaaaattactaataaattgacataaccaacattaaaactcaaaaaaaa

SEQ ID NO: 8395 - DNA, 403 bp, Homo Sapiens
gccaagcgcaagagatcagcgcctgagaagtcgtcgggcgatgtccccgcgccgtgtccctctccaagcgccgcccctggcctgggctcggtggagcagaccccgcgcaagaggctgcggtgagccaatttagagcccaaagagccccgagggaacctgccggggcagcggacgttggaagggcgctgggcctcggctgggaccgttcatgtagcagcaaccggcggcggctgccgcagagcagcgttcggttttgtttttaaattttgaaaactgtgcaatgtattaataacgtctttttatatctaaatgtattctgcacgagaaggtacactggtcccaaggtgtaaagctttaagagtcatttatataaaatgtttaatctctgctgaaactcagtgca

SEQ ID NO: 8396 - DNA, 807 bp, Homo Sapiens
ctggcactggagatgctgggtcgccgggcacacaacgatcaccccaacaacttctcccgctcccccccctacactgatgatgtcaaatggttgctggggctggcagcaaagctgggagtgaactacgtgcaccagttctgtgtgggggcagccaagggggtgctgagcccgtttgtgctgcaggagatcgtcatggagacgctgcagcggctgagtcccgctcatgcccacaaccacactgcgtgccccggccttccaccaactggtgcagcgctgccagcaggcatacatgcagtacatccaccaccgcttgattcacctgactcctgcggactacgacgactttgtgaatgcgatccggagtgcccgcagcgccttctgcctgacgcccatgggcatgatgcagttcaacgacatcctacagaacctcaagcgcagcaaacagaccaaggagctgtggcagcgggtctcactcgagatggccaccttctccccctgagtctttcacccttagggtcctatacagggacccaggcctgtggctatgggggcccctcacacagggggagtgaaacttggctggacagatcatcctcactcagttccctggtagcacagactgacagctgctcttgggctatagcttggggccaagatgtctcacaccctagaagcctagggctgggggagacagccctgtctgggagggggcgttgggtggcctctggtatttatttggcatttataaatatataaactccttttttactctgaactcctgcctgctactgaaacaaaaaagcatgt

SEQ ID NO: 8397 - DNA, 563 bp, Homo Sapiens
tgtttccttcagcagcacttccatgtcatctgcccccgtgaaaatcagctaacgccgtttctcaatgacgtggatccccctaggccaccgcaaccttccggaagctctctcagctcagttcccattctcccaccatctcttggttctccttctacctcaccggttgctagtcccttcgtcgcagctgaaaatgtgcccggggcctactggtgggcctagcccagggcccttacgcagtgcagtttcccatgaatgatgcccagtcattatcacataacctgtgcaagccagcaagatggccctggtgacagcaaaagaaactgcactaggacctgaatgtagatctcagtcatgttccttactaacagcacgttttgcaaccatgcgttaaagaaacatctgactcacaacaaaattttaaagggtttatttgagtgaaaagcaatttatgaattggggaacacctgactgaaagagcgttagtattccagagacaaaacatcaagtgcaagtttttattgggaaaatgtagaagcacaataaagaaattatttgattggtta

SEQ ID NO: 8398 - DNA, 948 bp, Homo Sapiens
  misc_feature (521)..(521): n is a, c, g, or t
  misc_feature (892)..(892): n is a, c, g, or t
atggtggttgtgagctcaccccattactgtgtgtggatgtacttatgacctcaaatattgtccagtgtttagcagctatgttggatactgtcgtatttaaataaagcaacgaaaaacgctattaatgatgccttcagtgtatattcctctgttgttcctaatgctcaaaatcaagggacctctgaaggtgtacttggctaaatgtaagacatctggcatcatttgcagcactgtaacaccttcagtctcagttgtgcaattacttctgtttctttagtcagggtctttgcagattctaaagttatacatgaatacatcaaagtggacaaattttgttaacatcccatttaatatttgaaaaaatcagtaccacaaatatattttgattgtcacttacaaaataaaatacatttaccagtccccacaaacaccaccctaaccacacgccacttgcccggcccccctccggccctcgaacaactttctctaaacccatctcgttgggcgtgcccgggcccagntacgccaagcgccaccatgccccatcaccctggttttccctaaggaaaatctttggcccatgcactaccggccttggcattcctccccaattaacaaaaaccccccggcgcccaaccccaccggttctgaacaaactgcccaatgggaccttctaaaggcctttacctggcatttttccccccgtattcccaaaccgaccctcgatttcaaattcacctgcctcccccccgtaaacccccttcgaacccctggtggccccttcctttaatacctttcctcctcaactatggcaatccctccccaaaccgttttctgatgacaccctcacactcgctagccccgcctctacggcccctgtttacccccccgnatttataacttgcgcccctatggccgaaaaacacgggcgcaaatacaaacttgtat

SEQ ID NO: 8399 - DNA, 454 bp, Homo Sapiens
atattcctacaggtaggaattttctggtgaccccctacctatggctgctctaactcatattaggagagtgaattcatttgtcctgaaagatgacttttgtattcttcttgccatgttctcccctaccccctgcctttttaaaaacaccagttcttgaaattgtgttattgtttttctttttatttctaggatgtacctacctgagtatgtgttttgcaaacgctattgatgacttacacaattataacccagtgtttatcttgtcaaaaagttttacatattcagtgattctcaaattatgctcctgtggagcatagactcattgaatcgacctgaaatttccatactaaatttaaataatgatagacttttcccagtttatggaagaaactatgcatagagtttttctgttccaacattgcccctttctgggccaggcatggtggctcatgct

SEQ ID NO: 8400 - DNA, 383 bp, Homo Sapiens
tgacccaacagaggaagcacagatcaaatcaccttggagtggtcaccagggggacagggagccccccaccaatgtatcaatgggtgatttatgatgccttctgccctttggcgagtgaatgggtttcccataggggaagttggcctccctccgtgagctttggaaatgttttctaatagacacagggaggccagttctgtttcagagcaattatcttcccaaattctctgttctggtgttggaaatgtgtgccctggtttctgttttcctttataatgctgtaaatctctgtctcatcatccttctcttttgtttccatagccttttataatgcatatatgatgctgtgaacagaaataaattatttatacaatcaaaaaaaa

SEQ ID NO: 8401 - DNA, 444 bp, Homo Sapiens
atgagccactgtgcctggcctgaattcagtgatttgttggggatccaggaatcttggctccaagtctctgctggccgtgtctccagatcaccccaccgtgctctccccatgctctgaaaacatcagagttgtctcctgcggtttcagggactttcctctgaagctggatctgagcgggtgggaagattatgagtgaattctctccttcacccaacatccctccttccccaagccatgaattgcccctcaacaggcatctgcatctcatttctgcgcctcctccaaggcttaataacaactctagaaagcctaaacgctgaaaagacaaaccctgactgcacaatgcaaaacatccaaacactagagtgtccaataaatgcaaggacgtccacagattctgatttctcctgtgtttagagacagggtctcgctgtgtcacccagc

SEQ ID NO: 8402 - DNA, 1954 bp, Homo Sapiens
  misc_feature (561)..(570): n is a, c, g, or t
  misc_feature (1279)..(1436): n is a, c, g, or t
  misc_feature (1439)..(1440): n is a, c, g, or t
  misc_feature (1451)..(1463): n is a, c, g, or t
  misc_feature (1506)..(1598): n is a, c, g, or t
  misc_feature (1645)..(1676): n is a, c, g, or t
  misc_feature (1759)..(1773): n is a, c, g, or t
  misc_feature (1793)..(1824): n is a, c, g, or t
  misc_feature (1831)..(1839): n is a, c, g, or t
cttatgtgacccacccatctgtgcttaaccagaatccagcaagtcagcacacaagtgattttattgttattttgttgtatttacttgcatttgttgtatttactttcatctgcagcatttggagtttaaaaataatgtaaagggttctagtagaaatagtgtcctaaggccaattacctaccatactaacaatcagcagataaaattctggacgtgagattccttataatctaattatacctgaggttgagcaagaaatgtcttcctttagaaaatctcattcaagtcaggttcttctctacagttcaaaattgagaatggatttaattaactagcatttagccagctttttcttgcccttggagaaaaagaatcattctcaacctgataatctgttaagaaaaatcccatatgaacaatctggtcattaacatacatatgatacggagtctctttgttgtcaccaagtgaacatacttctcatggtgggttggacagtaatacatgttagagggtcagaagcttctggtttctgctgtttgctttaaatacccttggggnnnnnnnnnnaaacccttacaaggggagcatcagctttggaaagtgtgactctgtaggagtgtagaaggcagtggtgtatgatcttagcctcgtcctgatgcctgaatccagccagctgttgctctgacccacagcaatagagcaagttacccatcaccagcatttgtacagagcagggaattctggttttagtccattggtagcattgtgtgtatgaggagattcaacaccacagacagctgcaggactcgatatccatggcttctttccatcacaaaacgggtagaaacacattcactgcttcagggttctaatctgtgtgtctccttatgactccatttctgtaagctactctgtaactttgatatatgctgtattttctttctttaaaagatttagatgttttttcagcaagctagccatacaaccattgtatctctttctcttcagtatggtttagagcccagatcagttagtaggctttcgttgtcttctctttcaatacatgtacatctttactgtttgaaaagtgttacagctgtcaaagaatcttcatggacctgaagataatttcttgtgaagttgaatgcaagtgtactgtcattcatagtgtttatatcaaaataccaggaatcttcacttttgctaccttgatatagcattgggctatcatgttacaacattgaaatacattgatttattaaaaaatacttttatnnnnnnnnnnnnnnnnnnnnnnnnnnnnnnnnnnnnnnnnnnnnnnnnnnnnnnnnnnnnnnnnnnnnnnnnnnnnnnnnnnnnnnnnnnnnnnnnnnnnnnnnnnnnnnnnnnnnnnnnnnnnnnnnnnnnnnnnnnnnnnnnnnnnnnnnnnnnnnaannggggagggggnnnnnnnnnnnnnaaaaaaaattcttaaaacctttttgggggcgggggcccccccnnnnnnnnnnnnnnnnnnnnnnnnnnnnnnnnnnnnnnnnnnnnnnnnnnnnnnnnnnnnnnnnnnnnnnnnnnnnnnnnnnnnnnnnnnnnncgccccgggggggcccaaccgccgttttttctaaaaaaccccccccnnnnnnnnnnnnnnnnnnnnnnnnnnnnnnnntgtctttaaaccaagggggcccccccgggggtttttttaaaatatatatccccccccgcggcccgccgttggtttttttaaannnnnnnnnnnnnnnaaaaaaatacaccaaaactnnnnnnnnnnnnnnnnnnnnnnnnnnnnnnnnacaaaannnnnnnnntgggaagacatcgtgtttcccccgcgggggggttaacacaacccacctctttgaaacccgggttggaaaataataatctctctccccccccggggggaaaaaacacggcgccaac

SEQ ID NO: 8403 - DNA, 542 bp, Homo Sapiens
  misc_feature (192)..(192): n is a, c, g, or t
ttttcctaggttctgaaactagaaaacctctaggttctttcaaactctaaaattctacctttaaattgtaatgcattctaaagatttagatatgaagaccctaaataccatcccgagtctaggagagaatctggatgtaatacttctcaacattatcttctcaaagtacaaagaatgagaattgggctttanagaatgctctctaaaccagattatattgagacaagcctatcatttctgcatcactgttttctttgtttaagaaaacgatttgggtattgctgctgcagcagtgggttgatgatattaaaatcaaataaaaatattactcttgaaacaaatgaaatgatttaagcctatctctctaagaaatcgcatgaaaatatacctaggaggcacacattgtattgtcatcaaattaatttgttttctaagctcaaatgtaatttaaaatgagatatttcttcaactggttcaatcaacagacagtagaaggattctacggagagaacacaggaaataaaccctacaataatgttaga

SEQ ID NO: 8404 - DNA, 439 bp, Homo Sapiens
tatcatacagtattacaatgtattatgtgcaaaattccatttaaaaaatcatttacaaaagtacaacacagtatgtgctgagggttctagttcaacaaaagccaaggctaaaaaaggtacaaggtacaaagccaaccaaatgagatgactatgcatctttacacagtacaataacatgtttaagtaactacctgtgttacgtggatacaagaccctcatagtttgtgcacctgcaaactggttttatttaacataagtttaatttcactgcaggttctgataatgtagatagatttttttgtgcattttcaaattcttctccattatatagcatcttatttaactcaacaaaagccacattatacattacttggtttctggtcccaataatttgatgctgttaagttttaatttgtatggaaaagggagaaaagtgttc

SEQ ID NO: 8405 - DNA, 519 bp, Homo Sapiens
gctttttcgatgtaataatctattctttgctttaaaatttgttgctaaaacttttctgtcctttttctcaaatttttttatatgtcatatagagtacgctaaggcagacatttttctgagttacctatgttgttttcatcttgatttccccaaataattctaaaattatatttttaaaaacttcatctctttatttagtcttatgtgtttgctaatttacttatttaatattattcatagtatttttctgtacactcgatgataacaatttaaaacttctgccacctgggactactgtattttatgacttcattacatactagagtcttcaaaatataatatgatctaattatgggagaacaatgccctcatactcttatctccatggtgtttgtgtgtattagataatgatatacctgaattttaaactcaagtattctgattatctaaacatacagcaaagaatatctcactgatacagtaacattgcagaaacaaaataaaaacactattatttta

SEQ ID NO: 8406 - DNA, 341 bp, Homo Sapiens
ctagagagaattctgcagtgcctggatatgagaagacccatgcagaaaccatgagtctctctatatgaattgtattaaaaggatggtccaaattctttgaacagtagaggaacttaaaatgcctttatgcacggagtgacaagtcaggtttaggacacgcgtgcatttaggatggactggaaggaacagagtaaaccaaagagagggagagctgttaatgactctgcattagtccaggttagagggtgaacattcaaattaaggaagaagtggagaaacaaatgctagttatcagttttcagaagctgaattgatacatctcagctttgattggctgacta

SEQ ID NO: 8407 - DNA, 277 bp, Homo Sapiens
  misc_feature (265)..(265): n is a, c, g, or t
gcgtgagccaccgtgcccagctgagatccactttcattctcacctcacagtggctcctgactccttttccaatgcaccaagacacacaccacggagggatgtctgcacagacttctaatgtggtttggggttgcaaactgtagttggggcaattttttgtagagaggtctggtcctggacccactgtcagagaccttagagaaaggatccctttgggggtcccagacaaagatcttctttctttataacttgtcatcctaagatntaaagggtggaa

SEQ ID NO: 8408 - DNA, 486 bp, Homo Sapiens
ggatccccgccaaacaaattgcctgaaaataaagagaaggctgggtggtggcagcatccgcacctccctgtgcgccccaatgccaggtgccacgtagaggcgagaggtctttccaacacggcgggggacttgtcaacaggattaggcgtgaggagccgctctgcgtttccagtctggagactgcattcagcctgcagaataccagccgtggcgcccgctctccagggaggaacgtgctgagaagcttcagtgggtcagggagcccaggacagccagccccttgttcctccagggctgcccactatggggcagttacagggaacacactcagcaacgcttctggcttcaggaagggctgggctgggcccggtcctagccagcagagggcaggcgccctaggtcctggggaggctgcacatctcgcagtggcctgtgcctggctggttcatgaacgtgcagtgctgacaggcccacatggctgcagtt

SEQ ID NO: 8409 - DNA, 590 bp, Homo Sapiens
  misc_feature (42)..(42): n is a, c, g, or t
  misc_feature (76)..(76): n is a, c, g, or t
ggaaccatttaaaattggggaaggatatggttaaatatcccngcccagtccccccccaatttataaatgggggganctggggccctctcccaacaccaccagtccctgatggtctgcttggagccaaaggcccaaatcccagtgaacaagctgcttaactttaaatagctattaaatagagcataaaagggtaaaaatcatcttaggtcccatttctagctatctaggcattatccttcaatctagcagtcccaccttttaggagttcaccctgagcatacacctccaacaatacgaaagtacagatgcacaggttattcattacatcagtatttgtaactttgcaatattggaaactatctagatgtccaagcatagagagtgattgaatggcctatggtacatatatacactggattactatgcagctggaaaaaaatggtatgagaatgatcaccaggaacggatacagagtgattttcaggataaagtgttaaagaaaaacagtgacatccaaaagaacataggctatattttatataagaaataaggaaaattattaaaatatatgtacctttgcttattttaca

SEQ ID NO: 8410 - DNA, 632 bp, Homo Sapiens
cccgcgtgggttccttgcagagggactcaccagcgtgtgctgagcctgaagctccacctccagggtgctcaccgagcagctcagctccaggatctcaaaatgacagcactgcagctcctagagcaggacatggcctgcaggctgatgccttcagactggagcacagagagacacaattacctcactgcccaggtggatgccgagtcctccctactctgcagcctcccttcatctgggcttggaaccactgctccacatcctggcagctggtctccaccacggcctcatactggccccatatctcctctgactgctcaggtccgcagtgggctcagtccccaactcaatccggagcttgtcctctgcactcctcagagtgcaggcttcctatgtacacaaaaagagcagactctgcattcattcagccctccaccaaatgtcttgcccacctgaagcacagcatggtgactgctcaggcacttcaccccaggagagcagcagagccaccccagcagcccccttgtcagcatctctctccatgtctgaaatgatctaataattatctctatttttactttatcacaaagagtgacacccatacagagttgcctctgtttcaatcattatctggg

SEQ ID NO: 8411 - DNA, 544 bp, Homo Sapiens
  misc_feature (14)..(14): n is a, c, g, or t
actgatagaaccanaattctcccctgacaagatagtcctacaaggtgaatagaatgtcctaatacccttcacccttgtgccatgttgagcccaaaactgtaggccagggagagatcagggaggctcagtacatctcaagactccttcctcactaaagtgagggaccgggtagggtgaggagatgtggactgctttcagaatggcacccggttaaaccaggccctgagtaattcattcataacaattcttcactggtcacctactgtgcacctaacatcattcttgtgtggagagggatacacactaaatacacacacagacaaatggcgaattataatacctatgaagaagagcagggcaggataacagggaggagagggatgggatactttggtggcccttccctataggctggtgaggtgacatctgaagaaagaacttcgtgaaacgaagtgaactgtatctggggcgcttatggaaaacaaaccctctagcagactcactggttgtttttataaataaaatgtagaagctgggccagcaa

SEQ ID NO: 8412 - DNA, 537 bp, Homo Sapiens
ctgagtttgatttttcattttcagtgtttttgtgtatacttcatactgttccctttttagaagtccactgtatatgaaattgaaccccaaagtcaaatggttaagtgttcagatcattgaggtccccaagctaaatatcaccatcataaaatgtaaattctgggatacaaaagtaaatctcaaattttattaaacatttttcacgatagtaaattgtattgcattttagtagtccagattttagaagtttggaattttaatataggaaaaatactttgtgggcactaccggctgctaggttactcctgtggtcactatgtcacatgtgtagtatcatctcaactggcacacctgaccaaacccaccttcatagtaacactaagctgtcatttgcccttcccactgcattggcatctgcaatgatggcacaaatacgacggggggtgaaatggtggcaacttagcctgaatcaaggcaggcattgaagtgtcctatcccaagaggccttgcattcttccctgacatcttctctccatt

SEQ ID NO: 8413 - DNA, 244 bp, Homo Sapiens
ctgcatgacatctcagagagaggaaaagctcttgtagaatgattgtctaatactgaaaaggccaaacacacaaccaaagcatggctacttgctttcgtataaagtggaaagaacaccagtggcacacaaggatagattgctttcagtttttttcttaatgaggcttaagaaagctttatgctgaggagacattcggctgctgtggaggttgcgttggctgcggagaggataaggatcgtctaga

SEQ ID NO: 8414 - DNA, 350 bp, Homo Sapiens
atggacgccaacattgccttgcatttgtaccttattgatctttgcccatggaagtctcaaagatctttcgttggttgtttctctgagctttgttactgaaatgagcctcgtggggagcatcagagaaggccaggaagaatggtgtgtttccctagactctgtaaccacctctctgtctttgtccttcctgagaaacgtccatgctgctgctgcccttactatgtcccactggttcattcaatcaacctgcacttcatatctagatttgctgagaaaagcttcctagcttatctccctgcttcatatgctgctcccttctttaccttcatgtcatgcctgttagctgcggg

SEQ ID NO: 8415 - DNA, 1093 bp, Homo Sapiens
  misc_feature (931)..(1046): n is a, c, g, or t
gggtccggaattcccgggattggaggcgggctgcgcacttggcctgggaaccgaggcggccaggggggcggcgcgcccgggcccggaaagcggcggaggggacgcccgggacagcgcccctcaccgcccgctgctcgcaggaggagcagcatcgatcccacgagaactgcctggacgctgccgcggacgacctgctggatctacagaggaacctgccggagcggcggggccgtggccgcgagctggaggagcaccgcctgcggaaggagtacctggagtacgagaaaacccgctacgagacctacgtgcagctgctggtggcccgcctgcactgcccctctgatgctctggacctgtgggaggagcagctggggagggaagctggaggcactcgggagcccaagctcagcctgaagaagtcccactcgagcccgtccctgcaccaggatgaggctcccaccacggccaaggtgaagcgcaacatctcagagcgcagaacctaccggaagatcatccctaagcggaaccgcaatcagctgtgaagccagcaccacctcagagacactgttccctgctccagggtagacctgagatgaacctccctggaggagacttatttcaatgagtccaccatgacggatgaggcacctcctttccctgctgaaggacaaaccttgtttccctgtggccctcattcttgtgctccctgaagctttcctaatattgctgtgctccccaccacccccatggcagtccctccgcagccccagtccctggccacccccaaggggaacagggaggtcacgacttgactttcctcccagagctcaccccatgtcacccctccaggccccagaatccagagggggcctccttttcctacactagcttgagaacttccgccctttgttttgaggacccagggccttannnnnnnnnnnnnnnnnnnnnnnnnnnnnnnnnnnnnnnnnnnnnnnnnnnnnnnnnnnnnnnnnnnnnnnnnnnnnnnnnnnnnnnnnnnnnnnnnnnnnnnnnnnnnnnnnnnntttggctccttgggggaaaataaggggggcacctctctcccgtgggg

SEQ ID NO: 8416 - DNA, 407 bp, Homo Sapiens
ccagggaagttcgggggaaatagtggagagagcggcagccacagcgaagccccacaaccagggtgtgcaggtcacacacagcttccctgagccctttctgcctgtgtaggaagcagaaggcggaatgtcggctctgcccttctccgtaagatggtgcattaaaacgttccttataaactggaaatgaaggcttgggaagatggctaaaatcagcaatccttggaataacgcagaagcatccctgcttccctgggcccgcccgtgggcctgcttgtgctgttcagtaggtggtttttagaaagggcttccttcagcgtcattagcaacaggagtcgtcgtccgtttgcatgaggaaatgctcttaaccttccgtttctgattgaaactagactgcatctgtcatagac

SEQ ID NO: 8417 - DNA, 462 bp, Homo Sapiens
ccatcagttcctagaactcaagcacagctcccgccgatcctggggcggcgccacctctccacccgcagcctgcggaggcggggacttgggtgtcggcttttctgagggtgatcttttgttttccgagtttgggattcggctgttgggaaaaaaaatcgcgtttgtaccttttccccccacagatgagaagtgtttgtaatggatttgtatttttcttaattttatgctctttagacgtttaaaagaaccaaaaaagaaacttttgcttcttcgttttcggttgggatttgcagtttaatggcctcagatccttctccagatccccagggtttctttgtcttatttatggagaaaaaccggtcactttgtccagcgcactgtgaggcccccactcaggccagccctggcccccccttggtacttggaaccgaagttacagattatattaaaataataatgtac

SEQ ID NO: 8418 - DNA, 457 bp, Homo Sapiens
gaaagagcaagaagaaagcttaggcagccctgtccaccattccccatttgatgctcagacaactggagatgggactgaggatccatccttaacagctttaaggatgagaatggcaaagctgggaaaaaaggtgatctaagagttgtaccacctatataaacatcctttgaagaagaaactaagaagcatttgcaaatttctcttctggatattttgtttattttttctgaagtccaaaaaattatcattacagtgtaccatattaagccatgtgaataagtagtagtcattatttgtgaaaaattcccaaaaagctggggaaaacaaatgtgtaacttttccagttacttgacacgattcagtgggggaaaaccagcattttttattctattgataccaaagcatttctaataagagcttgttaaatttaagaataaagttatttaaaatattctgg

SEQ ID NO: 8419 - DNA, 172 bp, Homo Sapiens
  misc_feature (81)..(81): n is a, c, g, or t
tccctacaaaaataaaaataaatataagctgggcatggtggtaggtgcctatagttctaactgaggaggctgaaaaaaaanggatcccttgagcccaaaatttcaaggatgtattaagctctgattgcataattgcactccagcctggcaacaaagcaagaccctgtttttt

SEQ ID NO: 8420 - DNA, 466 bp, Homo Sapiens
accacagaggatgctgacatcatttgtattatgttccaaggctactacagagaaggctgcctgctatgtatttgcaaggctgatttatggtcagaatttccctctgatatgtctagggtgtgatttaggtcagtagactgtgattcttagcacaaaaatgaacagtgataagtatactgggggcaaaatcagaatggaatgctctggtctatataaccacatttctaagcctttgagactgttcctgagccttcagcactaacctatgagggtgagctggtcccctctatatatacatcatacttaactttactaagtaatctcacagcatttgccaagtctcccaatatccaattttaaaatgaaatgcattttgctagacagttaaactggcttaacttagtatattattattaattacaatgtaatagaagcttaaaataaagttaaactgattatatttgca

SEQ ID NO: 8421 - DNA, 489 bp, Homo Sapiens
ttggttcttcccaaccatcttacgacgctttattactgtgatttcagagaagaaacaggcttacaaaggttaaggccttgaaaccactcaactggtttaaagtggaatccaaaccaaaggtgccggctccacgtctactgccctttccacggtgccatgctgcctcccacaaaacatccacagtgcccttggccaatgaggggccgccatcggaggtcacaggaagccttttcacagtccctctggggcatgagtggggagcagctctttctccccaaagctttaaagccccatcgaggaaggggtgagaactgacctcctgaagtgcccgagtgtgtgtgtacggggagagtggactcaatttttatttttgaaacctcatgcacagagttccttatattccccaggtcccacaagagtaccaggtgccatttcagaaccacctttctaaacctctgcccacccactgaaagcaacacggcccttcac

SEQ ID NO: 8422 - DNA, 853 bp, Homo Sapiens
ggggaagtagtgtgaggctcgtgggcggagccaagcgccgccatgtccgccgccctgctgcggcggggcctggagctgctggcggcgtccgaggccccccgggaccctccaggtcaggccaagccgagaggggctccggtgaaacggccccggaagacgaaggcaattcaggcccagaaactgcggaactcggccaagggaaaggtgcccaagtcggcactggacgagtaccggaagcgagagtgtcgagaccacctcagagtaaacctgaagtttctgaccaggacgagaagcaccgtggctgagtctgtgagccagcagattttgcgccagaaccggggccgcaaggcctgtgaccggcctgtggccaagaccaagaagaagaaggctgagggcaccgtgttcaccgaggaagacttccagaagttccagcaggaatacttcggcagctaggctccctggagggcacggtgaagaggccttcaagccctgcagcctccgactcctgctggctccaggaaccggccgtgccgcgcggccagcagatggcgatgcaggaccagcctggctcgaggaagccgcggagctgagccgagtggaggctggaatggagctggtgggccggaagtcctggggaggatttacacacagaccggagctggcttccgcaggcctgggcagagcatctgcacctgccggaaaggaacgtatctgttttgtttgcttttgcccaggtggggcctctgggctgtttgctgtggagcaaggctaattcctgagcccttggggacgacagctccaggagtaggaagaagggtgggcttccaagttacaataaatgtgaacccaaaaa

SEQ ID NO: 8423 - DNA, 826 bp, Homo Sapiens
ttaatcgacagagacccaccgtacttgggccttgtgctgaactactgagacacggcaagctggtgattagcaaagacctcgcggagcatgaagtgtggaagaagcagaattttacaatatcgcctcattaatagaacttgtaaaggacataattagagaacgagacagcagacatcgcaggtgcctgtgaagcatgtgtaccgtgtgctgcagtgccaggagaaggaactcacgcagatggtgtcaaccatgtccgacgggctggaagttcgagcagttggtcagccatcggctcctcttacaactatgggaacgaagaccaagccgagttcctctgtgtggtgtccaaggagctgcacaacaccccgtacggtacggccagcgagcccagcgagaaggccaagattttgcaagaacgaggctcaaggatgtgagggacacagtattgacagctgaagaaatgatttacgttttcccgagatgtaatgaactgccatgtccaggaagcttggctgtgagaagaaacctgcttttgatcatttttctagagatctgggtgtgaatccttttttgcctctgaggtgggtggtgagagacgggcccagctgtccaaggccagacgtccccaagttgggggagcacggcggccgggtgggcgctgcctcttgggggggcctcgctctgttttttccaagtgccacgtgggactgaggcagacactcccagtcagcccgctcgatcctgaagatcgtgtgaaggaagcgttcttggtgctacacacagtctggaaaagcagcctgggcttcactggcaggaagcggccgct

SEQ ID NO: 8424 - DNA, 467 bp, Homo Sapiens
cctaccagtattgttcagagagattgaaacagaataaacgggctgttcttgaagaagcaaaacccaggaatatgcattactttggtttaatacttagtgctaacattgaaactgttggtggtgatggattttgtagcttgctgcttgtttcaccactggtcaaattttaaccattaaattgccattcacttttagaatcttgtatttaagttttgattttcaaatgttctgcttcatgtgtctgtgaagaattgtactttaagtgtgtgtcctctgaggtgcttgagaaagtgtacactgcagaactgcccattctcattactgtgtcctattttattcatgcctgtgtgtttttcttaagtatgaattctagatacagctacttatggattcatcaatatcatgagcacttttgctggttccagtcaaatcaatggcatttaataaattttttaagaagtaaaaat

SEQ ID NO: 8425 - DNA, 451 bp, Homo Sapiens
aaagaggccaaccgctggggacacctggttttggcacctttatgaggcctcccagcagcacaggagctctaaggggcacgctctgcagttgagctatttgcagagctccatgatcgctcaaagccgagcacgcgcacgggtttgctactggcaccagcacaaggctttagacaggcacttcccacggctgagttctaggcatcccctttttgaaacgtgttctctccaccctgcaagggtggggtgagaaatctcactttcgaagggcttgcaaggaggaagagagtcggcgccttgcggattccccggccgcgcttcaaggttcacacgccgcgtggcagctcggatgcagcccggttccgaggcggtcggcggtcgagactggggcctcgagccgagaagcgaagaacaaagcggccgcgttagcccgccgccccgagggacctcgtgc

SEQ ID NO: 8426 - DNA, 2225 bp, Homo Sapiens
  misc_feature (1014)..(1072): n is a, c, g, or t
  misc_feature (1420)..(1420): n is a, c, g, or t
gacattcaccataaagtaactgacccaagtgtggccaaaagcatgatggcttgcctcctgtcttcactgaaggctaatggctcccggggagctttctgtgaagtgagaccagatgataaaagaattctggaattgtacagcaagttaggatgttttgaaattgccaaaatggaaggatttccaaaggatgtggttatacttggtcggagcctgtgacaattgttgacactgtgaactgtccaaaagtctcttaactgcaccttgtgaatggtagttgaggtcttcatacagttcagcctctagaatggtaacaaatcagccaattggattcgaaacaaagaagactatgtaaaactcacccatcacactttgagactactcactggttggaagaatatagtattgcagcaaatcctgtatgaaagagagatgtgggcttcctttttgagtcttgtgttaggtgctgagaccttttacatgggcttatacagggagagagtcttcaataaatgtagtcagcactattttctgcatccagtgtggttgcgtttctcacctgagagtaatcaagataacatctgtcatcttccttggtttattgagtgaaatgcctctcagtcttaggggacatggcagagatgaaagaaagaaagagtgggtttcagaagtgtcagggtggagtgattccaagtgggatggttgtggcattagtttaagctgaataaataatttcaatttggggcagttattctgctttttgtaaagccgtggccaattgtctcctgtaatgactgttggttcaggcatgttgtactttgtagggacaaatgtgcatttgtttgtggcaaaagcctacaattgacaaacttgtaaatttctttgtatataaactagctgtaacctgactatcctttgtgtttactgtttttgtaaatttttttcctctataaatgaaagggtgttggttcagaatggcactttgaataatgtaaaccagtgaaaagtggattttcnnnnnnnnnnnnnnnnnnnnnnnnnnnnnnnnnnnnnnnnnnnnnnnnnnnnnnnnnnnaaagtgcctcccacctaggcgtaggccatgaccatttggggtacgagagcctaattttgtaggacttaatctgttgaaaagtgcagttacttctggaaattaacctcaatattaggtcagcatgtgaaatgttggatttgacatgtcaggtagggttcagggactgattggtcccatttgccctcaggtcagttgtttaatctcaagacctgttactactgattttattaaatcagagtctttaattcttgcatgtttgtatctaatttctgaacgaatgagcacactttaaccagttatttacagttacctttttcctttaaccggattgtgaaagcttcatgtatnttaatttagattctgtgtttttaagggttctgagcatgaagctggcagatagtcggcaggactcattttttcatcatggctggctgatttctccatagattgataacagtatttggttatcttgcttctctgtagttttgcatcagctgtttaactttgagctgagtgaggggagaggggtaaagagaaagaaacttaaggtttcttccacagaactccaccattgtgggcttttgagagagccctaaagcattgtaactagtggtacctagtgacttccaaccaaagcctttgagtatgcactaaataggtgagaagaaaggagagaaggtttttaggttagaaacctttaaccgatagaaggatatggtatgttgtaaagctggaaccaagtttgcatttttgagggcttgagatgaagggaagactcttaccagatagtaagacagctgagttttcctcagttttctcgtcttaacactagtggacaattctagcattttgtttggaggatttcagagttaacctcatggaattcaggattttttagcaagtttgcttttggttttatcttggcttttagtaatcatgttggctggtctggtcacaggtgactgtgaaacagatgccctggtcttgctttcatcactctaggatcatgaagtgctatgctatttcctggttatgaatattaaggttggaattacatttttattgattgtttggatcagagctcagttcctgtagaaaacgaactgtaaaagaccatgcaagaggcaaaataaaacttgaagtgaatgcttaa

SEQ ID NO: 8427 - DNA, 526 bp, Homo Sapiens
ccacatcatgaaggtggtgcagcagatcgtgcaccaggctagcgccggccaccagatcatcgtgcagaacgtcaccatggacgaggagacggcgctgggcccagaggcggctgccgccgacaccatcaccattgccacccccgagagcctgacagagcaggtggccatgacgctggcctcggccatcagcgagggcactgtgcttgccgcccgggcagggacaagtggcactgaacaggccactgtgaccatggtgtcatcagaggacatcgagatcctggagcatgcaggcgagctggtcatcgcctcgccggagggccagctggaggtgcagacggtcatcgtctagcatgaggtctgcggggtcctggccgggcagggacagggcagaggactctgagcgccccacccatgcctgcctggcctggtagagaagatggcacaggatggaggcgccccaagacggacagtgtacataagagtttcttgttgctttacaataaaacatgagaacctgcaaaaaaaa

SEQ ID NO: 8428 - DNA, 413 bp, Homo Sapiens
tcttgctgtcactggatttcctggcatggcagacagaaagaaagatagtttgaccaagtcgtagaagctgatccagcgggtaaaaagggggcagggaactcgtcccttttattcttgcctcagagctgcctgaagacatgggccaggccggaggctggacaactttggataacgctgacctgtacttccaagtaaatgcctcctgaagagcccgggacccttcctgggagaattctgcagccagaatgaaggtgccatcagcaggaggcactgtgaagcaccatcctgtcgctgtccttgtccattcctagcaagttaatcgtgtcttgttaaccagcagttcctgttcaacgtgtaaagagacctgatgttttccctaataaagctgataacagattttgcaggaaaaaaaa

SEQ ID NO: 8429 - DNA, 175 bp, Homo Sapiens
aaagtattcttaacatgaaatccacaaaagcggaaacaatgaaccattcttgcactttacagaatcattgtccttagctttagaggttgttaatttcttgtttttaacatgaacagaatgtgtggttctgaaggtgtgtgggggtctcaagaaattgtcctttggggccgggcgc

SEQ ID NO: 8430 - DNA, 763 bp, Homo Sapiens
  misc_feature (553)..(556): n is a, c, g, or t
  misc_feature (558)..(558): n is a, c, g, or t
  misc_feature (560)..(561): n is a, c, g, or t
  misc_feature (564)..(564): n is a, c, g, or t
  misc_feature (566)..(567): n is a, c, g, or t
  misc_feature (570)..(570): n is a, c, g, or t
  misc_feature (599)..(599): n is a, c, g, or t
  misc_feature (653)..(653): n is a, c, g, or t
  misc_feature (666)..(710): n is a, c, g, or t
tcaatcacaataagaccacagatgacccaacatcttcctactgcaaatacttgcatttctcgactttacgtcccactctaatcctctaaacaaattctcaaacagaaagtgttactcgccattaagaccaagaattttggttttgtgtagagtataaaaagtgtgtattgctgtgtaatattactagcaaattttgtagatttttttccatttgtctataaaagtttatggaagttaatgctgtcatacccccctggtggtaccttaaagagataaaatgcagacattccttgctgagtttatagcttaaaggcctaaggagcactagcaacatttggctatattggtttgctagtcaccaacttctgggtctaaccccagccaaagatgacagcagaacaacataatttacactgtgatttatctttttgctgagggggaaaaaatgtaaatgttctgaaaattcactgctgcctttgtggaaactgtttcagcaaaggttcttgtatagagggaatagggaatttcaaaataaaaaattaagtatgtaaannnnananntgnannccnaaatgctaaaaacccccctcccactttanttttaataaaccgtacaacttatttttgtggaagcagagtaataaactaataantttatttgcgggnnnnnnnnnnnnnnnnnnnnnnnnnnnnnnnnnnnnnnnnnnnnnggggcccgggcgccccgaaaggaaagggaaacagggccaatacttggtttccc

SEQ ID NO: 8431 - DNA, 521 bp, Homo Sapiens
aagttagcttcaaatttgctcctatgctaaattacctgtaaatattctggataggaactacttgaaatagtaatttgttaaaagatatgacaaaatgaaaatgcttaaactacagaaatttaaaaatgccataacaatcttgcaagactaactttaaaatatactttaaatgattattatgattttggtggtaacgatcccccacacacaaccactatgaagaaataatgccgcatttttcccccattgtaccaaaaagataaaaaaatggtaaacactgatcaaggtattttgtattgtcaaggcatgcatattctaaagaattaaatgctaacttaacagcactggctttctggctggtcaactatatgaaaccttgttcattcctccgagtactgtaatgttcacacttgtacaatcttccctgtcatgactttaagttctacttttcattaaccatggcctgatattagttcttagagcttcttgtggcaaaaataaaatgatttaattctgaaaaa

SEQ ID NO: 8432 - DNA, 1249 bp, Homo Sapiens
  misc_feature (890)..(914): n is a, c, g, or t
cagcacgcaagaataagtgggggtctttatactcattcaggaatggtttatctgatgccaggctgtcttcgggggggcctttggatggttggtgaaatactttaattgccctgtctgctcacttctagctatttaagagagaacccagcttggttcttttttgctccaagtgcttaaaaataagttggaaaaaggagacggtggtgtggaaatggctggggagtttgctcttgtatccctatagtccaaggtttctcaatctgcacaattgacatttttggccggagtgttctttgtggtgagggctttcctgtgcattgtaagatgttcagcagtatccactcatggtctctaaccacttgacaccagaaaccccccagctgtgataacgcaaaatgtctctagacatcaccaaatgttccctgggggtggcaaatttgcccttgattgagaaccaccagtttagctagtcaatatgaggatggtggtttattctcagaagaaaaagatatgtaaggtcttttagctccttagagtgaagcaaaagcaagacttcaacctcaacctatctttatgttttaaatgttagggacaataagttgaaatagctagaggagcttcttttcagaaccccagatgagagccaatgtcagataaagtaagcatagcaatgtagcaggaactacaatagaagacattttcactggaattacaaagcagaattaaaattatattgtagaaggaaacaccaagaaaagaatttccagggaaaatcctctttgcaggtattaattcttataattttttgtcttttggattatctgtttactgtctcatctgaactgatcccaggtgaacggtttattgcctagatttgtactcagaggaannnnnnnnnnnnnnnnnnnnnnnnnaagaaaggaaagaaaggatgaaaaaaataaacagaaaactcagctcaggcacaattgtcaccaaggagttaaaagcttcttcttcaatagaggaattgttctgggggtcctggagacttaccattgagccaggcaatctgggaagcacaggaataagtagacactttgaaaatggatttgaatgttctcatcccttttgcagcttttctttttggctctctcatgtccttggcttgctcctctattctacctctctttctccagcaataatatgcaaatgaagacatgtatccacaagaaggagtgctcttcatcaactaatagagcacctacca

SEQ ID NO: 8433 - DNA, 448 bp, Homo Sapiens
ggacagaaggaaactaatggaccttccaggatttattgtggacggatgtggatatacgtctgtacaggaacaacacatatggaagtggactgaagcctatgtagaaacacacacacactgaacattgttattcattttgtaaaatactagtctttattttcattttttgtaaaatttaaacatcgtatggcgcataaagaaaaaggaaacaagaattaggggaaaataacattttccaaataattataaaaaattggcctgtgtctatgtatctatatctgttttgtatttttttctggttccaaaccagatttcctgtgattctatactaataatttttgatataaccctttgcttcttataatgagtgcgatatatgttgtcgaggctgttcttcaagaattaaaattgaagtgaaaatttaaacaaaaataaaagaatttagcac

SEQ ID NO: 8434 - DNA, 427 bp, Homo Sapiens
  misc_feature (396)..(396): n is a, c, g, or t
taataataataaactattatcgatgacaaaagcaggtgtttactatgtgtcaagcactcttcctaaagctttacataggatggtatacggttagaccacacttgccagcctctcttgcagatgaagctatgtgattaagttctctccaatagaatgtgaccggaagtaacaggtagaacttctgagctggggcccttaagatgtgcttcctccatattttccaccccccacttggcaacagacagtaacttgtcacccaccaacttttggacaatttcagaagaggacaatgctctgggagttagtggacaaataagctagaaagaggcccggggtcccttaatgactctgaggaggaaagccaccctaacatctaagacattctcctggactganggggtgagaaataaacttccatcatatttga

SEQ ID NO: 8435 - DNA, 911 bp, Homo Sapiens
tggaatatgttgcttcctccgcatgacagcgaccaccattcggtccctcaaggtagaaatttattgaattatccttaacttccctcttttcttcctcatgtcccacattataccagttaacaaatcccacaaaagctacatcagagaggtaccctaagattgctcatcctttttataaccatagtgtaagttcagactctcatttattacctgaaacacctcaatagtcttctaatgctttctctgccaatagtttctcctcactgcagtctatactcaatacaacacacaaagtcctcttcctaatatgcaaagctgattatgttaccctccacctaaaagctagggatgcctcattgtacacagcagcacctatacttctaaccatatatctagcctcaggcacactccccacatatacaagatacactgaacttttcacttttttatgaacatgtcatgccatttcataactgtgcctttaaacatgctgttccctttgcctggcatgcctttctcatactttgcacatggcaaactgatattacagttcagtgtacagcttccttcgtaggtatctcccttataactcagtcactcaacaaaaaatgtatcgagtacccatcaatacgacaagaaccttcacctcaaggaactcgtactctatattatgttaggactcattcacactgttattattatgttcatcacattataccatagtcatccttctacttgtctctcctcccagctggatcatgagatctttgaaggcatggctcctgtctcattactctttacacatcgtgcaaaacaaatcattttttctctagtttatgacaaagctaaagaataatgagaattgaagtttgtagcagttagttccaaaatatatatctatccacgtacct

SEQ ID NO: 8436 - DNA, 576 bp, Homo Sapiens
  misc_feature (555)..(555): n is a, c, g, or t
gcatatacacacaaatatttaaattcttccagcaccacttgtcctttctccgctgaatgcccttgtacctttatcaaagatcagctgaccatatttgtgtaggtctatttatcagctccatcgacctatggggccaattctttcgccaataccatgctgtcttgataactgtagctttacagtaagtgctgaaatcaggtagagtgagtcttccaattttattctttttcagtattgtgttgatatttgtaaaacagctttctaggattttgattgggattgcactggatctattgatcaagttgggaagaactgacatcttaacagtattgagtcttccattccatgaagatggaagtatttctctaatttatttagctccactttgatttccttttatcagttttttggaggtttccatattaacagaacctgtacatattttggttagaggtatatctaagttttatggttttcttggtgatattgtaaatggtattggttggtaacttcaaattgcagttcctcattgctgggctagaggaaatcaatgancctggataccggcccggggtc

SEQ ID NO: 8437 - DNA, 1554 bp, Homo Sapiens
  misc_feature (107)..(107): n is a, c, g, or t
  misc_feature (475)..(475): n is a, c, g, or t
  misc_feature (1236)..(1236): n is a, c, g, or t
  misc_feature (1319)..(1319): n is a, c, g, or t
  misc_feature (1346)..(1346): n is a, c, g, or t
  misc_feature (1399)..(1399): n is a, c, g, or t
  misc_feature (1401)..(1401): n is a, c, g, or t
tctcagctgtttacaatagagcaatggggcagtcctgagaaactgcccagagctcacacatgctttaatcgccttgacttacctccatatgaaacctttgaagattnacgagagaaacttctcatggccgtggaaaatgctcaaggatttgaaggggtggattaagcaccctgtgcctcgggggtggttgttcttcaagcaagttctgcttgcacttttgcatttgcctaacagacttttgcagaggcgatggcagagagcagctgcaggcatggtccctggagccgagccttcaccacgcactcgtccaagttcggatgcgggaacctggtcccagcttgagttcctgcctttcccaccacaaattatcaactggttgatgtgtacactaattacatttcaggaggacttaatgctatttatgttgtgcctctgcaggcaaagcccttaataaatattttacatcctttcttgnacgaaaggaaggggaacatgattatacttgaagtgatgtgcgaatcgagccctggacctacccccatcacttccccacgccaatagttaccactactcaggtaacacccagtctcacaccctcttggacgccgcgtgcaatagcgaacccacctgaacgcctgcttataccaactcaaggaagaatagactgggtatcgttccttcgcgccgcgcccacaccccacacaaaaaaagcgtccctcacaccactctgatcttttgcggaccgcgcgccctccccacacacgaaacaccaacacccgccgttctagctgttggtaccccgaaggaacaccccgccggaagacatgacagggggcgtgtggttgcctcccaccaaagaaacaagacgtcgcggcgcgcgcggctccccctgttcttcgcctctagaaaccaaacccaattaagagcgcttctgcgcggcactcccttcccttagtcccccaccccatcaagcgagacatcaccacgaccgctgacttacaacactaaagaaccacaccccgccccccgcgcccgctagcccacacacaaataaaagtgatagggaagggacgcatcattacataggaatacaactccccttccggccgcagcgggtggggaggcgtatatatcacaacgaaggcgcgttcctttacgctgaaccctcatcgcttacctagtctagagcgctggtcatcacacgcactctctcatctccgctcccatacacgatantaaataaaatacaaaagcgccagcgcaccacactctcagaacacacagacgtgcaggacacacacagataaagagtcgcgctnctcactgtcggggccgcgccgcggttnattcatccctccatcctagacggggcggcgtgtcacactactcatccgcacananagatcgtgcctcctacgcgtctctccgtcgtacatctacacacgctttctcccgtcgactgtgagtgcaaactcagtcttttagtgacgagagagaaatgagctgaccgccttgcgtttattccactctgcgccatcattaaactccacagag

SEQ ID NO: 8438 - DNA, 705 bp, Homo Sapiens
gatgggtgatattactgcatgtttgcaagctcaggggaaccaactagagagaaaatgtgaaatacgtaagagagggcatgacagcaggatcatagtcctatatgacagagggaagcagatttcacgtgcaagtggatggggttggcctgggcagggacaactcacttgttatgatcagagggaaaggtagagtatatgatgcaagtggatgtagggtgacagaactcagaaagagcaggcctcactcagcttcacggcactcgcatttgctgttgcctctgtttacaaatatttacgtgattttttcccttacctccttcagttatttactcaactgtcaacttcagtgagtctctctccttgcctttaaaaccgcaaactccaccccaacacttactatactatgctccttccctactttttctcctcagtatttattgccatctaatatacaacatactttacttttgaaacaccttgtttattgtctatctccctcctttagtatataagcactttgagggcacagatttttgtttcatttgttcactatcatatccttgagtgaataaattgtgggaaaagagggaggtaattcttttctgactgcttctgttttctcaataaaataaggaactgaaagagggaagaaagagttaaatatctgaagaactaaaaatctgaaatgacctaaatctcgtgccg

SEQ ID NO: 8439 - DNA, 385 bp, Homo Sapiens
ggatccccggggtctgctcgggggcccaagaaggccagtttctctcctgtctggagagatctgtacctgggcaaggggattggactggagggcccaggccactcacctggaggagcgtgatttcccggaatgttctctgaagagacagaaacacaggtgtgtgggtgggtggagcaagaaggaagcccatgtcctgagaggacccaaaggagctgatgtctgtcacccaatacccaccagaccaggcgtggcaagggggcagtgttccgagacaggccagaacatctgctatgactgggctccagctcccacctgagcttccaggcaccagggcaaggggctgccccttcctgcccccgagcagcccaaggatcctgtagagtca

SEQ ID NO: 8440 - DNA, 551 bp, Homo Sapiens
  misc_feature (42)..(42): n is a, c, g, or t
  misc_feature (59)..(59): n is a, c, g, or t
  misc_feature (77)..(77): n is a, c, g, or t
  misc_feature (120)..(120): n is a, c, g, or t
  misc_feature (152)..(152): n is a, c, g, or t
  misc_feature (203)..(203): n is a, c, g, or t
  misc_feature (420)..(430): n is a, c, g, or t
accccttccgggcaccccaaaccaaaatgttttaaaaatggngatttggtagcagtccnggaacctgggcatatcangcctttggttttaaaaggtaccaatcggggggtggtaagaacnccttgggcctggtacagtgtggatttcatcgngcctctatccaacactggtaactaggaccctacttatgcccaccataaggngatgcaatttttttaagttactgcatgtttttattaaggccattggttttcaaaataacaagtccttacaaagtatgattttataaatgatattctcgtaaaactgcgctttgccagtagcacagtgaatgtatgccaaatgcaagtccattccaaaatccatttggaaatcttgagctcagctgtggttcttaaacttttgcagtccatagggccnnnnnnnnnnnccttccaattttgtgataaattcatgatgtttacagcacagataaaactttgtgccataatcctaatttagctgaaatcaatattaactgttcaataaaaacttacttgcatatgttaaca

SEQ ID NO: 8441 - DNA, 409 bp, Homo Sapiens
accacggcacccctgctaacagagagggggctggagtctcagctccagccttccttcctctgcaccatccctccacctggatccaaactccagttctatcagcaacagtaatgtcaataacaagagctaatatttactgagcgatagcgacgctggccaggctgctctcagtggtccatgtgtccaacactccaacaacatcgaaggacatgctcttgtctccactgttagtggcaaaccattaattggcaaccaaaatctattccctttgctacaacagtaacagaactccaaatatatctggtcagggcgacccaaaataaagtctacacctcttagccttcctcacggctgttcataagactacttcctggtcaccagagggtggacctgatgtgtacagaactcg

SEQ ID NO: 8442 - DNA, 671 bp, Homo Sapiens
  misc_feature (19)..(19): n is a, c, g, or t
  misc_feature (178)..(178): n is a, c, g, or t
  misc_feature (191)..(191): n is a, c, g, or t
  misc_feature (492)..(613): n is a, c, g, or t
tgggtcccatgctgtgctnggcctctggagggtggggcagaaagctgagcatatggcgagcttgtggtctccttgaaggaggagaggcgcactcctggaccagccagagagccagaggtggctgacggtgttctcacctgaaccgctacccatgtgttgcacaggtgtccccagtttngggacccattctngcactctgcatctcactcctctattctacctccttacctcaaaaaaactccgcttttactcttgaatctctgatttcatgaatgctcccccatccatcccgaggcgaggaatcttgcactgtctttggaaggaaaggaaaggatgggagaggggctggaagcattggctagtagatgatcgaggctttctataccaccaccaaggtgtgtattttctcatcatcctggttgtgtcaggctgtccctagagatcaccctgacctcagtgtttaagaagaagggccagatgcagtggctcatnnnnnnnnnnnnnnnnnnnnnnnnnnnnnnnnnnnnnnnnnnnnnnnnnnnnnnnnnnnnnnnnnnnnnnnnnnnnnnnnnnnnnnnnnnnnnnnnnnnnnnnnnnnnnnnnnnnnnnnnnncatggtggtaagcacctataaccccagctacttgggggctgagacaggagaattgctt

SEQ ID NO: 8443 - DNA, 268 bp, Homo Sapiens
cctagaggacttaccacggcaaccaaatattctttggctttgaggatgagcctgatgcccgctttgtgcagctggaagactgcagccacatctttgaggtgcaagccctagaccgctacatgaatgaacagaaggatgatgaagtcgccatcagattgaaagtctgccctatctgccaggtgcccatccgcaaaaacctgaggtatggaactagcataaaacagcggctagaagagattgaaatcatcaaggaaaagatccagggctc

SEQ ID NO: 8444 - DNA, 870 bp, Homo Sapiens
gaagaactcgcaagctcctacgaaagaaagctcatcgaggtggcagagatgcatggcgagctgattgagttcaacgagcgcctgcacagggccctggtagccaaggaagccctcgtgtcccagatgaggcaggagctcatcgatctccggggaccggtgcctggagatttgagtcaaacgtccgaagaccagagtttgtcggattttgaaatatcaaaccgggcgctgatcaacgtctggatcccctcagtgtttctccggggcaaagcagcaagatgcattccaccgtgtatcaggtctacatccggataaaagaccgatgaatggaatatttatcgccggtatacagagttcaggagtttgcaccacaagttacaaaacaagtaccctcaagtgagggcctacaacttcccacccaaaaaggccattggaaacaaggatgccaagtttgtggaggaacggagaaagcagctccagaattacctgcgcagcgtcatgaacaaagtcatccagatggtcccccgagttcgctgccagcccccagaaggagaccctcatccagctgatgcccttcttcggtcgacatcaaccccgccccggagagccctgtgaacagcccggcccaaagcagcttcccgcttcccccaaactggaccggggtcagccccgggagacccgcaacgtggagccccagagcggtgacctctgacctcgacaaaaccgcagccacgggccctgtgcgtggcaccagctgcgtccaccccagccaactgccgctggcccctcacctcagcgtgacaaccacgtccacctggtgatcctgagagcacacgattcccaacagttacacaacaccccgattaaactaat

SEQ ID NO: 8445 - DNA, 859 bp, Homo Sapiens
gggacagatggcggagctgatgctgctcagcgagattgctgacccgacgcgtttctgcaccgacaacctgcttagcccggaggactggggtctgcagaacagcaccttgtattctggcctagatgaagtggccgaggagcagacgcagctcttcctgttgcccggagcaggatgtcccgtttgacggcagctccctggacgtggggatggatgtcagcccctctgagcccccatgggaactccgtgccgatcttcccagatcttcaggtgaagtctgagccatcttccccctgctcttcctcctccctcagctccgagtcatcgcgtctctccacagagccatccagcgaggctcttggggtaggggaggtgctccatgtgaagacagagtccttggcacccccactgtgtctcctgggagatgacccaacatcctcatttgaaaccgtccagatcaacgttatccccacctctgatgattcctcagatgtccagaccaagatagaacctgtctctccatgttcttccgtcaactctgaggcctccctgctctcagccgactcctccagccaggcttttataggagaggaggtcctggaagtgaagacagagtccctgtcgccttcaggatgccccctgtgggatgtcccaaaccccttcactttggagctgtccagatcacgcatgggcccatcccttgatggctcctcaggcaatgcccttgccacccggaatgcggcactgcagccaagctgtagtgctaaccactgtcccaatgcaatccagagctgtgccttccagcaccacaagtctttctgcagtccttcgtccaggcaacccaagtgtcccagtgtcctca

SEQ ID NO: 8446 - DNA, 465 bp, Homo Sapiens
agacacaaagattaacactaaagaggtagatgaagaaactaaaaagggaaaaagcaatagtaaatttgaaagaaatagcagctgcaacagcaggtaataccatatcccccagcagctttatttagaagcaaagacttgagcacagatacagagccgctcattaacggataatgccagttccagaattagcaatgccatttcttcctttcttcctgcatatttgtttaccctcacattgtggctccacactgcatgtgaagttcctaccttgtgccacatgctgggaatacaaagatgtgggaccctaatcttgccttcagaggactgtaagtctagagtggacattgctcactttctccttccccctatctcccatccaccacttattatctcctggatgccccattaagccatgaaaatgtgggagaaatcttagaagaaaaacagggactacttatgtttcaa

SEQ ID NO: 8447 - DNA, 605 bp, Homo Sapiens
aagcccatatttgcggtcatagtaggtcacccggtccttgagctcgtaggtatcaaagtacggtgtccacatacgtgatctggatgttaggccttttgtgagtcaagcttggacttgtccacagaggttagagtctgtgataatcctcaacgacgtcgtcgccaaatctctccgtgtagaactcctccagccggtgtgagatctctgccagcttcgtgatcgatggctccttgtacacaaactcctgctcatccaggtcaccgaagtgggcgccgtagaagcccacgcggaaatacgtcccgaacacgcgctcccagccggaactctggtgcatgatcttggtgaaggcctcctgcagtttgccgtgcaccgcggccagcttcttgtagtcacggtgggcttccaggatggggatgaggttcttgtagacctcattcaccgcctcgtagagcccgcccatggtgaagtagccggctgcctgttccagcaaccctaccagccccagctcagtgaagtgcttcccggagcagaagccctcctcgtcgggcgacaggatgtcgtcggagatggcggactcctctagcacgttggatgagatgttctgg

SEQ ID NO: 8448 - DNA, 247 bp, Homo Sapiens
ggcccctgaaggttcatcttccgccatcaaatgaggttttttctaaaaatggatcattgagaaaggttaggagagtggtcaagaccataacctagtagatttttctgaggaaaccgtgcacccggtgctgccagctgtcctgtgtgtccaccctcccactgtgcagtctcaccggacacccacgtctcttcaccaatgcacccatctctgctccctttattagaataaatccatcttgtcctgggaa

SEQ ID NO: 8449 - DNA, 448 bp, Homo Sapiens
caggactctgagggcaagctgttatcactgtgtgtgatatattcaggatgcaagggtcaaagaaagaaaccaagtggtacataagcccagcttttctgctgggctaagtgtaagtgtgagtaacatggtcaagcccctctattcttgggctaatgtaaagcctttcctgccttgcattaatgctatctccctgtgtactgtttctcttaaatgagcagatagaaatctgcagtgttggcagataggtgatggagaggatgataattttatcttctggccacagagctgcagccccagttgtcagagtccttaaatgaaacccccaaatccatccctccttccctagccccactggaatattctagagtaagagcactggataagtacacttgaacacatttatctaagcttagaaaatacctacaaggactgtggtcttgagccatta

SEQ ID NO: 8450 - DNA, 474 bp, Homo Sapiens
tccaaggcccccgtcaagcaggcttctgagagtgctacccttctcttgtaaccttgcagccaacacccctgcccggcccctgagctgcctcctccagcccatgctcttacaggccctgcacagagtagcactcattaattcttggttaaggaatgaatcaacgaatgaatggctatgcatggacctctgggcagggagacctgggtcttctctggctgagaggggaaggctaaggcatggctgagattcaagccaccattccaggcctctttgcccaagaaagaaacttctgtcacccttgcactctcctgtattctgagtccctggccaatagcacagccttccatgccccgacccccaccccaagcctctccactaggcctctgccaggatctaagcccatgagcacagggactggctatcccaagacctggcagatgtggctgctcaataaacacttgttgaaccatcaaa

SEQ ID NO: 8451 - DNA, 1167 bp, Homo Sapiens
caggccactgcatgcatgggacaggatgctttcatggagcccttcggtgacacacttggggtctttcagtgcaaaatatacctccttctcttcggtgcttgctcggggctgaaggtgacagtaccatcacacactgtccatggcgtcagaggtcaggccctctacctacccgtccactatggcttccacactccagcatcagacatccagatcatatggctatttgagagaccccacacaatgcccaaatacttactgggctctgtgaataagtctgtggttcctgacttggaataccaacacaagttcaccatgatgccacccaatgcatctctgcttatcaacccactgcagttccctgatgaaggcaattacatcgtgaaggtcaacattcagggaaatggaactctatctgccagtcagaagatacaagtcacggttgatgatcctgtcacaaagccagtggtgcagattcatcctccctctggggctgtggagtatgtggggaacatgaccctgacatgccatgtggaagggggcactcggctagcttaccaatggctaaaaaatgggagacctggtccacaccagctccacctactccttttctcccccaaaaaaataccccttcatatggctccaggaaccaaaggaaagaccattggggaattaacagctgccctgggggaggaaccctggtcagtggaaaatgggaaaggggaatatccattatggcccatccaaatatttatgggacctttatgggaccttcaaggtgagatttcctgaataaaggggcttaacacgtacgggggaaggtggttttcctgggtggacctcttgggagagggccactcccctatttctgaattgggtccggggctgattcctcattcccgccgcaacaaccaaacctccctgggatttacggcagggctttgaaccaatacctacaccttctttctctttgaaggcctggggcccctccccctgagaaagactgcgcactttggagaaaagtgaaggccccaaaagaaccaatggggaccttattgggaccttgtggcctttaataaccgcccttaaacggcggacggggacagaaatggaaactctctgttttccccagtgtatatgttccacatcttcccgtagggaggctgaggg

SEQ ID NO: 8452 - DNA, 1068 bp, Homo Sapiens
gctggaccggtccggaattcccgggatgccgagtcaagccgccgcctcgacccagggcccgcgggccaggagagcgctcggcggcttcatggcggctgaagagatgcattggcctgtccctatgaaggccattggtgcccagaacctgctaaccatgcctgggggcgtggccaaggctggctacctgcacaagaagggcggtacccagctgcagctgctgaaatggcccctgcgctttgtcatcatccacaaacgctgcgtctactacttcaagagtagcacctctgcctccccgcagggcgccttctccctgagtggctataaccgggtgatgcgggcggctgaggagaccacgtccaacaacgttttccccttcaagatcatccacatcagcaagaagcaccgcacgtggttcttctcaggcctcctccgaggaggagcgcaagagctggatggccttgctgcgcagggagattggccacttccacgaaaagaaagacctgccgttggacaccagcgactccagctcggacacagacagcttctacggcgcagttgagcggcctgtggatatcagcctttccccgtaccccacggacaatgaagactatgagcacgacgatgaggatgactcctacctggagcctgactccccggagcccggaaggcttgaggatgccctgatgcacccaccggcttacccaccacccccagtgcccacgcccaggaagccagccttctctgacatgccccgggccccactctttacctccaagggcccccggtcccctactgccacccccgccccctaagcacggccctcccagatgtttggcctggctgctgaggactccaagagggaccccactgtgcccgaaggcggggctgagcctttgcccccagggtacctgctacccccccgaaagaatgaagcgatcccccctctggagcaccatgccccaccggcaccccgggcctcccggaaaacccccttggctttcccggaaaaatggccagccccccagccccggaagcccctggaaacccttggccccacggggccctgcc

SEQ ID NO: 8453 - DNA, 323 bp, Homo Sapiens
ctatatcgcacagggatgacaagaagtatcaggtcttaataaggcaatacaaaatagatccatatatcaaagaccatataatattgtaaagatcaacaataccaaaagcatagagtggaatataagaaaatagtttattataacgtatgatttaattaaagctgtttacagttattctcccacagtagttaagcatgaattataaaaagaataagagatgagaaacaggcacacgcagcacacagggttagagaagccagcatgcaaagtctgtggaactcgaagtttcactgcaacaggaatgagaccagacatgggtgacc

SEQ ID NO: 8454 - DNA, 404 bp, Homo Sapiens
gtgaggcaggaggcagagccacagccaaggccctgaccacttctgtgccagttgtctaagcagagcgcctcagggacgctggaaatgccttaaggatagaggctgggcatcacatcaaatgggactgtggtgtttggtgaaaaccttcctgaggatctggattcaggaccctccatgactggcctatttactgtttacagctggccagtgcagagctgctgctcttttacctttttaggcccctgtaacttcccaccctttaaactgcccagaaggcatgcctctcccacaggaagaggggagcagacagggaaatctgcctaccaagaggggtgtgtgtgtctttgtgcccacacgtggtggctggggagtgcctggatggtgcggtggttgatgttaaccta

SEQ ID NO: 8455 - DNA, 1618 bp, Homo Sapiens
  misc_feature (691)..(691): n is a, c, g, or t
caccttcgctcccgtctttctggaaacaccgctttgatctcggcggtgcgggacaggtacctcccggctgctgcgggtgccctggatccagtcggctgcaccaggcgagcgagacccttccctggtggaggctcagagttccggcagggtgcatccggcctgtgtgtggcgcgaggcagggaagccggtacccgggtcctggccccagcgctgacgttttctctcccctttcttctctcttcgcggttgcggcgtcgcagacgctagtgtgagcccccatggcagatacgaccccgaacggcccccaaggggcgggcgctgtgcaattcatgatgaccaataaactggacacggcaatgtggctttctcgcttgttcacagtttactgctctgctctgtttgttctgcctcttcttgggttgcatgaagcagcaagcttttaccaacgtgctttgctggcaaatgctcttaccagtgctctgaggctgcatcaaagattaccacacttccagttaagcagagcattcctggcccaggcttgttagaggacagctgccactacctgttgtattcactcatctttgtaaaattcctatccagttacaatgagtatcttcacaagtcatgttattctctatgcttcatgctgccacatatacgacaaaaggtccttgaagcaagggggctcaanatagtttacctctgctgagatctgtcttggacaaattaagtgctaatcaacaaaatattctgaaattcattgcttgcaatgaaatattcctgatgcctgcgacagtttttatgctttttagtggtcaaggaagtttgctccaaccttttatatactatagatttcttacccttcgatattcgtctcgaagaaacccatattgtcggaccttatttaatgaactgaggattgttgttgaacacataataatgaaacctgcttgcccactgtttgtgagaagactttgtctccagagcattgcctttataagcagattggcaccaacagttccatagtttaacatctagttaagctacaaatatagtataagcattattagcagctggtacttctgctaggggttgtaaattccaggtgttacactgacctcaatccaatttacataatttacataaatgcatctcggtggaaaaataatcattttcttggcatgttaaatcaagcttaaaaagttttgagaaaattttactgtgctgtgttgctaatggttaaagaagtctgtatctagtgataaatataccagtttttttaaaaagatgctgttgtgcctatatcatgaagtacattaatttctcatgtaaaaaaaatagctctaaaatttgtttcaacctaattggtaacctgagtttatatctggcatgaattcattatggtgatacacatatgtgaattcagtacattttgagacagtattctaccattcagtaattttggttaatgattttaacacttctcagtgtatttaatttcaaattgtttttttaattggttttatgctgctttgttaggacagatgtgttttgaatgtaccattataagaagaattctatgtatcttaaactatgatcttctaaaattttatttccg

SEQ ID NO: 8456 - DNA, 902 bp, Homo Sapiens
cacatagaatttcagttttattaaaataagcacaatgtataaaagcaccgtggtgttgtataaacgtctgccggacaaatgcaaatctattttctttatgtaactcaatagttccacttatctgaatggctgtaccttcaggtgcacacgggcagcaggcactgcattgctcaaacagggaagtgaggcttcaccctagctgtggcttcaccttaggcacagagcactatctaactgcccagatctgtgccacccacagcgaagacctggggacacagaccagcagacaccgatgctgtctctaagttcatcacaggaacacgcttaaaatcagaactaatagggaactgctgattaaaacccaagatgcatggacacttctagaaagaagagcacagccgttccactctctgggaagttcatgggcttgcagtgggagtttaaggtatcatctttgctggaacagcgatggttaaaaacaccaaaccttcctttgagaaacaaacgatactactgactttagcacgcaatcacaaacaaacggggcatgattaacgagggatacatttcagtcacagcaaaagaaagattctgtgcttttccgtgctcgcagaccggaacgcactgattctgattacctgaatcgcagtgcaacacggctccttgcccttccctgaattgaggggcatggcttcgctcagcccagggagaagacgggcagcgcaggcacatccggcaggccagaggcccgtgcaacgtcgttcgaacgagggtgacggcacacgcagtagggcccaggcacctgtcgggccgcctctgtcagctgatcccttcttgccttcctcccttcctggctgtacccccggcgtctcttctcgcgcgccagccggctcggtccgcct

SEQ ID NO: 8457 - DNA, 119 bp, Homo Sapiens
gtagaaaataaaaacaagaaaatcgttccaatgtaagatgtttgttatagaaactttaggcaatacaggtgtgtaataaaatgtttaataaacttctaaacacttttgtatttggattt

SEQ ID NO: 8458 - DNA, 565 bp, Homo Sapiens
ggatgtgggagcaatgagagttgaaccgttgtttttgttggagatgcagactgtgtcttgaaaatgatgattatatatgcaaattctgccctaccctcaccctcttccaagtttccccccaaaaaggtcacacagtgcggcttcctgtgggaaacaggagcagagctggcctgcagagcccctggggctgtgatgaagctcatatcttatctctgttctattaacaaaatgggagtttgtgggttttaaaaaattccgtttctaaatggaggaatagatgactttctttcttttggtgggggttgggacttgtggctttaaagaaatcacttctgagtaggatgtatattttcgttggatttttgttgttatttctttagaaccctccacagcaacatgcaagaccatggagttaaagaaacccagagacctttatcaattaattgtactgtttgtgaatttgtataaataataacaaagatcctcttaaaacgtttatattcttacagtaaaaggttaaactgatatttatataataaaagaggaaatatgaagtatgtttttg

SEQ ID NO: 8459 - DNA, 606 bp, Homo Sapiens
taggtgtccgtgtgacagattgcttcatttatgtttctacatagtaaggtgactgccaaataataggtgaagtcatctgtctctttgtaaattattttatatgacctataaatttaaaaatgtttttcagtgagtgcttttaacaaacttaagcttctgccctgccaagggaattaatgttatcttgtgaaaggtgttgctgtttgaattgatgagaaatggaagatgagaactccctaagagttctcataataaatcatctcatcacaaatcaatacggtatacagagttaaagtggaatgaggtaagaagatacagctacagaaaatagttgcgtgtatgggagaacagtcattgtaattgggtagttttgttaataaatatttttaaatcttgcttttcagaaattaccgaatgtgtataaacaaataaagaaaaataatttagctgtgttttagacagcattagaatatattgttcagcacagtaaaatatatttgaaatttgataagccaaaaatgtggttttgaatgaatattttgtgaatctttcttaaaagctcaaatttgtagacttctaaatagaataaacacttggcagcacgat

SEQ ID NO: 8460 - DNA, 626 bp, Homo Sapiens
ccttgtattacagtacaatgtttacattactatactgtcaagctgaaagtataaaaaatgtacatatacattttgagttatgtatcctttttttaaaaaaaagttcgagtctgttgcactaggctgtacatgactaaagttgacagatgctatgctagatttataatcactagttctggtacttgtgtctttgtatgatcaaagcatgcaataagcaatacaaaataccaagccttatacttaaaagaagtttaacatattggttaatatactggttaatatactggttaaacatattgaatgtatataagtggcaaaactagatttttaaggaagtgtacattataatattggagctcagtactgcatgaagagacttcattaaaactaagaaaacatttatttggggagaaattttaggcatttaagaacttgtatttttctattttaaaaagttaaattattccgtaatttggaagaagtttcgttgaatgtaggacataaccgtttgaagggttttcatttgaaaaattgatgtattttgtgccttaatattttgttcttttaataaaatgctattgaacttctaaaactaggggtaccagctcgattcgtatcgtccgtta

SEQ ID NO: 8461 - DNA, 563 bp, Homo Sapiens
  misc_feature (26)..(26): n is a, c, g, or t
  misc_feature (54)..(54): n is a, c, g, or t
agaattgctgtcactgttgctgacanggtttccatggtgagttcaggcctgagnacagcagtgtctgcaaaaccacatggcccttgagaaatgtccttgcacattgggcttcaaactccctcttctagggaatccatcttggccctgaaagcagaggtacaacaccagccccaaaggcaattctgttttcagattggttgctctggaaaggaaggctggggtgagggggcattttacttgcacagaggctgaccctgcctcccctcttcactgaccccatctccaaggtagacctcagccatgtcagtccctgttctgggaggtgctgggctgggccacagccagggttatgtaggtaattaacctgtccaaccctgagcctcgcctccccacaccagcaacacagtggtctctctgtggtgaccattcacagcataacattctgcttagcctcaaactgaaagcattgcaactgatgtcaaaaccagatgagatcttacagggagagagattgggtgcaatttgcctctttctttgaataaaaagctctttgctcaccctca

SEQ ID NO: 8462 - DNA, 442 bp, Homo Sapiens
ggcttggtggttgaaagctcggagtccgaactctctgaagacatttttcccgccttgccactttctagttggtgaccttggcaagcaaggtactcagccgctgtgtacctcagttttgcggtttgtaaaatgggagttacaatagtgcaccccttgtagagtggctataggtttaagagttaatatacgcaaggtctttaggacggtgctgagcgtacagaaggccctctcttgagtggtcgcagttggctgctctcggcctcatctccgtttgtgaaaacccgtccagattccggtcctcccaggccccagctgaagtttggagagaggctttgctgaatagctgtttagtctcccccaacccccttggccctcggagctcctggaaaaagttcttaatgaagtaatgttgagagcgtccattaaaatcaatgtgggagtc

SEQ ID NO: 8463 - DNA, 262 bp, Homo Sapiens
atggccgagaaccccagcttggagaaccaccgcatcaagagcttcaagaacaagggccgcgatgtggaaacaatgcgaagacatagaaatgaagtgacagtggaactgcggaagaacaaaagagacgaacacttattgaaaaagagaaatgttccccaagaagaaagtctagaagattcagatgttgatgctgattttcaagcacataatgtaaccctagaagctatattgcagcatgccacaagtgatacccagtgtccag

SEQ ID NO: 8464 - DNA, 626 bp, Homo Sapiens
  misc_feature (551)..(565): n is a, c, g, or t
ccgggcgccagcccggccccgagagaagcccctaatccgcagccagagcctgcgtgtggtcaagaggaagccaccggtgcgggagggcacctcgcgctccctgaaggttcggacgaggaaaaagactgtgccctcagacgtggacagctagggtctgctgcatctgcccccttcttacctcgtgccctgcagggctccagggctatttggagggaccttggggctgcacatctggcctgcctgcaccagctgcctgggccccaccctcctgactcctgctgatggttaagggccgggagcagatgctgccaaggccacatgcagggatgcacccacaatgtaccaaagcaggctgggcccagggttctatttattgccttgctctgccctctcccttccccggttgtgggacaagagccctccctgaacccctgcaaccctccctgaacccctgcaaatgaaaccaaacgtccacctgggtgtgttcattccttcctgtccttcaaagtacttgatagcctttcataaggcctggcacatgtgtcctggtnnnnnnnnnnnnnnntggtgagtgaggtcaggtttgcgagtgttttgataaataaatacataaaggggcaaaaaaa

SEQ ID NO: 8465 - DNA, 687 bp, Homo Sapiens
attgggggaggaatgccaacgcccctaggtcatgggccagggtttttccttgggaaaccagcttatggcccatgttcaccttacctacgggggcccgcggcgcccaaacgaaatggttttagaaagctttcttgaggggccgagggcggccgacaaggctttttcttctcactttgggcttccgctagtgcaagatttaataaaaaacaaacaaaaataggaatggttgctttcaacattttccaggttgtgaaaggtttgccacgactctcaggggtgtggttctaagctgcatcagtggaacaaatacaaaatgctgtcctcctcctgggctggaaggcagtgcactttctcctcttaacagccagactagcgggtgaggagtcagtgctgtgacccaggccaagctggagtgtccgcatagctttttctctgaccagtggggattccatctaccttgaggcgtgctggctgggccccgtttccacaccagcacatggtgagacagggtagcttatcaacaggctgctgggccttaatactgacagtgagtgtggcgggtcacagccaggaaaggactaacacagatgccctcccagcccccactgctggcctaattttagaataccacggaaaaaagctttgatgaagacaacaggaagtctacacagccgaaagtggtgtgga

SEQ ID NO: 8466 - DNA, 664 bp, Homo Sapiens
attaactgtttatactggtttaatccatgtcaaatgtagtttacaaagggaaaggacaagtacctttgtatagaatatacagacacagcatcacaccacagggcccacgggagggtcggggagacgacactttttccctgggaaaggcagctctaatcccaggaatggttctcagcagaggctgggtggccaggagcactgtcctctagccccctaactcagcctctgcttcagctcggttcccatttcctgcctctaccccccaactccttataaagagccccatgagctaagactaaggagaggatcatgtcccttggggcgtgtgccccatgtctgggagaagaaatatacaccactgaacaccgagcacatgggagagggaagggacaccacaggagagagagaggcaggtaccccaagaggtggatgggccgagctcccagccaaccctgaaggaggcgctgcttccaggggttcttaaaaaagaagaaaatcatacaaccaaagggggaggggacaggtagagggcgaggagttgtcccatttatacacaacattgtaaacatacacggtctatattacatgtgcttcagtctggtgtttgcatgtctgtctgtccgtctgtcagtatgggggctggatcttaggagccgtgcccccc

SEQ ID NO: 8467 - DNA, 1308 bp, Homo Sapiens
gcggccgcagccgcgtcagtgtccagcacgtcgtggcctctggtccgaccaccaggccctagtctcggtcagggagtctgctctgcctcccaggcgggatcgctggtttctctcgacctcgcagagctcctgacaaaggcggcttctgcgtcgtcactgcttcccggcgccattccgaggccgggccttcttctgacacgggctccaaccccacctgaccaagcccgggacagtcaaggcttctcaatttgtattttccaggcaagagaactttgtaccccttctctgtgtggatagactccccagcgtttttcctctggaaatgcccacagggcttgccgcgtggagactgatctgttccatccgttagcgcgaggtagcagtgtcgcctcgcccctcccactgcgggctcacggggagctggcgtctgtcagtgccttgtcacgcctggcatagaggttgggctggaggcctgtccactggcttctggagctgaaggtctgcgtcacggtgaaaattcgggatgtttacagagcatcacaaatgcctctctctcgccgctctctcattttctttgtataactatgcagccttccctctctttctgggatgtttgggacttcactcgacctgcacgggctctgcccgacatgccgtgggagctgctgggattcctttagaaaccgctgcccgcatgctttgaaaacagacctttctcagctggctgtggggacctgtcagagtctggggactcggcgtgcagggcgggctccaagcgctttgcttccggaactccggcttcccaaggggtactgtgcagactgaccaccggcctcccgcctgcaggtcagaggctctgacactgtctggtttccaatgcttctggagacttcctgcctaggcctcatcctcctctttgccagtcacctgattaaccaattctccagcattaggacttacctccttctttttgtaaggtctcttgtatgttgttaaatgtttggcttaaacaatttataaaagcctttctagaaggcagacttagccccagcagagcctgggaggaaggcggccgctggggctcctgggcatcctctctggggagctgctggccgcttagcgttgtttgatttttgaccttgacatagtagataggcttgtggtttttttaatttaaagatattaagacttaattcactaaaatttattctaaggggatatttatacttttatactttttttaggtatcgtattttatcagcttacagtttaatgcctaagtttcccctggaaatagcaaataaaatt

SEQ ID NO: 8468 - DNA, 704 bp, Homo Sapiens
  misc_feature (118)..(118): n is a, c, g, or t
tcagagggctctcggcagcctgtgagtatccggccttccatcccagcactctcctgcaaaaaagcagaccaacattaataacgtctaatttctgactgctccagtaacagcacacacntgatacaagacagaagggcctggacaggagctcttttcacaaaggaccgctggcgagatgagccatccttcttgcttgtcatgctggagggaagtttctggcttccggacaaatgctttgtttgcaggaggcccacagaggattccacgtggcaaaaggttcctactcacagagtgggatctgcaatccgcaggcagggtccttcaggaagaagcccgtgctgagcacacaggtccctgcgaccacagatgaacagaacgcctggccttgcccctggtgtcagtcagactaattaggggcccaggggacttgctggcactgcccttgctgtggctggaaaagctatttaaattcacaaagagcctcacttccaggccaggtccttttggttccatgcgtgggagccaggtgcaaagacgaatgtgctctcagcagaacgaccctgggctctgcttatctccgaggacaggatctaatctcacactgaatttcagaagggagaccgatcatgttggcaatgcccccctcctgtatgcaagtaagtgactttgtttaaattaaaatttgtatttttagttgacaaaaa

SEQ ID NO: 8469 - DNA, 789 bp, Homo Sapiens
ggtagttgttgctctgtcttggaaaagcagcacagataacacagctttcagaataaaatcctcgcatataaagggcaaaaatgtatgggtgtttgagcaatgaactggatcctagcagaggcattacaaaggactctgtgggaaaggttccatagtatccacagtcccactgaacacattctcaatgtgccatgatgcaaatccaacatgatgatcgtttggtgtgggttctcccacccccacagagtgtggtgggagaagacaccctctatatagtgtcccattttccccagtggcaacacatgtgcagaatagcagcgatgacggccacgcagagatgtagaagtgacttaacacccctgctgactctgcctcctgcccacctgagccatggagggaaggtctgccaactgtcccaggatgtcaggtggacgtgggaaaggcgagtagaagactgaggccaagcgagccagcgatccctaaataaaaggtgccactggggttttaacttcctttaaggtcctaaccaaggcctgggtactaaatgaaacaaagaggctctaaaaaacttgtcactgcagacggttgaaatgatgcacagccaatctgcctcccgaaagacagatgatcaaggcagagcccagcagccagcaaggcgaactcagttccagctggatttagggtcaaaaggtggccgaggcattgccttcccagaaggagtgagtcacgaggaaagactgaaagcgaggcaaggtggtggatttgtttttcccccagctcctcgtgccg

SEQ ID NO: 8470 - DNA, 635 bp, Homo Sapiens
ctagtcttatacagctcaataaaatgacttgcctagaacttaacctcccctaatggagaaaaatcgaggggagacttcggcgtaaagtagacaagtgactttgtagaatcaaatgaaatgcagactgctgagtgaagctgctgacctgaattcacgatcgtctcaggctctgctcccagttccagaccagcacggctgattgtccgtccagcaacatctgtccagtacaccatcctctcccggcagtcgtaatcaattcccacgattatggagccctttgtgcatcaaatcatagaattagaagaattaggttacatttcccctttgttcacactcagctgccttgctcatgcacagctgcagtgagcaacactgcactgtgatcctgcaggcaacagagcagagtagctggacatgtgggcactcgggtgaaatctaggctcagccacttagtagccatgtggctttgggcatttaacctctatgcgtttgtctcatttgcaaaatgaggccaatagtgtacctgcctcatatggttgctataaaaattaatactataagtgcttgtaaagtgtcctaatcagtaattggcatacagtaagcccttcaataggtgctattatgactgatgattt

SEQ ID NO: 8471 - DNA, 712 bp, Homo Sapiens
  misc_feature (79)..(79): n is a, c, g, or t
cggcacgaggctgagtgggccagccacagcctctcccctccctgtccgtgatgcggtcaacccaggcgtggcaagcccntgctgggcaaggccaggtaagcacgctggaggggccacagacaaaagggacatccgtcctacagactttaaaaggtaactccgaaccatcaggcctgccaaggcttcccacagccacctggcctcagctgcttcccacagatatgaggtgtggccctttcagggagaagcttttggaagaggtagcaccgtcacagtcaaggggggcccaactgggtggaagaatgggaagtcccggaggctggaccatctgccagccgaggcagtgactctgcttctcctaaaggtggtgaccagtagggaggacggccaccttcttcctgcagtgggcactgtctgtgctctggaggcagccgtgatgacaagtatagacagtcaaagccacaccaccaagggtgaaggccattccaagaggcgagcagctcagagaggagactgagtctaggggaggacggctaggaaagggggccaaacttgtatataatgatgtcttccatgtctggctccctggacagataaaggcccaatagagcagggaccctatctgtctggcaccgtccttagggcctataagattgccacatagtagcagctccacagctctttgttgaataaatgaatgaactctaacaag

SEQ ID NO: 8472 - DNA, 1346 bp, Homo Sapiens
  misc_feature (1098)..(1098): n is a, c, g, or t
  misc_feature (1146)..(1146): n is a, c, g, or t
  misc_feature (1180)..(1180): n is a, c, g, or t
aaaaaatggagttgttggggcaggacatgcacacaatgtgaaacagacaaaatgcattacacctgtagtgtaaagtggccactatgaatccctatgtatgagaggagggaggcaggctgcagcttcagccacagaatggggactatggaagacagcaggagctcatttcctctgcacattttggctgttagacctgtgtgtgtgtttaaaaaaagagaagtcagtgctcactttttgtatttaaatattaaaaatgattccaactgaaaaccacggcctcgcagaacgcacaccgaaccggaaacggggcgggaaaggtatgcgcaagccgagcccgaagaacggagcggcggcggaccgggagcagcttgttgctgggccgcctccgccctccagcagcgcctttctagacgcctcgcgttggcgggcccgggccgcacgacgggaagatcgaaaagtgccctattcatgtgtttccgcgcgcaggcgccggggtcggtgcctccagcggagtggggcattgctcccacggtcgagaacgccacggggcgctgcgtccgcggcggctcgccgaccaccgtccccccgaggggaagtgttgggcgggtcgcgctgatcggggagccgtgtggagaggccggcaggcaccgcgccgcggctggccgcgactgcgcggcactacgcgccccgggtccgcggtggattgccggagcgcaacgaggacttggcagcgaattcttccttaccgccgatatatcgcggccaccaccggggaggagccctcggcggaacagggcggcgacggggacgaacacggcagccgactctcgccccgccgggcgcgtgtgtaggacgtcctccggcgtcccccgttcgcccgatgaataattccgacacccgccgccgttgcaacagccacaaagccgctcaccatgaagcaccggcccgggtgtaccaaggctgggtccgaagggctcctcgtacgaccgagagggtgtgaggcgcgtgatgacgtgcctccggcacaggtacatcttgacacccgtaatgcggcgtcgccacgaaagagtgcgtgctcggcgcactcggccccccccnctacgccaggccgtcaacagcaacatagcgcgcgtactatgtgttagngcgcggtgagatgagagagtgcgccgatccgctntggcgcactagccactactagtatgggtgcgaccgcagtccgagccgtggcgtgatgtatacatacgggacgatggcaccgccatgctgcgctctcctgtcgccgcgcacgcctacgtaggctcacagacttgcccatgcatgtctccgtgctactctctatcggc

SEQ ID NO: 8473 - DNA, 956 bp, Homo Sapiens
  misc_feature (459)..(459): n is a, c, g, or t
ctgttgggttccatctttatacttgacatggaaggaaaccaggacccagagctgctgaacaatttgcccagtcgttcagcagctcagtagcaaaccaggattcctctgctgctcagggatagtgggaggtggaggctcagcgtggaagatccacagccccgcacgccctctttgtgcctcctcctgctgtctccatgttgggtgttagcaagatgaaacatgttgggtgtcttcttcccccgcaagccccagccccagatccactctccacccctctcctttcttctctgggcctccagaggctaaccttgatgggtttcatcagcaaggacttttctttgctttggccaagtagaggaactggtaggagataggaaggtgggaagagatgagatgaggtttccatgggttggctgtgtctgtacccctagcaaggccacagctgctgtggggctgccntctcccgtggctgcagctactgtctccgtggtccaggaacaacactccctccccttcaggccccagggtggtgacagcttcctggctgtggccagccccggtgcatagcacctcccttgttagttttccttataaagaatctctttgtacagtctcttcagtttggagagtaacatctctttccttcagggaccctgaccgggcccccgcctcgctggctcagcactgccaatgggacttgccatggggagtcactgtcatcttgtgtcatgttttgattaaaggagagggtcttccagtggaggagaggtcccagaatggagaccatgggacagtgaagctcttgaaactgaatgcccaacggtggattgtacgagctctttttttagagagaagatcatagctgtcattctatttgtgaaaactgtcccccaaaactgagccaaaaataaacattctaaacagtctcatgctaaataaagcaccagagaagccaa

SEQ ID NO: 8474 - DNA, 307 bp, Homo Sapiens
agcaaaaacccaagcttacagtcagggaatccaactaactgatttgcactaccagatgcaggaattagaagcaccgtgtacttctgaagatgatagcaactatgttaaagaatgaagaagctctctatatactaacacataaagtcctccaacgtgtcagataaaaaaaagcaagaaacaaaactgtgtgtacagtgcgacacctttattgtaaaaaggaagataaagatacgcatttgtatttgactgcaaaaatttaaataagatttgcacataaaactctataaaagccgggcatggtgctcat

SEQ ID NO: 8475 - DNA, 739 bp, Homo Sapiens
  misc_feature (443)..(443): n is a, c, g, or t
  misc_feature (463)..(463): n is a, c, g, or t
  misc_feature (504)..(504): n is a, c, g, or t
  misc_feature (602)..(602): n is a, c, g, or t
ggaaaccatttaaccttttatatggaatatattacagagttacagttcacaaagtagaatgctgagctgaaaacccgagtttctgctgtgactgtcatctcactgagcacttcgcttttctttgcttttattttttccttctataaaaaggcaataatgataatttataatagtttccctacccagagatattagaagtatgctacagtgaatgttaaagtaccttgagatccttaaatcaaaggtgctatatacataagtaagactctactttcagaaaaaggtaatattatttcctgcactgatccctactaattctatattgatacaaaagcaactcaatgctaaaaaatgcatagaaaatataagtctgtgtctgtgtactgtagagatgtatgtgacaagtgtaaacaaaatgaactgaagcagtaatgaacagttanttagggggaacatgataaangagattatattaagccttatgtttcaccacaaaaccccttnttatggcttactaaaaccgagctcactgtaaaatcatgatccaacttattgctaatctttatgatatgcttattcctaatctttatggtatggtgtcnaaccgttcatttgtatcttattgctcattccctggaccacagactaggaacagaaaatacttgctttaataatatatatgctgttgatttcacaaaaatttcttaaaatacagcctgggtacccagtgaaaaaactg

SEQ ID NO: 8476 - DNA, 518 bp, Homo Sapiens
cttgaagatatggaatacttcctgcctacatcttcaactcagagaccgccaggggatttcagtgtttattgcttttttctctgggtttggaacagttccgaccagctactatttgaaaaatgtagaagtatttttttgcttattatcaaaaggagaatgtagttttcttgcaacaaaatgagaacttgatatctttcttgcctcgagggtgtgtgttgggagacgggggtggtgttcagccttctcttcctccacctctgtatcctggtagccagaattgaagttccaagccacaccaaggagggtggctgcctttcatgaaaggcagacatgtagtaattacctttttgcctatctgccgccgtccccttgtgctgagggggttcccttgccgctctgtctgttgtctgcacactgcatttgtttgtctggaatgcagaactccttgcacttgacaatcactacagtctttctgctttttctcttaaacagcttttttaaagcacccagagaccctt

SEQ ID NO: 8477 - DNA, 447 bp, Homo Sapiens
  misc_feature (350)..(350): n is a, c, g, or t
  misc_feature (370)..(370): n is a, c, g, or t
  misc_feature (397)..(397): n is a, c, g, or t
  misc_feature (405)..(405): n is a, c, g, or t
  misc_feature (421)..(421): n is a, c, g, or t
  misc_feature (428)..(428): n is a, c, g, or t
atgagccaccgcacccagcttctatacattttggatactagacccttatcagaagcataatttgtaaatattttctctcattctacaggctgtcttttcacttcttgataatttattctcttatgcacaaaaatgtttaattttgatgaagttcagtttatcttttttgttatgtctgctttagtatcattctctaagaattcactgacaaatccaaaagtcatgaagaataaccctatggtgttttttataagagttttaaagttttaagctcttacatggtagggtgttgatccagccaatcagagtcttatactaaaaaggccggctggtatttggataaaaccttngggggtctaaccttcattcntttacatgtgggctaatccaggctatncccagtanccatttggttggaagnagatggntccttttcccattaaatgg

SEQ ID NO: 8478 - DNA, 615 bp, Homo Sapiens
  misc_feature (14)..(14): n is a, c, g, or t
  misc_feature (51)..(51): n is a, c, g, or t
ctcaccacccatcnttctctgctcacaaatcagcatacacattttgactgncacacataaaggcatcaaattggatattttcttaattagacatgcaaagtaatgtgagtcctgccagtattctggtggataggtcttctgagtatttggttgcttgtcacaacattctccagcagtgatatttctaaagaggagatacatgttgaaaacggttttaatttacacttccatttcctgattacatttggaaatactttgtgtaaaccatcccccttccacctccatttgtctgttgaaagattttaagttggaaacagttcctgtctgaaaactcttctgagaaccacaaaccttgtgtatggattcggcatggagccctcagctggcggctctgggtgctgacggccgctggagaggtgggctcccctcgtgcactttattgcctgggcagttttgcttgatcttttgtgactttgagccttttaagtagtttgaatgataagacttaaaatgtttcataattatgttttatgtaacagactttgacattatttaaacgagcatgtgtaatgtaacttttctctttgaatcatataaaacttgattttacattga

SEQ ID NO: 8479 - DNA, 1152 bp, Homo Sapiens
aaaaaaatgaaagattgctgatgaaaccacagtggcatgatttgcttccatgcaaactggggatttggttttgccttacactaaaagcattacctcacctcatccaggatgctgggcagttttatgctaaatataaagaaacaagattgaaggaaaaggaagatgcactgactagaactgaacttgaaacacttcaaaaacagaagaaagttaaaaaaccaaaacctgaatttcctgtatacacacctttagaaactacatatattcagtcttatgatcatggaacttccatagaagaaattgaggaacaaatggatgattggttggaaaacaggaaccgaacacagaaaaaacaggcacctgaatggacagaagaggacctcagccaactgacaagaagtatggttaagttcccaggagggactccaggtcgatgggaaaagattgcccacgaattgggtcgatctgtgacagatgtgacaaccaaagccaagcaactgaaggattcagtgacctgctccccaggaatggttagactctccgaactcaaatcgacagttcagaattccaggcccatcaaaacggccaccaccttgcccgatgacatgatcacccagcgagaggacgcagagggggtggcagcggaggaggagcaggagggagactccggtgagcaggagaccggggccactgatgcccggcctcggaggcggaagccagccaggctgctggaggctacagcgaagccggagccagaggagaagtccagagccaagcggcagaaggactttgacatagcagaacaaaacgagtccagcgacgaggagagcctgagaaaagagagagctcggtctgcagaggagccgtggactcaaaatcaacagaaacttctggaactggcgttgcagcagtacccaaggggatcctctgaccgctgggacaaaatagccagatgtgtcccgtccaagagcaaggaagactgtatcgctaggtacaagttgctggttgaactggtccaaaagaaaaaacaagctaaaagctgaatattctgggagatgatgttcaccttcattttccaaaatgaatatcttaaaaatcttatgcagaaatttgcattttgtacctcaatatttctacgtcatgtgccttagt

SEQ ID NO: 8480 - DNA, 862 bp, Homo Sapiens
  misc_feature (42)..(42): n is a, c, g, or t
cctttcactgcttttgtaaagcgggagcgggacctcaggggnagcccgtcttctttcttcggcatggacaggccccctaagctgcgggacgagttctgattctggccggagcaccagaccctctgatcctggagggaccagagtctgagctggtccttccagccaggcctggcagccagaggtgctccgggattgcaaactcctcttctcacctgccaaagatggagaagagtgccagggacccctcaaggagggagacgctccatatcccagggcataggacttgcaggttcctaggagacaggagcatctcccatcgcacgtgctttctgctcttctgggaatttctcacactggcaaagcagtccagcctccgtcttctggtccactctgctctgagcagcctgggatgctgaactcttcagagagatttttttactagagagatttctataattttgatacaaggtcatgactatcctagaactctctgtggtttttgaaaatcattgaattctattaatgtaggtacctaaagtgaccttaactgaatgtggatgaggctggggctggtgtgggtctttggctgcttttcaaggtgtcccccaatgtggccctcaagagccatccccactgcctggccagagccattgttgtcccctacttcctaggccatttctggggcttgggggatgaatgctgtcctgtgctgtaaacactatgcaaatggaagttatcggttgtggtgctgtgcacgcgctcttgtgggcgactaagtgccactcacgcagcatgttcctggcaaggagcacataccatcaagccaccactatcatggtatcgttctcacagtcttttgggg

SEQ ID NO: 8481 - DNA, 960 bp, Homo Sapiens
gggtctgaaagcatcaagtcctctgggaaaatttcagtagtgaagtttcttctggaaaagctcaagcaagagctggtaaccagtccccacaattacactgataaggagctaaaaggagcctgtgaggcctacttccttactaagaggcgtgagtaccgcaactccctgaacccctttaaaggcctgaaggaaaaagaggagaagaaacttcgaagtcgccgatatcggctttttgccaaccgatccagtatcatgaggcattttggacctgaggaccaacgtctgtggaatgatgtgacagaggaactgatgtcagatgaagaggacagtcttaacgagccaggtgtgtgggtggcccgccctccccgtttccgggcccagcgcctcacagagctctgctaccacctggatgctaactctaagcatggcaccaaagccaaccgtgtgtatgggcctccctcagacagactgccttctgctgaagcccagctccttccaccagaactttacaatcctaatttccaagaagaggaagatgagggaggggatgagaatgcacctggctccccatcttttgaccaaccccacaaaacctgctgtcctgacttgaactcattcattgaaatcaaggtggaaaaggatgaataaaatctacagccaagaataactctggcttccgccatgccccatgtctcagaaataggtggccatggggcttcacaaaataatgagatgctctgtgcagtctgagaaagcgaatttgcctcttttcttaacacagtctctactggggaagcagaacactggtgggataaaaacttatctagaaggggagaaactccctccactgtgaacagtaagccagaatatgcttattcctcagcataaacagtatctcggagaagcctgggatgagaaaatgaggaggatgggtccaagaaacatgaggccttcttgaca

SEQ ID NO: 8482 - DNA, 483 bp, Homo Sapiens
ctcgcctggacttccctggagtccgcccggcccatgcagcacccggggctctgcaggggaccccactccaaagcagaatgagacacacaggggttttctgatggttctttcatcccctcagctcctctttcttcaaatcgcctttaacctcagtcagaatgccagtcttcgccaggttggcccagtgcccagcaccctcgcacccacgcagagattctggcggcactgctgaggcaggagttggtcctcccagctgtgggtgagctctggtgtgagctttggtggtcgctgggccccacagaccctactcgcccagagcaggggctgcctacatcatgagtgtgtgagccacagtcatggccagaaagagcccactccggagagacatgcagcctctgtcccccaggcccactgtggggctccttcaaacatgcagccacaggcttacccctaaagcccactggttagggacatggcgtggct

SEQ ID NO: 8483 - DNA, 324 bp, Homo Sapiens
tttcattctgcttttctttattgtctggctaacttacaaagatgcagatgtctagggtagtctctaccctaccacttacactatcctgatgacacagatagcaaaatgtgtctgtttacatagtgcatgatatgaaaaaaaagtttttcttcctctacggtccttgactataaggagggaaaaattaatttcatgccaacatttttggggaactttaacaatcatcccatttctgctactaaaataacaaaactggtattacactttaaaatataaagacctaacagtttttacaaatatgcaaataatctactacttagacat

SEQ ID NO: 8484 - DNA, 507 bp, Homo Sapiens
gcggccgcctgcagactgatgcctgaaggagctgtggccaggccacatggaggtgacgtgtgcggacaggttgaggatggccttcctagtatcccggatggggcctttatgaggacaacccagctggcgccacctgcgcccagagtgacagaaacatttccaggagacccaggcccccgaggtgcctgcctgccacatctcacagggccttggccggccacatggccaggtggccacgggacacgtggcaggcacacagtcccgaccaggggatccagcagcaaggccccactgggcaaatgccctgattcctgcaactccggggaacccaagactgcgagacaggagaggggacagcaggcgcatcccaaccctgacgggaccgtccacacagcaggcaggagacacctggagaagcgcagccactgtcaggcagtcagtcggcagaggagcggcagtgaacctggctcagatgtgacagtggcccgtggtccgtggtcactggtt

SEQ ID NO: 8485 - DNA, 348 bp, Homo Sapiens
tccttgaacgaaagggctgagacaccacctctgccgatccctcaattgagtcaggcatcaaggcttagcacccagcaggtgctggattggtttgactctcgattacctcagccagctgaggtggtagtttgtctagatgaagaagaggaagaggaggaggaagaactgccagaagatgatgaggaagaggaggagccaggaggaagatgatgatgatgaaaaaaatgatgtgatcatacaagactgagtggggagctgggggaggggaggtctgttactgaaagatgaaccaacttagtaactgtttaaacaaagaaaccacatttttaaaattaccttgtggcagag

SEQ ID NO: 8486 - DNA, 606 bp, Homo Sapiens
aaatcagaaagtctcctgtacatggagctgaagaggggctgctgttttccgaatgttttccatttcacaggcgccacctgcttgcccggggttggtcttgagaagacacccaaatgttcatgcctcagaaaggcagcagaatgccttttaggaaatttttttaaagtaatttgaagctaatattagaagtttgggtaagaagaagcagttgtttctctcttttctccctcatttcatggaggtgttaatgatcatggctggccgtgatgtacacatgggctgattttcattttttcagtttcatagctgagaaattcagctttgttttagttgaatcatcatattggaaagcagacattgaaagttttcttttctatctttgttatgaatgtgctatggccccttttggagacttctattgggtaatattctatgtgagagaaggaaacttggtattaaatgttgtggaaaataataatgatgataataataaagtatatgctgcaatggtgtactgccaatcagattgcttgggagaagaaaatttattcaaatccaacgataaaaaattaatttcttattgaataaacagtatgttcccatatg

SEQ ID NO: 8487 - DNA, 513 bp, Homo Sapiens
ccccagtgcgctcgttctggtccccacagactgccccagccaacgagattgctggaaaccaagtcaggccaggtgggcggacaaaagggccaggtgcggcctggggggaacggatgctccgaggactggactgtttttttcacacatcgttgccgcagcggtgggaaggaaaggcagatgtaaatgatgtgttggtttacagggtatatttttgataccttcaatgaattaattcagatgttttacgcaaggaaggacttacccagtattactgctgctgtgcttttgatctctgcttaccgttcaagaggcgtgtgcaggccgacagtcggtgaccccatcactcgcaggaccaagggggcggggactgctgtcacgccccgctgtgtcctccctcccccccctccttgggcagaatgaattcgatgcgtattctgtggccgccatctgcgcagggtggtggtattctgtcatttacacacgtcgttctaattaaaaagcgaattatactcc

SEQ ID NO: 8488 - DNA, 511 bp, Homo Sapiens
cctccagactgcgcccggaggtggtggtgtgcatgcggagggacacagcgctggagacagccctcaatgctaaggcctacaagcgcagcaagcgccagtccctgcgcgaggcccgcatcactgagaagctggagaagcagcagaagatcgagcaggagcgcaagcgccggcagaagcaccaggaatacctcaatagcattctccagcatgccaaggatttcaaggaatatcacagatccgtcacaggcaaaatccagaagctgaccaaggcagtggccacgtaccatgccaacacggagcgggagcagaagaaagagaacgagcggatcgagaaggagcgcatgcggaggctcatggctgaagatgaggaggggtaccgcaagctcatcgaccagaagaaggacaagcgcctggcctacctcttgcagcagacagacgagtacgtggctaacctcacggagctggtgcggcagcacaaggctgcccaggtcgccaaggagaaaaagaaaaa

SEQ ID NO: 8489 - DNA, 533 bp, Homo Sapiens
caggactcagtgtcaccgcggggtgaacccagacctcacattcaggcaatccccaggacgccgatcggctggcactacccactgtcccggccaccccccctggagctcaaaggcttggccctccaactgctccaccctgccggctcccaggctcaaacctgcagcccgcggatcccctgccccggaagcaaccagattcgcgggaggttacctgactgatccaaggtgatacagctggtaactgatggagatgttggtagtgaaattcatgtacttttagttctttctatggaatctagaggtagaatacatgtacaagaatatcgactaccgtctactcaggtctctgttttatctgtttattcattaactctcagcttttaataggatccaatgagccctctgtggttctgaagaattgccttgagtatatgcagcctcaaaaaacccacttcctaggctcagtctttgatcaatatttatcattatcaccagttattgttctaataaactctactctggaaaaaaacatc

SEQ ID NO: 8490 - DNA, 696 bp, Homo Sapiens
gttacataggttacgtcagcctactgtggctgttgagcaaagcatttctcctttctgggcctcatttgcactagatgggcctgtggtcccaaagtaggtcagtaggttggggttgctgacaccccttgggtgcagctttgggacagatgagtggctctgtcctgtcactgccctctccctgcctgggggctatgtgcactccagacccctgcccaggctcaggcccatgaggtatggagaaaccctggcccccaggaactggaagcaccgcccactcccctggcattccagctttgcaggtgaccctcctctacccaaagctctgtccccctgctcccaatccagaagaactgcggcacgtgcttcgggcagcctagccacaggctttgagcgcctgcattcctgggggctggagggtggggtgccaaaggccctgagcaaaagccagagctcctctcatcaaagcctttacaaggtgctgggcccagaggctttgccttgacagagtggcccagggtttcaagggaggaggaacctccccctacctaggacccttcctgtggggggtctacagagtcagggacagaagggaagggacccacaggaagtcacagtggtgcccagggatgtgtcagcccccagccacggggacgcgggattcaagaatgaagtaaatacagtcacagccccaagtgg

SEQ ID NO: 8491 - DNA, 639 bp, Homo Sapiens
  misc_feature (571)..(571): n is a, c, g, or t
  misc_feature (601)..(601): n is a, c, g, or t
  misc_feature (605)..(605): n is a, c, g, or t
  misc_feature (608)..(608): n is a, c, g, or t
agttttttatttaaccagtgaaactttcatcaaacaataaacggtttccttttagattcaatattgtggcttttccagaaccagcatgttccctttcctcagtaaacgaggaatccataaaacaagtttttgttggttactaccagagtcatgtgcatgctacaagtgctgcagccagctgggcgccgtctgggtgtagtgtcattttaagtatttggggtgggatgagggagagagagcagctccacagacaaggcagactgccccagtgtctccatcgaggctgggggacagctgctgcccccactggagacagcggactgtccttcagtagaagacaggtggtctgcatcgcccagcggcagcgcagcacagaatcaagacaaagcacacgagatcccactgcacttcagagggagcagtgccagagtgcgagtgagaagacaaaggaacaggaatcctagttttaggaagaatttcctctggacgctctgattttaagaacaccagttaaatggattttatagtacagaagacatgtttatagtagtgaagaacttcagctataaanaatagtttaaaatggtttaccagcaacctncccnagncaagtacattcattaaaaaggcaattgagtg

SEQ ID NO: 8492 - DNA, 497 bp, Homo Sapiens
gatctgcaatgagtagcagacacatgtgctgtgaggggaagcacttcatggctgtgatgtgcccataatggtgaaggtttatatgagaattggctaatgttgaatttgattattctcaaccagagaagcagacaggatatcagaatcagaaggaatttaagaaagtaattgctactccccgccgcccccacatttgaacctctgattcagactctgcagaggagattgaatgaattgatttaaaggtgaggtcacaaactggccacttttcagtggaatctaagccaacatgttttactttggccaatgcagtatgtgtgtgttttaaaaaccacatttacacacttctagtgaggctgaaaactccaatttgttactcttccattccctaatttcttaaaaccagcaacttcacacttaagttaatgggcctctgaaggcaattgagacatcagttttagacacccccccgccaaacacacacccaacccgatcta

SEQ ID NO: 8493 - DNA, 406 bp, Homo Sapiens
ctcaggccttccctaacgctccaagcaccgctggagcctttaatgggtgagggaacttgggtaagaggaagatcacccccttcctgtcccctttctaggccccctcaagtgcaggtgacccttaattggtgagatcttcagcctcagccgccgacctttcccttttgtccagttttggagttcccgttttttccttgtttgctttccgagtgtaaggtctggccggtgagaaagatttcccccaaccttgattaatcagccccctcccccaacttacttcccttaggacgggtagggctgagggacctcctctcctggaaagtgcttactttgcctggggaaggggctagacactgtcccagggaaagtaatagaaggtggaagaaatcaataaaatcagaccaaa

SEQ ID NO: 8494 - DNA, 200 bp, Homo Sapiens
aattggacaagaaccatgcataatattaatagtcttaaagccagagaactgggaatgtaatctttttttcctgtgtctctaagtgactctcaattggagtgatgttggcatttctgacctgtatctacctgctgtttttattggcatttacctgctttattgggcttatatgcaatcttgaatacagatttggccccctc

SEQ ID NO: 8495 - DNA, 539 bp, Homo Sapiens
acacattccaagaggctaaaaagcaaatttctgtacattaggagatttgtgagtccttaggaaaggctcagaagagggctccacctagcacaatacctgaccatagaaagtggtcagtgtctgcagaatgagtcggcatgaaccgtactttccttggcagggttattaggtggtaaatacctgcagaataatgggattgtactagggtttcttctggctttagaaacccatttgtttactaatagattcccagaggataccttgatctcaccaagctatttgccagaatgtctcctgatggcctcattgaagaaagggggactatgagccagatgctggtgccctgaagatttgtagtttgtgggatagtcttaacttggcagggtttgattaacagaatgaagtctgttccttagagggaagtctttgcttgctgccctgacctgctggacactgttaattgggatgaggtcaaagaaggcatagttaccacatttgcaggagaccctaacctggaaatagtaaattacataacattc

SEQ ID NO: 8496 - DNA, 349 bp, Homo Sapiens
gggtcggggtgggggcgaagggccgcatggcatcatgtagggtcgggactggaagggtgtgccctcgccgtcctcgccttcgtcttgcacgagacaagatgtcacgattccgaatccaaacctcagagacagcccccatccctctcgttagccacccacacaccccgctcagcaacaataacaacctgcatttagggaacgtgtgttatgtgccaggccacacaggcattatctcatgtactcctcacaggcaccttatcaaggagatgctgttgttacctgcattttacagatggggaaactgaggctcaatgcattaaggactgccaaggaaagccctgtcctgtgg

SEQ ID NO: 8497 - DNA, 567 bp, Homo Sapiens
  misc_feature (49)..(142): n is a, c, g, or t
  misc_feature (159)..(259): n is a, c, g, or t
  misc_feature (482)..(482): n is a, c, g, or t
gagaaaacaatcttgctctgtcaccaaggttggagtgcagtagtgcgannnnnnnnnnnnnnnnnnnnnnnnnnnnnnnnnnnnnnnnnnnnnnnnnnnnnnnnnnnnnnnnnnnnnnnnnnnnnnnnnnnnnnnnnnnnnnatcctttaatttttctnnnnnnnnnnnnnnnnnnnnnnnnnnnnnnnnnnnnnnnnnnnnnnnnnnnnnnnnnnnnnnnnnnnnnnnnnnnnnnnnnnnnnnnnnnnnnnnnnnnnnaagttacgatgcccagctctaaatgatcttaaggagaaactggactttgtgttttgctttgaggagaaaagggcgacacaagtgttgcatgtgttttttaaaagtgttattttgtagagatacataatgaaaataatttatggatgaaatgatatgatggtcaagattcacttcaaaataatacggataggggaaggaaaaagcagggggcggtttagaacanattaaattggccttaagctggtaattgttgaaactagctaattctactcttatttctactttcttatgtttaaaactttcctatt

SEQ ID NO: 8498 - DNA, 619 bp, Homo Sapiens
  misc_feature (13)..(13): n is a, c, g, or t
  misc_feature (46)..(46): n is a, c, g, or t
cctgggaggtaancaagttgatttatgatggaagatgaatgatagnatgtggggaaggagaactcaggggaatactcgatttttagcctgtcattggttggatggtgaagcaggccaacaaaaatgggggggcctgggcaaagattaggggtgggggagccagagtttcatttggagctcatcagtttgaaatctcagtgagacttccaaattgaataggcagttggatgcagagatgtggagcttgggcctggagatgcacattgtttggagatataaatggtgtttatagacctatggttttataatacatcccttggagagatagagagaaaccagagccaaagaccgaacccagggtcactccaccacttggaggctgggccagtggctggaatgcacagcagcacggggcctggtgtatagtaggtgttcaacaaatctttgttgctgaggaaatcagcaccagcagtagtgactgcttatgcagtttctggagcagcttgcttctgaagtcagattcatggatatcacaagctcgaagacaaacgaacagagatgttttgctcactttagttaatagatttgatcaattaaacctgtttttggaagtgaaaaa

SEQ ID NO: 8499 - DNA, 587 bp, Homo Sapiens
  misc_feature (21)..(21): n is a, c, g, or t
  misc_feature (27)..(27): n is a, c, g, or t
  misc_feature (63)..(63): n is a, c, g, or t
  misc_feature (75)..(75): n is a, c, g, or t
ctgcctgtgtgcccaggtaanaggcanggtcataatccagccacagaatgccttagggaggangactgaattccnagggggagacctgctaagcctttccaaatgggctgtgccctgactggactctcagcctagctctctggaaccctcaacccacttgtcaactgtgccaagacaaaccctcctagacacaaatcgagtatctagcttggctttctgcactgagcagctgactaccagaggcatctgaggcctccatccgttggattgtcgtggagaagactttgttggggaaaataaacccacccttcctgattaaacattttctccttggccttgttgtagggagaggacctgtaggtacttccagaaactagaatcataggatcttccaaacttcctgtctctaagtacaggagctggaatctttccaccaagtacttatagattcaatcttttgcttagtccatttagcttagggtggaaatttctcaaggcaattactgttttgcagccctttgcataacttgcatagctccttgtagtttagtgaatgacactgaataaaacattctgacaaaattttt

SEQ ID NO: 8500 - DNA, 449 bp, Homo Sapiens
ttgctctactaagaagttaggcctttaatatcacagacaatgggaggcaaaatgaagacataaaaaggcaagtagcaagcaattcagtaggctaagccagggatttgagagtctcccaaggctcctcccttcctcattccctgcatgagtcatttttccagtctgtccacacccattcacccctccatcccacactctcattcaccctccaagctgccgtcacaggaactttctgcaatacaagtccagactccatctctggcccttgctgcctaaactttcctagttcattagttttggcagtaaagttgagactcgttagatcaacacagacctacttttaagtgtcatctcctgccactctcctggtacttacccctgccctcgcttctcacagaaaggctgagaaggctggcagaccccttggaaaaaccctgctcctttcggtg

SEQ ID NO: 8501 - DNA, 201 bp, Homo Sapiens
acagtggagttacctctgatccccatgccctacggggctgccaccttcctgccagggtttggatcatcacagtcatttgcatcttcactccacagcgtgagtgcacatacacatctgttttattgcatttggcccttataggaatgagtgggatatggggaaatgaaaaggctgagactgcgataaaaaatgtagctctta

SEQ ID NO: 8502 - DNA, 516 bp, Homo Sapiens
gtaaattcattagttggtgggctaatgtcctcatcatatgatcctgtggatgattgtcatttctcaggacttgaaaatgacttggctgaatctaaaggtaaaaaaagccaagcctctgtcacttttcctagactccgtaggcacagctagtggagtcttagcacagtgcccataccctaagaaattaataatgaaaaccaaacctcaagaacctagagcagctctctacttgccaccatggactccagtggtcagcataagaaaagcagatagttgcattctatttagtttatagctgctttgttcctttgtgtttcactaagcagaggctcaaaaattcccttgataacttcagctgcccctgttcttttcctcaaactccaggatgagacctttaatgtgggacaatttctggtgaaggtactcacagcgacgcttttcttctctgtaacttgggtactgctgcagagaaaaagcatccatgtcaaaaagtaaaaattctcattctaccttgaa

SEQ ID NO: 8503 - DNA, 1199 bp, Homo Sapiens
  misc_feature (164)..(164): n is a, c, g, or t
  misc_feature (283)..(283): n is a, c, g, or t
  misc_feature (326)..(326): n is a, c, g, or t
agagagagcgttctgccctaggtccaaatgttaccaaaatcactctagaatcttttcttgcctggaagaaaaggaaaagacaagaaaagattgataaacttgaacaagatatggaaagaaggaaagctgacttcaaagcagggaaagcactagtgatcagtggncgtgaagtgtttgaatttcgtcctgaactggtcaatggatgatgatgaggaagcagatgatacccgctacacccagggaacaggtggtgatgaggttgatgattcagtgagtgtaaatnacatagatttaagcctgtacatcccaagagatgtagatgaaancaggtattactgtagccagtcttgaaagattcagcacatatacttcagataaagatgaaaacaaattaagtgaagcttctggaggtagggctgaaaatggtgaaagaagtgacttggaagaggacaacgagagggagggaacggaaaatggagccattgatgctgttcctgttgatgaaaatcttttcactggagaggatttggatgaactagaagaagaattaaatacacttgatttagaagaatgacaccaaacacatcgctgaaaaaattaagtcagctcagcacgagttgaaattgactacattaatttctttccacctagaatcaacaggatgtttatttcctatgctgattctggaggagttaacctcctgcaaaaaaggcatcttgtccctacatcttctcttctgactttggctacatctcatagtaagttcagagtagttcatgataaattgaaaatataatggtcattgcagaaaatgattgatgttgtaactgtccacccaagtaagaagtgtatctgcctttccatcttttggttttcatttgggcatgtgctattaccagaaacaacaaacttatatttaaaatacccttcatttgacacagtttttaatgagtgatttaatttcctctgtatttgtatgtttagaagactgcctaaaacatgagcactgtacttcataaaggaaactgcgtatgcagattcagtattgtgtatctttggacaattagatggacatttaaaatggaacttcttttatctgacaggatcagctacaatgccctgtgttaaattgtttaaaagtttcccttttcttttttgccaataaagttgtaaataaagaccatcatacattaaaatcc

SEQ ID NO: 8504 - DNA, 429 bp, Homo Sapiens
  misc_feature (290)..(374): n is a, c, g, or t
gtctggcttttccttccctcaagattgtctggttgaggccttggtttcccttgaaggcttggggcctggttaagtgctttctggggcccaagcagggaccctgggcttgggccggctcctgcctctccctcttctctccctaacaaacacttctctatcctggggggtgagtacagtacacttggcggggtgggcggggggtgtgctggggactgggaggccggtgaagccggtgctagacactataatctaacaggaaataaaaaataatattctgcacgtcagaatgnnnnnnnnnnnnnnnnnnnnnnnnnnnnnnnnnnnnnnnnnnnnnnnnnnnnnnnnnnnnnnnnnnnnnnnnnnnnnnnnnnnnnattaaaaagttgactccatttaaaggcttatgatacaggggcggggcgagtctct

SEQ ID NO: 8505 - DNA, 457 bp, Homo Sapiens
ggcttcattttcagagtgagacatttgtactgtggctatgtaggagaacattcttgttcttagcaaacatactgaagtttttagatattaattaccacagtgtctgccactgaatttccagtgactaagtggaaaaatataaaacatatgaatataaagaaagaaagagacaagtcaaatgtagcaaaatgacaacacttggtgactctaggtgactggtcgacagatgttcattgtactatcaatgtggctttgctgtgggtttgaaattttgcaaactaagagttgggtggcggggagaaggatacaccaaaaaactaagtgattatctttggatgggaaaatgtttggtaattgcattcttaaaatgtcttctttgtattttttaatgttcaataatgtatatgtatcagttctgtaataaaggggaaaacactttttttaaatactcatattc

SEQ ID NO: 8506 - DNA, 1195 bp, Homo Sapiens
  misc_feature (989)..(997): n is a, c, g, or t
ggggcctctcgccccgcctcccgcgctccccgtcaggttcaaagccccctcccgcctaacgtcttcagcccagccaggctgcccttcttccctgcggagggagggcctgggcggtcgcgttggcgggagggaggttacctttcccagtctcgctctggccgcctgagccaggaggaagcagcggcgaggtctgcgggaggcatggcgggagctccggacgagcgccggcggggccccgcggcaggggagcagctgcagcagcaacacgtctcttgccaggtcttccccgagcgtctggcccaggggaatccccagcaagggttcttctccagcttcttcaccagcaaccagaagtgccagcttaggctcctgaagacgctggagacaaatccatatgtcaaacttctgcttgatgctatgaaacactcaggttgtgctgttaacaaagatagacacttttcttgcgaagactgtaatggaaatgtcagtagaggttttgatgcttcaacatctcagatagttttgtgccagaataatatccataatcaggcccatatgaacagagtggtcacacacgagcttattcatgcatttgatcattgtcgtgcccatgtcgactggttcaccaacatcagacatttggcgtgctcagaggttcgagctgctaaactttagtggagactgctcacttgtcaatgaaatattcaggttacatttttggaataaaacaacaccaccagacttgtgtgcgagacagagccactctttctatcctggctgttaggaatatcagcaaagaagtagctaaaaaggctgttgatgaagtttttgaatcttgtttcaatgaccatgaaccttttggaaggatcccacataacaagacttatgcaagatatgctcacagagactttgaaaaccgtgatcggtattattcaaatatatgagcacaatgacatttttatattacagagcttccatcatcatgaagnnnnnnnnntttggttctcaagtgaacaaacatataaaatgtaaacaatccctacaatccagataaaacagagaagactgtgattctagcatattatcagaaaaagtaactatggcaaaaatgaaactgctttaaactccaaggcagaaattgtatctttatagctaaccatttagtaaataaatacattacatttttgtattttaa

SEQ ID NO: 8507 - DNA, 777 bp, Homo Sapiens
ttttttttccgtagtccaaaggctttattgttctgctgaaatgcttacaaatactgaaaacccccagcctgggcccaggcaaccaagggctcaatgctgggaaggagagcaggggaggtgggcttagtgttaaggcgtgaagggcgaggccagacagctggaggcctggtcctccactctccatttccatcacccttcggaggctgaaggaagggcggcggcaccacagggcccttcccctctgctgcatcatctcctgctcaggctttctctctaggagcattggaggaatcctctttccctgtcggaaactcaacactgtacagaactccaaccataacccttctagcttcctctcccaactgcatcgctcctcctctgttccatagatcccccggcttcatcccttctggctctaagcaaggcaccagtggaagggagagggctggactggggggctggcagcctgtgcatcagggctgaagacacaggcagggggaaggaaaaaggtattcagtcccttccccccagcatgagatgcccaggggcctgggctggagagatgatggcacgtaccctcagatggcccacagctgaagcagtgggctgggccacagagctgcagcaattagtatgtaaccatggcaatgaagcagtcactatggtaaccatggtgatgagtctgcaactaggggatggagctgggacctcaaggttgacacttgagatctctggcccttgagcaagctaataaaaagtataagggaaaggagaaca

SEQ ID NO: 8508 - DNA, 941 bp, Homo Sapiens
gatccacttttagggctcacccacatttgtttctagatttacccctgcgctagagtaagcactttatctccagaactgagagcaaagttaacaaatctcaccccttctctcctgcaaattatgtggacagactccctggaacatgtttggggcttccacctagggccacctagtggtatctctgggtctttacttggtcagatgtttattctacattgttccccaggaacagagtatgagctcattgatgcagaccgattctaattgccaggccctaatttgcagactaactctcataataaacagaggcccatagttgtttatgaactgcttatcccttaaaggagcacaagaacccctccctgccctccttgggcaccctgcctccaggagatggaggcacgtgataagacaaaagactgcaccaactcaccctgacacagttacatagtcactgagagtggggaagatgggacagcccacatgctgcataagatgggccttatgcagcaggcccaggtcgtcattaaggagtgacccctttcctgtaacctgcactttgggatggtagaagtttctttacctgctgacaggtttggtggcactgctggttacccctgggccctgaatggagctaaaatcacatttggtaccagcagcacctatcccaagtgtgatccttcatcccaacactccctcttggagctgttccctgggtagagctagcatgccagcagcttctgcaggctccaaacccaggccagaagccagacccaggcctgctgcctgcatctgcattccctccttccagtgttccttagaacagacatttaggtatctcaggtcctttctaagtgtccctttcctatgtatgcatttcctttttttgtctttactatgcactttagcttataaagccaattaaaaacaatgattgagaa

SEQ ID NO: 8509 - DNA, 534 bp, Homo Sapiens
  misc_feature (197)..(216): n is a, c, g, or t
tttattcccttgtcctttttcaggagaattagatttctataggattttctttaggagatttattttttggacttcaaagcaagctggtattttcatacaaattcttctaattgctgtgtgtcccaggcagggagacggtttccagggaggggccggccctgtgtgcaggttccgatgttattagatgttacaagttnnnnnnnnnnnnnnnnnnnnatttattgagtttttacaagatgtatttgttgtagacttaacacttcttacgcaatgcttctagagttttatagcctggactgctacctttcaaagcttggagggaagccgtgaattcagttggttcgttctgtactgttactgggccctgagtctgggcagctgtcccttgcttgcctgcagggccatggctcagggtggtctcttcttggggcccagtgcatggtggccaaaggtgtcacccaaaccggcaggtgcgattttgttaacccagcgacgaactttccgaaaaataaagacacctggttgctaacctgg

SEQ ID NO: 8510 - DNA, 385 bp, Homo Sapiens
  misc_feature (109)..(121): n is a, c, g, or t
caagatccctatctctacaaacaaaccaaaaacctcagtagcatctttgttgttttttctcttctgtcaggtattttggtagtagtgatcttctgattttacattcccnnnnnnnnnnnnnccatgtagaaatctctatggccatttcctcttgtgaattaattgagtttctaaagtgaactagctgcatgttagaaccaggacttttttgagccctttagagcatgctggcaggcgtcatccccaagccccagggtgggtcatatttctggatgatggaggcagggggtgcaggggtcccctatctgcacattgttctgagtctgatgtgattcctcaactcctccatgaaacaggggccatgcttgtcctcgtctggggcaaa

SEQ ID NO: 8511 - DNA, 214 bp, Homo Sapiens
caccacgccatggtcacctaccatccaagccatggtcacctatcaccaagccacagtcatataccatccaagccaccgtcacctaccatccaagccatggccacctacctgccaagccatggccacctacccgccaagccatggtcacctacccaccaagtcatgggtcgcctaccatccaaggatgccgaggcctggaacagatccttcccca

SEQ ID NO: 8512 - DNA, 428 bp, Homo Sapiens
  misc_feature (230)..(230): n is a, c, g, or t
gctggcgacaggcgtaaataaaagttggatctgaagatttctgcctcggttaatgtggaagtctcacgcactcctgatttgatattttggctgaattcctagcttcaggagaaaaagcttttaattgattaggagaaaaagaaaggaggaatgatagtgaaaagatggattctcaaaaagatcttagaagcacataggaaatatttttgacgctggagaaaaaaagtcanaatgcaaaatgactggggccgtgaggttttgattttgatgtagcaattattatgcaaataacacacaaacacgaagagattgtagttccattatgagaacacagccttgctgcttgtttataaaatgagaacgtcagggtaatatacagttttcttcaaatccacaaacgctccatattgagactgatttaagtgact

SEQ ID NO: 8513 - DNA, 395 bp, Homo Sapiens
cgaggtacagtccatttctgacctgaatgaaatattcagggacttaggggcgatgattgtagaacagggtacagtccttgacagaattgactataacgttgaacagtcctgtatcaaaactgaagatggtttgaaacagcttcacaaggcagaacagtatcaaaagaagaatcaggaagatgcttgtgattttaatattatttgtcatcatcattgtgctcattgttgtcctcgttggcgtgaagtctcgataagtggcattgggttttcgtgtgtgccgcgcgtgtggatctcccgggtgtgaggggcttggcctgcgccccgccagctgcccgcagaggtgcagcctcgaggaatctgagggcgtcggggcagcgaaccttttgcatccacgg

SEQ ID NO: 8514 - DNA, 451 bp, Homo Sapiens
gtagatgcagagggcagtaagatataactcaactttgaaaatgtcagccgttatagttgaagaaatctgacccaagagacttcgctccgctgcaagatggaaggaagcttaagtaagacataaatttgtaatgaacttgctcacaacatccgccgccactgtgacttgcagtcatcatccattaccacaaaattaggtgagcctgtgcttgaatctcgtttcttttttttcagcagctcagagatggagtttaaatcattgatatactttatctgaaaatatgtaataatatgagaacaggaagatttaaaggggttattaagataataagatagaaaaatcatcagaagaaatttctacacttttattgtattttaagtgggacccctttttcctatcccaaggaatcttagatcaagttcagtaggtggagctcttaactcttacttaa

SEQ ID NO: 8515 - DNA, 585 bp, Homo Sapiens
  misc_feature (433)..(433): n is a, c, g, or t
  misc_feature (571)..(571): n is a, c, g, or t
cggcacgagaaagggctatctttcaggacacaaacggacaataaagacccccagtttcactcatttataattaccagggaagatggttctcgcacctatggttttgttctcactttttatgaagaagttacaagtaagcaaatctgcacagcaatgcagacactttaccagatgcacaacgctgagcattacagcagtgtgtatgcttcatcttccctgcagtatggactcattggcaatgtagtcttgatgaaggagatacaacttcccttttgaaactccagcgatacaactcctatgatattagcagagacaccctgtatgtttcaaaaagtatatgcttgatcacaccgttaccattcatgcaggcctgcaagaaattccttatccagctttacaaggctgttacctcacagcagccaccacccttgcncacttgaaagctatatccacaatattctttatgaagtaccccttccacctccagggaggtcactgaaattttatggtggtttatgaacctggtcatctgccagaggctgggcccagtgaactccccctctctgattanccccttcgggaggc

SEQ ID NO: 8516 - DNA, 274 bp, Homo Sapiens
  misc_feature (212)..(212): n is a, c, g, or t
ttcagtttgagcttcaacttcacttataatgacttgaaataatgtaataatgtgccatattacttagaaataacacctagctgttaagtgtcacagcagcttctgcagtgatgtgacgttattgataatgagcattttctataagaggacattggaaactgatgttgcatactcattcagaatattgtttttaatgttgaagtgaaaacacnttgtacctgtaattttagtcaaaaccaaatataatgttggtctgttaaaattttctgactca

SEQ ID NO: 8517 - DNA, 511 bp, Homo Sapiens
ggaagcgagggaggtacagcagaggaataaactcagcaaagatgcggggtcggctgatgtccagcctcggcctgattccaggcagctctggatatgaatggcaccaccgaagttgtcccaccttgaggcaagggggcctgtcatcagctgtgggctacccctggtcaggcaaggcataaccaccgggcattttcagcaatagcaactgtgagctgtttagtagtcaatgctctgagcagctgcaggctggctctctaaaggtctccaagcagaggaagagaaatcatagcgacggattcttaagggtgaaaaagacggcggtccacagaatctggctacatccctctggaacatttgcattttgataaaggacttgcttttggagctaaggagtgaatcatttattgcaaattatgtggcattttcagaagaagtaaaataatatatagaaatggtacacaaaggaaagtcatatctgcaaacgagtcccttatctgccaagcctctcctc

SEQ ID NO: 8518 - DNA, 483 bp, Homo Sapiens
cagcaatgatcagttccagttaatttggaaggttcatgggttttggaagggggaagccatactggaaagggagaatgtccgggttaagatcttgaagcacagttccaggctgtggctttgttggtggagagctgggttactttccattccccagttaaacttgttttctaccattgagtccagtatcagttgagtcatcaatatgaatgttgaagttgcaaagtgtaagacaaaatggggaatttatgaagtatttacaaatattctatggtcaatagtttaatttctcatagatagggatggataaagtctttatgaaagcagaccaaaatccaatggcttttcaaataactagacttttcctcttaactataagaaaaggaaagtgggtaactgtcaaaagtagatacactttgaaatcttggagcacttaatagaggtgacttaatattttgggagttgagaacttttaaacacagcagt

SEQ ID NO: 8519 - DNA, 280 bp, Homo Sapiens
aagagccctgaggaccaagactggaaggcagagaggatgtgacatcaggtgggatggctggggacagccaggttattcacaccacagttaggatcttgtcttgcatctccatggaccatgaacaagacttgtttgtacagaggctgtaaactgctggctatagtaacagaggctagagaagcagcaagagcgttgacccagcttacatgtacatggctgtgctattatctgggcaatggtgccctgaacagggggtgcggcgcctgtggtcccattacaa

SEQ ID NO: 8520 - DNA, 2032 bp, Homo Sapiens
  misc_feature (1675)..(1686): n is a, c, g, or t
ggccgagggcctcggcggcctggagcgcttctgcagcccgggcaaaggccgggggctgcgggctctgcagcccttccaggtgggggacttgctgttctcctgcccggcctatgcctacgtgctcacggtcaacgagcggggcaaccactgcgagtactgcttcaccaggaaagaaggattgtccaaatgtggaagatgcaagcaggcattttactgcaatgtggagtgtcagaaacgaagattggcccatgcacaagctggaatgttctcccatggttgtttttggggaaaactggaatccctcggagactgtaagactaacagcaaggattctggccaaacagaaaatccacccagagagaacaccttcggaaaaattgttagctgtgaaggagtttgaatcacatctggataagttagacaatgagaagaaggatttgattcagagtgacatagctgctctccatcacttttactccaagcatctcggattccctgacaatgatagcctcgtagtactctttgcacaggttaactgtaatggcttcacaattgaacgatgaagaactttctcatttgggatcagcgatatttcctgatgttgcattgatgaatcatagctgttgccccaatgtcattgtgacctacaaagggaccctggcagaagttcagagctgtacaggaaatcaagccgggagaggaggtttataccagctatattgatctcctgtacccaacggaagatagaaatgaccggttaagagattcttatttctttacctgtgagtgccaggagtgtaccaccaaggacaaggataaggccaaggtggaaatccggaagctcagcgatcccccaaaggcagaagccatccgagacatggtcagatatgcacgcaacgtcattgaagagttccggagggccaagcactataaatcccctagtgagctgctggagatctgcgagctcagccaggagaagatgagctctgtgtttgaggacagtaacgtgtacatgttgcacatgatgtaccaggccatgggtgtctgcttgtacatgcaggactgggaaggagccctgcaatatggacagaaaatcattaagccctacagtaagcactatcctttgtactccctcaacgtggcctccatgtggttgaagctagggagactctacatgggcctggaacacaaagccgcaggggagaaagccctgaagaaggccattgcaatcatggaagtagctcacggcaaagatcatccatatatttctgagatcaaacaggaaatggaaagccactgaaactatgcagcatttcagttttcatttaaacacttagttcagaaaccttaaaggatttgaatatttcaaattgcacacgtcactccagcatctctgtaaaataattggaatgaaaatacttcttgcacttaaacactgcacatgccgtactttgaggttagtctgaatcttgaactttaataccaaattaattttgaatgcttttgtttcctaagagataatggcatggtttcatatgttatactttggacagacagagttttaaaaatggaattattttttctttcatgcctcttgtaatgttctgaacaaacttgaatgatgaaagtattaaagagatatcagtaaaaaagagaaaaaagatagaaataaaannnnnnnnnnnncaagagtttcccgtgggggggcccaaggttcagcgttaccacagttttctggttaaagggggggcccaatagggaggtggtagtaataagctaggggatgggaccgtcgtataacaagcgtcgggacgtgggaacagctggtagctggagaatctttggtgaagggagacctatatgtccggaggggggggacacaagtgggggagaatctaccctagaagagaatattaaaagaggtcttaggggaaatataaagatttaaggggggtaagtgtggtatacatagggtggaatatgctatgagttagaaaatttggtataaggaggatgattgtcgaaatttttg

SEQ ID NO: 8521 - DNA, 567 bp, Homo Sapiens
taataaaattatagatatatagatgtagatataaaaacataaaacagacacaacgcaagcagacgctgtcatgtgcttactctcaggtccctgacaccaagggaagcactgacccctccccagtgtgctttcccacggcgcgagcaccgcagccaggccggggctgcggacgtggcatgccttggggtggggttctccagtttggcagggagggcctgagggctggggagggggctctgggtgtcaccagccccctgtggcagcatcacccccgtgcctgctcccgcctgcccccccgtcgcctcccacaagagcataaagcaaaggttaaggctttgatgaaagggacagcggcggccggagcactgacacatcagacacggcgcggcagcacagcacacagacacgggacacatggagccgggcccccggcaacagctggctggctggccgtctgtccacctatccaccaccacccagagcaggacagggcagaagcatcagccttgccaagctacaagcttccagcggggtccgtgaaaggcaacgcttagttaggagtagcct

SEQ ID NO: 8522 - DNA, 463 bp, Homo Sapiens
atgtggtgaactcttaaggacttttcccttcaagtgtgaaggaaggtgtgatgaatgctgtggagaggcatctgggaacaagaatatccaaaataaagccttgacattaaataccccttccactgctcactttgtggatggtagcatgagctgtctaccaagaagaaacctgctgctctcttaattttaatatttcctaatttgttgatggccttttgtgttgtgaaccacaacaaagagaggcctcttttgtggctggttattccagttccctgggattttaaattctttggtctattaagtatccttgtattggatacgtaataccttagtgctgtcataatgttgtacaagatcatgatcagcttctccctttcttcattttctgtgatttaaccatgttctttcctgtctctttccatttaagatattttatttgaatactgataaacattttatcctg

SEQ ID NO: 8523 - DNA, 1021 bp, Homo Sapiens
ccggggggcggcccccgcggggcaccggatccgggaaatacagagcagcggaaggcacgcgcgaattttcccgcgagagcttccagcatgggtctctccgccactccagccccgcgcccctcgccgcggccctcgggcgtctgcgccgcagctgccgcccccgcctctttggagtctctcgcggcctcaaagcgcggcctgcgtcgcttccggcagttcccgaccgcgggcgatggctgccgctgggggcgcccggctgctgcgcgccgcttctgctgtcctcggcggcccggccggccggtggctgcaccacgctgggtcccgcgctggatccagcggcctgctgaggaaccgggggccgggcgggagcgcggaggcgagccggtcgctgagcgtgtcggcgcgggcccggagcagctcagaagataaaataacagtccactttataaaccgtgatggtgaaacattaacaaccaaaggaaaagtggtgattctctgctagatgtgtggttgaaaataatctagcatattgatggctttggtgcatgtgagggaaccctggcttgttcaacctgtcacctcatctttgaagatcacatatatgagaagttagatgcaatcactgatgaggagaatgacatgctcgatctggcatatggactaacagacagatcacggttgggctgccaaatctgtttgacaaaatctatggacaatatgactgttcgagtgcctgaaacagtggctgatgccagacaatccattgatgtgggcaagacctcctgaactagaacaaataggaatattttcatggaattttacctatttttataattattatttcttaaagtgattaaatgagaacatggatgagtggacttcatattatgactagctttactattttaattcaccttgcataactactgaattttgtcattcttgaaagtatgcaatttttattttggttatattacaaaaatgtcaatcaaatattaaaaaatagttaatgtgattggaa

SEQ ID NO: 8524 - DNA, 1015 bp, Homo Sapiens
agtgacgccagcttggagctcatcacacctgggtggccaagaacaccaacaacaagatcagccggctgctagacagtctgccctccgatacccgccttgtcctcctcaatgctatctacctgagtgccaagtggaagacaacatttgatcccaagaaaaccagaatggaaccctttcacttcaaaaactcagttataaaagtgcccatgatgaatagcaagaagtaccctgtggcccatttcattgaccaaactttgaaagccaaggtggggcagctgcagctctcccacaatctgagtttggtgatcctggtaccccagaacctgaaacatcgtcttgaagacatggaacaggctctcagcccttctgttttcaaggccatcatggagaaactggagatgtccaagttccagcccactctcctaacactaccccgcatcaaagtgacgaccagccaggatatgctctcaatcatggagaaattggaattcttcgatttttcttatgaccttaacctgtgtgggctgacagaggacccagatcttcaggtttctgcgatgcagcaccagacagtgctggaactgacagagactggggtggaggcggctgcagcctccgccatctctgtggcccgcaccctgctggtctttgaagtgcagcagcccttcctcttcgtgctctgggaccagcagcacaagttccctgtcttcatggggcgagtatatgaccccagggcctgagacctgcaggatcaggttagggcgagcgctacctctccagcctcagctctcagttgcagccctgctgctgcctgcctggacttggcccctgccacctcctgcctcaggtgtccgctatccaccaaaagggctccctgagggtctgggcaagggacctgcttctattagcccttctccatggccctgccatgctctccaaaccactttttgcagctttctctagttcaagttcaccagactctataaataaaacctgacagaccatgaaaaagaaa

SEQ ID NO: 8525 - DNA, 198 bp, Homo Sapiens
ccagttaatgctaagaaaagatttggggaaggttataataaaagtattttgtggtgaccataagaatgtccctccccaaacaagtaaacttgtgaaagtttaatttggaattagtggaagctgttcctttgaaagccaagatattatttaagttgtaaagccagctaataaaatgccttagtttgagcataaaaaaaa

SEQ ID NO: 8526 - DNA, 574 bp, Homo Sapiens
ccacgcgtccgcggacgcgtgggtacaagaagagaactccagtagccttattctgtcagggacgaattgtttaccccatgataatgtaggatatcataaattcttcttcaaaggttttagcctgtaatttgttaagtacattgagttctgagatcctctccaaagaaccaatgtatcagtatgttcagctcacctgttctttgttcttcattttaacttttaatttcctcattctttatgtctccttgcccctagtttcagtaaacaatcccctcctagcctctgtcacctgctctgacctgagtcacctttagtcacctggtccgtaaccatctttcctgtctaaacttctcaccccaccactctggcttatacccctgctctctttaaaatagccagtcagaattagcttagattgtgcggtccaaccctagcccataggggaacaacacagcagtagggggtacctgcatcagggataagaacccattcccctcccttgttccggtgtgctctcgccattgcaccatccatgagacgcactcttgtatagaagtaaaattgccttgctgag

SEQ ID NO: 8527 - DNA, 120 bp, Homo Sapiens
acgagttgaatctcaaattctggggcttaaacaagcacattccaaattaagaaccaatgacctaagggaatgtctggttacctcctagttatacaagcaaaatctgcatagtatgtagtc

SEQ ID NO: 8528 - DNA, 432 bp, Homo Sapiens
gtgaaggctccgcagagcaatctaccccgctcttgtccgtgcccagaaagcgggttccacttggcagggattattttaaactgctaccagcaattcattcacctgacacccgacaccggcagcccagccccgccggaggcgagacaaggtgagttgtaaggccgaaccgtgttagatgcaaaacaaatactagaagaaaaaaataagggtggggtagggtgagatgcggtcatctgaccacagggtaacctggctggttaaagggaagagtttttcattgccctctacttttcgtaattttgtaggattgtccggtgcccgctagaggtcgccaaacggagtccttttgcgctggttcttaagtggattcctagtgaaaaggcagacaactgaaaatgtgagtgctgtcttttaagtaaaatcactctcggt

SEQ ID NO: 8529 - DNA, 497 bp, Homo Sapiens
cggcacgagaggaagatgggagggaattatcttgcccatggtcgtgcattcagggatttaacatttacagttttagctacttgccaggaactggaccatctatggcatgaagggattagtcacattactgatgattattagttgcttgtattcagtgcctgacactgtgcaaagcgcattatatgcgttactttcttcttcacagccacgcttttggtgtttccccattttacaggtgaggattcgggttcaaacatgtcaattttcctaaagatgcatagctggtacttagtggactcaattcagctctgtttagcagcaaagtttggttgtgaccacttcattcaattaaagcctgtgtgctggcacaagtcatttaactagtgcagacgttcttaaccctggctgcacctgagaaatctgcatgggtttataaaaacaaaccaaatgtgatgtccggattccatcccctagttaacctgctccagagtttctgt

SEQ ID NO: 8530 - DNA, 268 bp, Homo Sapiens
ccaccttcacccttcacgtgaggcacccagaaccagacgtaactgtcccaagagtggtctggataaagctgagaaaagcaagattactacacacatactagaatgcctaaaacacaaaatagctgacaatatcagttgctggcaaggattgaagccacacactcattcattgctggtgagaatacaaaatgggacaaacacaatccagcttgtgttcctaggtatatacccagctgatctgaaaatctagccgagtgcggtgcttcag

SEQ ID NO: 8531 - DNA, 487 bp, Homo Sapiens
  misc_feature (370)..(382): n is a, c, g, or t
ccacagtggagaagcatggacgtgaggagaaaggttggaaggattgactctgaaaaggagacattctttctctgaaccttgatggaaagaacctgtgtagaattgttacgtgtgatctgtttccagaaaaataaggaagttagacactctttcttcacttctgttcctatagacttgaaatatgatttctcacatagtagttattaaagtaaaaatttaatatactaaaaatgatgggtattttgcttcactcttgaaatgggcatgtcctgtacattagtcctatacattagttatgaatagattatttttctcttagcatgatgtaatttcataccaaacatgcagagaagaaatgggctcctgccannnnnnnnnnnnngccatccaagaaggtatttcttatgcaccctttttgtacataaagtagaaatcaacacccaacgtttcttatatatatcaagcttaagcttctggtgaaaatact

SEQ ID NO: 8532 - DNA, 422 bp, Homo Sapiens
  misc_feature (25)..(25): n is a, c, g, or t
ccatctgccaagacaccgattatcncacgctggccttccctgatactgaagcacgttccttcaaatgtcagccagtgtttttcctcgcaccctcttcctccagccagtccctgccactggccttctctctccctaaatccccgggggcaccccaccacacactggcgggagtggttccaccatcaagacagctgcctctctgctacaaagaccctggtaccccgtaggtgaaggtggaaaagcttagttatccagaaaagcagaggcatctcaagtcactggggatcgcgagagagtttcaaccacccctacaaggcgactttgtaaggaagggccgcattttgcaactgcagagttccctcttccaggaaattacttcctgaacactttacctgcaccagatgtatttatttgtttattta

SEQ ID NO: 8533 - DNA, 414 bp, Homo Sapiens
  misc_feature (114)..(114): n is a, c, g, or t
atttagtgttaatcctgtgtatattacatatacacagccaactggaccttcttgtactccatcaccatctcctcagagtgataccaaacccaactacagtttttaaaattaccngtagcccgagcaaccgacttgaaaatcttttaaatttagtggaccaagaagagcgctctgcagcaccagaacctattcagcccatttcagtgataccaggctctgggggagaaaagggaagccataaatatcagagaagttctagttctggatcagatgactatgcctacacacaagccttgctgttacatcaacgagcaaggatggagaggttagcaaagcaactgaaacttgagaaagaggagctagagcggttgaagtctgaagttaatggtatggagcatgacctgatgcagagac

SEQ ID NO: 8534 - DNA, 443 bp, Homo Sapiens
gccatcatcatttgaattccaaccagtggggagaagaaaggggaaaggaacagaccttcctttaaggatacttccaagaagttgttcatactacttcctttcatatcttgtggactggaagcaatcacattacttgaaatatttcatgtttttattggaaaccatgagcccaatcaaaactcaaagttccattattctgtagataaaggaaagtggatattgagggacaacttgctgttaccgatgtcagctgaccactaaacactcatagcaaatgacactaaaagggtttctttggtggtatttttcttgagatttgaactcgcgttcaactaagtcaactaaacctcagatttggactgctctaggagtacttgggggtgaggggaattgaaaagcaaacagaaaagtataaaatcatccctcagtctctgataagagct

SEQ ID NO: 8535 - DNA, 602 bp, Homo Sapiens
gtatcgtgtttaattgcagtgtaggcacgtcgccattcaaactcagttctggggtggttttgcataaagttttgccaacgtgttcttttttctgtatgtattattgcctttttataaaaggtgttgaagtattgtctcagtgataaaaagagagagatgttaatggttgttgtatatctcaccgtatccaattgtaagtatttgcagggtacagcagagccttagcttgcaagagcgtttgtgcaggaggtgtccctcaacacccaggagctgaagggattggaaaggtttggattctttgtaaatgtcctgcttttctttctctctgtgtgtatctatttacatgccttagcacacgccctcccatcctgatccctttgccctgtcgccggaacaaccagaatgctggtgcgctgccggcacagtacaagttgatgaaaccctaatcagttatcttgtgtgacaggggaagaagagaaactccatagtattccttgtagaatatacatacctgtaggatgctgtgtaatgggaaaccatagaattgggcttttgtcatttcaaagttggagaaatgtatgaataaaatgtataaaacatga

SEQ ID NO: 8536 - DNA, 452 bp, Homo Sapiens
  misc_feature (19)..(19): n is a, c, g, or t
aagggtgaggggcttcccncagggatccccccacctggcctgctcacggggccttggagcatgagaccagtgaccccgagttttgcccaaatcaggacaggggtcccttctcactcccctttctcaggccaggagggccgagggccacacgggtgccacagcccaggtcggagtggcccagccggcaggcttgttcttcagcatccgacgggaacatctccaacagaagcaaaacggaaagtgcctcccggacccccagagggccacccaacctcaccagtcaccagccccagaccacccacagcccctcccagacaccccgcctcatctggaaatagttccgtttgtttctctaaaaagacttgtaggtgggaaaaaaaatcttttgttctcatggaattggcctattggcaagatcgcatgtttttttaataaacgttgtattttagaat

SEQ ID NO: 8537 - DNA, 462 bp, Homo Sapiens
  misc_feature (403)..(419): n is a, c, g, or t
taaaactgttgcatcaagagaaaggttgtgttttattttctgaaatgagcacaaagtacacctttcacaataacactgaaagcaggtgcaaagactgacagtgacctttgactaaaggtagctttgtaaaaagaaaaataccaaataaatcagtgccctttctgattgttgtaaaactggaggtggggaggggctgtttgttacataaaagttggtccaaacttacaaaaaaagcacaaatgtgcatagttcagaagatctgcaagagggccataaaaggcttatgcccctaaaattagcatccacttaaaactgcaagaatacaaaataaaattgttaactagaatttgtgaagatgtacaatcgatctagtttttagaacagcatgaatttaagcaaaggnnnnnnnnnnnnnnnnnaaactattgtatgcaagacccttctcccataaaaataaagctg

SEQ ID NO: 8538 - DNA, 456 bp, Homo Sapiens
ttgtaaatgatgactcaatctatctcccaagcaccaatcctgaagggaatgctgaatctgaatgcccccataggtggaacttcaaactctcaatgttcaaaacaacatcgctttttcttcacaaaatcttcattatgtatttgatggaaccaatatccttgaaataacataaattccaagctttaggtacctttgacgtataggggataaaagaaagggaacagtcaatcagatgctaagttctcttagttttacttttcttgtttctctccagtgcaaatagcaagcaatacacatagcaagtgctgaataagtgcttttggaatgtgtattctaatttctgaacctttccttatgcttccaaaaatgctgagagacgttcaagcttttggtagagagaagagatgaactggtgactttgatgtggggggacatttgaggactccacccctattt

SEQ ID NO: 8539 - DNA, 419 bp, Homo Sapiens
  misc_feature (51)..(79): n is a, c, g, or t
attttctttttccattaaattgccctcatgtcctaatgtgcagtttgtaannnnnnnnnnnnnnnnnnnnnnnnnnnnnaatttgattttcaagagtgctagacttccaatttgagagattaaataatttaattcaggcaaacatttttcattggaatttcacagttcattgtaatgaaaatgttaatcctggatgacctttgacatacagtaatgaatcttggatattaatgaatttgttagtagcatcttgatgtgtgttttaatgagttattttcaaagttgtgcattaaaccaaagttggcatactggaagtgtttatatcaagttccatttggctactgatggccaaaaaatagaaatgaagtcctatggaaagtattattcctccaaaaaattaaaaaggttaatgattttga

SEQ ID NO: 8540 - DNA, 439 bp, Homo Sapiens
agtggagtcagtgaccccaggtggagggacttccagttttaacaatgggttggtatgaaggccagaaggagtgaaacatgtgaactttctggcgaggagactccctcttgaatcatccatatgtagccccggggtcacttgcgaagagtctctaacagcttctgcctcactcctaagctctgaccgctaggctttcaccccagccgccggtcctgattcctgagatcccaatattgagcaccaggtttcctggaattgtgtgctgcggctgtgatgtaggtttcggtcgctggaagctgctaaaccatagctgacgccccctcctaagccagccttccttccccgcgcgggcatctgtccagggccttgtcgcgctctcagtctccttcgcagcctggccccaaccgttcaacttcaataaagcaaaactccagccaca

SEQ ID NO: 8541 - DNA, 477 bp, Homo Sapiens
ggcacagcagcaaggttcacggatatccgtgtgtcttgtctgtggccaccaggcacaggtttggcttccggtcagtgtcccgacactgtgcgggaggtgacaacagagcaaagcagcgcaggggtcagggaggtggagacactgctgaaatcacactaccccaccctcagctgaagccccacgttccacaaacttggggtcatagattgtccagtcactggctccctccctgtcagcacagcacagaggaaggggctaactgaatcttttaccacttctggcctggctccagaactttgttctagattccttaaaagtcggtagctgatgtcaaactcaattgagcagtagctttgatcccttggtctgggggtcgaaggaagatggcgctgttatcagcggggaaatgtactatttaagatcagctttgttgtaaaaccatttgttctagaataaaactcaattggaaacgtgaaa

SEQ ID NO: 8542 - DNA, 574 bp, Homo Sapiens
  misc_feature (158)..(158): n is a, c, g, or t
gccacgtgagtgagcatggaagtcaagccatgcaatgactgtcactctggctagcaccttgattgcaatcttctgagaggccctggtccaaagtcaccctgcaaaaccaatgcccagaattactgacatatttatttcaagctaataaattataggcngtaatttgtaatatgcagaaatagataactattacggtagatcaaatgaaaagattttccaatgtgtagaaactacataaattcttttcttacaggacaatcttattctaatcaataacatttgcttttaaggcagataatcctccaagttttctaatgatatctgaaactattaactgattctgtgaattatgaaatctgaaaaggaattggaagttgctaaaaatctatcatttgcattgaccagtgtgaagcacagtggaatgagaatgcgtgccctgacaccaaagaaaaataagtgactggaaagctgaagaatcaccggcttcagtgacatggaacccagtgatttgatttttgacgagtatcgggtgactttgaggtggtcaagaaaccacactttaagaacaatgtcc

SEQ ID NO: 8543 - DNA, 290 bp, Homo Sapiens
agcaggaatttaggaatcaaggagctccctgggccaggcaccccgaatgcgagaggataagctccaggaagggacttcctgtcacactggaacacacagaaaacacagttctgacatcaaatctcccaaagctgggtctctccttctccctaaatcctaattcagtatcctttgagaggactgcagaaaccccttgggtgtggggcacagttttgaaatgtcaggttaaaagccagtggcctgtaattctcaggagatgcccttttggacggaccctgagcagaggaagc

SEQ ID NO: 8544 - DNA, 457 bp, Homo Sapiens
tttggctgcagtaacattgctactaactataatagcatacagtgttccctcctactggtaagaatacattctacttttaaactaaaacttgacaggcctcttataggccatgccaacactttgaaaataaaactcttgaagtttcaacagaaatatatttttacatgataggaggaagccttctggaacttaccgcttacatggagtgaaggagttgcatcaacaatggggctgttatgaactcgggctccacactgtctcctaaagggattagacaggtctcataatgtgtcagaggcagaaaaaagtgacccaagaaggggctaaatccttagttctccttaatattttcccatgtcaacactgagatttgagaaggcagaaggaactgacttactttatatacttgtctgatccttagtacttaatgaaatatagaatgttttatttgacgcct

SEQ ID NO: 8545 - DNA, 515 bp, Homo Sapiens
  misc_feature (27)..(27): n is a, c, g, or t
  misc_feature (49)..(49): n is a, c, g, or t
  misc_feature (270)..(270): n is a, c, g, or t
gtccccataattacagaactgtcctgngcttctccactgaaaccccaancgacccgctaccaccccagcatctccagcaggagggaaaacccagtgatccacagtcatgctcttcagctgggcatttgtggccagtaaagtgtgggcagtgactactattagtgctttcttttataacctcccagatgtgcaaaattaattttaactggcttgtgtatttttgcttttccccagtatttgcggggaaccagtgctcactgggtaacaaanagataaaaccacccaggggatttccttccacctggagcgtcctctaggcttctcacaagcgggatgatgccaagagaaaggcacctttaggataataagttttcttaaattcacaacatgcagatttggctttacatttaaatgcattggaaaatggaatgttttccacttctacaaggctaacccacagatgcacgattatttacgaataaaagaggatctattcacgctattcttatctagac

SEQ ID NO: 8546 - DNA, 476 bp, Homo Sapiens
cggcacgagcaccatcccagttctgttgtggacttgaccaatgcattcttctcaatcagcattgctccagagagccaggaacagtttgccttcatgggagggcgacaatggactttcatagtgttgctgcagggctatatgtatagccccattatatatcattttcttattaatgatgttatgttaaccgcgtagttcttttgctggtttggaggctcacaacacccctcttgcctgggattgggatgatgaggctgaaacagcccttctgatgacataagccctctgggtggttaaccaagggtgcccatttaaactagatgtgcatgtaaccaccaatagaagttgggctaagggcctatggcagttatatggaagtgcttggaagcgccagtcagctttttagtcccagctatggaagggagctgagccccagtgttcattaataaagaagcagttagtaaccatatatgctg

SEQ ID NO: 8547 - DNA, 411 bp, Homo Sapiens
gagggaaggcaggccagccattcaaattgattcgaacatcagattctttgaacttgcacatgtgatgtggtttgactcccttataaatacatcgaatttggtggcttaaagctttagagtggatcatgaagaatctcacaggggtcaaatgagactctggccccaaattatggatctgtacttggggtacattttctttcctggcccctacaaaggtgagcagaagacacatttcctttggtgtcagaagtggcttcatctttgtggtcctgcagggtaaagtgtgacacaagagaagacttaggtccagaagatgctatacataaagtggggaaagcaccttgcccctaaatgaaggcccctgagacatgcactcttttctgcccttcacatgatgaaagtctcactttg

SEQ ID NO: 8548 - DNA, 548 bp, Homo Sapiens
cggcacgaggtctctaatgccaagccaagtatagaaatcagcctcatcgttcttttccctggatggctcgtggagagtcttggtgaatttccaacatgcatgtttgatttggtttgttttcatattgactcttaagagtcataccaatcacaagtttaaaggcagccattccaggagaatgagcgtggtggtccatgctcagcttgggtgcttgatgtcagatgatataagaagttgatccccgtcagttggacttggattagagttccatccaaggaacatggccggagaaagatcttttcatatacatatcataacaagtcataggaaaacagagtcagtccttctctttctgaaggtgttagaaatatttttctgaaactgttatagataggattttaaatttttatgtgtagttttcctcctcctacaaagaatttgaggctataagtaaggatctgtagaacctttcctgaggaaccccagtaggcacaggggaagcgcgggtgttctaacagaacttctctcttgtgcatgtgtgcgccctg

SEQ ID NO: 8549 - DNA, 480 bp, Homo Sapiens
  misc_feature (451)..(451): n is a, c, g, or t
  misc_feature (459)..(459): n is a, c, g, or t
ggcacgagtggtgacctgcttcttaggaactacaacgtgagcctttattttgcctcgtctgcaactccatccttagcctttgcgttgtcagcctgccttcctttgccacacttgagtcttcctaaccttaccccttaatagcaatcacttcatcatcatgcgctttcccactatcccttctccctgtctcttcccacccatgaaaacaaatttagaaaatgaagggaaataaacaaacaaacaaaaagtcaccattatgatgggattgaggcataatatctgagtaagaagggaataaattaggttttccttgacagtatatactgcctgtttctgtccatcctcttatttgcttctttttctttgctcttccactccagtccttaagcgagtttagttttattcgttcctcttgtcccttttcatgataacaatgtgtcatagtctgctntaaagttnttcatacttaccgatgttagt

SEQ ID NO: 8550 - DNA, 312 bp, Homo Sapiens
gcttggaggagctctgttggtgagaggtcgccctgcctcactggcacccctgggggcactagctggaagagaggcctggcccatgctcctctcagggcaggcacatgtacggggcatacaaggcacagcgcctgttggaacaggtggctgtgttcctgctcctggcccccgtgcggctgggcctccgcccctgcaccagtcacatgcactggacgagggccgaaactcctgtctgctatcgagccctggtgctatgtggccccggagccacagcacaatcatctcagtggcgaagcacaccacttgattcta

SEQ ID NO: 8551 - DNA, 503 bp, Homo Sapiens
gcctcaataaattccgggattgtttagaaagggttttcaaggcaacggtttcactggctaaaatcccatcatggctgctccggtttcactgggttaccggagaatccaaattgaaaatcgaaggcctactttgaaggcaagtttgaatgaccatgtcctaaaggctccagaggaatcgggaggctagcaaagcttaaaggcccccttctctgcccccagcctctgttccccccttggaggagggctgtaggaagattccctctttcctgcaaagccacattccagtgagctctggatgaagctctggccaaccaaagacactgtccccacagcaggtgcctggtgggccacgtgttctcacactggtggaggagctgggcttctctccaaggcacaaaccttactatggaaagcagccatatttgcagataccactgtccccttttgtcctcttcgtggctggaattcaaaagcatgtatttctgaagcctcttgtgacattg

SEQ ID NO: 8552 - DNA, 663 bp, Homo Sapiens
  misc_feature (144)..(212): n is a, c, g, or t
tcacaagggaaatgcaaatcaaaccacaaagtacttttttaaagtttatggagtcaaatctatttttccttgtcatctgttttcttccaggtacttttatgcttagaaagtccttctgcatatagaggacaaataaacatttannnnnnnnnnnnnnnnnnnnnnnnnnnnnnnnnnnnnnnnnnnnnnnnnnnnnnnnnnnnnnnnnnnnnatgacaagtagtatgaagacaaaaaaatcgatccttattttgcaccaaatagccaattgtcacgtaattgtttatggaataatacttccttttacctctgattttgtaatgctgagtttattagacaacaaaatcttatatattctaagatctgtttctgggctctttccattccattgaactatgccataccattttaaatattgtagttttacatttttccttggctattttgacctgtttattcttcttgaacttagtaggcccaccgattaagattttatttggaaaagcagtgtctctgcttttaatgagctgagtgaggcaaatcacttaacctctccatgcctttgtttcttcatctgtaaagtggggaaaagagtatctccttttgcccaagttccagggaaattgtgaggatcaaatgagatggttatgaaaacattttgaa

SEQ ID NO: 8553 - DNA, 513 bp, Homo Sapiens
agagctagtcagatgtgaattgtatctgttgtaataaacatgttaaaacaaacaaaaattgttatttttcttttccttcggtcagtgcacattagcatttgaactacctggggattctttatcagaactgttcttgttgaatatttatacttaattgaaataattccttaagggaggttttgtttaaaacgtattaacaggaaattgtgtatgagatatttaatgaaataagaaattcaacaagaatgattaagtcacttcccaagtggttgtcatttgttaaaccctggtttacctgtcttgctattatgacatttcatttggaaggatgtttgtgttgtagctaactgttcaagtctggtgctgactgctgttcttagccatcacaaaacgctaaatttgtgtaattggagcttcctgctgttatctggaaatagcaggaaagcgcagctttgtatattgtttcctaaagtatattaaaataaaaaaagaaactattgatttattaaaaaa

SEQ ID NO: 8554 - DNA, 708 bp, Homo Sapiens
cttggccgccagtttctgttccactgacagtgacttgcgcttctccccaaaggcgctcttcctgcatcgagcctcccacctggccctgttgactgcccacctcaccctgctcctgctgtttgccctctgcaggtggcacaggacaggggaaagtatcttgtcgctgctgagggatccctccaaaaggaaggttccaccccagccccttacacccaaccagatcgtttctaccctcttcacctccaacttcattggcatctgcttcagccgctccctccactaccagttctacgtctggtatttccacacactgccctacctcctgtgggccatgcctgcacgctggctcacacacctgctcaggttgttggtgctggggctcatcgagctctcctggaacacatacccttccacatcctgcagctctgctgccctgcacatatgccatgccgtcatcctgctgcagctctggctgggcccgcagcctttccccaagagcacccaacacagcaagaaagcccactgaagtccacccctttccctcaggacctgagtctaccctcaggacctggggttggttggactctgcccttccaaataaaccttgctaagtccaactctgtgcaacctacatggaggtgggggcagccgatgcctggtccaggctgtgaggcacacgtatggagcagataaagaattcaatcaagc

SEQ ID NO: 8555 - DNA, 679 bp, Homo Sapiens
tttttttgttttaaagctttattgtagactttgctgttggatacaaaatgaaggcatacaactgtcacaggcagggcagtaagtacaaagtctaagctgtaaaaaccgtttgaaaatataaactcgtttttggaatacatgtgtcaaaggctgcccatgttaatacctttggtataaaacggtaacgattcccttgacaaacccatccatcacctgacgcacattcacatctcctggtaactactctacctagtctagtctcaaccacccctgtcagtcacgactcactcctgttcctttgcaggtgcagaggagcctgggaggtaggtcactgagaacacccgtcctacataggcgctgcgcccagccgggctccagcaggggccgccacctgtgccccacaagcacacgtccccacccacagtcacacatatcccttaaacaaacatgaacacagacacaaaccagacccaaagttatctatctacccgcacatcctcaacctgttcactgctggccactctacactgtgtaaaaatcagaggcaaagacaagggggtctgtgtttatagcagggaagctcctggggctggtggtgtgagggtgtccctgcctggatgccaggctgggaggacaaagggtatgggccacctgaatttctaagcaaaatacctttgag

SEQ ID NO: 8556 - DNA, 630 bp, Homo Sapiens
  misc_feature (335)..(352): n is a, c, g, or t
ctcgaggtcccatgcgcgacgcttccatcaagaatggggatcacagagacattcctccgagccggggagtttctttcctgccttcttcttttggctgttgtttctaaacaagaatcagtctatccacagagagtcccactgcctcaggttcctatggccggccactgcacagagctctccagctccaagacctgttggttccaagccctggagccaactgctgctttttgaggtggcactttttcatttgcctattcccacacctccacagttcagtggcagggctcaggatttcgtgggtctgttttcctttctcaccgcagtcgtcgcacagnnnnnnnnnnnnnnnnnnccctcaaagtctgcaactttaagcagctcttgctaatcagtgtctcacactggcgtagaagtttttgtactgtaaagagacctacctcaggttgctggttgctgtgtggtttggtgtgttcccgcaaaccccctttgtgctgttgggctggtagctcaggtgggcgtggtcactgctgtcatcaattgaatggtcagcgttgcatgtcgtgaccaactagacattctgtcgccttagcatgtttgctgaacaccttgatggaagcgtcgcgcatgggg

SEQ ID NO: 8557 - DNA, 939 bp, Homo Sapiens
gacatagtcaatgaatagtcagtagaattagaatggtgaacggattggcgacatttcaagagaagatgtcagcagttctgtgggacgggaacctgcgtctgtggcaggaacgccaggctgagtacttccaggatgacatgccagaatctgaggaatgtgccagcgcccctgccccagtgccccaatcctctacacccttttcctcaccccagtagatccaacctccagccccatatagggtgaacctcttgataagctctctgcctcctcctccctttctcccttgtggggaatgtttggaggaatcactggcatttgatggggaataacataagcctgggctctgagcctcagctgagccctggaagattctccccatggggcagagtggtctccttacgtgctcacacccagtcagcttgggtccctatctctggccagagtttggcaggactgccattatctggggtgtggcctctgccagcaagagaagtgtcctgggtgtttttaatcatgtttgaatgttaggggttggatcctagagtagatgcctgaggccacatctgaacagacctgtcagccaggcctgccaggtcttcacgttgaggattcaactggccaatcacaggacaggtgtcctggcctttcttcctgaggtctctaggggaggggcatgggtaagggtgtttcctcagcaccctcctggggtggggattatgtctgctgtcatgtctgggtctttagggtaggacaggctgtggtatgagaggcaggagtctccacaaggcttcatgtggccccttatagggcaggccctgccctctgggaaggtcccttcatgctggaggcacacagctttaaggaagtaggttgaagtaggactccttcgtcctctcactggctttggctccctcaataaactgtgtgggaacctgaaaa

SEQ ID NO: 8558 - DNA, 426 bp, Homo Sapiens
  misc_feature (172)..(194): n is a, c, g, or t
agatctgattctttcttttcctttggaaactgggattaatgtatgctctagatccatttattagaaatgcaaaaatactacaattttttgatggatgaaaatactcctgtaacacaaacagagaactggaggaactgaagaataactcactcatatagctctgcctcattcnnnnnnnnnnnnnnnnnnnnnnntagcagaggtattttactcagaaaataggtttcaaagaacattaatgactttcttttcccttttatgtctgcttaatcagtgttaaactgctatgggaaaagttttatagaactatataacctgaatgttggtctctttgtacacatcttttctatgactgcaaatcttcactttatgtatcatttttactgtcatattatttttgttcaataaaaactttgtgataaaagg

SEQ ID NO: 8559 - DNA, 495 bp, Homo Sapiens
atcgggcacgaggtccaccatgtgcaatggcctttagaggccagaagccagggttctgggcaattttgcaagttactcctgtggccaggtgtggtctcggttaccaaacacggttacctgcagctttctagtcctttgtgctcccacgggtctgcagagtcccatctgcccaaaggtcttgaagcttgacaggatgttttcattactcagtctcccagggcactgctggtccgtagggattcattggtcggggtgggagagttaaacaacatttaaacagagttctctcaaaaatgtctaaagggattgtaggtagataacatccaatcactgtttgcacttatctgaaatcttccctcttggctgcccccaggtatttactgtggagaacattgcataggaatgtctggaaaaagcctctacaacttgttacagccttcacatttgtacaattcattgattctcttttccttccacaataaaatggtatacaag

SEQ ID NO: 8560 - DNA, 367 bp, Homo Sapiens
  misc_feature (220)..(220): n is a, c, g, or t
acactgatgtttacttgctcaatgtgtaagactcaatcttcccccaggtttcccagaatgctggcagctagccccatagcctcatacccttcaggcaaatgactgggaaaaagtattctctggggaacctggtaaactcagggaacgcacctatagccgccaacactggggatctcccaacgaaagggccagccagttcatctcgctgtgagtccaccangttgacaagccagacacaaagagcaaccaggctttttagtcccccattccttaatgagtggacagcccaggccaccgggacatttgagtaaagccttaacataaaactcagaaaaagcaactaggagaggccagatgcggtggctca

SEQ ID NO: 8561 - DNA, 480 bp, Homo Sapiens
cggcacgagagcgaataagcactgtgaagaaaatgggacgggggctatggtagtgatgggaatttagatcagatggggaggggcctaaggagacctttctgaggagtgacaaattggatcaaaggtaagcgacaagaaagggccacctgtgtgaatgggggaagggacacagaagagatgttagtgcaaggaggctgacacgcttgaagggagagtggcgtaagccgactattgatggagcctcctctgcactaggcactgcctttaatgctgagacgaggggtacccggctggggcctgtcagttgaggccagagaaattgcagggttagatcacatagggcctaggagtttattctgttctccaagcccctggaggttggcaactggaggctgacgtgacctgatgaatgtgtgcaaagattaccctggctgctgggcagggaatatgactctgacgagcatgagtgaaaatggagac

SEQ ID NO: 8562 - DNA, 423 bp, Homo Sapiens
  misc_feature (12)..(12): n is a, c, g, or t
aggtcaggaacnccagtttgcttttctgttttgtgtcctggtagcagctgttgagtaacctttcattggaggttgggaagggaagtgaggagaaagtgttcttgtttagtgttttatttccttataataggatgctgcctaacccagttcatctctatgtcctgttcactgaatattccgggtaattgaaagaaaatataatggatgggctccattaaaaccagctcaaaaataaattcttgtcagtaaagatttcttgtcaagatgtcttggattgcacttttgttgaggaaagacagtgtaaatagttaaagaatgttgataaaattgaaacatttggttgtggaattgtgtgtggttttagagggtttctgtttgtgaaatgtatgtattaaaaataataaaattccagaaactaaaaaa

SEQ ID NO: 8563 - DNA, 715 bp, Homo Sapiens
gggaccgccaagaagctctatggcagcacctttgccttccatgggtcccacattgagaactggcattcgatcctgcgcaatgggctggtcaatgcatcctacaccaaactgcaggaatgggaaaaggacagcacaggatgccctccaaggatgagctggtccagagatacaacaggatgaataccatcccccagacccgatccattcagtcaccggttcctgcagagtcggaatctaaactgtatagcactttgtgaagtgattacatctaaggacctccagaagcatgggaacatctgggtgtgccctgtgtccgaccatgtctgcacaagattcttctttgtatatgaggatggtcaggtgggcgatgccaacattaatactcaggaccccaagatacagaaggaaatcatgcgtgtgatcggaactcaggtttacacaaactgagggggccccagccctcgtaccacccctgttaccccaggatccatctgccctcataaaagtgttcaggtacaacagctgaggctgccctgaggaatcaaggggccattaccaaggggcaggaaaaggatatgtaagaggtggccttcatggtagagcttgacccaagaactactccacattcggatggcccagactgactccatcccctgactttccctttgacttcaccctgtttgtaaataaaacaataaaatggaaggtgctgtgg

SEQ ID NO: 8564 - DNA, 452 bp, Homo Sapiens
  misc_feature (115)..(115): n is a, c, g, or t
agactgtgctgagaaagcagtataagcctttctaaccttccaagactgaagactgcacaggtgacaagcgtcacttctcctgctgctcctgtttgtctgatgtggcaaaaggccntctggagggctggtggccacgaggttaaagaagctgcatgttaagtgccattactactgtacacggaccatcgcctctgtctcctccgtgtctcgcgcgactgagaaccgtgacatcagcgtagtgttttgacctttctaggttcaaaagaagttgtagtgttatcaggcatcccataccttgtttttaatctcctgtttgttgagtgcactgactgtgaaacctttaccttttttgttgttgttggcaagctgcaggtttgtaatgcaaaaggctgattactgaaatttaagaaaaaggttcttttttcaataaatggtttattttaggaaagctc

SEQ ID NO: 8565 - DNA, 976 bp, Homo Sapiens
  misc_feature (27)..(27): n is a, c, g, or t
gaggcgccggcctccttatattaatantacaacacccagatggaaccggtccggaattatccggatcccggagcccagccctttcctatcccaacccaacctagcccagtcccagccgccagcgcctgtccctgtcacggaccccagcgttaccatgcatcctgccgtcttcctatccttacccgacctcagatgctcccttctgctcctggtaacttgggtttttactcctgtaacaactgaaataacaagtcttgatacagagaatatagatgaaattttaaacaatgctgatgttgctttagtaaatttttatgctgactggtgtcgtttcagtcagatgttgcatccaatttttgaggaagcttccgatgtcattaaggaagaatttccaaatgaaaatcaagtagtgtttgccagagttgattgtgatcagcactctgacatagcccagagatacaggataagcaaatacccaaccctcaaattgtttcgtaatgggatgatgatgaagagagaatacaggggtcagcgatcagtgaaagcattggcagattacatcaggcaacaaaaaagtgaccccattcaagaaattcgggacttagcagaaatcaccactcttgatccgcagcaaaagaaatatcattggatattttggagcaaaaggactccgacaactatagagtttttgaacgagtagcgaatattttgcatgatgactgtgccctttctttctgcatttggggatgttttcaaacgggaaagatatagtggcgacaacataatctaccaaccaccaggggcattctgctcccggaaatgggtgtactttgggagcctatgaacaaaatttttgaaggtgcactttaccaatttgggattccaacgataaaaatggcggttcccctctttggtgcccgaagaaaaataaacactttttggaaaaaatggggaaaaggggaaatttttcacaccc

SEQ ID NO: 8566 - DNA, 591 bp, Homo Sapiens
  misc_feature (26)..(26): n is a, c, g, or t
  misc_feature (38)..(38): n is a, c, g, or t
  misc_feature (99)..(99): n is a, c, g, or t
  misc_feature (415)..(415): n is a, c, g, or t
agcaccactgtcaacaggcttctgancgtggcttgganccttagggggagaaaaggggtttggtctgcttctaagatgttcatcaagtggagtgataancttcatttgagacaggtgaactctgccagtgtcttctcccttttggcactccaagtaattattttccgtctgcttcagcatcacaagtacatccccacgcttacaagagagttctccggggttttgagagacaatatcttcattggcaattccatgaggcacagacagcatgtatttactgtagagagggtgtcctggtttgggacgagggggtagcaccggatcttgatttttaaaaacttgactccttggcttttgagagtccagttgccaagttactttgttttttctgaaagatcccatgtccaggaaggangatcgatttaaaagccagttcctcattagatctttctggttgcaagaaagctttgggggaggtggtctctcagggggcaccttggttggaggctgttgagttggaatggtttttccattcacaggtctcggtggcaaccttgggggtactcgcacaaaacctcctgtttgacctgg

SEQ ID NO: 8567 - DNA, 1361 bp, Homo Sapiens
  misc_feature (1207)..(1207): n is a, c, g, or t
gctggtaccgggtccggaattcccgggatcgggcggcgggcggcggaggtgcggggcctgctcccgccggcaccatggccaagaccgtggcctatttctacgaccccgacgtgggcaacttccactacggagctggacaccctatgaagccccatcgcctggcattgacccatagcctggtcctgcattacggtctctataagaagatgatcgtcttcaagccataccaggcctcccaacatgacatgtgccgcttccactccgaggactacattgacttcctgcagagagtcagccccaccaatatgcaaggcttcaccaagagtcttaatgccttcaacgtaggcgatgactgcccagtgtttcccgggctctttgagttctgctcgcgttacacaggcgcatctctgcaaggagcaacccagctgaacaacaagatctgtgatattgccattaactgggctggtggtctgcaccatgccaagaagtttgaggcctctggcttctgctatgtcaacgacattgtgattggcatcctggagctgctcaagtaccaccctcgggtgctctacattgacattgacatccaccatggtgacggggttcaagaagctttctacctcactgaccgggtcatgacggtgtccttccacaaatacggaaattacttcttccctggcacaggtgacatgtatgaagtcggggcagagagtggccgctactactgtctgaacgtgcccctgcgggaatggcattgatgaccagagttacaagcaccttttccagccggttatcaaccaggtagggggacttctaccaacccacgtgcattgtgctccagtgtggagctgactctctgggctgtgatcgattgggctgctttaacctcagcatccgagggcatggggaatgcgttgaatatgtcaagagcttcaatatccctctactcgtgctgggtggtggtggttatactgtccgaaatgttgcccgctgctggacatatgagacatcgctgctggtagaagaggccattagtgaggagcttccctatagtgaatacttcgagtactttgccccagacttcacacttcatccagatgtcagcacccgcatcgagaatcagaactcacgccagtatctggaccagatccgccagacaatctttgaaaacctgaagatgctgaaccatgcacctagtgtccagatntcatgacgtgcctgcagacctcctgacctatgacaggactgatgaggctgatgcagaggagaggggtcctgaggagaactatggcaggccagaggcacccaatgagttctatgatggagaccatgacatcacgaggaagcgatgatgcgagtcc

SEQ ID NO: 8568 - DNA, 1172 bp, Homo Sapiens
  misc_feature (1013)..(1075): n is a, c, g, or t
tcttctctgatattcagaatttgcgtgtcctgtcgtaatatgctgctgttgaagtaactttaaatgctcctttatgcaccaacgcattccacccagattgtccttgtaaattagagtaacactactgaacatcatgtaccactattgtagcaatagtaggaaagacaagggctcccacacaagattcgagtagcagagacatgatctgctaaaggattggcctcagctggaattcgaggaacaggacaacctatccctggaaatatactacttaaaatttggtagtttattcgagtattggcgccacagtctaagcacatagtcctcccagcgaatcatcttgcctaatatcagcatgacaggaatagtaggaagtccaattaaaaggaataaaggatcagctctctccataacatccagaccttctttatgacctacaacctgcatcactgtcactgctccataagtcacagctgtccaatagatagagccgaccattattcctgctgcagcaaatggacaggcttttgagatcagtctatctgcaagatccaagacgtaaaccactggacccaattttggaaaaacttattaggtattccagcattgcacatgaggacatgccactctggccgtactagcttccatcttttcgcttcttcatccacccacagcgttgtagacagcaccatggatgaaacccattttagtagaatcctctagcaccatgcactggtctcacccattcagctgttctatcatcttcatcactagcaaaacaaacccatgcaacttctgtccagcactctgctgtcagggcttggctcctggcatctgtccgcggagccgcgcgccacacgcccttcccacagtggacccgcctcaaggccaggccccagggacaatagcactgagagccggcggagtaggccgcagtccggcggcagccgcgaacccgtcacccagcttcccggggcagctccgctagcctggcggcggcggtgcagggcctnnnnnnnnnnnnnnnnnnnnnnnnnnnnnnnnnnnnnnnnnnnnnnnnnnnnnnnnnnnnnnncgcggcccgggttcccgtccgtcggcccgaggttccggtccatggaccgcgggcgccgagttactgccggcggaggagctaccatcccggaaattcc

SEQ ID NO: 8569 - DNA, 427 bp, Homo Sapiens
gagcattttttcatgcattcccactgatcacaaaacccatactactacctcattgacaccatacctgctaacctcgaggctttagtcatacaaagaaaatggcctttctgtattgttcttctgtgctctcataatgcttaaccatgtcttttacttaaacaattccaggaactggccttaggagatccaaatagggaaccaagattgcagagtgtcccatcttgggagggaatgctgaataattaattgatttacagccttgttgccgctggccagaccaccaggtggcccattactcgagatgatcatcacaaccagatgatgctaacctatatcctctacccttcgcgtgctttgtctgggaagtcttttggccccatgtcagtttctattgcattgagagcccaagagcccctggtcagtcagg

SEQ ID NO: 8570 - DNA, 1226 bp, Homo Sapiens
aggtccccgaccccccactaaccgccacgccgcggcgaaaaaaaacggctggtacgggtccggaattccgggatcgtcgagtacacgatggaagcaaacgaggactatgaggactatgagtacgatgagcttccagccaaggatgacccagatgcccctctgcagcccgtgacacccctgcagctgtttgagggtcggaggaaccgccgcaggagggaggcgcccaaggtggaggaggagcaggagtccaggtgcactacaccgtgtgcatctggcggaacggcaaggtggggctgtctggcatggccatcgcggacgtcaccctcctgagtggattccacgccctgcgtgctgacctggagaagctgacctccctctctgaccgttacgtgagtcactttgagaccgaggggccccacgtcctgctgtattttgactcggtccccacctcccgggagtgcgtgggctttgaggctgtgcaggaagtgccggtggggctggtgcagccggccagcgcaaccctgtacgactactacaaccccgagcgcagatgttctgtgttttacggggcaccaagtaagagcagactcttggccaccttgtgttctgctgaagtctgccagtgtgctgaggggaagtgccctcgccagcgtcgcgccctggagcggggtctgcaggacgaggatggctacaggatgaagtttgcctgctactacccccgtgtggagtacggcttccaggttaaggttctccgagaagacagcagagctgctttccgcctctttgagaccaagatcacccaagtcctgcacttcaccaaggatgtcaaggccgctgctaatcagatgcgcaacttcctggttcgagcctcctgccgccttcgcttggaacctgggaaagaatatttgatcatgggtctggatggggccacctatgacctcgagggacacccccagtacctgctggactcgaatagctggatcgaggagatgccctctgaacgcctgtgccggagcacccgccagcgggcagcctgtgcccagctcaacgacttcctccaggagtatggcactcaggggtgccaggtgtgagggctgccctcccacctccgctgggaggaacctgaacctgggaaccatgaagctggaagcactgctgtgtccgctttcatgaacacagcctgggaccagggcatattaaaggcttttggcagcaaagtgtcaaaa

SEQ ID NO: 8571 - DNA, 357 bp, Homo Sapiens
caaaaatttgattattctcgtgttagtattgttaacttctttttgcgactgcgttacatcatttaaagaaaatgctgtgtattgtaaacttaaattgtatatgataacttactgtcctttccatccgggcctaaactttggcagttcctttgtctacaaccttgttaatactgtaaacagttgtacgccagcaggaaaaatactgcccaacagacaaaatcgatcattgtaggggaaaatcatagaaatccatttcagatctttattgttccccaccccattttcctccttgtgtatgtacttcccccaccccctcttttttaaagtaaaatgtaaattcaatctgccccaaaaaaa

SEQ ID NO: 8572 - DNA, 551 bp, Homo Sapiens
tgttgtgctaatgtaaaagtgtcatacaatttagaagatttttgaagatggtaaacttagaagaattctatgttctgaaatgcacacttttagaatgtttttctttgaaaacaggctaatagttctttctttttttgacaaagtttcagctcccctctaaagagtaatggtgtcatttttctggtttaaatttcccttatatttccacctgtaatgtcagtggcaacaacatcatacttcacttacttgttaatttactttttacccttattctaagagcaagttgagttgaactgaatcttccttgtcttagtaacaatgtataaatagtggcttttctgtacaaaaggttgtaatgcctcctgatggatataattttgtgattgtatttaaaagttgaataaatcacaccagcttcctgaaaatgttcataatgcatcttttggaaaacaaatacatgcctactttgtgcatatttgcattaacatggcaaagattgtatgaaatacctgtttttcagaaaataaaggttcagtctcaaaagataaaaa

SEQ ID NO: 8573 - DNA, 427 bp, Homo Sapiens
ggggagaaaaacagtctcaaaaccttgaacttcttgggaagagaagtgttgggctgagaagtaacattcccaggaaatagtgagaagctcgccctgtgtttgaaaccgtgttggtctctgtgttcctggaagaaaacagggaagcagcatcttttaaagcctgttctctaaggtgtctcgttagagcccaaagtggaatccggaaggcagccagagctgaggctgccccaagactcagacttgctaagaattacgccgccgacttcaaacccagagagcatctttcttttaggcgaaaacgcatatatttattttttgtaagttataccattctttcacattagataaactaagttttgggggatccttttgtaatgacttacactggaaatgcgaacatttgcagtaaaaaaatatatatataaaa

SEQ ID NO: 8574 - DNA, 452 bp, Homo Sapiens
  misc_feature (356)..(380): n is a, c, g, or t
tttttgcttaagatggtgtttaatacagcagggagccaagatacagtagtaggacacagtaaagaatgtggagtgtgtagatacaataaagaattcattttatgatctgccacctgttacttgaaagaggagtaagttagggaaataaatgactcagttcttcatacatgcaaaggtaagttagttattacaaaagtttttgctgttgtttgtgctgaaagaaaagcatatgcatttaaacattttttaaaaaataaatcactcaataggcttaagaaaaatactttagttcatagttcattgatctgacgttttgatttaagatcaggggatgaatccaggatgaaaacccaagnnnnnnnnnnnnnnnnnnnnnnnnntatagaagtgaatcatttaccatgcaaaaggcctcttccgcctcagctaacctccactcgtttatattgcct

SEQ ID NO: 8575 - DNA, 862 bp, Homo Sapiens
ttcacaaataaaccaactttaatagatattattttgtatttatatagtgccttcttcaagaaccttaaatgctttacagacattatctctaattaatccccacaacaaccctgtgaggtaggtattactcccattttacaagacagggagactgaagcacagagaggttaagtgacttgcccaaggtcacacagttaaattcactgaagagccaggacatgagcgctttagcctcccagctcccagccaaatacctcatgatagaatctttaataaaaagtgtttttaaagaaagtatcaagagtagttatgttatgaaaatgaggtctttctactgccatcaaggaaagaaaaaaccctatactgatggttagaggcccctagacccacatatgactacatttccctctttccctgttcccaagcctcctggttcctgtcttaaataatcttttaaaggtcaaatttccaagacagaagccatgtgacttaagaagtgggacttaatttagaatatttacttttagttacaataatttatagaaatttttattccaatatacacaatatgggacagccatcccaacaatcatgtacatagttacacggcaatcagccaccacttacgacttacaccagccccgcattttaatcacagtcaaccaacatacaacctcacgatgctttcttcatgggtcacttttcttacttactatacctgtatttttcccccatccctgaccctatacgttttaaaagtacatctagtttctgataaacttcacaacattttacttagatccagctgcattaagaagaaaaagtaaatgtaaaactgtcaccccacaatccctccctgaca

SEQ ID NO: 8576 - DNA, 835 bp, Homo Sapiens
  misc_feature (492)..(501): n is a, c, g, or t
cgagaaaatggctaggaagaataaaccctgcccatgaaaaaaataagaaccctcaaatgcatgcattggcactggtatttccaactgcacaaatctttgtgccatcttgaatataggaatttttaacaggggttgacatgcacacaacaccattttcattcagtatgaaccttgaggctgctgccatttttccacttaaccaaaccagcctgaaggtgaacctcgaaacttgtttcataaatctttcaaaagttgttttacatcaatgttaaaatttcaaaatgctgcagggtaatttaatgtataaaatattagtaagaaaaagtatgtattgcatacttagtagaatagatcacaacatacaaattcaattcagtgcatgctttaggtgttaagcatgagattgtacatgtttactggtaggtccctgcatctgtggtggctaggtaaggaatgagaagatgtcaaggactggacgtattttgtggcctnnnnnnnnnnggctgtttgtaggcgttttaaatatgcttattttgtgtgactctcactacctattacacactgttgctttgtgggtttgttttgtatgtgcgtgtgttatacagtagttaaatttccatgcagaaaaataaatgtcctgaattttcatattagtattctttattgtatatcatgcatgtaatttatttagaaatgtaggtcttactaaatgtatatgcatgtatttcagattatactaggatttcttggattagaagcagattgtgttaactgtaacttaaagaatgaatgttaaataaaaagatacagatttattttcttcattacaaaatga

SEQ ID NO: 8577 - DNA, 430 bp, Homo Sapiens
gaccttcaagcagccagtggagcaaccagcctgggagccttcgacgtaggcgctgtgggcgaaggaaaaggcctggcctgctgcctcttctcttgcagcaaaatccgctgctgtgaaggagctggtaggcggacgctctgtagataagagaatccctgatctgcctgggcatcatcttgctctttatgacctgcttggctgccactgtgtagggcctgcttaaagtcctttgcactctcagcattcccctcaagttcaaggacaagcttctcattatggcaggcataaaactctttataattcgtcctccactctcccagctcagggctccagctgttgtctcacacttccttgaagttccctctgctgagtcgcccttgtgcctgaccaacttacttactaaaataaaaatcccaatttctttccagtc

SEQ ID NO: 8578 - DNA, 528 bp, Homo Sapiens
aaggacaccactggtgaagcgggagatttaaccttctttgaactcctcccttttttccttacttgaactgtaaagcaagtggtttgctaggtgttctgcccttaaacccatgcacccacatcctcatcagcctgaaagccattctggggaagatgcccagaatctatagcaccttgagagaaggtcactagcaagctaaattagaagtggagattatggatgattccaacactcaatgttgtaagcatacaatgttcattccacattttctctccaacacagtggccacatttagtgtgcacctaagaaataaacagacttttttggtttggacccagaaataaattgtggtaacccagcagttttgactgttgatgtttaaaaacctgtacatgcactgtagacctcaattaataacaattagtaactttccctgttatcatgctaaattgtatattctacatgatggatggtgttagagaaatttttgtggtctagtaaacttttgttgcttcataacttcaaaaa

SEQ ID NO: 8579 - DNA, 526 bp, Homo Sapiens
ccgtgactctgggtgagtcgtgtgactcaggaatgggggtagatccatgtcctccactgtcccccattagttctgtccccttcacaatgagaagtgttttctggcaggccctaggtaaagggtcgggggaggggggagccttgtagggaggcctctacacagaagaaagcagcccccatgtcccagccacttctgggtcccagccagcagcacggatgttactgtcctgctccttcccccagccccacgccctaccagagggggcaaagggcacgtcccatcactcactgccctgtctgaaatgtggcagccactgtgggccaggctcagggcagggcaggcgattccagtggggttgggccccctggcgcctgctgcttactgcagtttcatgcaggcctctgctccttgtctttcttacctgtaaaatgggtctcagatgctccgccctgcttggccccagcttgtctgtctctgggtcctgggccagccaggatacctgataataaaagatcattgggtgaac

SEQ ID NO: 8580 - DNA, 476 bp, Homo Sapiens
actgtataccatgtattatgtgtatattgttcatacttgagaggtatattatagttttgttatgaaagtatgtattttgccctgcccacattgcaggtgttttgtatatatacaatggataaattttaagtgtgtgctaaggcacatggaagaccgattttatttgcacaaggtactgagatttttttcaagaaacagctgtcaaatctcaaggtgaagatctaaatgtgaacagtttactaatgcactactgaagtttaaatctgtggcacaatcaatgtaagcatggggtttgtttctctaaattgatttgtaatctgaaattactgaacaactcctattcccatttttgctaaactcaatttctggttttggtatatatccattccagcttaatgcctctaattttaatgccaacaaaattggttgtaatcaaattttaaaataataataatttggcccccccttttaaaata

SEQ ID NO: 8581 - DNA, 939 bp, Homo Sapiens
  misc_feature (367)..(367): n is a, c, g, or t
tcaaattggcatggattttttcttccagagaaaatatcttcaactctcaaagtagaaccctgttctttgacccctggctacacaaagctgcttcagtttatccagaacatcatttatgaggaaggatttgatggatccaatcctcagaaaaaacagagaaacattttaagaataggaattcagaatcttggctcacctttatggggagacgatatttgctgtgcagaaaatggtggcaacacgtcacagccttaccaagttcctctatgttctccgtggtcttctgagaacctctctttcagcctgcatcatcacaatgccaacacatctgatccagaataaagccattattgcccgtgtcacaccntgtcagatgtagtagttggtctggaatcatttattggttctgagagagaaactaacccattgtataaggattatcatggattgattcatatacggcagattcctcggcttaataacttgatctgtgatgaatcagatgtcaaagacttagcttttaaattaaaaaggaagctattcaccattgagcgactgcatttgcctccagacttgtcagacacagtgagccgctcaagcaaaatggatctggcagaatccgccaagcggctgggcccaggctgtggcatgatggccggaggcaagaagcacctggacttctagggattcctccttagtcgctgcatgcagaattctatgacactctaattatgattgctaatagcttatgtaaatatttttcttaacaatttgaccctccactccttgaaaaacacaggattataaaatggtgccgccatttctcattttttaactttttacagaactagcacagcagaaatacttttaaatttttccttcatgctctagagaaaataattttatttttaaataaacgccaaaaaatgtcaaaatctc

SEQ ID NO: 8582 - DNA, 428 bp, Homo Sapiens
acatagaagtgcattaatctgccaagtccagataacaggaacagaccagacttatccactgtcccaagttctccagcctggcacatccgccagccccacggtgctcattgaagtgctcagcaaccacattcctaggagacactgccttatgtctttttcaggctcatgcaaaacctcattgggtgggtttttcagtttttagaaacagttttctagcttcacagtcggagagagtccagaaggcagaaatcatttgtcttgtcccctgaataacaccatccaattttctgataagccatgcgtcaccaaggaatggaaactaggcttggggaaaaaaatgtcaatgtcccagaggttaggttacattttaatggtagtaatatatttggaccaagagttcccatcctatggtggccaacaaccataaa

SEQ ID NO: 8583 - DNA, 242 bp, Homo Sapiens
caaccatagaatgacatttcgacccctgagtattaccacatagatttcctgagcacaaagacaccgttctacatgattacattaagatgatcatgcctaaaaatataaacagtaacttctttatagcctctaatacagagcccttaatcagtattcaacaattgtctccagaatgtttgtctttaaaaacaacgacaacaaccagtcccatcaggttcatacattctatgctgtcggtccga

SEQ ID NO: 8584 - DNA, 410 bp, Homo Sapiens
  misc_feature (44)..(206): n is a, c, g, or t
  misc_feature (225)..(279): n is a, c, g, or t
cgggcagactgcttaagcccaggagtcctgggcaacgtacaacnnnnnnnnnnnnnnnnnnnnnnnnnnnnnnnnnnnnnnnnnnnnnnnnnnnnnnnnnnnnnnnnnnnnnnnnnnnnnnnnnnnnnnnnnnnnnnnnnnnnnnnnnnnnnnnnnnnnnnnnnnnnnnnnnnnnnnnnnnnnnnnnnnnnnnnnnnnnnnnnnnncgtggaaagagagggagcnnnnnnnnnnnnnnnnnnnnnnnnnnnnnnnnnnnnnnnnnnnnnnnnnnnnnnncttttgaccatttttaaacagggttatttgttttcttactattaagttgagttccttttatattttagatattaaacctttgttggatgtatactttgcaaatataatattttctcccatactatggtagt

SEQ ID NO: 8585 - DNA, 557 bp, Homo Sapiens
aatcgcttgacaggaagtgaaaaaaggaccggtgactcagctgaaaatagcacccctgtctatgaggtagaagccttcactttccaggatcttgtaggacattggtcagaattctgccattttggtgggttttctccctcttttgattttttacaaggcagcaaacaaagggggcccaaaacaagcactgatgttgagtaacaagaaacagactcgggtaccttccctctcccctcacttggatgagtgggggtgggatgaagagtctaagttattctaatggtagccaattaatttggtttagaaatgcaaggggacatggagcaaatatttttaattgtctaggcaagatgcacaaagaagctaccagcacatagcaagcctgtttaaaaaccaaccattactgaaagctttatgtaaactgctttcaggcctccgcctcctctcccaacaggcccaagttctaatggcacagatccagacatgacctcagagggcagaggggcagagagaactttccatcatggctgcaggtcaccacctctgaaggaggcgat

SEQ ID NO: 8586 - DNA, 557 bp, Homo Sapiens
gtattacacaggctagacagagatgccaagtcccaacagcgactgagctgtgtgcacggtgccaggtacaggagggttagtgaactgcctgtcagggtacctgttagccccgtgacaactcagatggggtgaagttttgtgaggtcagagtctgctttcgtaggctctttagacagcacctaccacttggttctccagcgtagactcctgggagcagccaactgcagccattgccatccagtggggagatgggttagggaggaggacgggctgactcctctcctgtaataaagctgacaagagttctagaggattctgcttctctagtaactagacaggtgatacgcatttgcttgccacattaagggaaaatggtgtcatttgttgcagaaaaacaatggatacattttcttctggcctaaatgaatatttatgtgcaaacataggcaactgttaaaggctggaattttcaaaagatccaaacagagacttcctgcatcttctgcctttccaacagaagcggtgatcgtctaagtatgagcctgtggctttctttg

SEQ ID NO: 8587 - DNA, 459 bp, Homo Sapiens
ctgcgtattaaactaagtaggatattagagatgtatgcagcttgacagctgtgtagataacttaaacacactggctgttgtgtgagggcatcatctatgctacagaaaggaataatcattagactaaatattcctagaaatcccaaacgacaggctcttcaaactcaagtggaaatgagacctcatcagagtattctcctgatccagtagagtgtggtgtgtggagtcaaagcctaggttattgtccatccactcctagttggatgttacctaacttctttgagtatggttaattcgctggtgatatgaaatcagtatgtattttgctgcgttattgtggagcttgaataaaatagtaatgcatataaagcagtggtgtagtgcctggcccatcacagaaactcaagaaaagagagctgacactatcgccgtcatcaaagcacccacttcttccctcca

SEQ ID NO: 8588 - DNA, 299 bp, Homo Sapiens
ctgtcatacacaggctgtcagaatcaaaaggggctttaagataatttaatgcaaaccacttatataagaggtatggaaatgaagtccaggtctcacataaccagtaagtgcagggccaatgcaacaaccaggtggctggattcctagacactgttctttccaggactcagcacaatgaataaatcatgtgtagaatggtaggaaaccctgttttctcccccaagcccaatgcaagaccctgccaacagctttcaccttggtctaggggatctctatttgtagagaacagcaagaataac

SEQ ID NO: 8589 - DNA, 313 bp, Homo Sapiens
ccgtctatacacaggcagctgctcttgtgccgggtcaccttgggaaagtctttcctgcagttcagtgcatgaaaatggcacattctcctccaggtcatcactcagtcactggtaggcccagtgtaaatggcctagcattagctgaatatgttatttacagaggagaacaggcttatcctgagtatttaattacttaccagattatgaggcctgaaggtatggtcgatggataaatagttattttaagaaactaattccactgaacctaaaatcatcaaagcagcagtggcctctacgttttactcctttgctg

SEQ ID NO: 8590 - DNA, 582 bp, Homo Sapiens
gaagtcactaagcagtatagcgcagggatctcagactagtgtggacaggaaacatcaaggacattacataagctccccctcattccgacccagaatctagatgtaatcaagaggacagagagatgctccaaatttgcttcccacctaccagaatagggactctgctctgtattaacctataaataaagtatgttgcttgtgctcttgagctatcatctgggattcatacctcctaataaatgccactgaatattatgaataaaggtatatgtgcacaggagtgtgtgcatgagtatgagtgtgtatgtttgttccaagcagagatagcagcattttccaaggtctggagataaaatgagaatgtgcatgtggagaactacaaaccattcatgggaaagtacacaaatgggctgtttttttcaggtcgggttcccaatgataccgtcttttttctattacacagtgacgtgtgtaaggcaccaaatcatgatgctaggaaaaacatcttgatatgtaatgccatacccaccatctaggtaatggtactgcatatctttggtccttccgcatgtgccagagggt

SEQ ID NO: 8591 - DNA, 356 bp, Homo Sapiens
tagcggacgtaataacagaggcgggggcagagtcttgcctgccccctgcagaagctgggcaagtgccataagggaggccggacagttccactcccagatcccgagacttctccgcctcgtcctggggtccagctgacctatctcctccaggcaccacggcccctcatgcaaatgtacacgagaatgcgtgcagccaggccatttcttcacctccatgtaaaatcctttcattagaggatgatgttaaatatatttacatatcatttcctctttataggtaagacaagcatttactctaacaagtctattcatcacttcttcctcaagctcttgaaacaattaggttccttcaggag

SEQ ID NO: 8592 - DNA, 545 bp, Homo Sapiens
  misc_feature (22)..(22): n is a, c, g, or t
agaggtgggcaccagatggtgnatcttgagcctctcagggtggccaggtctgagcctagcgggccatgatgttaggggcggcggagagagttgactgttggcgaggagaggaagggcttgttctccaaccaccagggggcgcgcttgtggcttgggaaccagttttactcagacatctggtctacacctaagtggaaccaggttgacttttgcaaggaaacacaggttccagggaggtgtttcagtgtctttatgcttgtggagtcaagttgtctgggaggaagatcctgggtctggcctctgcagtaggtcagtcgccgggcacactgctacgcctgcccgccccattatgagaccatttgggtaagcctctggcgctggcctccttgccctctagcctggcagccagatgtctgagactacttaagagccgtggtaaaggctgcttctccaggggcctcctgactggggcttctgtgtctcccactgcacggaccagagtgtcaccattcagtaaataacacagtctctctgtattacggtga

SEQ ID NO: 8593 - DNA, 670 bp, Homo Sapiens
tacacaggcatggaagccatgtagaaatacaaagtcagaccattggaggtttgagctgattgtgagattttcaggtacaccagggaggcaagatagtacatctctagtgctggacttaaactgaaggcagtccttctttaaattgttttggtgccctctgggcattaaacagatgcagtcttccacttacggccaatagttagagccacaaagagtctatttcaagtttcaggagatgaatggcatctctgctgctctttgagagactttaaggtatttttcccctgaattgtgattgggttcccaggcagggttcagaacattgtgtttattgtctgccgtattatcttttaagcaatgctgtactgcctgatggtatggaggaggtaacatagatgtttgtaaacatacagtcatttgatggctgaggaagttttgccacccagctagaagtaatttacgtattgttagctagaagaatttcaacctgaaattgacccaatttttcactctttaaaacagagcagttgctagtatagtgggtaggtttctagatttaacctggtttatcttacattttaggttggtcgaaccttaatggctttgtccgaagatcttacgagaaagtttaaaagcatagtgactatatagatgtggacgccagaaggag

SEQ ID NO: 8594 - DNA, 157 bp, Homo Sapiens
gcggtccgtcttacagaggcggggagtaagagagcaagctcgcagtgatgaatcaaaaggtatacaagacaaggttaggccagttaatttcttagtgtcatcagctataaatggagttatgagaaataagtgaaaatggttcaataaatatttcagt

SEQ ID NO: 8595 - DNA, 546 bp, Homo Sapiens
gcggaccgtattacacaggcagcacgctgatcaatcagggctaatggaaataaagacaccaggtgtgccaatgagggcacaggctattttccacttggcttgtctttatcacggccctaaaagtttctctctgctccctggatggcctacaaatgtggacatgatccctcgaatcctgggctaaagcagaatcacaaaaatcacaaacccgatcttccagaaatgaagcagaggcacatttcactcgagggacagaagcaaaatgccaaacccagagcctgctccgtagctccccaggaaaggtagagactgtgtggggccattggcagcctgagtggtacccatggggtctcctctgcgcacagcaatccatgggggtcctcaaagagatgctgtggtggcagtttccagctgtttctcttgagaccatctgtcccaaatcacagcccaaggtcataaatcaaagaccacttcctttctgacatgctctttcttggggaggtgtccacacgtataggagagtggtctagaggaagaaaggttcat

SEQ ID NO: 8596 - DNA, 306 bp, Homo Sapiens
cttacagaggcgtgcagcaattcttaccgatttctctccactctagaccctgagaagcccacgcggttcatgctagcaattaacaatcaatctcgccctatgtgttcccattccagcctctaggacacagtggcagccacataattggtatctctgaagggccagcacgaggtggagcacatggtgaaaagacagatgcagtaacctggaacccaggagtgagggagccaggaatcaggcccaaggctcctgagaggcatctggccctccctgcgctgtgccagcagcttggagaacccacactca

SEQ ID NO: 8597 - DNA, 685 bp, Homo Sapiens
  misc_feature (17)..(17): n is a, c, g, or t
tgaatgaggtggtatcnaaaagtgccctggcagtgaaaggcaagatagagttctgtagagtaggggtcgtggtgaccctgttggagcagatactgaagtagtggtgagtgcggagaggcaagtcacattttggccctagtcaactgtagctgaggagtaaacagagggaactgtttactgtttacaggattctgatgctcatctttgaaggctgggctctgctggaggactgattttgaatgatgtcaaatgattttgacgagattaaatggggagatttagttggtggtggcatgcaggactgatttgatgaaagagcagcacagttatgaatggtgaaaccgaaaggaagatttgtggggcttttaacagtctcctcaacgtgttgtggctgtgggagaagaattaacatgaatggagagtgtaaagaagcctatcagattgtctttgatctgcacagtactggggagtcccatgtgggacacgggtaggcagcagtctacaaagctcagagctggaaagacaacttgaaagaacaacacaatgaaaagttaccgcgcctctagttgagattttctaaacatcggaaccatgtgaggtgtctgatttcataaacaagtggaatttaatctatactctctaagtggaaacaactctgtggcactctacttgctgtcaatcgcgt

SEQ ID NO: 8598 - DNA, 482 bp, Homo Sapiens
cggaccgtataacacaggcatgtgggtcagtgccctgtgttgaacgttcttagccatgcggggaaagtggtccgagccaccctctgttcagaagggatcactcactgctatgcagaatgccaggcctccaagtagaagagctgggcctcccctgtagtacctgttaaaacagaagtgctcactgaattgctttggtgattactgctatcatgatagcacttttggttgaagggtcctacagcgagttccttaattggactttgttcaggaaagtgacgtgcagcccatgttgcggagtgtagcgatgcttggtgagagcactcattatgcgctgtgcacactcttaacagctggttgctcccggggtgctacgaggtgccacctggagaccacctcacctgctccatgaaggactgtgcccagggctccctggtgtccccttgtgtcagtggggattgcccaccgtgcctctggtatagacg

SEQ ID NO: 8599 - DNA, 387 bp, Homo Sapiens
aggacatcagatactctgaatatgacgtgaacaacgtaaaaatagctcctgtatctctttgcccccacccttctccccaacaacacaaagggcagaagagagtgacacccctaacaaacagccccagcctcctacatctggaccagctgctgtgagccaacagggtattctaaattatactttaattaccataatttttcacaggtacctgaaaacagatcatgacgacggtgcaagaaatccccaaataggatgcacgaggtccaagttaaagctagtcttctaaacacacaccttttctcacatgccttttatttcatgtagcactttacagtctgcagagtgctttcatgggcctcctctctcccacaggacctctggttaaga

SEQ ID NO: 8600 - DNA, 427 bp, Homo Sapiens
taggtcggtcccggcagcgatatacaaacatgaactagagaataattccaagcaggtataaaggataataggtttcagtggggctggaaaccacgctatgtattttactaaaggctactaaagtagctaaactacaggtttactgaaaatagacaacttgattctcctcttcatcctgttgtcttcaggctaggagactaggagatgctcagccagccaaggatgtcccatgggtctctacctggccaccctgagaggtctctatgctggcctcacccaagaggtctctatcctggccacactggggaggtctctatcctggacaccctagtcctccactgtaccctgcatccacaggtccctggatggacttggatgagttggctcttccccttttctcagaataactgtaggcctgtggttacga

SEQ ID NO: 8601 - DNA, 844 bp, Homo Sapiens
  misc_feature (761)..(761): n is a, c, g, or t
  misc_feature (776)..(779): n is a, c, g, or t
ggagcatcagatctttcctccccagagctggaagttggcgctggtgactgccatgatgagtggcatagcagttgtcttggccatggcaccctatgatgtggcctgcacaaggctctacaaccagccgcacagatgcacagggcaagggcctcatgtaccgagggatactggacgctctgctgcagacagctcggaccgagggcatttttggcatgtacaagggtataggtgcctcctacttccgcctcggccaccacaccatcctctccctcttcttctgggaccagctgcgctccctatactacacagacactaaataacagccgctttcccagtctccaccaaatgagcactccttggccacttgtgcctccaccactatgtcctggtgactactgattaggtgacctttcatccatccatgggggacagccaaccccactccccatctgttctcagggttgaatcactacaagagatgagtttcccttctttccttgggtgttgctttaaaccttccctacccattcccctgggtaactcacacccctctctcagggctgaacgagtcatcccaaagtgtatttcctcccactcaccactgccaccccttgagtccctcctggctcccatgcacaggtttaaactcctccctccaaaaccaaagggaattgagagacccaattcccaggcgtctgggaacccaggggtcctggtagattcaaaggcacagagattatattgattataaagcggaaaancccgacgggggagannnnacatggcggccgcctcgggcccccagaaacctttctagaccttccctttgggcccgcggggccca

SEQ ID NO: 8602 - DNA, 674 bp, Homo Sapiens
acgtatatatagcaaggattggaggagatggcaacaataaagatgatgacccaaatgaagactggtgtgctgtctgccaaaacggaggagatctcttgtgctgcgaaaaatgtccaaaggtctttcatctaacttgtcatgttccaacactacttagctttccaaggtaccagtgaaataattgatttttggtgttgattttcataagctaaaaataaataacagaagaatgttcagggcagatggccttctaaccagtgcatagtatttctataaaacagggagcctgttattcttttggtattagcttccagagaaactaacaataaaatatctaagatctaagtagtacattaatgttaaaagagtagatttcatctcctggcctttagtttatattcagtataaggaaaatagataaaactctaaattaatagggggctaaggttacaaaacctgcagtctggttctaattctgtagtaagcttgagcaattcactaattatcagggatcagtttttgcatctacaagtggtaaggttttggtttagcagagctgtagttcttcccttccatttattatttagtgtcatgcaactcttgttctgattcaagaccataaatatagatctactgtttttcagctctccttctcttgtcccaatttttgggga

SEQ ID NO: 8603 - DNA, 1070 bp, Homo Sapiens
  misc_feature (659)..(668): n is a, c, g, or t
agcgagaggtctgcgcggagtctgagcggcgctcgtcccgtcccaaggccgacgccagcacgccgtcatggcccccgcagcggcgacggggggcagcaccctgcccagtggcttctcggtcttcaccaccttgcccgacttgctcttcatctttgagtttatcttcgggggcctggtgtggatcctggtggcctcctccctggtgccctggcccctggtccaggctgggtgatgttcgtgtctgtgttctgcttcgtggccaccaccaccttgatcatcctgtacataattggagcccacggtggagagacttcctgggtcaccttggacgcagcctaccactgcaccgctgccctcttttacctcagcgcctcagtcctggaggccctggccaccatcacgatgcaagacggcttcacctacaggcactaccatgaaaacattgctgccgtggtgttctcctacatagccactctgctctacgtggtccatgcggtgttctctttaatcagatggaagtcttcataaagccgcagtagaacttgagctgaaaacccagatggtgttaactggccgccccactttccggcataactttttagaaaacagaaatgcccttgatggtggaaaaaagaaaacaaccacccccccactgcccnnnnnnnnnngccctgccctgttgctcgtgggtgctgtgtttactctcccgtgtgccttcgcgtccgggttgggagcttgctgtgtctaacctccaactgctgtgctgtctgctagggtcacctcctgtttgtgaaaggggaccttcttgttcgggggtgggaagtggcgaccgtgacctgagaaggaaagaaagatcctctgctgacccctggagcagctctcgagaactacctgctggtattgtccacaagctctcccgagcgccccatctttgtgccatgttttaagtcttcatggatgttctgcatgtcatggggactaaaactcacccaacagatctttccagaggtccatggtggaagacgataaccctgtgaaatactttataaaatgtcttaatgttcaaaaaa

SEQ ID NO: 8604 - DNA, 953 bp, Homo Sapiens
  misc_feature (876)..(877): n is a, c, g, or t
ggggagaggcgttccgcggaggagaagaggaagaggaagttgggggagggtcctagcggggagtgaaccggaagtgtaaaggttcctgcctctcctcggccaggcggaacctctctgctgggcccggtggccgcaaaagaactttctttctcccgcccgaacggtcgccgcggccaactgcctcgcccgcctggcagcctaaccctccttctcttcttctcctctccggcttcgcgcggccctgcctccctctcgcccggcggcatccgcttgctgctgccaccgcctcctcatcttctgcccggccaaccggcctgccccgctgcagtgatgtgcgacaaggagttcatgtgggccctgaaaaacggagacttggatgaggtgaaagactatgtggccaagggagaagatgtcaaccggacactagaaggtggaaggaaacctcttcattatgcagcagattgtgggcagcttgaaatcctggaatttctgctgctgaaaggagcagatattaatgctccagataaacatcatattactcctcttctgtctgctgtctatgagggtcatgtttcctgtgtgaaattgcttctgtcaaagggtgctgataagactgtgaaaggccccagatggactgacccgcctttgaagccactgacaaccaggcaatcaaagctctctctcccactgatggatggatggactgataactccggaagaatgactctcctggggcctcacactggctgcctgtctgtcctggcactctctatctgccacctttcttcaactaaatacctttaaacgggtggaggggaaagaaaaaatcctaaccaaatcccaactaccacagaaaaaaccaaaatgggtaaaaanngtcttggtcggcccgtcttcggcccctcaaaaagttttctaaaaccaattccttttggggccgccggcgcccaaaa

SEQ ID NO: 8605 - DNA, 373 bp, Homo Sapiens
gtgggggctggaggtgctggtagctgaggggacgggcaagtgagaggggagggagggaagtcctgggaggatcctgagctgctgttgcagtctaacccactaatcagtttcttagattcaggggaagggcaggcaccaacaactcagaatgggggctttcggggagggcgcctagtccccccagctctaagcagccaggagggacctgcatctaagcatctgggttgccatggcaatggcatgccccccagctactgtatgcccccgacccccgcagaggcagaatgaacccatagggagctgatcgtaatgtttatcatgttacttccccacccctacattttttgaaataaaataaggaattttattctca

SEQ ID NO: 8606 - DNA, 336 bp, Homo Sapiens
gtcggtaccgtactatactacaggctcttctggcctcaggcgctttgcagacctccaatgcaggagcagaaattcccctcttccttgttaatggaatttgatcttgtagaggtatccaccctctccccacagccacgtgctctggggagtgggtcatgcctggctaagacccctgcccttgattggcttaggtatcagcacatcatgcaacactggcccgagagacatgagtggatgtttgctgggggcttgtgggaaaagatttccttactgtacatgcgtgtgcacgcacacacacacacccttcttctatagggcctttgcgtgtttggctgt

SEQ ID NO: 8607 - DNA, 681 bp, Homo Sapiens
ctcggtccgtctatacacaggcagaagtggcagtgtagggttgaaaggatcaggaacatccagctatttatgatagcattgcttcattatgtcaagttcaacaaatgttgacttgctggtgaaggtgggggaggttgtggacaagctctttgatttggatgagaaactaatgttagaatgggtcagaaatggggctgctcagcctctggaccaaccccaggaagagtctgaagagcagccagtgtttcggcttgtgccctgtatacttgaagctgccaaacaagtacgttctgaaaatccagaatggcttgatgtttacatgcacattttacaactgcttactacagtggatgatggaattcaagcaattgtacattgtcctgacactggaaaagacatttggaatttactttttgacctggtctgccatgaattctgccagtctgatgatccacccatcattcttcaagaacagaaaacagtgctagcctctgttttttcagtgtggtctgccatctatgcctcacagactgagcaagagtatctaaagatagaaaaagtagatcttcctctaattgacagcctcattcgggtcttacaaaatatggaacagtgtcagaaaaaaccagagaactcggcagagtctaacacagaggcaactaaacggactgatttaaccca

SEQ ID NO: 8608 - DNA, 696 bp, Homo Sapiens
tacagaggcgtcccactgagagagggtcttacaagatcaggcctggctccggcttattgcatgttcctcacagtatgaatgtacaagagtgtgccacaagtgctatcagcatagcctcaagggccatgtactgctggcctcaaccaacgtgcagctgggccctctccccagcctctagactcaaggcatgggactgagtgtatatatatgtgaagattgtataaccccgtcagtcccccgcctcctcctatcacgatcaggctctcttctggtcaaaacaggcaaagttaacgaaatcacccaaaatgcccagtggcaaagccaagacacctgtgtgttcctccagggaacccacatactggcaagtagcaagcaaaaccagaagcaaaggtcagcctcatttcactgctcttgcctctgggctccattcagttccaaaagctccaggcttggggaacaagtcccttgctgtacaaatacagtgactacagtgtgcagggagatcttttctaactaactgtgagcaaccatctgggttagggctggtgtgaatagaaactaaaagaattgtcaaagttaaatttctttcaccctggctgtgatgtgtttgggtttcctatgatgtgggcccatgcccgattgttaaaatagttttcatagtatccggaagattttccccagaatacataagacagt

SEQ ID NO: 8609 - DNA, 462 bp, Homo Sapiens
tttgacaggcaagcacctatgtgttcaattcgaaatgcaacaatgacagatgtacaactttaccactcttaaagaaactaacatgccatccattattctccatgtgggaaacattcagtaaacttctaaaaccaaacacaggactctggcatatccccacacccccagcagcaggctgtgacaggctttaatctcaatcaaatgccactgtacacagaacataaaaacaggctcaggatgctgcatgtcactctgacatatcacattatttcatattactctgtcacttactcacaaacaaaagtctccactatggcatgattgagagagaaaataattcactttatataaataacagctaagaacaacatactgtgaacagtttccagagtttgaacattcagcacaatcaattcttacttcttgggaaaaaaatatcttacctactcttttctgttaccc

SEQ ID NO: 8610 - DNA, 207 bp, Homo Sapiens
ccgagctggaccgagaggaaatccacatcccaccagaagacagggtgttggcaggcatactcctatctcctcctcttggctctcaatgctgaggcttgcagaggcatcccagcggcaccagcctcccactgcacagcttccttccctccttcactctcctctcccacccctgccgtgaagccctgggcccacttcccaagaatctca

SEQ ID NO: 8611 - DNA, 544 bp, Homo Sapiens
tcaggctaacctagctgggtgaaggactgagtgaacaaacaatgcagtcaagaacttgagatggttgtattctaactgccatgagttaatttaccagtgatatctttggttctaggtgtcagtaattaacactgtggatacctcccatgaggacatgattgtaagtattaatatcaccctccctggaggggtgtggacatgggcatttttgtgggagggaagcaatttggggttttcattacccctttctgttgatcattcatggatccagggtggctttgcagtggttgcctatcagcctgtaatctcggggtatggcaggctccctagcagtgccctctgagttgtcaggactgtggcagtctaatcactctctgctgggaggaacctgggaataatttgtagttctaggctgtcagtcttccagccaacacaataacctgctctcggatgaaggctgagtgggtacggaggcttgacaatagtcttcccacctgtcttcctcctgctgtcactccttcacccaagctaggggatcctctag

SEQ ID NO: 8612 - DNA, 848 bp, Homo Sapiens
atacctactgctgggtgatggcgtgagatgtatgcctcacaaaacagaaagttctaaccccatacccatctgattgtctccaccacttcgtgtgcctcagtttccattatgtgtcagataagggtaactggtccctgtgtcgtgccaacgcatccgcagggttgtgtggtaaccagttaaatcggaacctttgaggaaggctgtagaacgtggtgagggcttttcatgcattgaaactcatctgcccgtaccccataaatacaattaggtgcttgctgcagaggcatcgggggtctcgggccagaggtgacatctgaagcaatcgggaccctgttgggtttggccacatccgacctgccgcccatgctggggcaagacagccacgcgcggcgaatgcaccggccctgaactctttctcgagtagtccccagaggtagctgctgcctttcagtttctgcacttgttaatctccaaagggacgttgccagaccacgaggccaccctgccctttcatggtaggtataatgcagatttcaggaagagagagaagaggtaaagagaccagaaacaaagtctttctgcaagcaaagaactgccacaggccccagctgttaggtttgaggggcgtatggggcaggcgactgaactgcagagttggagccagaggtaccattgctgacccctgagcccaggagccttgagaatactgacagtgttaataataactgcaatcatccaacatatgatgctagaataactggacatctgtgtgcaaaaatattaaacctataccttgcaccttatcactccttcacccagctaggttcaccctcggttcgtatctgtaa

SEQ ID NO: 8613 - DNA, 882 bp, Homo Sapiens
  misc_feature (686)..(749): n is a, c, g, or t
ggggcccgcgcggacccggcgagaggcggcggcgggagcggcggtgatggacgggtccggggagcagcccagaggcggggggcccaccagctctgagcagatcatgaagacaggggcccttttgcttcagggtttcatccaggatcgagcagggcgaatggggggggaggcacccgagctggccctggacccggtgcctcaggatgcgtccaccaagaagctgagcgagtgtctcaagcgcatcggggacgaactggacagtaacatggagctgcagaggatgattgccgccgtggacacagactccccccgagaggtctttttccgagtggcagctgacatgttttctgacggcaacttcaactggggccgggttgtcgcccttttctactttgccagcaaactggtgctcaaggccctgtgcaccaaggtgccggaactgatcagaaccatcatgggctggacattggacttcctccgggagcggctgttgggctggatccaagacccgggtggttgggacggcctcctctcctactttgggacgcccacgtggcagaccgttgaccatctttgtggccgggagtgctcacccgcctcactcacccatcttggaaaaaagatggggctgaggccccccagctgccttggaatggggttttcctccctaaattatggcatttttnnnnnnnnnnnnnnnnnnnnnnnnnnnnnnnnnnnnnnnnnnnnnnnnnnnnnnnnnnnnnnnnggcgtggggaaaaaatgggcctttgagggggtaattaaccctctctctccggcccctttccgctatttttctatcctctccgccaccgcccttgttttatacccgcgttcccccccctacttttctcttccct

SEQ ID NO: 8614 - DNA, 712 bp, Homo Sapiens
ggggctcaggggatggcggagctgtgaaactcggagctagaaggaaagtctcaacgcttgtctaaattttgctttgtcgtgacgagctacctagacccacgcagagctaacttgggagagcgcttgtgacgctacgaacctctcgaacacctgacgactgggcgccagggccggatggagggtggagagccagtgcggcgcagctgcctcctcttaacggggacaccttgcaggaatgtgcggagtggagctaacgggagcggatagaaaccgagggaggggaagagagcgcgaaggcttggccggaaggagaggttaaaaaggaaaggcctaaaatgaggaagagagttaccacaacaagcagtacctagttccagttcttggtcccaggagtttgtggttgttgctgctttcatcttcctcagccaacacaaaaggaaagtgccaaggggcgattcctaggaccttcagtgcagtctccaccttgcggacttggctcatttgtgtccactcctttctccagccttttacacttgatgctcttggatgaatagaaaggagcacaattaatggaaaacacaagcttgggagtcaagggatttgggttctattcctgtcctcccttggtgacgacatcattaccttggggttattcaagctttcagtgccagagttccctatatcaataaaagattattacattgacctcctt

SEQ ID NO: 8615 - DNA, 1478 bp, Homo Sapiens
  misc_feature (817)..(834): n is a, c, g, or t
  misc_feature (1172)..(1281): n is a, c, g, or t
ccacgcgtccgcccacgcgtccgccggcctgactgtaacacccaacccagcccggacaatatacaccacgaggatctccttgacaacctttaatatccaggatggacctgactttcaagaccgagtggtcaacagtgagacaccagtggttgtggatttccacgcacagtggtgtggaccctgcaagatcctggggccgaggttagagaagatggtggccaagcagcacgggaaggtggtgatggccaaggtggatattgatgaccacacagacctcgccattgagtatgaggtgtcagcggtgcccactgtgctggccatgaagaatggggacgtggtggacaagtttgtgggcatcaaggatgaggatcagttggaggccttcctgaagaagctgattggctgacaagcagggatgagtcctggttcccttgcccgcgtgggaccccaatagaactcagcccttccatgccagcccttcctgctgcctccctcctgtctggctcctggggcccatgcttagagcccaggctccagccctgagtgcttccgagctggcggactgcccaggggccatcagaggatggtggtgctgctgctgatccggggaccgctgtcttccctcccatacgcctttcatccctccttctagggcctatggcagttctcccaggatgtgtggcgagagcctgggccagcccacagcgttcctagtcaggcagccacaccttggtcctcatcttggtcccttccaatctgaaacctcgtgcctggctcgtctgccacctacatttctctttccagctgctgttttgtnnnnnnnnnnnnnnnnnngaagcccaaactagtgagagtaatatctaattatctcattttttgtaggtctgtgataaagaacttagtcatcccttccacctcctactgtgaagaacagaccctgggtcccacactgaaatcccctctagtcacccattcccaccccccagggagctgcctcccaggcagggggtgcagaaaatgattgatgggctggggaaccctggagagcctcgactccggaagtctcaaggtgcctcctcctctccttagctggcccgttggttttctgagcagggggctgaactgtgaacaagtcagacaaataaagcaagggtctgcaccatctgcaatgnnnnnnnnnnnnnnnnnnnnnnnnnnnnnnnnnnnnnnnnnnnnnnnnnnnnnnnnnnnnnnnnnnnnnnnnnnnnnnnnnnnnnnnnnnnnnnnnnnnnnnnnnnnnnngaggggggcgccgccccactaataaagaaacaccgagggagacgagcccaatcgcggagcgccacggttgtgcacacggacggccccaatgagagcggccgtcagaaacagaggcgggcaccgcgcggacacaacacacaggaggggagacaaccacgcagcgcggcgcgaacggggcaagaccacatcgcggcgag

SEQ ID NO: 8616 - DNA, 875 bp, Homo Sapiens
gggggccgctgtgtgctgctgccccgagatgccaggcattgccgggccttcctagaggagctccttgatgtcttgcagtctctgccccctgcctggaggaactgtgtcagtgccacagaggaggaggtcaccccccagcaccggctctggccattgctggaaaaagactcatccttggaggctcgccagttcttctaccttcgggcgttcctggttgaaggcccttccacctgcctcgtatccctgttgctgactccgtccaccctgttcctgttagatgaggatgctgcagggtccccggcagagccctctcctccagcagcatctggcgaagcctctgagaaggtgcctccctcggggccgggccctgctgtgcgtgtcagggagcagcagccactcagcagcctgagctccgtgctgctctaccgctcagcccctgaggacttgcggctgctcttctacgatgaagtgtcccggctggagagcttttgggcactccgtgtggtgtgtcaggagcagctgacagccctgcttgcctggatccgggaaccatgggaggagctgttttccatcggactccggacagtgatccaagaggcgctggcccttgaccgatgagggtcccacgctgaccttggccctgacctcaggagccacgctgtagacattccctctcctggtctctgggtctggcttccaggctctggctgtggatgtcttcagcctctgggtgctggccagtgaggtcccaaatgacccagggcttaagggagaggcgagagaatgatctggcctcaggggacaggccacctggtcaggaggaatatttttcctgcactttttctcaggtatcaataaagttgtttccaactcat

SEQ ID NO: 8617 - DNA, 1200 bp, Homo Sapiens
  misc_feature (187)..(187): n is a, c, g, or t
  misc_feature (190)..(190): n is a, c, g, or t
  misc_feature (219)..(228): n is a, c, g, or t
  misc_feature (238)..(288): n is a, c, g, or t
  misc_feature (331)..(344): n is a, c, g, or t
  misc_feature (364)..(418): n is a, c, g, or t
  misc_feature (420)..(433): n is a, c, g, or t
  misc_feature (453)..(456): n is a, c, g, or t
  misc_feature (502)..(502): n is a, c, g, or t
  misc_feature (627)..(627): n is a, c, g, or t
  misc_feature (743)..(743): n is a, c, g, or t
  misc_feature (783)..(783): n is a, c, g, or t
  misc_feature (832)..(832): n is a, c, g, or t
  misc_feature (837)..(837): n is a, c, g, or t
  misc_feature (857)..(857): n is a, c, g, or t
  misc_feature (913)..(913): n is a, c, g, or t
  misc_feature (1012)..(1013): n is a, c, g, or t
  misc_feature (1022)..(1022): n is a, c, g, or t
  misc_feature (1035)..(1036): n is a, c, g, or t
  misc_feature (1065)..(1065): n is a, c, g, or t
  misc_feature (1090)..(1090): n is a, c, g, or t
  misc_feature (1092)..(1092): n is a, c, g, or t
  misc_feature (1106)..(1106): n is a, c, g, or t
  misc_feature (1135)..(1135): n is a, c, g, or t
  misc_feature (1141)..(1141): n is a, c, g, or t
gggactcctgagagcagagctggccgcagccatgaccccgcagcttctcctggcccttgtcctctgggccagctgcccgccctgcagtggaaggaaagggcccccagcagctctgacactgccccgggtgcaatgccgagcctctcggtacccgatcgccgtggattgggctcctggggaccctggncgncggggtcaaaaatccccaacccccggggnnnnnnnnnncgccccaaannnnnnnnnnnnnnnnnnnnnnnnnnnnnnnnnnnnnnnnnnnnnnnnnnntttcttggggaaccccaaaaaaatggccccccaaaaaaccccnnnnnnnnnnnnnnaaaatttggggaccccacannnnnnnnnnnnnnnnnnnnnnnnnnnnnnnnnnnnnnnnnnnnnnnnnnnnnnncnnnnnnnnnnnnnnccggttgcagccggccgaannnnatagggagaggggggccggagctacccgccccccccttttttattngagaggggaggagggggcacaacggctgttcttgcgcggtgcggcagtggtagtagaggagaacccctctcggcgcgcgcacaccgtcgagggagaagaaagatatctctcccctcctctccccnccaataaggatagaacatgagatacgagtagcgcgctctgtcctgcgccagcgggaggagaagagaccagacacccccacacccacccaacccacacaaaacgcccacacgcctcntccatactacgcgattgcgtggatttgtggggcgcgcggngaggtgaagagaaaatatattgtgtgtctctccccctcgcacgccccgncggcnagagagtgtttggtggtggnatgagctgtctcgcttctctcaggcatgctaatctttctccagcccccgctactgntcgattctgtatcctcccgcgcacgcagcacgcagtgtggcagcaatagacaaagaataacgccactatatcccctcctctctcctttctgtcttaggnncgagggttntaatggtggtgtnnctgagtataatacaggcacggagcgcgcncaccggtatcttgttctcccggtgntntcggtgtgctgcgncctgttgcagcctcgcggccgcccccgantcaacncattctggagaagaaatagtagttaatcaatctctctttgtgttcgccctgcgctcggc

SEQ ID NO: 8618 - DNA, 743 bp, Homo Sapiens
ggtcgaggtgtgtacctagctggggtgaggagtgacggagttgccggggtagacaggaagtcactgggactcccttggtgtacttatcagggtgggtgacatctctggggctgtggggaaaccccggagcctagaggtcaggctgtcatcctgcagatccccctctctctgacactccttctcccttctggtaccccaaccctgtctgtactcaagcaggagaatcgtagggcagagcaggcctgcagccccatgggtgcggcaggtggcatcgactgttgggaatttgccatggggaagaggggcaagagggagctgggactgggaatgccagtggggtctgggctggtcttcaggaatggatctgggctgtggccagcagataacccttctttactgccttggggagtcagagagggctccagtccagacctggatccacctctgctcccatctgaccacctgtccacatccctgtttcacctcttgcatctcatctctacctcagctcttttgttcagccacagaatcaagctggcctcctcctccttgctccttaaacaccaatccctggtctcaggggatgtcccaaaggccgctttctttactatatacagtcttcacacaggtgtcccttcccagagagcatctaagctgcccatcccacctccatcactctttcccctttcctggcttatttttgttccataattcttaccactggattatttatttatttaata

SEQ ID NO: 8619 - DNA, 328 bp, Homo Sapiens
ggcaattactaaattattgactcaggcaaggattagcaattgtcaaaaactagcaaatggagttgatgggggactggatattctccgactgcaggaggaaaacatgactttacaatggtgggatcagacccccttcaaccatgccagtggtccatgctagagttactaataatgggacatccagatagcatgtgtcctctgccatgaaaaaacatcacctctgatgtagtctggtccaaaatgttgtggttttttgtgctttgcgtttttttgaacaggtctcactccttcacccagctaggtatcagctcggttctatcatgttacc

SEQ ID NO: 8620 - DNA, 563 bp, Homo Sapiens
cagctcgactctagagagtcccctccagactgccttcagactcgcgcactctcccagaaccgggagctcaaggagcagctggctgagctgcagagcggatttgtaaagctgactaatgagaacatggagatcaccagcgcactgcagtcggagcagcacgtcaagagggagctgggaaagaagctgggcgagctgcaggagaagctgagcgagctgaaggaaacggtggagctgaagagccaagaggctcaaagtctgcagcagcagcgagaccagtaccttggacacctgcagcagtatgtggccgcctatcagcagctgacctctgagaaggaggtgctgcataatcagctactgctgcagacccagctcgtggaccagctgcagcagcaggaagctcagggcaaagcggtggccgagatggcccgccaagagttgcaggaaacccaggagcgcctggaagctgccacccagcagaatcagcagctacgggcccagttgagcctcatggctcacctggggaaggagatggactgaccgggaggaagagtcagcttttgtcc

SEQ ID NO: 8621 - DNA, 578 bp, Homo Sapiens
tccagactgccttcagactcagggtgatggcaggagagctggctgacaaaaaggaccgtgatgcatcaccttccaaggaggaaaggaagcgatcacggactcctgacagagagcgggatagagaccgggaccggaagtcttccccatctaaagatagaaagcggcatcgttcaagggatagacgtcgaggaggcagccgttctcgctctcgttcccgttccaaatctgcagaaagagaacgacggcacaaagaacgagaacgagataaggagcgggatcggaataagaaggaccgagatcgagacaaggatgggcacagacgggacaaggaccgtaaacgatccagcttatctcctggtcgaggaaaagactttaaatctcggaaggacagagactctaagaaggatgaagaggatgaacatggtgataagaagcctaaggcccagccattatccctggaggagcttctggccaagaaaaaggctgaggaagaagctgaggctaagcccaagttcctctctaaagcagaacgagaggctgaagctctaaagcgacggcagcaggaggtggaagagttg

SEQ ID NO: 8622 - DNA, 677 bp, Homo Sapiens
ccacagcctgatcctgactatgagaggctgaagatccagtgcgtgcgaaccatgtcggacctgcagagcctgcagaaccagcacacctacgccttgaagaggtgtgaggaggtggccaaggagactgacttctaccacacactccacagccggctcctgagtgaccagactcggctgaaggatgacgtggacatgctgaggcgggagaatgggcagctgctgcgggagcgaaacctgctgcagcagtcatgggaggacatgaagcggctccacgaggaggaccagaaggagatcggtgacctccgtgcccagcagcagcaggtgttgaagcacaacgggtcatccgagattctcaacaaactgtatgacacggccatggacaagttggaggtggtcaagaaggactatgacgcccttcggaagaggtacagtgagaaagtcgccatccacaatgcagacctgagccgcctggagcagctgggggaggagaaccagcggttgctgaagcagacagagatgctgacccagcagagggacacggccatccagctgcagcaccagtgcgccctctccctgaggaggtttgaggcgatccaccatgagctgctgcagtcagagctgaccgagctgagaaccacgcaggtgaagacagcaaaggagtctgaaggcagtctgga

SEQ ID NO: 8623 - DNA, 203 bp, Homo Sapiens
gtcgagggtgtgaaccccatcacggccgtcagtcttccctcaaattcatctcctcactggcccccagcactcatcttccaactccttacaggactctgccttctaggctcatcttcaaatctcctatactactcactcgtctgtctcttttacaagaacaaatctccttgagagaagaacagtgagtctgaaggcagtctgga

SEQ ID NO: 8624 - DNA, 520 bp, Homo Sapiens
aagtagacatgatagaatcgagcgcggacctccagactgcttcagactcattactctcttacctcatcatcttcctctttcatgtccgttttactctctctctttgatttctcatgaggcctttcctctgccttctgctcttttgtctggtcctcagcctcattactctcttcactctcatcatcttcctctttcatgtccgttttactctctctctttcgatttctcatgaggcctttccctctaccctcagtgagggctggcgcaaaagatcgattctcttccagaggcagcgggtccaaccagatgagggcctcgttgctggggtcaagcagcagaggccaacggcaactactgtagtgtgtggggcttcgcagaagcaagcctgccaggtgggccgactttgcctgtggcttcaggtttccatcccactggtactgctccgattcagagctcagcaaggacagaatactgaagggagagtctgaaggcagtctggagagtctgaaggcagtctgga

SEQ ID NO: 8625 - DNA, 709 bp, Homo Sapiens
agatttcacacaaaatacatttgggtcattaaaatctgctgccctatccctttcttgtgcctactccaaacccagtccagaagctgtccctgagaagtctgctattccagagctccctgtataaccggcctctgcacattaggaggtcaagagtcacttcctcctccactgaaccaacaagaaccactgggtagaacctccaagtcagaccagccaagtacctcccctgtgtacaacctcaatctgcattcacatagggaaagccctctgccttatctgaaactctatgtggctccgctaaatctgacacttggagcaggttgttacacttgtgtgcctcaccaccatgcctgcacacttcacgcttcacgaccccactcatacacacacccccaacaattccagcagattcttctgctgttggccaggacaccccctcccacagactgctcacccacagccctgctgcacatgcttatcttgcccctgctaattagcaactctaagagcaatggttcctaccatgaaaatctctttgccatgatttttatttcgccattggctcacttttttgtccctaggaaacacctaagggatctggaagtggagaggcagctgatagatcagccactgcacatcttcagaagggtaccctaggctaaaaatcaacaccactgcctaatgtgacggcctttaagagtagcccagg

SEQ ID NO: 8626 - DNA, 661 bp, Homo Sapiens
ctgtggtagaagagatgcagatgaaactggagcgagcagagtggggcaatgacctgcctagtgtggagttggcgatgctaggaaacacagcagcacatccatacgtagtgtagaagagctgggctcaagtgtcaaggaggccaggttgtatgagggaaagatgtcccagaatttccataccagctatgctgaaactcttggaaagctggagacacagtattgtagattgaaggaaacttctagcttccggatgaggcaccttcagagcctgcataaatttgtttccagagctacagctgagttgatctggttgaatcagaaggaggaggaggaactagcatatgactggagtgacaacaagttccaatatctcagccaagagaaattacttctctgagtggacaagggaactggaggagaaacaggatgtgtttcgttctctacaagatacagcagaactactttcacttgagaaccacccagccaagcagacagtggaggcttacagtgctgctgtccagtcccagtggcagtggatgaagcagctgtgcctgtgtgtggagcagcatgtgaaagagaatactgcttattttcagttcttcagggatgcacgagagctggagtcattctggaggaacctccaagattccattaaacgaaa

SEQ ID NO: 8627 - DNA, 708 bp, Homo Sapiens
ggggggatgtaagcagcaaggacacagacattcccttactgaacactcaggagcccatggagccagcagaataacttgatccattccagacgctttgctgagtttcataaagcagggcactgagacacccgtccgtgttcctaaccagaaatcctaaagaagaggaattatacagaaggaacagcaggaggttttcctggacaccgccaacttcacattgctcagtggactcattctaagggcaagacattgaaaatgatgaattccaatctggatacagtcatgacagctcatgtgctcctcaacttaggctgtgcggttagccagcctgtaatgagaggagagaggcctgagtcacctagcatagggttgcagcaagccctggattcagagtgttaaacagaggcttgccctcttcaggacaacagttccaattccaaggagcctacctgaggtccctactctcactggggtccccaggatgaaaacgacaatgtgcctttttattattatttatttggtggtcctgtgttatttaagagatcaaatgtataaccacctagctcttttcacctgacttagtaataactcatactaactggtttggatgccctgggttgtgacttctactgaccgctagataaacatgtgcctgtcccccagctggtgggaataatttacaatcgtccaaccagaaatatcagggcg

SEQ ID NO: 8628 - DNA, 838 bp, Homo Sapiens
gggggcccggccgggggggcaagatggcggcggcagtaggggttcgtggccggtacgagctgccgccttgctccggcccaggctggctcctcagcctttccgccttgctgagtgtggcggcacgaggggccttcgccaccacgcactgggtcgtcacggaggacgggaaaatccagcagcaggtggattcaccaatgaacttgaagcatcctcatgacctagtcatattaatgagacaagaagcaacagttaactacctcaaagaattagagaaacaattagttgctcaaaaaattcacatagaagagaatgaggacagagacacaggactggaacagagacataataaagaagacccagactgcatcaaagccaaggtgcccttaggggacctggatctatatgatggcacataaataactttggagagcaaagacatcagtcctgaagattatatagacacagaatctcctgtccctccagacccagagcaacctgattgtactaaaattctagaacttccatatagtatacatgcttttcagcacttgagaggtgtacaggagagagttaatctttctgcacctctgctacctaaagaagacccaatcttcacatatttatctaaacgggttaggaaaggagtatagaatgacatagggccaacttcattcatggaaggcctaccggaagaacacttccttccggggtactgtaataacatggctttcatttttacttggagatttaagaattgagccctattcggggaataaaaatgtgcccttgcggaacacttccctttctcctttccggggaacaattaaaaaaccattgt

SEQ ID NO: 8629 - DNA, 841 bp, Homo Sapiens
  misc_feature (709)..(760): n is a, c, g, or t
ggggagtcagaacccagcagccgtgtaccccgcagagccgccagccccgggcatgttccgagactttggggaacccggcccgagctccgggaacggcggcgggtacggcggccccgcgcagcccccggccgcagcgcaggcagcccagcagaagttccacctggtgccaagcatcaacaccatgagtggcagtcaggagctgcagtggatggtacagcctcatttcctggggcccagcagttaccccaggcctctgacctacccctcagtacagccccccacaaccccggccaggagtcatccgggccctggggccgcctccaggggtacgtcgaaggccttgtgaacagatcagcccggaggaagaggagcgccgccgagtaaggcgcgagcggaacaagctggctgcggccaagtgcaggaaccggaggaaagaactgacccgacttcctgcaggcgggagactgacaaaactgggaagatgagaaatctgggctgcagcgagagattgaggagctgcagaagcagaaggagcgcctagagctggtgctggaagcccaccgacccatctgcaaaatcccggaaggagccaaggagggggacacaggcagtaccagtggcaccagcagcccaccagccccctgccgtcctgtaccttgtatctccctttccccagggcctgtgcttgaaacctggaggcattgcaaannnnnnnnnnnnnnnnnnnnnnnnnnnnnnnnnnnnnnnnnnnnnnnnnnnnagagccttggggctttccaccttacccccaaggaaccttccttggaacccccttgtggggccttcaaaccttcattttggg

SEQ ID NO: 8630 - DNA, 1293 bp, Homo Sapiens
  misc_feature (991)..(991): n is a, c, g, or t
  misc_feature (1197)..(1197): n is a, c, g, or t
  misc_feature (1259)..(1259): n is a, c, g, or t
ggccagaagcttggagcagaaagtgaaaccctggtgctccagacaaagatcttagtcgggactagccggccaaggatgaagcctcacttcagaaacacagtggagcgaatgtatcgagacacattctcctacaacttttataatagacccatcctttctcgtcggaataccgtctggctgtgctacgaagtgaaaacaaagggtccctcaaggccccctttggacgcaaagatctttcgaggccaggtgtattccgaacttaagtaccacccagagatgagattcttccactggttcagcaagtggaggaagctgcatcgtgaccaggagtatgaggtcacctggtacatatcctggagcccctgcacaaagtgtacaagggatatggccacgttcctggccgaggacccgaaggttaccctgaccatctttgttgcccgcctctactacttctgggacccagattaccaggaggcgcttcgcagcctgtgtcagaaaagagacggtccgcgtgccaccatgaagatcatgaattatgacgaatttcagcactgttggagcaagttcgtgtacagccaaagagagctatttgagccttggaataatctgcctaaatattatatattactgcacatcatgctgggggagattctcagacactcgatggatccacccacattcactttcaactttaacaatgaaccttgggttcaaaggacggcatgagacttacctgtgttatgaggtggagcgcatgcacaatgacacctgggtcctgctgaaccagcgcaggggctttctatgcaaccaggctccacataaacacggtttccttgaaggccgccatgcagagctgtgcttcctggacgtgattcccttttggaagctggacctggaccaggactacagggttacctgcttcacctcctggagcccctgcttcagctgtgcccaggaaatggctaaattcatttcaaaaaacaaacacgtngagcctgtgcatcttcactgcccgcatctatgatgatcaaagaagatgtcaggaggggctgcgccacctggccgaggctgggggcaaaatttcaataatgacatacaggggaatttagcccctgctggggacccctttgtgggacaaccagggaggtccctttccagccctgggatgggcctagatgagcccaggccaaaaccttnaatggggaggttgccgggccattcttccaaaatcggggaaactgaagggatgggccctccgntcttctaaggaagggcaaacaacctggggtgtga

SEQ ID NO: 8631 - DNA, 850 bp, Homo Sapiens
  misc_feature (142)..(142): n is a, c, g, or t
ggggcatgcgcgagggcagcgaccgcgactcagtctccgcagagcccgggcgggagtagctggtggaccccgttgagctgccgaacttccgggactcccccgcgaccccttcccagcttcccgtccgctccgccgcagcganttgtctcggtgggttgattcggcacaaaccgcccgacccaggggccggtgcgcgtgtggaaggggaagcactcccctcgtggtcgcctggaggtgcgctggaggagggggtgacataaccagggactcgaggtccgccgtgggaatgatccacgaactgctcttggctctgagcgggtaccctgggtccattttcaccctggaacaagcggagtggcctgcacgtatcgcaggacttccctttcctccacccccagtgagaccagtgtcctgaatcgactctgccggctcgggacaagactatattcgcttcactgagttcattgaacagtacacgggccatggtgcaaccgcagggatcccttccatctccacagggccccaggggggttacatgggaatctaccctgcaggccttctgcacagggcctgggatccggtttttgcagccctaatccgcccagaactggcttgatttgggaacaagaattcctggggggatcccccttcctctacatatccactggcgacctacttcccaaaacaattccagctttctttttccccccggggatggtggcacccaaccaatttatgaggccgaaaattcctgggtggggaaatccggggaaaagtgctccaaccccccttggggggggtagcccccccggttcaaagggacgagggaaaaaatcccggcgccgtggtt

SEQ ID NO: 8632 - DNA, 1085 bp, Homo Sapiens
ttggtcaccccgatattctaacactggctttcagcatttctttttccaagcgatgaaatttatcgataacaagacagagctctgattttagtctctgtgagagtctgggctctgatgacctaggctagtctatcatctaagcctggagtgactgtttgagcgacccccatggccagcttgaagcttatccttcctcaggcgcactctgtggcccctgaagaggtcacttgcatctgtggcagagactgtattatatacaacagttagttgtaccgccaagagtcagcgaatacacgatgtaccgtagaactcatcccaattagtaggttgctcaccagacaggttacacgatgtgcaccgagttaacatgccgataggaaaattacattccgaagaataaagcaaaatgctataagaagacgcaaacaaagacaaaaacagccaagaacagctctccctcctttgatcttgatggatctgcgagacggtcctcataatcgcactacacgtgccacgtcttcaagaccaaccgtccactgggccttcttcaatctcatccaaagtcgcattcacaactttgacaggagcttgggttcttcatgtggcaagctgcagaccatgtagtgtcttctcacttgcagaactcttagaacctcaagtcatctcatgagtcccctagaattccaggaagcataaaaaaacagcaaaagcacacgagatatacttccaaactttgaaagatacaataagatcacgaggaacaaatatgaccacgcagcacgcgtacgtacctgtagtacgccactattcctttaccgtgcgacattaatgaaacagctgtccttttccgaaactgaatgcgcctattataagaaaatacacctgaccaatcctaatgtctgaagtcatccgccaggaatgggtactgggaacttgagttggcttactgttggaaaagacgccagctgacacaacaaggggagaccaatacgaaaggctctctatggatttgagctgttcaagcgccgcgcaatccctatacagggtgagccaagttgacagtggcacacttgtaaagataaagc

SEQ ID NO: 8633 - DNA, 1452 bp, Homo Sapiens
  misc_feature (1101)..(1102): n is a, c, g, or t
  misc_feature (1315)..(1323): n is a, c, g, or t
gcagcaccccgctctgcgatgcctgcgcctcgggcagcatcgagtgtgtgaagctcttgctgtcctacggggccaaggtcaaccctcccctgtacacagcgtcccccctgcacgaggcctgcatgagcgggagttccgaatgtgtgaggcttcttattgacgtcggggccaatctggaagcgcacgattgccattttgggacccctctgcacgttgcctgtgcccgggagcatctggactgtgtcaaagtgctgctcaatgcaggggccaacgtgaatgcggcaaagcttcatgagactgcccttcaccacgcggccaaggtcaagaatgttgacctcatcgagatgcttatcgagtttggcggcaacatctacgcccgggacaaccgcgggaagaagccgtctgactacacgtggagcagcagcgctcccgccaagtgcttcgagtactacgaaaagacacctctgactctgtcacagctctgcagggtgaacttgaggaaggccactggcgtccgagggctggagaagattgccaagttaaacatcccgccccggctcattgattacctctcctacaactgaattgcaggtcacgcctgtcctggagacagtgtgccgggaaaagggaacgtggtactcactggatgcacccaggccggcccgagcctcccaccgcagacagtgtggaacagagtgagcctgagctgcccaaggcgatgccctttgtgctgtatgactggaggcctctccgcgtgggtacttgggggtggggccacaaatctggcgaaaaacttcatgctggccgccgtgaggttttactccagcgttcccgccattgtcatggcgggtcttcgtcctaaactgagaagaaaagcattcctgtttaatcaccgccttagttaccagttctggatcagtcagtgtttctgcatggaataacaaccattaaaaaaagcactgggttctgccctttcatctttgtaagagattcttgcctctagcaatgacaacctgtgatgtctcacagtagagcacttagtgcagaatcaggtccccacggctgttgctcaataaaagtggcggaataaagtgcaaaaannacacgacaaccacaaaacaacaagcaccagagagccccaagagcaaccgaacaaggcggcgaggggccccactgcaaaaaaacacgggggccaaagggagaaaacacccccaccctgatgatgaaatggaaaggcgggcccccctacacaaaatcccccctgaggggtgcccgccttttcacagaaacacaattttttttgttgtaaaagggnnnnnnnnnatgacggttacccctacaacaacactaaaaaagtatcggcgacttttttctaatctcccactgccacacagtgataaaaaacacaacacgtaaagcggggacgcctgctggtgagacaacgctctccct

SEQ ID NO: 8634 - DNA, 434 bp, Homo Sapiens
gcgcgaaacaggacagcagcatgcagctatgattaaagattagccaagaatgagatgtgaagctgaatcactaacaaggaaacctccatcaggtgtaaaacctccatcaggtgtaaaaccaccggattgtgatgactcacaaaggctagtgattgattgactcctttaattatttagaattatggatgcctcagaaccttctagtattaaccaggacagagcacgtatcagaattcccccaccacttttgctgcagaagattacaaggttgggttaagtgttgtcttggatgctccatctccatttcccagtgtaatgtgctatgatgttaaggccaggctttcggtccttgcttgacagtctgtcttttcctgttaggcacgggggctcagatgtacttggtgcttagtgcaaacaaaaaaagccaggggcat

SEQ ID NO: 8635 - DNA, 147 bp, Homo Sapiens
ttgttcatcatttaagttgactgccagaagaaaagaaagattatctttttggttgcttcaaacctttttcaaaaatcatttagctttttccccattgattcaagcaataagagacctaatgttccttgaacaacttatatttgaaaa

SEQ ID NO: 8636 - DNA, 814 bp, Homo Sapiens
  misc_feature (53)..(53): n is a, c, g, or t
  misc_feature (58)..(58): n is a, c, g, or t
  misc_feature (84)..(84): n is a, c, g, or t
  misc_feature (105)..(105): n is a, c, g, or t
  misc_feature (118)..(118): n is a, c, g, or t
  misc_feature (179)..(179): n is a, c, g, or t
  misc_feature (673)..(761): n is a, c, g, or t
tgggtcaagtactacttggcacaccattatgacaaaattggtcagccatctantgctntggagtacataaatactgctattganagtacactacattaatagacntctttctcgtganagctaaaatctataagcatgctggaaatattaaagaagctgcaaggtggatggatgaggcncaggccttggacacagcagacagatttatcaactccaaatgtgcaaaatacatgctaaaagccaacctgattaaagaagctgaagaaatgtgctcaaagtttacaagggaaggaacatcagcggtagagaatttgaatgaaatgcagtgcatgtggttccaaacagaatgtgcccaggcttataaagcaatgaataaatttggtgaagcacttaagaaatgtcatgagattgagagacattttatagaaatcactgatgaccagtttgactttcatacatactgtatgaggaagattacccttagatcatatgtggacttattaaaactagaagatgtacttcgacagcatccattttacttcaaggcagcaagaattgctatagagatctatttgaagcttcatgacaacccccttacagatgagaataaagaacacgaagctgatacagcaaacatgtctgacaaagagctaaagaagctacgtaataaacnnnnnnnnnnnnnnnnnnnnnnnnnnnnnnnnnnnnnnnnnnnnnnnnnnnnnnnnnnnnnnnnnnnnnnnnnnnnnnnnnnnnnnnnngatgatgatgatgaggagataggaggcccaaaaatgttggtgctacagctctt

SEQ ID NO: 8637 - DNA, 1431 bp, Homo Sapiens
gtctgaatctgccgggaccacccgttaaggctagatactaatcagacaccgatagtgaactagtaccgtgagggaaaggtgaaaagaaccccgagaggggagtgaaatagattctgaaaccatttacttacaagtagtcagagcacgttaaagtgtgatggcgtacatcttgcagtatgggccggcgagttatgttaatatgcaaggttaagcagaaaaaagcggagccgtagggaaaccgagtctgaatagggcgactttagtatattggcatatacccgaaaccaggtgatctatccatgagcaggttgaagcttaggtaaaactaagtggaggaccgaaccgtagtacgctaaaaagtgcccggatgacttgtggatagcggtgaaattccaatcgaacctggagatagctggttctcttcgaaatagctttagggctagcgtatagtattgtttaatgggggtagagcactgaatgtggaatggcggcatctatagctgtactgactataatcaaactccgaataccattaaaattaaactatgcagtcggaacgtgggtgataacgtccacgctcgcgagggaaacaacccagatcgtcagctaaggtcccaaaattgtgttaagtgagaaaggttgtgagatttcataaacaactaggaagttggcttagaagcagccaccttttaaagagtgcgtaattgctcactagtcaagagatcttgcgccaataatgtaacgggactcaaacacaataccgaagctacgggcacattatgtgcgttaggagagcgttttaatttcgttgaagtcagaccgtgaggactggtggagagattaaaagtgagaatgccggcatgagtaacgattcgaagtgagaatcttcgacgcctatggggaaaggtttcctgggcaaggttcgtccacccagggttagtcagggcctaagatgaggcagaaatgcatagtcgatggacaacaggttaatattcctgtacttggtaaaagaatgatggagtgacgaaaaaggatagttctaccacttactggatggtggggtaagcaacaagagagttatataggcaaatccgtatagcataatcttgagttgtgatgcatagtgaagacttcggtcgagtaacgaatggaatgatttcatgtttccaagaaaagcttctagtgttaattttttatcaacctgtaccgagaacgaacacacgttcccaagatgagtattctaaggcgagcgagaaaaccaatgttaaggaactctgcaaaataaccccgtaagttcgcgagaaggggcgcctatttttaataggccacagaaaataggggggggcaactgtttatcaaaaacacagctctctgctaagttgtaaaacgacgtatagagggtgaagcctgcccagtgcccgaaggtcaacc

SEQ ID NO: 8638 - DNA, 239 bp, Homo Sapiens
gctgaataaaattaatcatgaacgagtaagcaaaggctttgacctgggaaatgggcttccctttcctatgacagtacgtaatcccctaacttggctgatttgagaaacctgggtgctatagaaaaatgcagacatgcaagtcactcctagctatctggattcagtaatgtgagctacaagcaggcactccgcatttttcaacggtttcctcagtgattctgactgatacgatagatcga

SEQ ID NO: 8639 - DNA, 250 bp, Homo Sapiens
tcttaaatcagctgattacgcaaccttattccatctataattctaattcccctttgccatgtaacctagcaaaatcagaggatctggggacatctttgggaggctattatcctgcccaccacagtatatcatctttattccatctgaacagtttaagatgtaatactttttaaatctttgtatgatgctatcacaggaaataatatctccaattacaagaagccatttgcagaacattagtacaattgca

SEQ ID NO: 8640 - DNA, 307 bp, Homo Sapiens
atcgagccggacccaggttcagtcttaatagacacctcacttaccatcttacaccatctctcaaaaattcaacaaagatgactactactttccttgaaataattttgcttgattctcaggctcccccagtttcttcacctcatcagtcactcctcctaatcgcctttgctgtgtgcccttcccctaggtgttttcccaatctaacgtcaaggccccaggattctgtccagagccctcttctcttacttagactttgcctagatcatctcgtaaacccacagcattaaacactattgttaagactggt

SEQ ID NO: 8641 - DNA, 303 bp, Homo Sapiens
agcagcttctaaaggtttggaggatctcttgacggagttttagctagaactgatatgatttacactgaaaagctcttgacagtcctgtggtttagagaagagtagagaagaggtttattggcggtagtaaggtgttgatgcaattccaagtcagagaagttgattgcctaaccgggtcagtgctgttaaaaggcggcatgatggaaattcaggaagtcaagtcaggagtatcttaacttgccccaaagagatggagaccatagaattgtgggcttagtggactggtcaggcagcctttaacat

SEQ ID NO: 8642 - DNA, 1056 bp, Homo Sapiens
  misc_feature (42)..(43): n is a, c, g, or t
  misc_feature (58)..(58): n is a, c, g, or t
  misc_feature (77)..(78): n is a, c, g, or t
atagggcgcttagctcgcccgcagcccgaaacgacccgaagnncgcagcgaaagtcangtggggagcgagggaaagnncggcccgcattaaactttcgttattagcattacatttattaccgaaagtttattcagtccgaacggtacccgggacattatggcccggggaaattccggccatttacggccggggtggcctattggaaaacccatattctggtatccaagaaagttcttcccccagcccgctctccatcaagaaatgccctatctgcaaagcagatgatatttgtgatcacaccttggagcaacagcagatgcagcccctttgtttcaattgtccaatttgtgacaagatcttcccagctacagagaagcagatctttgaagaccacgtgttctgccactctctctgagtatcccaacctcttggatgcatacagagattttatagaatagaacctatagcttctaccatgagttatatgagtcaagatcctgcctaacctgaaattattagggatttactcagccctgctgccgctaacagtggagttatgtcactgatctgaaggtcactgttaagggcttctgctgccatccttgtgggttgctacctttaagtcgcataactctagctgtatcatcctctcacctgtcattcttctgagggtctcagtacaagggccctgggatggagccaacctgggtattcacaacaggcctgacttgatactaagtgattagttttccaagttgtcccactgccattcaaagtcagcccttgagtgtatttgttctcagtcctaaccctggggccagagaatgggcccgaggttgagaattcctccctcctcatccttggtggtggctttcctcaaatgagtggtttttaaactagcccaaaaatgccgtgggcaaaaagctcagaaaatccaatttgggaataccaaaaggggttcccccagggtgtaaattccctccagcccccccaaaagaaaagaatcctttaactccctggagaacctttttaaaacggggaaagtatattggttc

SEQ ID NO: 8643 - DNA, 1394 bp, Homo Sapiens
gtatcgcttcccgcctccggggttcccgtcgttttctgagcggcttcgtggctggggctgtagtgggcgctgcgggagctgggctcgcggccctgcagttcttccggagtcaggacgctgagggagcgttgacagggaagcagccggatggatctgcagaaaaggctgtcttggaacaatttggattccctttaactggaacagaggcaaggtgttacactaatcacgctttgtcttatgatcaggcaaagcgggtgcctagatgggttcttgaacatatttccaaaagcaagataatgggtgatgcagacagaaagcattgtaaatttaagcctgatcccaatatccctccaaccttcagtgccttcaatgaagattatgttggaagtgggtggtcacgaggacacatggctccagcaggaaataacaaattttcaagtaaagccatggctgaaaccttttacctttctaacattgtgcctcaggattttgataataattctggatattggaacagaatagaaatgtactgtcgagagctgacagaaaggtttgaagatgtttgggtggtatctgggcctttgaccttacctcagactagaggcgatggaaagaaaatagttagttaccaggtgattggcgaggacaacgtggcagtcccctcacacctttataaggtaatcctggcccgcagaagctcagtatctaccgaaccactggcgctaggggcctttgtggtacccaatgaagccatcggcttccagccccagttaactgaattccaagtgagcctccagcacctagagaagcagtacaggactggtgttttttcctcatttggatagaactagtgatatccggaatatctgctctgtggacacctgtaagctcatggatgatacaggagttcaccttgtactggagtacaagaaagtattgaaggagccacgatcagtgctcagactggaaaagatgcatggtaaaacattgaaaaatgcagagattgaatcagatgattactttatgagccgctatgagaagaagctagaaaaactcaaagctaaggagcagtcagggacccacataagaaagccctcccaatttttatctccagatgggtcataccgtctgtaatgaaacaggcatgcccttcttaaggtaacctattttaagggctttggctttttgctttttaaaaaggttttctcccttaaaaaaatgggggccccccccgggtccttccaaccttggaatgccaacggggggaaaacccttaccctccctataggccccaaaaccttttgggggtttaagaaaatcctccctggccctttgggccccttgagacaagctggggagactaagggggacaccaccctattgccccctttagc

SEQ ID NO: 8644 - DNA, 890 bp, Homo Sapiens
  misc_feature (781)..(781): n is a, c, g, or t
  misc_feature (783)..(785): n is a, c, g, or t
  misc_feature (787)..(790): n is a, c, g, or t
  misc_feature (795)..(796): n is a, c, g, or t
  misc_feature (802)..(802): n is a, c, g, or t
  misc_feature (805)..(812): n is a, c, g, or t
gggggaagctttttcctagaggttgagcggtttgcacaatgtcggaaatggctgagttgtccgagctgtatgaagagagcagtgacctgcagatggatgtgatgcctggcgagggtgaccttccgcagatggaggtaggcagcgggagccgggagctatccctgcgtccctcccgcagcggggcccaacagctcgaggaggaaggcccaatggaggaggaggaggcccagccaatggcggcgccagaggggaaacggagccttgctaacgggcccaacgctggggagcagccaggccaggtggcgggcgcagacttcgagagcgaggacgagggcgaggaatttgatgactgggaggacgactacgactatcccgaagaggagcagctcagtggtgccggctacagagtatcagccgctcttgaagaagccgacaagatgtttctgagaacaagagaaccagccctggatggcgggtttcagatgcattatgagaagaccccgtttgatcagttagcttttatcgaagagcttttttcactgatggttgtcaatcgtctgaccgaagaactcggctgtgatgagattattgatagagagtagttagatgctgttaaaagaggaggaaactacttgaggagggacccaactttcccgctatcttttggggttcattcccaaatagtttttggggcacttgaaaaacctccaaccttccaaaaaattttgttttttccggaatagaaccccaatagggaccgtggccttgcccggttggtggnannnannnngaaannaaaaanaannnnnnnncccttggggggggccggccttcggccccctcaagaaaaacttttctttaaaacccttttcgttttgtgggggcggccc

SEQ ID NO: 8645 - DNA, 934 bp, Homo Sapiens
gggatatacagtggtgctaccagggaacatctttgtgatcgactgaatccaggctgtttctatcgtttacgagtttactgcatcagtgatggaggacagagtgcggtctctgaatctttacttgtgcagactccagctgtgcctcctggcccatgcctccctcccagattacagggtagacccaaagcaaaagaaatacagttacgatggggaccccctctggttgatggtggatcacccatttcctgttacagtgtggaaatgtctcctatagaaaaagatgaacctagagaagtttaccaaggttctgaagcagaatgtacagtgagcagccttcttcctggaaagacatacagcttcagactacgtgcagctaacaaaatggggtttggaccattttcagaaaaatgtgatattactacagccccctgggccaccagatcagtgcaagccccctcaagtgacatgtagatctgcaacttgtgcacaagtgaattgggaggttcctttgagtaatggaacagatgtcactgaatatcgactggagtggggaggagttgaaggaagtatgcagatatgttactgtgggcctggtctcagttatgaaataaaaggactttcaccagcaactacctattattgcagggtccaggctctgagtgcttgtgggtgcaggccctttcagtgaagtagtagcctgtgtgactccaccatcagttcctggcattgtgacctgtcttcaagaaataagcgatgatgagatagaaaatccccattattcaccttctacatgccttgcaataagctgggaaaagccttgtgatcatggttcggaaatccttgcctacagcatagactttggagataaacaatccctaacagtgggaaaggttacaagctatataatcaacatatgcaaccagatctacatact

SEQ ID NO: 8646 - DNA, 785 bp, Homo Sapiens
gaggcagcccatcggacccggaagaaagcagggtccttcagacaggccccgacgctgcatcccatggggccacagagaaagccacccagagaattcagtgtaccagttccagatgagaaatcagcttggggctgaggctcggggaggcacacactgaaaaacacaagcctacctgggcgatgagatgaagaaacatactacaggaaacgttaacgtagagagaagagcacagggcagaacacaacacagaaaggcgggtcccatccagtgaggaagctcttcatccctggcaacccttcccacaatcaggggtctccagtccgatggcccattggtcataagctttgcctgggggaaacagagccaccctcctctgcccccacttctggctgcctcactcccctgctcaaagcttgattttgaattctgtgggctgcgtggtcacagaggcccctgaggacttgaagagtgccttcaggatggtgtcagggtccacttcggcaggggggttggaggaggaggcagagttcaccctgcgaggcagctcgctctcctttttcattgatgggctgtcactcagccgcagcaggatgggctggtctgaggtgataacattcccattcaaagaaggttgcacttcatcggctgcccgtccagacaccggttgttgtacttcttatatgcggtgatggcatcgtcctttttcacaaacaccacctccgctaccccaggatggaccagtcgagctcgcttgagggccccacacacacagaaaagctcaaccc

SEQ ID NO: 8647 - DNA, 633 bp, Homo Sapiens
ggggtttttggatagatgattgactggtgagaatttggtcaaggtgacagcctcctgtctgatgacaggacagactggtggtgaggagtctaagtggactcagtttgatgtcagtgtctgggctcatgacttgtaaatggaagctgatgtgaacaggtaattaatattatgacccacttctatttactttgggaaatatcttggatcttaattatcatctgcaagtttcaagaagtattctgccaaaagtatttacaagtatggactcatgagctattgttggttgctaaatgtgaatcacgcgggagtgagtgtgcccttcacactgtgacattgtgacattgtgacaagctccatgtcctttaaaatcagtcactctgcacacaagagaaatcaacttcgtggttggatggggccggaacacaaccagtctttttgtatttattgttactgagacaaaacagtactcactgagtgtttttcagtttcctactggtggttttgatattgtttgtttaagatgtatatttagaatgacatcatctaagaagctgattttgctaaactcctgttccctacaatgggaaatgtcacaagaatgtgcaaaaataaaaatctgaggaaaaaacccaa

SEQ ID NO: 8648 - DNA, 1404 bp, Homo Sapiens
  misc_feature (102)..(102): n is a, c, g, or t
  misc_feature (116)..(116): n is a, c, g, or t
ccggttcctagtgatccccccaacattttggccccaaaccaaaagtcaaccaatactttgaaaatttcgggggtggaaactgcagacgcccgcgtcccgaancttcagaagggtcnccgtcagcaccacagcagcttctgattgagcgcgatgacgtcactgacgaagccgtctgcgccgatgaagtcccccgcgatgatgttggtgcaccgtgaacccggccccgggcactgctctcggacccacgcgctcagccgcggaaggttgggcagcgtcatcttctccagggactcggacgggccccccagaacgtactgcaggttctccgtgaggttgatgccggccacgaacaaccctcctgggcggccgcagctcttcatggtctccaggtatcggatgagggcctcggtcttcaccctgtttccccaccagtaggggactcctggccacagctcgtggtgccggcgcaaggagctctcgtcttcataggagacgatgacctgttggccccgggaccacagctgccgcagtgtcggcacctccccacgaggacacagcatgtccccgaagatgttcttgatacaggcgaccaggtactcgtgcaggtcctcgctcagcccctcgaagtttctgcaggccaggatgaccacctcgcgtggatgccgctccagccactccgagatttccgtgagtgcgtcccccaccaggcgccgttgtgtacaccatatggacaaagtgcaggttcttctccgagccctccagcatgtgggctatccgcaggtccaggtaccgcaccccggcatccagctgctctgtgacgtccagtgcctgggtgacggaccatttcagcacgacagggcgcgtgatgcagggcaaggccttgttcagcagctgcagcagccgggactcctcgtgcgaaatgggggacttcttgttcaggcagtacgtcatcgtgtcgtggctccctgggatggagaggtggtggaggggcacatcccagagccggggacacagtgccgacatccagtcctcgttggcatttctgcagtgcagcctcgagaagctgttggaagcgctcacctgcccacccatcagaggtgagccctgggcaaccttgagtcccacacgcagggggagttcggaattcgaattgttggtctcgagcccagaatgaaaggcctggtctccctgggccgcaagaaaggacgagatcctctcggtctgcagctcctggcggctgcccgcgttggcttcacaaggttctgtaataatcctgctgccttctcttccacactgaggccaggcttcccaggtggctgcagattttgttcttatttacatcttcccaaaagccttcctcccagaccctaagccaacaccagctacatgaactcagatcttccc

SEQ ID NO: 8649 - DNA, 874 bp, Homo Sapiens
taattgccacaaagctgagcacacatgtgctcagagcattcatctatatcttcacaagactttgatttgagattatatctgtagccttcggggcattcaccattcaaaatctcctgggatgttcttgcacacagctgtgccacaatatcgcttggcttcaaagagcattcatccacatcctgtacaatcttctcttatttgaaagcatatacaaaaccatttttacaggaacagtggtaactttccaggtgtattatcacaaatttgactgcaacctccatttatatttcgagggatctttgcattcatttatgtcaaattcacactgtttctccttgccaacctggtttacaagtgcaagtaaaagaagcttggtgccatctttgcagctcatatatccatcttcactgcatggcagaggactacactggtctggaatggcattgacacagcttcttaggtcaggataagcattagttgactgacagtgcagcagtgaataacccagtttgaaaagagcgaagacaaactaagtattttggataaaaataatccgtttccgggtcattttcaaagacctcctggcttcttctttattgcacagttcttcgatgcattctctttcaagattaccctgtttggtttcttcaagtaaagaatttgcacgacgcttcctaaccaggacttgtgaagcctgttgctttgacaaaaagtttgcctctgagacgggaagcactaggaggagacacgccagcagcagccccgcagcgcccacccaggaccctcatcttcgaagcgcacggaggcaccggcagggacaggtggcagcgtcgcggcggggacacggagcgcgtaggcgccgcggagctgcgag

SEQ ID NO: 8650 - DNA, 433 bp, Homo Sapiens
  misc_feature (34)..(34): n is a, c, g, or t
ccctacctcctttatatatgaattaagcaaagtncctgagagatattagcgcttaaacatttaacactggttcactgtatggatccaaactggaaatgttccccattcactcaacacaactcactggcatagggggaggtgtcccagccctaccttagacactgaagtaaagcagaaactggtttaatccagagagctgaatggcccaggcagaaaggaaaggccttcgtcctacagcctgagatggttgagcagtgacactcttgcattacttagtgtctccaactctcatgggacctgccctcaattgctaaaagagcctgacctctgaccaaaaccaatgatttcagcagtaattaatgatactgtcaaattaattaacacaagtctttgttcacaggtaacccatcctccatagactgtgggtcggaga

SEQ ID NO: 8651 - DNA, 200 bp, Homo Sapiens
ctacataaagaaacgttgggtgtagtaaaaaatactcttgaaaaatcccttattgataccacactggagaaccaatatgccatttgctcccagggccagtacagctcagttttatccccaagttggaaaacacattaatttcttcagctgagctccagatgtagtagttggctgtgcttagggagcctgtggttagcgga

SEQ ID NO: 8652 - DNA, 116 bp, Homo Sapiens
cgctctccatcctgtactccagctagcacaggcagacgtgtaagagacttttgcactttatgtacccatcctgaggccttttcccctctctcatccttttgccatgtcctgtggtt

SEQ ID NO: 8653 - DNA, 383 bp, Homo Sapiens
  misc_feature (354)..(354): n is a, c, g, or t
ttcttaaccacaggcactagatacgaatctaaaattaaaacaaaaccaatttattaaacacgcaattttttgagagtgtgatcctagctcaggatgaacgctcgctgtgtgcctaatacatgcatgttgaacgggatgtagcaatacattcagtagcgaatgggtgagtaacacgtacctaacctacctttaagactgggataactattggaaacaatagctaataccggatatagttatttatcgcatgatgagtaatagaaaggagcttcacagcttcacttaaaaatgggggtgcggaacattagttagttggtagggtaatggcctaccaagacgatgatgtttagccgngccgagaggctgtacggcctacactagtg

SEQ ID NO: 8654 - DNA, 359 bp, Homo Sapiens
gtttcatctgctatattatgccatattatgcttgcgttctctctgaaaggacaaaactctcacatgaaacaatgaagacactcaatgtggtgttcactattaggttgaaccacatgcaggtgccatttttgtaggtcagtgtggtcaattatcagcagtgtcccatgggtcagcctaatacagcagcagccggggttcggacagggaaacctctctgcgcaggaatggtcagtagaggtttcatggcggagctgggcatggagcagggccttgaaggctctgtagactctggatggatagaaatgaggtgggagaggctgggtgtggctgcgcatgcctgtggttaatacggcgtccga

SEQ ID NO: 8655 - DNA, 409 bp, Homo Sapiens
ttctagtccagagtgacaggcacagaccacgcccactcccttacaccctgactgagctgctttcacaccatacggcccgcgaagggaggatgcatggcctgcaaagcctgaaatatttacagagaaggagtgctcacccctgccctaggggcaaagcccaaagtgtacccttgacgcaagacagaaaaagctactaaaggcgatgttgtaataatagcatcgacatcattacattattgattatatcaatgactgcttactctgtccataccctgtgcgaaggactctgcacctaccaactaattggatcctcacaatcttaaaactatccttgctcaactgatagggaaactgaggcacgggacggtaaggccacttgccccctgtttcacagctaggacatcactgg

SEQ ID NO: 8656 - DNA, 345 bp, Homo Sapiens
cgactcgcacccactctagtccaggaaactgggttgatatttaaacaaggacgacttcagtgaggtaattcatgttatgtctgttgacacagtcatttgaactgggaaaaatcagttactgggaggagtggcccttttcataaggagaggttttcctgtagttgattaacttaaatgttggggcagtaggtgataggttaaaatggggagagttaaaaagtaaacctctctctcaaatcatttttaagcatttgagattgtatgtctttttcttcgtcctgaaaaggtttaagtatgaagagacaaaaaaaggaaatttgtattagaaactaggaggcttatgac

SEQ ID NO: 8657 - DNA, 570 bp, Homo Sapiens
  misc_feature (542)..(542): n is a, c, g, or t
agaccagaacgataacggtcctaaggtagcgaaattccttgtcaactaattattgacctgcacgaaaggcgcaatgatctccctactgtctcaacattggactcggtgaaattatggtaccagtgaaaacgctggttacccgcatcaagacgaaaagaccccgtggagctttactataacttcgtattgaaaattggtttagcatgtgtaggataggtgggagactttgaagctgggacgctagttctagtggagtcaaccttgaaataccacccttgctaaattgattttctaacccgttccccttatctgggaaggagacagtgcgtggtgggtagtttgactggcgcggccgcctcctaaagagtaacggaggcgttcaaagctacactcaatatggtcagaaaccataagcagagcacaaaggtaaaagtgtggctgactgcaagacttacaagtcgagcaggtgcgaaagcaggacttagtgatccggcggtacattgtggaatggccgtcgctcaacggataaaagctaccccgangataacaggctaatcttccccaagagat

SEQ ID NO: 8658 - DNA, 379 bp, Homo Sapiens
gaactcctggactcaagcgatcctccagtctgggcgacagagggagactcgatctcagaacgatcaaacaaacaaaaaaggcatgtgctcggaacagtctgactctgggaatgaagttgagctgatttaatcatggcattggaaaatcaaggagtaactagaataagatgaaaattattcattaggctaactctcagaagactagaagtgaaaaactgaaaattaaaggaatgaggttaaggctatcaaattggaggaagtgagggattttcttagaaatatgattgatatagcatattacatcaggcttttctgtagaaattaacagccaattcaatactttatgtggataagcacatgactagagtggccgggtcgc

SEQ ID NO: 8659 - DNA, 1031 bp, Homo Sapiens
cggtccggaattcccgggatgtccctcggtcttgggttcccggagaggtgagtctggctgcagtgtgggtgcggggcgccgggctgttcggggtaccggtgtcgcagtcgccagtccgagctcacacctgggcgtggatgttcagctgcgcatctgggttgcggcagcttcgccaggcctggggctggctgggccgctggggccgccctggaggcctggagccactgggcctgcggcgcctctggcagctgagcagccgctttgctcgcgtgcaggaggctgttcgctacctcacacccccggctggcgctgtggcctcgcttagctctaccgtttagcacccggctgacatgcacccggtcggtttccgccaggatgcgggagagttggggcaagctacctgcgacagcttgaacttttcctagggattccgctccacccgccggttagagcgtattgctcattaaatccgagacctgtgtgcttgctactgaaataaaagaagtataaagtccccagagtccttttaggacgttatgacttttctcctttgcaagactgcaaaaaactgacaagaagacaaaactcttacccactcccagggaccgcgttgtcttgagtatggctagtaaaggctagcaagtgaggctttgtctctgcatcccgttccccctaacatcctcagagaaccttcgtttctagaatctttctagtattcagagacttctccagggtcatgatcccaaaggcttaacccgtttacaaggaggagagttgtctcctgacggcccaaacatggcagctaaaatggagataactttaagcttccaacactgaagcttcctcccagcaagagagaccctaatagccaaactagaagaaaaacggggccctcctctgcaaaaaactgccccgatcctgagctctgccccaaagcttcaaaacctttttgttattcaaaagggtcttgacccccagagagggttctccaagttccaaaatttttgccgaagggggttgcaacccgaact

SEQ ID NO: 8660 - DNA, 915 bp, Homo Sapiens
ggggatgtcattatcttaggggattttggccaagggccagacagcaatgactatgatatcctgaggaaagaaaagttccaccacctgatccccgcgcacaccttcaccaacatcagcaccaagaaccctcaaggctcgaagtctctggacaacatctggatcagtaaaagcttaaagaaggttttcacaggtcactgggctgtggtgagagaaggcctcacgaacccttggattccggataactggtcttggggcggggtggcttctgaacactgcccagtgctagccgagttctacactgaaaaggactggagcaagaaggacgcccctcggaacggcagcggggtggccttggagcgaagtgaagccaacatcaagcacgagcgatgatgacaccaaatccatgtgtccaccccgggacccaggagggcacagccaaggaatgagccctgtggggtgacgcttcagggcagagctgccttttaatttttattctcagagcatcagcacttgaggccttgccccacgccttctctgtggaccattcaggacctccagtgggggtggcgtgccaggcgcgtaccccaccaggtgggcaaagcagaaacctgcggggagcggagacgccttttatctctggatgccacagacctgagcagcattgggctggctgtccgctgctgactggatggcagcacaaagacaatatgagcagagggaggagaagaaggggtgctcaggctgcgggccacagtccagcagcgccagaagcactcatttctgaccaccaggctatgacgttcctgctgcgcattacagaaagcttttaactgtgatcaggcactctgctcagatacattgagtggcgatttttagttttgttttgaaaaaataaacagattaacctgcaaaaaa

SEQ ID NO: 8661 - DNA, 843 bp, Homo Sapiens
gggcgggcagccgcgggccgagcgcagccgcctccgccaccgatgcgcctggtggccagactccaagtgggaccggcggacacgcagcctcgcgtgtcaggggaagctgatggagaatcgagctctggatccagggactcgggactcctatggtgccaccagccacctccccaacaagggggccctggcgaaggtcaagaacaacttcaaagacttgatgtccaaactgacggagggccagtatgtgctgtgccggtggacagatggcctgtactacctcgggaagatcaagagggtcagcagctctaagcaaagctgcctcgtgactttcgaagataattccaaatactgggtcctatggaaggacatacagcatgccggtgttccaggagaggagcccaagtgcaacatctgcctagggaagacatcagggccgctgaatgagatcctcatctgcgggaagtgtggcctgggttaccaccagcagtgccacatccccatagcgggcagtgctgaccagcccctgctcacaccttggttctgccgacgctgcatcttcgcactggctgtgcgggtgagccttccatcctccccagtccctgcctctcctgcctcctccagtggggcagaccagagactcccatcacagagcctgagctccaagcagaagggccacacctgggctttggagacagatagcgcctctgccactgtccttggccaggatttgtagactccctgagcctcagtttcctcaactgtaaagtggagatgggtttggtgtcgggaataacgggaccaataaatgatgctttactattaaaaaagaaaatccatgtaaaa

SEQ ID NO: 8662 - DNA, 1058 bp, Homo Sapiens
ggggggcgcacctcggggcccgcgggccgagtgtcgctaggacgttttccgcaggcctagcaggcggaccccgcggctcggagcaagcggtgcaggtgtggaccgcacaacggggtgcacaggattagttaagcaaagcaggaacccagctggaaaattaaacgagccctggatctgcaaagcaggtcccttcgcgagaccaaagccgtgatcccaaccttagcaacataattctactggaggtgttgatatatatactaatccagaacaaccatgtagcaagaggaataaaatgaagttcagaagtctgtttcgggaaattttgaagccctttagaaagaaaaatttctacattttgttacatgaaattcatgcaaatatatgtcacgtgccaatgctatggagttgttgaaaaataagcacaatacccatttattaccaccttctcaatctgtaaaagaggctgtaaactctgggttgtcgaaaataaaaataaaatggaaaaccctcattccctaatcaccccccaatattcacccccccataccatcattggccgcggtccgcgcttcgggtcccctctagaggaaaattttttcttaacaccccattttctcaattctgtaggcgccgccggccccccccacatttaaggtcacacacccgaaaccatggcacaccacataaacccgcggtttccgcttacgcccggaaatctcctgcgggtctactggacctttagaccggccttgggcaaatctctcccccccatatatacacaaacagccgcccacggggcgggtagacaacaagaagaccagatctaccacggaaacaaaactatcctccgccagaggggaagttcttcgtggaaggctcacctatttttctgggcaaccccatatctcaaaaacgtgggaggcgtcacgaaatcgcgaaagcctcatgtatttataacacaaacttgttgcgcgccccccaccacgcgggagggcagctctatatggggaaaggggacattagggtgtgggaaaacccactcccaccaaaccgcatct

SEQ ID NO: 8663 - DNA, 990 bp, Homo Sapiens
  misc_feature (506)..(519): n is a, c, g, or t
gtcctgggccttgactcccccaccctgcaggcctggcctgaatctggcttcttagacacagcccagtccttcctgcctgggctgggaataagcctctcacaggttctggtggacagatctgttccccaggtcactccagtggtctccaggcttccagagaaggctggttgcctcaagctcttctctgcctcataaacggatccagagaaggctggttgccttaagctcttccctgcctcgtgttcctgaaaaacggattaatagccctttatccccctgcaccctcctgcaggggatggcactttgagccctctggagccctccccttgctgagccttactctcttcagactttctgaatgtacaatgccgttggttgggatttggggactggaagggaccaaggacactgaccccaagctgtcctgcctagcgtccagcgtcttctaggagggtggggtctgcctgtcctggtgtggttggtttggccctgtttgctgtgactannnnnnnnnnnnnngaaccgagggacggctgcctttgtctctgcctcagatgccacctgccccgcccatgctccccatcagcagcatccagactttcaggaagggcagggccagccagtccagaaccgcatccctcagcagggactgataagccatctctcggagggccccctaatacccagtggagtctggttcacaccctggggggtgtgtcactgtgatgggacacgtaggagtccacccttaaaaccagcaccctgtccctcgaggctgccgagtgggtgtgtggactcgggggccttcccacaaaactacgtccggctctgggcccgagacagccgcaggccccagccactgaatgatactggcagcggctggggttttatgaactcctttctggtattttttcccctctatgtacaaatgtatatgttacgtctcaatttttgtgcttaagtaaaaataaaaacattttcagacaaaaa

SEQ ID NO: 8664 - DNA, 843 bp, Homo Sapiens
  misc_feature (729)..(729): n is a, c, g, or t
  misc_feature (734)..(734): n is a, c, g, or t
  misc_feature (758)..(758): n is a, c, g, or t
gggggggcaggaagggaggcggccgccgtgccattcttaaaggcgcccgagtgaaggcgacaggccgctgacggccggaaggaaaatgagtgagtctttggttgtttgtgatgttgccgaagatttagtggaaaagctgagaaagtttcgttttcgcaaagaaacgaacaacgctgctattataatgaagattgacaaggataaacgcctggtggtactggatgaggagcttgagggcatttcaccagatgaacttaaagatgaactacctgaacgacaacctcgcttcattgtgtatagttataaatatcaacatgatgatggaagagtttcatatcctctgtgctttattttctccagtcctgttggatgtaagcctgaacaacagatgatgtatgctggaagtaagaataagctagtccagacagctgaactaaccaaggtatttgaaataagaaataccgaagacctaactgaagaatggttacgtgagaaacttggattttttcactaatgtgaacttctgtgtttctaaagtatttatgtattaacctgaccatactggaatcagacataaatacttatttatgcctaaaaatgcactgttacttacagtttgtttcctgcagtaaagaaaaattcttcatttgtgcaaaatttgaacaaagaagaaatcatcttcatagtaatggaaactttgtaaagtgtttccctaatattggtaaatgnttagntgggactactttttcttccaaggnactttttttgcactccttgtggacttaatttcctcataaccttaatggggtccgggaaattttgtttacttattttaacaggacc

SEQ ID NO: 8665 - DNA, 432 bp, Homo Sapiens
  misc_feature (115)..(115): n is a, c, g, or t
gaggatcttcatggtacaactccagcctatctgagcactctcactgtgcatctgaaaggaacaggagactgcaggaaagacagtgcctggattaacttaaaggaactaaaaattnggaatttttactcttgatatccttccaaatcaactctctcaatgttcccatcctcaaaactatcatatggggtaactgaggcagtcagaaatttactgactcaatgtcactcaattgattctgagttcacggctgattacatccgaccaaactgctttttctgaagtctactccgtttaatcatgctggcgatgattttgtgcggctctaggacaaactccacctggctgaagataaagcaaatctgcggtgacttagtcctcctgtcatttcccatcagttccccactctcctcctctgcccctccacagtctccc

SEQ ID NO: 8666 - DNA, 851 bp, Homo Sapiens
gggggagttgagtgatattgaccatgatggaatgcttgacagagatgagtttgcagttgccatgtttttggtatactgtgcactggagaaagaacctgtgccaatgtccttgcctccagccttggtgccaccatctaagagaaaaacgtgggttgtatcccctgcagaaaaagctaaatatgatgaaatcttcctgaaaactgataaagatatggacggatttgtgtctggattggaggtccgtgaaatattcttgtaaaacaggtttaccttctaccttactagcccatatatggtcattatgcgacacaaaggactgtgggaagctttcaaaggatcagtttgccttggcttttcacttaatcagtcagaagttaatcaagggcattgatcctcctcacgttcttactcctgaaatgattccaccatcagacagggccagtttacaaaagaacatcataggatcaagtcctgttgcagatttctctgctattaaggaactagatactcttaacaatgaaatagttgacctacagagggaaaagaataatgtggaacaggaccttaaggagaaggaagatactattaaacagaggacaagtgaggttcaggatcttcaagatgaagttcaaagggagaatactaatctgcaaaaactacaggcccagaaacagcaggtacaggaacttccttgatgaactggatgaaacaaaaaagccccacttggaaggagcgacctccagggaaggtccaaaagaaaaatggggtctgaaggaaggcccccaccggaatctcccttcccccgtgaaagctgtgaaattaacctctattccccggacaattcccccaac

SEQ ID NO: 8667 - DNA, 849 bp, Homo Sapiens
gtgttgctgtgggtgtggtgctgggtgtggggaacgctgcggatgctgcggtaaaccatgcggtcgatggggaggatgtggagatggctgtgggtgcatctgggggtgagacagtgagacctgtgcaaccgaattactgcctgtggtgttgaggccactgccatgactgttggacaggctgctttggttgctgtgtgggtgagtgctcactgtactgctgggagagtgctgaaaggtacatgaagtgtgggactgctgggaagattcagaagggatgttcatcaaaccttgttgactaagtgactgctcaaaaactgacttatagaaggctccgaaatgaggcactaagatcttcaaattatattctgagaaaagtaggtgcttgtctctttctggaaggttgtactgtggttgctgctgaggagttaatgattgagagactgattctggatggcttgtcaccggtgtataactatgcacacttccaacactgttcaaattaacagatgccaaactctggtctgagagactgttgttaaggctactgcgtgggctatcactaccatcctgatcagtgttatacaatgttacccgttctacagatcgtgccctcttctttggccgagtaggcagcgcatcttccttcggaattggtgtctattgcccagtaggacccctttccagggtcatccttagatcgaggcactttaaggaaacatttgttcaatgacagattatgtcgtatggaattcattaatgaagtaacagatggacaagcctgtccatacaaacccatctggccacaaagagaatctcaggctgcgcaggccggagtacaactgccggtgg

SEQ ID NO: 8668 - DNA, 572 bp, Homo Sapiens
  misc_feature (488)..(497): n is a, c, g, or t
ggaagttgggattttcctggactatgaggctggcatggtctccttctacaacatcactgaccatggctccctcatctactccttctctgaatgtgcctttacaggacctctgcggcccttcttcagtcctggtttcaatgatggaggaaaaaaacacagcccctctaaccctctgtccactgaatattggatcacaaggatccactgactattgatggctttctctggacactgccactctccccattggcaccgcttctcagccacaaaccctgcctcttttccccatgaactctgaaccacctttgtctctgcagaggcatccggatcccagcaagcgagctttagcagggaagtcacttcaccatcaacattcctgccccagatggctttgtgattccctccagtgaagcagcctccttatatttggcccaaactcatcttgatcaaccaaaaacatgtttctgccttctttatgggacttaagnnnnnnnnnnctcctctccatctctaagatgtcgtctttggggagatctctattatatcctggatgggttgcaaaagggctttct

SEQ ID NO: 8669 - DNA, 587 bp, Homo Sapiens
aaatggagagaaatgtagggaatcaaaacaactagttttttcctttataacggaagttttataattcatcttttatgtaagtgtaattctcattaaaaataccctaaagcttaaagttagcaaggctgcccagcctaacccacaacagtttgatgctgccccctagcgtttgattcccttcaccttttgctaaaataaggtaatgtttaaattacaattagatttacttactgctgtaaatctggtctattttagtttcctctgggtagttagtgttgctaataagatggacgtaagtgtttttgaactggtgaattctgattgcttttagcccccagttttccaaataggggtgaattctgggtagagatagaacaatcaccaagttaccttgctccaaaaaagaaatttacgtatgggattgttttcaaagcgggaagttagctgtgtaaataacaacaattttatatatttaatctgggcttctccttatcttgaatgatataaaaatctactttctagattaatttagttccatataactttgtattgcaatgactgtactgataataaagtttgaaagtgtt

SEQ ID NO: 8670 - DNA, 1208 bp, Homo Sapiens
cccaacacgccccacgaaactatacggctaggtagcgaggcctgggtggcgaattcggcacgaggtagaaacagaaaagacccctaaggactgggtgcgtcagcaccgtaaagaggagaaaatgaagagccataagttagaagaagaatttgagtggctaaagaaatctgaattcttgtactacactgtagagaagaaggggaatataagttcccagcttaaacactataacccttggagcatgaaatggtcaccagcaacagttacagagaatgaaggagaatgcaaagctatcggaaccagtacaaatttatcttactggaaaacctgacttcccgctatgaggtgccttgtgtccttgacctcaagatgggcacacgacaacatggtgatgatgcttcagaggagaaggcagccaaccagatccgaaaatgtcagcagagcacatctgcagtcattggtgtgcgtgtgtgtggcatgcaggtgtaccaagcaggcagtgggcagctcatgttcatgaacaagtaccatggacggaagctatcggtgcagggcttcaaggaggcacttttccagttcttccacaatgggcggtacctgcgccgtgaactcctgggccctgtgctcaagaagctgactgagctcaaggcagtgttggagcgacaggagtcctaccgcttctactcaagctccctgctggtcatttatgatggcaaggagcggcccgaagtggtcctggactcagatgctgaggatttggaggacctgtcagaggaatcagctgatgagtctgctggatgcctatgcctacaaacccatcggcgccagctctgtagatgtgcgcatgatcgactttgcacacaccacctgcaggctgtatggcgaggacaccgtggtgcatgagggccaggatgctggctatatcttcgggctccagagcctgatagacattgtcacagagataagtgaggagagtggggagtgagcttgctagctgctccagtacttgagagcgactctgtgtcccagagcacagctgtgctgcgtcagggaggaagccagtatggccaggtggtggctcctgcagcctggagctgatgtgcagtggcctctgtgagccccagcctgagccagtcccagctgtgcttggagtctttatttattttaactatttcttcaacattccacatttgatgatgatacctctt

SEQ ID NO: 8671 - DNA, 304 bp, Homo Sapiens
cgatccccctgtgcgcaaacgcgaaaggaagtgtatacagtgccctatagcagaaagatccggggacgggaccagcctccgagcgacttcaaacccaaaagcaagcaacttccagactctaaccgggacgtctcaatttgctctgggtgaagggaagacaggcgagaatttccaggtccgtggggatcccacgtcccaggggcagaagcgccggggacctgggaatgtgcagacttaatccaaggcagagcgaaactcacgcgccgtggtaggaccatcactccacgcgatccgttctgtcgtt

SEQ ID NO: 8672 - DNA, 279 bp, Homo Sapiens
gttgcacccggccattctagtccagggggagagtaatgaagcccttggctgtggctgacccgtgaagtggaaaggaagtagtatcttcagaaggtatttggagtcatgaataagagaggacacaattaaaggtgactgtaagtcttctagcccaaattgactagaggatctgttaagccaactgaggaacttaatcagaggtagcagaggatccgcatacttattcacttctcaacctcaatatctatatcccgattgtgcctgctgtgcggtgaagtc

SEQ ID NO: 8673 - DNA, 348 bp, Homo Sapiens
catgtgcgcagacgcgggacgtctacgtcggcaagcccagcactggacaggcccatccaggccatggagcgggtcagcgagaacaaggtgcgtcctgtccacttctggtttgccacgggcggcgctggcttctgcatcagccgtgggctggctctgaagatgagcccgtgggccagcgggggtcacttcatgaatacggctgagcggatccggctgcctgatgactgcaccatcggctacatcgtggaggccctgctgggtgtgcccctcatccgcagcggcctcttccactcccacctggagaacctgcagcaggtgcccacctcggagctccacgagcaggtgacg

SEQ ID NO: 8674 - DNA, 415 bp, Homo Sapiens
  misc_feature (17)..(17): n is a, c, g, or t
  misc_feature (43)..(43): n is a, c, g, or t
gcctctttagcctcagnccaaagctggcttagctgatcaaatntatgagcagcctttatgactagagtggccggccactctagtcacaagcagcaatgtcttctaacttgtctccctatctctacttttgccacggctcccaacagacctttctcccccctcacacagcatgctgagttagctttttctaatcagatcacgtccctcttttgcttaaagttcttcatggctgcctgcccagtgcaattaggcacaacatgatctggcccctggctatctctctggccttactgtcatattactttcccttgtttactctcctccagtaattcaggccccactagtctgtaaacactgccaaccttgttcttacctcagggcctttgcaatagcgtagtccgactggtctagagat

SEQ ID NO: 8675 - DNA, 272 bp, Homo Sapiens
cagctgcgggccagtttgcaacgcgtatcagacatgtagaaactcaacagatggaaaagtacctgatataaaagacatctttaggagtacccgtagtaactcagtggttaacgaatccgactaggaaccatgaggttaagggttcgatccctggccttgctcagtgggttaaggatccagcgttgccgtgagctgtggtgtgggtcacagacgcagctcggatcccgcgtttactcaactgcgcgtttgcgcacatggggatctctctagag

SEQ ID NO: 8676 - DNA, 237 bp, Homo Sapiens
tcgagctcgcacccggccattctagtccacagagagggcaaaaggataaagactgaagagttgttcattgaatgtgaccaggaggtcgttggtggccttaatgagagcaatctcagtggactgatggggacaaaaactaaaatgattgagagaatcatgaaaatggatatagcaagtataggtaactctagaagcttagttatgaagggaagagaaatcgagtgatgactagagtgg

SEQ ID NO: 8677 - DNA, 430 bp, Homo Sapiens
ctactcaagaatacgagtctgaagatgaccaagacttgagtaatacaactgagagtgaggagtcaaggcagaagcaacatgtccccagggaagggcagtgagatggatgggcgtgagtcagctttaccaaaactcaagtacctaggacaggacaactcgctagcagctcagtcacctccgtggcggacacagataaggatgttaagaccagaaaaccagagactagggccccgtcctcagccctcacagcatgacacagatgcctccctcggagagcagggtctctcggcatccagcggcgtggtctgcattctgctctacctcatgctctaggccccatgccatcgtctcggccctagaccgtgaaaactgccagtcacccgggcactgctcctaggggctggcctgcacagccggatggcctgtgggc

SEQ ID NO: 8678 - DNA, 712 bp, Homo Sapiens
gtgctcggagcctcggcggaccttgctgcctctgtctctttaacgcgagaggaagcgatgcagaggggtggaaaatggcagagctgcagatgttactagaggaggagatcccgtctggcaagagggcgctgatcgagagttaccagaacctgactcgggtggcagactactgtgaaaacaactacatacaggctacagacaagagaaaagctttagaggagaccaaagcctatacaacccaatctctagctagtgttgcttatcaaataaatgcattggccaacaatgtactccagttgctggatatccaagcctctcagcttcggagaatggagtcttccatcaatcatatctcacagactgtggatattcataaggagaaagtggcacgaagagagattggtattttgacaacaaataagaatacatcaagaactcacaaaataatagcacctgcgaatatggagcgccctgtaaggtatattcggaaacctatcgattacacagttctggatgatgtgggccatggtgtcaagcatggaaataaccagcctgcaagaactggcacactgtcgagaacaaatcctcctactcagaaaccgccaagtcctccacatgtcaggccggggaacactgggacggaatactccttataaaaccctggaacctgttaaaaccccaacagttcctaatgactatatgaccagtcctg

SEQ ID NO: 8679 - DNA, 299 bp, Homo Sapiens
cgccgatgggtactaccacagatgtgagctgaagatagcagtattaagtacctaataacccaagagtgaggcagtcaagtctaggtagcatgaagtaatcaaaaatcagtgtatcacagggtcctagtaggtaggtgtggggaaggagttctatcaagctgttaggagtttaggggtcagtgcatctaagaaacaggaagaggttgaaggtctgagaaactgttccgggtcagaggctagatgtgggtatgtctgggagtgtgtgtcattcccccactttccccctgatatgctctcca

SEQ ID NO: 8680 - DNA, 384 bp, Homo Sapiens
ttagcacataaggagagcatttcctggaatatcttctgcagccccaggttcatctcgagccgctgtctccgggccctgagcaggtccagtaggtattcccagagccggatgacattgtccttcctcgctgtgatgcgcttgatgtcgtggtaattatcggcctcgagctaactggccacggctaccacagcctgcacacgctcctcgtatgcggcaatgtctgtctcaatggcctcgtgcttttttgtggcggactcaactgcaggaaggtcaaacccaaagttgtcctgagacaccagacgctgcttttcgctcagccaagtctccctcatagctgcattgcgatcaaatctgcgggcgagctgttccagtttctcctgtcta

SEQ ID NO: 8681 - DNA, 433 bp, Homo Sapiens
caagagaatccaccagatgtcgcaaacgcggatcatgaaaatagatgctgtgatagataataattctccgattagattgatggatgggggtagggctaggtttgtgaggcttgctactagtcatcatgttgctatgagtggtaggagtgtttgcagtcctcgggccaggattatggttcggctgtgtactcgttcatagttagtgttggctaggcagaatagtatggaggatgttagtccgtgggcaattatgagagctgtggcccctatgaagcttcagggggtttgaattatgattgctacgattacaagtgctatatgacttactgatgaataggcgattaaggattttaggtcggtttgacgtaagcagatagagctggttatgattatgcctcatatggaagcctgaggaatggatgctaaagcgtca

SEQ ID NO: 8682 - DNA, 350 bp, Homo Sapiens
  misc_feature (28)..(28): n is a, c, g, or t
ggaggggctgtgagctgagtggatatcncagagatcaccagtaatgggagatgttagagttctagctaagcagagtagaaaaacacgaggtgctatcctcgtgttgagaacttctggcatccagttgagaacccagaaaagccagccacaggaacagcactaccctagacccattgtaacaaagcctaaaaacccaagccttgaccagtcaagctgacctgcaagtaacctgcctaccatagcagaactcaacactctttcacggaagacaacaaaatccagtctttgaacaacagcatgcacagttgctcagcaactgttgagataatatactcgccaatgtctagaag

SEQ ID NO: 8683 - DNA, 619 bp, Homo Sapiens
cccgccattctagtccactagagacctgtgtctattgtagatcgatgacattcaacagtcctgcagtgctggcatcattttgataaaaaggggtgaaagcaagtgggactgtgggcagatttttaatgcttagaacaattattccatcgaagttttcttgtgtcccttctgccttagcctttgtaggatagcatgcttgctaatttcttgctcatggggtaaggaaatgaagatttttgctaggtccgtaggattattaggactactcaggcctgaagctatgcctggatatagccagaaaactctcccatagcttgctccaaggagctgagatacagcagtacttccttgtaggtcatgattctgggtaacctggaagatgacctcattcatatcctgtattctatgtgagacgttaagaaggtagaggtggccaagaaggaaattgttgctgcctttatggaacaaattatctgaaacccagctttctcgagggcttcattgaagtactcaactggggcacttaacccagtctaaggctggtcaaggaaggcttgctggggcaagtgtcttttgtattcacacctaaaggaggttattcaattagaattatccacat

SEQ ID NO: 8684 - DNA, 200 bp, Homo Sapiens
agtaatttaatgactcagggacataattgttataataacagaaggtaatatatcttcaagaagttcaagtcagagtgctgatggtctaaagactttcccctatgatttgacactagcctgaagactgtcttctacttttgaagataaacgtttgagggaaagtagcttagtacaaaccgaatgagccccatgggctttct

SEQ ID NO: 8685 - DNA, 898 bp, Homo Sapiens
ccgaacgcccgcagcagggtcagaagggaggtggtcgccctccgtcgtggtctggcgtgtattccgagcgttggtgtctggcggtttccgagcgttggtgtctggcggtttccgaccgttggtgtctggcggtttccgaccgttggtgtctggcacgcgccaccctctcttgctttggttgcgccatgccgatgtaccagacaagaagacaagaaaatgatttgaggacagcttcaatcgcggtgtgaagaagaaagcagcaaaacgaccactgaaaacaacgccggtggcaaaatatccaaagaaagggtcccaagcggtacatcgtcatagccggaaacagtcagagccaccagccaatgatattttcaatgctgcgaaagctgccaaaagtgacatgcagggatgtccttcctgagatccgtgctatctgcattgaggaaattgggtgttggatgcaaagctacagcacgtctttcctcaccgacagctatttaaaatatattggttggactctgcatgataagcaccgagaagtccgcgtgaagtgcgtgaaggctctgaaagggctgtacggtaacccgggacctgaccgcacgcctggagctcttcacctggcccgcttcaaggactggatggtttcccatgatcggcggacagagagtacagtgtggccaatggaaggcccgtcacattacctgatactttatcccttaaacgtttttcctacccctgaggtgggaagaataacaaaccatgggggtgggaaagaagaacaaaccgcccggagccccacggcgcccccaggaggaacttttcctttccagccttttctgactggtcccttcctcttggggggggagcccacggctgtcctctacccccggcaaggagagct

SEQ ID NO: 8686 - DNA, 801 bp, Homo Sapiens
  misc_feature (735)..(752): n is a, c, g, or t
ggaatgtgaagagctctcggctgtgcaagtggtaccgtcggggcctgggccgcgaaggatcttctgccacagctgcaacatgggcggcaagaacaagaaacacaaggctccagcggccgcggtggtccgggccgccgtgtctgcttccagagccaaatctgccgaggctggaattgccggggaggcccaaagcaagaagccagtgtccaggccggccaccgctgccgctgccgctgccggctccagggagccccgtgtcaagcaaggtccaaaaatttatagttttaattctacaaatgattctagtggtcctgcaaatctggataaatctattttgaaagtggtaattaataacaaactagagcaaagaattattggagtgatcaatgagcataaaaagcaaaataatgacaaaggaatgatttctggaagacttactgccaaaaaattgcaggatttatacatggctttacaagcattttcatttaagacaaaggacattgaagatgccatgaccaatacactcttatatggaggtgaccttcattctgccttggattggctctgtttaaacctttcagatgatgcacttcctgaaggattcagtcaggaatttgaagagcagcaacctaaaagtaggcctaaatttcaggtctcctcaaatacaagccactatttcacctccattgcaacctaaaacaaaaacatatgaagaaggaccccaagagtaagccnnnnnnnnnnnnnnnnnntatggaagtaaatatgaaaagagtggattttacgatatgctgaaccacc

SEQ ID NO: 8687 - DNA, 915 bp, Homo Sapiens
  misc_feature (732)..(787): n is a, c, g, or t
tggaggtgttgccgcccaacctataaaagggactttttttgcaaaggcctttcccccactattggggtgggagaaaaaggatgaaagtctctccccgaatttaggggatttttaaccaggaaaaggtaattcccaggggcccgggggaatcccgttcttttaattttatccaagttcccttttggaaccaccctgctggatggaggaaattaaggttctaccaaaaattccttaagccaatatgcttgttacgggcccagtaaattagagtctggggtactgttccagccagaatgtccaaaaactttaaaggagtccatcctgaattccttcagtaatgggagtcatgccactagagagatgggcacttaccaaaggaaaaaaatggagaaatttgttcagctcgtattttgggggccaggaattgaagaagttgaactgctgctaatcgtacattagcatctttatctgtaaacacagcagtcacttcacttaatatgtttgaaaggtgtgcatcaattataaatgggtattgagacaaaaggtctttaagtccaagaagagcactttgtttaaccccagcattgtagtgatgcatctgtgacagcaaatcctttatgttaagttttctattgtttgttggaagtgttccatcctctttgagttgctcaggcagatgtatagtctttgttttaaagtttgtaggagtagcattttgtaacttgggcttcnnnnnnnnnnnnnnnnnnnnnnnnnnnnnnnnnnnnnnnnnnnnnnnnnnnnnnnnagtcattctcgactactgaggacccggccgcggccggggcgagaagcccgagaagacaagcgagggagcagaagcccacggggcaacagcgtgcgccgccgacctcaggctctagctcccggagcccc

SEQ ID NO: 8688 - DNA, 846 bp, Homo Sapiens
aaattattcacaaaaagcagctggaaatcagaaaggcagctgccgctccagggtctcaaatccattaaaaccaccacagaacaattaaaacaatcagagagagaaaaggaaaaggaaacaacgtccaacatttggcatttggttttatccacaggttttcccagagctcctcttggaattgaaagcaaaatatattggcaaacactgcttctcaatacacaggaaggggagcctcagtgcctcctgccaacagaggcggctctgtgcagtcagactgtggggtgcacagcagtctctcaggctggggtttctggcctctttccatccaatcaccccttccaggaaattcagcagcctaccagacactgggcctctgcctggctgccctttcccccaggcagagcggccttgggcataataccaggcaacctgccagccccaaagcagaaaccctgctgggatcccttccttcatcaaccttggtgtggaggatgctcaatagcgcttccacctccccctccccagcccctagctacatctctccacccttccctggacagtcctacttcccagctcacccacccaccagcagcttaagtctgggtgggatctatcatcagctcctccccctgtaacctcttccctccacagatccaccctgtgctcctctcctcacctctccccctccactcacattcttactcaagtctccaagaccctgaggctggatggtgccacaagagaggagggtcagtttccctcagggaaccaaaaaactggcttgcttggcacccagggacagtagctgtttggctctccacccaattaaaaaaacaaatccctgcc

SEQ ID NO: 8689 - DNA, 897 bp, Homo Sapiens
  misc_feature (96)..(134): n is a, c, g, or t
ggggccccgctccccagcgccccggaagtgatctgtggcggctgctgcagagccgccaggaggagggtggatctccccagagcaaagcgtcggagnnnnnnnnnnnnnnnnnnnnnnnnnnnnnnnnnnnnnnnagccgcccaggctcccccggccacccgtcagactcctccttcgaccgctcccggcgcggggccttccaggcgacaaggaccgagtaccctccggccggagccacgcagccgcggcttccggagccctcggggcggcggactggctcgcggtgcagattcttcttaatcctttggtgaaaactgacacacaaaatggctgcaaataagcccaagggtcagaattctttggctttacacaaagtcatcatggtgggcagtggtggcgtgggcaagtcagctctgactctacagttcatgtacgatgagtttgtggaggactatgagcctaccaaagcagacagctatcggaagaaggtagtgctagatggggaggaagtccagatcgatatcttagatacagctgggcaggaggactacgctgcaattagagacaactacttccgaagtggggaggggttcctctgtgttttctctattacagaaatggaatcctttgcagctacagctgacttcagggagcagattttaagagtaaaagaagatgagaatgttccatttctactggttggtaacaaatcagatttagaagataaaagacaggtttctgtagaagaggcaaaaaacagagctgagcagtggaatgttaactacgtggaaacatctgctaaaacacgagctaatgttgacaaggtattttttgatttaatgagagaaattcgagcgagaaagatggaagacagcaaagaaaagaatggaacaaaga

SEQ ID NO: 8690 - DNA, 223 bp, Homo Sapiens
agcggctggagaacttggttctgaaatcatcccgcagccagtggcgttgtcgatctgcaccacaagcctggcattctcagacttggtacacaggatcttctgctggagctcctcaatggtcttaaaataggactggtaactggggcacagcaagggctcctgctgctgagaccgctcccggatgaggttctccagctccgcgttgccaagccccagactgcgg

SEQ ID NO: 8691 - DNA, 1371 bp, Homo Sapiens
  misc_feature (99)..(99): n is a, c, g, or t
  misc_feature (101)..(103): n is a, c, g, or t
  misc_feature (107)..(107): n is a, c, g, or t
  misc_feature (109)..(110): n is a, c, g, or t
  misc_feature (112)..(113): n is a, c, g, or t
  misc_feature (115)..(115): n is a, c, g, or t
  misc_feature (117)..(410): n is a, c, g, or t
gggacccatgttccaccttacctacgtgggccccgcgcgcccaaaacgaatgggtctagaaaagctctcggagggcccgagggcggccgaacatgtttntnnntttntnntnntntnnnnnnnnnnnnnnnnnnnnnnnnnnnnnnnnnnnnnnnnnnnnnnnnnnnnnnnnnnnnnnnnnnnnnnnnnnnnnnnnnnnnnnnnnnnnnnnnnnnnnnnnnnnnnnnnnnnnnnnnnnnnnnnnnnnnnnnnnnnnnnnnnnnnnnnnnnnnnnnnnnnnnnnnnnnnnnnnnnnnnnnnnnnnnnnnnnnnnnnnnnnnnnnnnnnnnnnnnnnnnnnnnnnnnnnnnnnnnnnnnnnnnnnnnnnnnnnnnnnnnnnnnnnnnnnnnnnnnnnnnnnnnnnnnnnnnntaaaagtcattttaatttgtaagatatgtttactgttttagagagacagaggctaacttttcattttcaaggactgctgaacaatcatccatgaggtcttgaagttgaataacaggaaactgtaacttgtttttcaaaccatttggctactgtaagaagctgctggtcacaaaacgcacgtccaataaactgcagtcctattggcaacccttggtttgagagtgcaacagggatactcactgctggcaatcctgccatatttacagcttgtgtaaaaatatcatcctgggcacttcgggttctgttgtcctctttgatgaactccaagtatggtactgcctcactcaaggtggtgggagttagcaagacatctactccagagttaaaagcatttacaaagtcattagcaatgaggcgtctcactttctgtgctttgacaaaataattttcatagttttcttttaataagaaaaagtttcctgagagaattcttcctctcaccacatcattaaacccttctcgtctggttgcagcatacatggcttcagtggacacatcaatgtcacatctgtgaccatattgtagcccatcaaatcttgccatattcgatgccacttctgatgtgcacaatacatggtagcagacaattgaataactggtgtgaggaagggatacttcaattactttggccccctcagactcaaagaggtcagcagctttggaccaaagagactgtacttcacttgataattccggtacaagatattcctttggaattcctatacatagtttgctcacatctgccaactgggaagcatgaatggtttattaataggttcatgcactggccggacctgaccccagggactctaccacagtacatgaacctattaataaaccattcatgtactgtggtagagtcctgggtgcactggccgtaccgaccgcagcctcgtgccgg

SEQ ID NO: 8692 - DNA, 614 bp, Homo Sapiens
tcactagtgtaggccaagccagtattgagctcacgctagaagatgtgaacgataacgcccccgaattctctgccgatccttatgccatcaccgtgtttgaaaacacagagccgggaacgctgctgacaagagtgcaggccacagatgccgacgcaggattaaatcggaagattttatactcactgattgactctgctgatgggcagttctccattaacgaattatctggaattattcagttagaaaaacctttggacagagaactccaggcagtatacaccctctctttgaaagctgtggatcaaggcttgccaaggaggctgactgccactggcactgtgattgtatcagttcttgacataaatgacaacccccctgtgtttgagtaccgtgaatatggtgccaccgtgtctgaggacattcttgttggaactgaagttcttcaagtgtatgcagcaagtcgggatattgaagcaaatgcagaaatcacctactcaataataagtggaaatgaacatgggaaattcagcatagattctaaaacaggggccgtatttatcattgagaatctggattatgagagctctcatgagtattacctaacataaggggta

SEQ ID NO: 8693 - DNA, 707 bp, Homo Sapiens
ctgagagcaagagtggatgaggccatggaactcattattgcacatggacgggaaaatggagctgatagtatcctggatcttggattagtagactcctcagaaaaggtacagcaggaaaaccgaaagcgccatggctctagtcgaagtgtagtagatatggatttagatgatacagatgatggtgatgacaatgcccctttgttttaccaacctgggaaaagaggattttatactccaaggcctggcaagaacacagaagcaaggttgaattgtttcagaaacattggcaggattcttggactatgtctgttacagaatgaactatgtcctatcacattgaatagacatgtaattaaagtattgcttggtagaaaagtcaattggcatgattttgctttttttgatcctgtaatgtatgagagtttgcggcaactaatcctcgcgtctcagagttcagatgctgatgctgttttctcagcaatggatttggccatttgcaattgacctgtgtaaagaagaaggtggaggacaggttgaactcattcctaatggtgtaaatataccagtcactccacagaatgtatatgagtatgtgcggaaatacgcagaacacagaatgttggtagttgcagcaccgcccttacatgcactgaggaaaggtctactagatgtgcttccgaaaaattccctcgaagatttatccggca

SEQ ID NO: 8694 - DNA, 245 bp, Homo Sapiens
ctctagaggatctctgaagtgtggggagggagggtctttgtcagcactccccctgtgcaagaagagcagagacctgcttctttcctctcaacagtccccgtccattttctgttctgtgttgtgttcataaactaccagcgggaccatctgttgagacttggtagcaaaggatttttgctggatgatgcaagcagtcaagcatttaatgaggaaaccaaaataacaggccaggcacagtggctcat

SEQ ID NO: 8695 - DNA, 1202 bp, Homo Sapiens
  misc_feature (458)..(458): n is a, c, g, or t
  misc_feature (929)..(929): n is a, c, g, or t
  misc_feature (1057)..(1057): n is a, c, g, or t
gtgctatgtgacctatagacccgtgcgtacaaaaagcaggctggtacgcgtcggttattcccgggatatcgtcgacccacgcgtcggtttgatgggacagattcctgttattttcattctggacctagagggactcatgatctttgggatagcagatgtttgcctactccagctgggaagttttaagattccttctgtcaaacataagatggtggttggaagaatatcgctttgatggatttcgttttgatggtgttacgtccatgctttatcatcaccatggagtgggtcaaggtttctcaggtgattacagtgaatatttcggactacaagtagatgaagatgccttgacttacctcatgttggcaaatcatttggttcacacgctgtgtcccgattctataacaatagctgaggatgtatcaggaatgccagctctgtgctctccaatttcccangggagggggtggttttgactatcgactagccatggcaattccagataagtggattcagctacttaaagagtttaaagatgaagactggaacatgggcgatatagtatacacgctcacaaacaggcgctaccttgaaaagtgcattgcttatgcagagagccatgatcaggcattggttggggataagtcgctggcattttggttgatggatgccgaaatgtatacaaacatgagtgtcctgactccttttactccagttattgatcgtggaatacagcttcataaaatgattcgactcattacgcatgggcttggtggagaaggctatctcaatttcatgggtaatgaatttgggcatcctgaatggttagacttcccaagaaaaggaaataatgagagttaccattatgccaggcggcagtttcatttaactgacgacgaccttcttcgctacaagttcctaaataattntgacagggatatgaatagattggaagaaagatatggttggcttgcagctccacaggcctacgtgagtgaaaaacatgaaggcaataagatcattgctttttgaaagagcaggtcttcttttcattttncacttccatccaagcaagagctacactgactaccgagttggaacagcattgccaggggaaatccaaaattggtgctagattcagatgcaccgcgaatatggaagggcatcagaagactgggaccacagcccctggactttttttt

SEQ ID NO: 8696 - DNA, 741 bp, Homo Sapiens
caagggaggaggtgaacgagaaactccgggacactcccgatggcaccttcctagtccgagatgcttctagcaagatccagggcgagtacacgctgaccctcaggaaaggcgggaacaataagctgatcaaggtcttccaccgagatgggcactatggcttctcagagccactcaccttctgctccgttgtggacctcatcaatcactaccgccacgagtctctggcccagtacaatgccaagctggacacacggctcctctaccctgtgtccaaataccagcaggaccagattgtcaaggaggacagcgtggaggcagtgggcgcccagcttaaggtctatcaccagcagtaccaggacaagagccgcgagtatgaccagctttatgaagagtacacacggacctcccaggagctgcagatgaagcgtactgcaattgaggccttcaatgagactatcaagatctttgaagagcagggccagactcaagagaaatgcagcaaggaatacctggagcgcttccggcgtgagggcaacgagaaagagatgcaaaggatcctgctgaactccgagcggctcaagtcccgcattgccgagatccatgagagccgcacgaagctggagcagcagctgcgggcccaggcctcggacaacagagagatcgacaagcgcatgaacagcctcaagccggacctcatgcagctggcgcaagatccgagaccagtacctcgtgtggctcaaa

SEQ ID NO: 8697 - DNA, 992 bp, Homo Sapiens
tgaagtgatctagagatcccggagttagcgggtgagacggccacggccgcacacagccccactggcctccacttggtggcccagccccgatcccagcgccgtcgagctgaccccactctgagagcctggccgagctggcagcatggagccctcggctccccagactttgccgaggggctgctccggaccccgttgtgagccggcctcctgtctgcatgccccttgtggccaccaggctccgaggggccgtggtgactcttgatcaaagagcacagtgaactgtcccttctgagtctcccttttctacagttgatatattttgtaacttggtacaagatgaaggacagcagctttccatccctagttcagagcccccgttccccaggtcctgtgggctgagcggctggggctggggctgcccacgtgtggcctccgctggctctgcctgctcctgcaacagtgcggtccctgcccggagaactcaggaggcctgcaagaagagaactgattggtggtcgaagcaccatcttcacagatgttcaggggcagtggggggctccaggcacggtcaatgaaggaaacagtgcctgtccacccaccctgcgtgtcactgtggcggcctggctgtcgctgctttttgtcctctgccgtgtttgcgcggcctcagtgccctccctggtgcgtctgcgctggggccctcagtgctcggggccttggggtgcatgggcgccgcctgggcagctagagtgtctcagcccggtgctgggcctggccgaggggcggaggcaccagctgattccaagcagccagcattcagtggccttgtcaccaagctccacacctcctcctggtgttggcttttggtgacatcacaaggcccctccaggtgcaggcgcttctgtttggcaggcccctgccaggaggacctggtggctcctcattctcttttgccattggaatgtcccctgccgtctcttctctttaaacgacat

SEQ ID NO: 8698 - DNA, 416 bp, Homo Sapiens
tggaagtgccagcactgtggacactctttgtcatctcaatggctggggaaggtgctcaattcccatacatgcactagaggccgggatagaaaatcgtcagctggacacagtaaatttctttttgaagagcaaggaaaatctttttaatccatcctcaaaatcttctgtatctgatcagtttgatcacttgtcatcccatttatatttaagaaatgtggaagagctgataccagcattggatttacttcgctcggcaattagagaaagttattctgaaccccaaagcaaacacttttcagaacaattgcttaatcctacactgtctttccttaacagccaaataaaggagcttttcattcacactgaagaactagatgaacatctgcaaaaaggagtgaacattttgactagagtgt

SEQ ID NO: 8699 - DNA, 270 bp, Homo Sapiens
aagtagcgggggaacagatagcggcaagtcttccgtgtgtgctaagatcgtgcagctcctggggcagaatgaggtggactatcgccagaagcaggtggtcatcctgagccaggatagcttctaccgtgtccttacctcggagcagaaggccaaagcccggaagggccagttcaactttgaccacccggatgcctttgacaatgaactcattctcaaaacactcaaagaaatcactgaagggaaaacagtccagaagcccgcttaaactcg

SEQ ID NO: 8700 - DNA, 382 bp, Homo Sapiens
gcactctagtcagcggggaaaatgcaatgatggggcccaggagggaggagtgagcacctattgttttgtggaggaagaaaggttaaactttatggaggaggtgcaaataaaatgtgaataacaatatcagtatagatataatttttttcatgcagtacaaaaggctataaaatgaaacttctagaggattatctagactccttcctgcaaagccacagttaacaacagttaggtttttttcttcttcttcttcttgaaataactaaattattttgaatggtgaatgtaagctttatgaggctggaactttttggccgatctgttgcctgttgaatcttcacctaggagagcgattgacacttaatagatgctcagtaaatat

SEQ ID NO: 8701 - DNA, 634 bp, Homo Sapiens
cagagaggttattgtccgtcattccgctttccactaacatttgcagcagtccgcataaagtcttggtggcttcactctgcatgatctcagcatgaactccagcagacagacaaagagtctgcagtaagttaatagtgctggtaaacatcattgcagtggggtgaatgttcctttcagtttgttcggcttcagagtcgtcctctgtgtccgaatcctctgctgagggctgtacaggggctggcagctctgccagcttgaggtcgtattttccttctttccccatcctgtaggagttggtgctgcctgtgtcccactggactcttatccacccgtcctctcccagctcaccaatcgctcggcctaggcctggaggaggcccatcctgatcgccccatttccagtccacacctctcatgacccttgttccaatcttcatcatggcagccagttctggccctgaaacagggagctgcacaggagccgtttccttccttgtttcttccaaaactgtggcagaagcaccttggcagaagcattcatatcttcctcaacgctgtcacaactggggccaattcagcgcagtgccgtctgagcgaggccagagtgccggaatagagcagaagtcacgcaagat

SEQ ID NO: 8702 - DNA, 400 bp, Homo Sapiens
caccagcgattggcagtgggtacggttatattttacgggcggattaccgtacatgaggtacttggacaaagttttacggggaagaaggaccttgtaactaaataatattctgcacatcaaatcactttcaccggcccccacccccgcaacacacaccagaaaaaggctacacacacaacagtccctcccaccttgttacccctctcctaaacccagctcattctttctcaattactttaagagccaagaagacttcgctggctctgatgggggaagccccctgaagtgggtgcaggacagcaagagaacatatgccaaaaaaggagctagagggctcacagataactgagaatggccttaacgatcacaagttttgccttctaagagtaaatcgtgttgc

SEQ ID NO: 8703 - DNA, 258 bp, Homo Sapiens
gtgtgcttgagtgtgggaccctggccaagtgcaggaatgggccataccgtctcacccacagtatcacacgtggaaccgcagacagggcccagaagctttagaggtatgaggctgcagaaccggagagattttcctctgtgcagtgctctctggctaaagtcacggtcaaacctaaacaccgagcctcattaacccaagtgaaccaaccaaagtcaccagttcagaagtgctaagctaataggagtctgactagagtgg

SEQ ID NO: 8704 - DNA, 278 bp, Homo Sapiens
ctagtccaaaatgtgagaacactttggaagtggctgttagttttatagatttgattttagagtcataagcatgggcttgtaggctcttaatagtggggaaatgtcttccacaaatggttattacaaactaaccattgctgggagctgtaatggaaaataaacttcacacaaaagaggaagaaaatccccggtctctatgggagcagatgtgggagtgatccattctactggggactatcaggaagttttcaaagaagtgtctagagtgggtgcggatc

SEQ ID NO: 8705 - DNA, 346 bp, Homo Sapiens
gatcctcgaaatacaccagcggaaaaataagcaagaatcccaaatacagaactttacaagctgtgaaacttggtctcttgcaatcatgttactgctcaaattagagacaatcttattgctgtctataggagcagcatcgtggcaccatcagcaggcaatgatgatgttgagaacagcagcaaaaataaacaatcgtatgctcatgaagaacccaagcctacaaaatggatacctttcagaaaagtatatacttaaaagacccaagacgtcaggataataaagctctgtatttataatcttttatatgtcctattgaggctattatgcttaagtaaaatagctaaag

SEQ ID NO: 8706 - DNA, 190 bp, Homo Sapiens
ccactctagtcaaaaaaatttgacaataaattcacaaataggaaaaagcaagaaccaactactgttagaatatcccattcccagtgttacctccactaaaaacaaaaacgtatctatgcctctctaatccactagaactcaagttggagacgtgagtcaatgctctagtcgaccaggctgaagtgcagtg

SEQ ID NO: 8707 - DNA, 261 bp, Homo Sapiens
ctacccggccactctagtcaaagagaagactaaacatttcagagtagctttcgtcacaaatagaggtggtgttctttcatgacaaccgaatttctcaaacaagcgtgacagcagaaacccctgagactgtgtcagaatcccaaaggagagcagatagataatgaaaaggaaaagaagccagaaaacgtaaactaaagaaccagaaggcaagagaggaggatgtcaagaaggtcggcagagtgcggtggctcacacctatga

SEQ ID NO: 8708 - DNA, 222 bp, Homo Sapiens
ctgtgtggtaatgagagatccaaacaccaaagataaaggggaaaaaagtcttaaaagtgtccagaggaaggaaaaatgacctgttcaacagaacaagctcccaggtaaaacaagagcccaaaaggcagcagagaaagggacaattatgattctgaaagataataactgatatctcagattttacattcagtgaaaatatctttcaagaagtggggcaaaggc

SEQ ID NO: 8709 - DNA, 395 bp, Homo Sapiens
gaacctgatatactgtttgtttactctcaactctttgtacaaatattattgtcctaagggccttttcccctcctgcctagaaaataggttgtgtattggttttattcaacctgctgtctgctttaggattggagaaggtacctggatccttgtggactgccactgctggctgcctcctctccaactcatcagaagagcattttgacaaagacagaggacttggaccagggcatgccctgttggggatgtttctgtcagcaaggacatggcatggaatcaagtgggctgatgtgttgttatttaaacagtaccaaagtgcattcttcaatgtatgtttgcctgcttgaagcaaggcccaagttgagaatacagtaaaggaaactcatgaaagtgga

SEQ ID NO: 8710 - DNA, 1211 bp, Homo Sapiens
  misc_feature (548)..(548): n is a, c, g, or t
  misc_feature (550)..(648): n is a, c, g, or t
  misc_feature (737)..(745): n is a, c, g, or t
  misc_feature (995)..(995): n is a, c, g, or t
  misc_feature (1034)..(1034): n is a, c, g, or t
  misc_feature (1036)..(1036): n is a, c, g, or t
  misc_feature (1122)..(1122): n is a, c, g, or t
  misc_feature (1129)..(1129): n is a, c, g, or t
  misc_feature (1148)..(1148): n is a, c, g, or t
  misc_feature (1176)..(1176): n is a, c, g, or t
  misc_feature (1185)..(1185): n is a, c, g, or t
aaggaaaatgagcttctgcagaaagccgtcattacacctgattttgaaaaaaaccactgtgttccaccatatagtgaatcaaagtatcaacttcagaaaaaacgcagaaaagaacgacaaaaaacagcaggggatggctggtttggtatgaaagctccagaaatgacaaatgaactgaaaaatgatctcaaagcactgaagatgagagccagcatggacccgaaaagattttacaagaaaaatgatagagatggcttccccaagtacttccagattggaaccattgttgacaatccagctgatttctaccattcacgaattcccaagaagcaaaggaaaagaactattgtggaagaactgctggctgattctgaattcagaagatacaaccgaaggaagtactcagagatcatggctgaaaaagcagcaaatgcagcaggaaaaaagttccgaaagaagaagaaatttcgcaattaagatttaccaagcaaactgcaacattttacattgctcctttatttacttattaaagacgtttggaaaactancnnnnnnnnnnnnnnnnnnnnnnnnnnnnnnnnnnnnnnnnnnnnnnnnnnnnnnnnnnnnnnnnnnnnnnnnnnnnnnnnnnnnnnnnnnnnnnnnnnnttgtctaaaccatcccatcgggccccaagaaactgttccgaaaccctttccctgcgaaaaacttgttcacaaacgaacgctgggcgcgnnnnnnnnngattgtaatcgccaaacccttgcccaggccccgtggacaaaaacccccgcggagaaaaaaagcgcgctgtggggcccctaaacaattttaaagggccacccgcgggcgcgcagagtccgagagacaaacccccgggttctatactgacccctcgccgcccactgtgctttgtcttttcaacgaaagggtggggcccgccgcccctgccaaaatccataaaccccacccgggagggccccctacccttccnattacacaaagggccacttgagaaacgcctcggccgacnantccgcgacactaaaaaacatcgacacacgcgcacacaaagcggagcgccaacacataagaaaacaccccgccctcgaactaaaagnttccccnagtggggcgaacagagganaaataacaaacaaacgggctcaaaaatntcgaccccncgagcgataatcacacctctcccccg

SEQ ID NO: 8711 - DNA, 392 bp, Homo Sapiens
  misc_feature (84)..(92): n is a, c, g, or t
gggattctgtaatgttcctccatacagttaaaacatcctaacttgtttttcaagctcactcaggcctacgccaaacgtttctgnnnnnnnnnaaccatgaggtttaatttatttttgtgataggagggatatttacatattttagtggaccacattttaagttggatggtgtgctctaaaatactgaaaaacaatagcccatatacctatgtatttgtttttgatgggttgtttactctgaaataaaatgtatggttttcttaaaaggaagttttaaagtacctattttgtgtcatcctgtattgaaaagaatgtcaagcttgttaaaatgacatgtaacaaaaatgtattttgatttgtatttcagaaactaaaaaataaaatgttgaaag

SEQ ID NO: 8712 - DNA, 819 bp, Homo Sapiens
  misc_feature (734)..(734): n is a, c, g, or t
tgggctaggtaggaggcctgggtggtgaatcggcacgaggaagtcagaggaggacaaagaaaaagattcctttcttggcaactggaggtcaaggcgaatatttaacttatatctgcctgtcagtgacaaacaagaaacccacacaggcgtccatcacaaaggtcaaacagtttgaaggctccacatcatttgttcggagatcacagtggatgctcgagcagcttcgccaggttaatggtatcgatcctaatggggattcggcagagtttgatttgttgtttgaaaatgcttttgaccagtgggtagccagcacagcgtcagaaaaatgcaccttcttccagatcctccaccatacctgccagaggtacctcacggacaggaagccagagtttattaactgccaatccaaaattatgggaggaaacagcatcctccattcagctgctgacagcgtgaccagcgcagtgcagaaggcaagccaggccttgaatgagcgtggagagcgattaggccgagcagaggagaagacagaagacctgaagaacagcgcccagcagtttgcagaaactgcgcacaagcttgccatgaagcacaaatgttgagaaactgcctatcctggtgactcttcttaagagaaactgaagagtttgttcagcagtttttacaagaattcaggacctccgcttgcttctttttttccaatatttggacacttagagtggtttttgtttttncttttcagatgttaatgtgaaagaaagggtgttgcatttttacatttccctaatgatcttgctaataaatgctacaatagcatca

SEQ ID NO: 8713 - DNA, 299 bp, Homo Sapiens
cggattgctaggaggaatgaaaaactaaactgtatagtttatattccgtaaaccattttataatgttcaaagattaggttttgttattgatagtattaaatacacagtttctcttaacagtgatgggtgaaaacattttaccggattatggaatgtttaccagaacatgttttgattcttgaatgtacataataatgccatctaacttatttacattcttgtttacatgtgggagcttttgttttcaaaaattattttgttaaaaaatctcaataaagatttattattgttgttcttcg

SEQ ID NO: 8714 - DNA, 567 bp, Homo Sapiens
acatatctgcatttaaaaaagcaattcttagaatacttcctttacattattctcctattttagacattttgtgaaagagaacaaattgtccagtggcctcctgtcagatcaacaattattatactccttaattccatgcaaatttaaatgaatgctataaaattttaaatctgtagcctgggtgtacgtttcactcaagttctcctactgaggactcttgactaacagcatactggcagtttcaccttaacctgctcgttaaataatgtgttggtgtgagatatcaggaatgtctcatgatatcacgtttaccatttacaccatctgcaaccatatgctattaataaaatggaaaaaaacaaaatggtcattttgcatatacttcactctgacctagtttagtccatgatactataattgtgagagcatatccagatgctgtgttctctatgtaaaacagtattgtccattcagaaatgtgtgacccttcatttatggatattgactatatgtaatgcagtgctatcccaatattttcaataaaggactttatgcattcagtgaaaa

SEQ ID NO: 8715 - DNA, 232 bp, Homo Sapiens
tcagggatatagttcatatcccacttctttgtttacaccgatgtccctgaatatcagcctgtagctaatggacttgggatttctggtctaagtgggcctcctggggatggggtggtacactgagcttttgagcctcattgtagagtagaaaggtactggggcctgtgtggtaagccttgttgaaatgctctggtattcagtattgccttaataaacttcacccccccctgcc

SEQ ID NO: 8716 - DNA, 635 bp, Homo Sapiens
agcacgcacccggcttgtagcaggaccagaacccctttcgcccagcaggtctccccagagtggatttgggcatgtatccggaaacggaagactggtagctccctgctaggtttgctgtcttccctctccctcaggccatactctcctttaccatactactggactggactcaggctggaggcagatagacacagtatagggggaatgggcttgcttctcccaaacccaccagttctccactgtctcttctggaccaggaattagttgctgtgggtgccacagctgaagtcagtttgtcttgctggtttaaatagatctttcagagctgggtgctgggtttgccatctttttgttttctttgaaaagcagcttagttaccctttttataaataaaatatcttgcagttatctttgtcctttccccacctacacccccaataatttccctagagattaaggagtaaaggctgggctatggcagctctgtccacaaagccttctctcccatccttgcctgttcctttgtacttccaggctcattttaaagttgtatttaaaggactgccctcggaaatgcttctgtttagcggaacttgtattcagcctgacacgctttgccaggaacaaacctcatg

SEQ ID NO: 8717 - DNA, 1628 bp, Homo Sapiens
  misc_feature (1505)..(1559): n is a, c, g, or t
cgcagtagtacatatagaaccgtggttaaacaagcaggctggtaccggtccggaatacccgggatatcagtcgacccacgcgtccgggattgaagagttctaagcataaaataagtggcattttctgacttcttccatcctcctccttccctgactcacagaaggaatgcaatcacccagcaagtcctaccatgttactgcaattttttatctcaaaatgccgaactgagaaaactgtccattttctgagcacccccagacaaggcaaactgaccctcagccagctgcctgcattgtccctgcgcaatctcagctttcacacggcacagccaattccatcatttatctcaaactgcagttggcacttttccaaaacagtttcaacattcaggccaccagccagcttctagccctaccatcagcacatcattcatttacttaatgcgactccacatgctgcacaatcacccagcccttcaccatctgccccttcatgccttctcatttctattcatcacattcacctcatcatcgtatcatagaatgcaggggaatcctctaacctgcgtctggtgacgccatcagtcgtgggaagtatattaccaaacatgcgaccaatgcgatgagccagcccatccttaccacggttcgaagagatgctcccacagtgcctcagcgccaacaacatcccactccccccagttggtaacaaaaaagccccttcgcatatcttcacttactcaaaccacgattgggcacagctaccccagagtgagcataccttaatcgcgcccttggacacatcaaaatagggactaccttcgccagccatacattggggaacattggccaacggcggcgcccaatgacgaacaggcgacaagacccgcagggaacctctaacagaccaccgcccgccctccacaacacgacaacctgggtgagacacgccaacgatatccatccaagaccggcgtagcacaagagtggacaatcgaggcgcccatggggcccccgggccgtccaaacaacatcacgagcgcacagtcgaacacacaccaaaagaccccgtccccatgacatgaggacgtaggaaaccataccgagcagacatacacaacacccggaaagccgccgcgaacacacgggacaaacaatgagagtggccaaggccgcacaggcagccacgcacgacgcgcaacatcaaaaaccacaagagcaaactgacccgacaacgcacgagagccccagaaacacacaaacaacgagaacacagctacaccgacagcgaaaacgcacaccaccagggactgaacaacaaacaaagaatcagacacccacaaagaacagcagcctcatctagccgcacaacacgagagaacccgcggacaatgcagcaagaactgagccatgaagactggacaagacagcgaaagaccaccgcgccacactagaacgagaacacatgagaccacgacaccgaaccaggccaacaggacgcgaannnnnnnnnnnnnnnnnnnnnnnnnnnnnnnnnnnnnnnnnnnnnnnnnnnnnnngcagacacaaaccaaccagaaagcgaccagaatacgaaagcaacaacgaaacaaccaacaagcgaaccc

SEQ ID NO: 8718 - DNA, 910 bp, Homo Sapiens
gggacacaggggggcggggaaggaagatggcggcgcccagcgtcccgtgaggagagaggacacagggatcccggggagcggccccagactcgtaaattatggccgcatctccgcacactctctcctcacgcctcctgacaggttgcgtaggaggctctgtctggtatcttgaaagaagaactatacaggactcccctcacaagttcttacatcttctcaggaatgtcaataagcagtggattacatttcagcactttagcttcctcaaacgcatgtatgtcacacagctgaacagaagccacaaccagcaagtaagacccaagccagaaccagtaccatctcctttccttgaaaaaacatcttcaggtcaagcccaaagcagaaatatatgagatgagacctctctcacccgcccagcctatctttgtccagaaaagccaaatgaaaaggaattgatagaactagagccagactcagtaattgaagactcaatagatgtagggaaagagacaaaagaggaaaagcggtgggaaagagatgaaagctgcaagtggtatgatttgcccaggaattttggggctcaacctatccaaaaatcaaactccccgggtacctttgggtttttccgaatataccttactttatttgaaaactctaatctttaatgaaaaccaaaaggctaatttttattttaccaccctgaaaaaagaataaatttgtgaaactggcaagaccctggtctttaaaaattttttccctcccctttcattttaaactgggggattttgaaaattaaaatttttcttgaaaattcttatttttacacccggaaattgggtaaaataggctattcgcgcctttggaaagagaaattgggaattttaaaagaataaagtccaccccccttttt

SEQ ID NO: 8719 - DNA, 1285 bp, Homo Sapiens
  misc_feature (53)..(53): n is a, c, g, or t
  misc_feature (107)..(107): n is a, c, g, or t
  misc_feature (178)..(178): n is a, c, g, or t
  misc_feature (891)..(903): n is a, c, g, or t
  misc_feature (907)..(961): n is a, c, g, or t
  misc_feature (1129)..(1129): n is a, c, g, or t
tagggggccctgcaggtgtgcttaactgacgcttttttcaggactgccaggcncgtgccagcttctctgagactgagcatctgtgtgtgcggcgctgagaaaggcgnccaggagtgaggaggaagccagggcaccgaccacagagtggcaggggtgacgaggaccattcctgagcacncaggtagaagccaggcacctctccccgttatgactttcagttcataactgtctgtggtttaacaggaccccaaggctcctgtctcccgccctgaatcctcagtgtaaatgagcaggtattgtttggttctgacccttcctaattctttccccaaagccccctgaagcagtcatcttggccaggcggggtgtgggagggagctgcgggcggggcaggactcgctgcctggctggagctccccaggccagcaggtgtgcgggactgtgagccaggcctgtgccctggctgacgggctcatccctgacactgctggccattaattctgaaggcccagcgtgcagggctcagatcacaatgaagccaatactagcgtgtgacagctgcctggcatcattggtctgccctgtcgccagggggcagcggtattgctggctcacacagagctatggggtatgtctaatattccttagagaaaagaaatgttaatgtaaaaagacccaaagtgatatctgtcaaaataagtaaccgctccaggttcacagatacgcacagcacgcaaggtggattcatgacgcacagtagggactactcacggctgacgcccaacagggatgccggggccgagcgccggtggtcatggaggaagcacaccacagctggccacacgcagtagcaccaaactgggctggaattcggggggccattccccaaannnnnnnnnnnnnaaannnnnnnnnnnnnnnnnnnnnnnnnnnnnnnnnnnnnnnnnnnnnnnnnnnnnnntccttgctgaaggaaatcgtggctcccaccgggctctggccccttctcaccggaagctgcgaacggcctttgtggggaatatacaagatgacgactgatctacagaaaccatagggaacttgactcgagacattcatgtatgcgtccttagtattatgtcattgtgantgacctatggtatgtttgcttctctcatgcacattagtgagatgcactctctcaatatgagcaacgtaaatgagatggaggggagctcgggcgccaggaacgacatcgtgtgcgatagtggaggtaggcagagagcgggactagagaacgtgtacg

SEQ ID NO: 8720 - DNA, 988 bp, Homo Sapiens
  misc_feature (489)..(569): n is a, c, g, or t
  misc_feature (579)..(593): n is a, c, g, or t
  misc_feature (812)..(821): n is a, c, g, or t
ggttagacaaatgctacattaatgtttgggtggtcagattctactttgaatctgaagtttgcagatatgcctatagatttttggagtttaccactttcttattctgtatcattaatgtaatattttaaattactatatatgctaccatttttctggatttagtaagaaatttgcagttttggttcgatgtaacaagggttttaatgtaatttatgttagattttgcatttttttcattactgttatattttaacctgactgactgatctaattgtattagtattgtgaataatcatgtgaaatgttttgagacagagtactatatttgtgaatataattttatggtttttttcacttagaacctttctgtgtggaaaactaagaaaattgctttctgctgtataatctggcattcattgtagattaaagcttatttttctgtgaataaaacgtattcaataaaatactattctttaaaattaacaaacnnnnnnnnnnnnnnnnnnnnnnnnnnnnnnnnnnnnnnnnnnnnnnnnnnnnnnnnnnnnnnnnnnnnnnnnnnnnnnnnntccttgccgnnnnnnnnnnnnnnnaaaaatttttcaaaacctttctttggccgcccggccccctaaggaaagggaccttggcctaagttgttcccaagaaaacccgggcaagaacaagggttggatttcccccaaataaaaaccccccggggcgacccaagggttctaacaaatccaaagggggctttggggcctttccgggacctctcaacgggaccccaagcgagcccaatatcaattttnnnnnnnnnnttggccttatgggaagaagtggggaaattcttaaagcctttcccccgaacttgaaacccctcccaaaccggccttgttgaaccctgaactcccccggcggcatcaccacccttttgcccccctgtgccaaaaataatttcgccccgggggcaaaaaaccgggggggg

SEQ ID NO: 8721 - DNA, 1119 bp, Homo Sapiens
  misc_feature (611)..(611): n is a, c, g, or t
  misc_feature (1021)..(1021): n is a, c, g, or t
gggaaaattgaagtgatacgtgaaattgagatgagtgtggatgatgatgatatcaatagttcgaaagtaattaatgacctcttcagtgatgtcctagaggaaggtgaactagatatggagaagagccaagaggagatggatcaagcattagcagaaagcagcgaagaacaggaagatgcactgaatatctcctcaatgtctttacttgcaccattggcacaaacagttggtgtggtaagtccagagagtttagtgtccacacctagactggaattgaaagacaccagcagaagtgatgaaagtccaaaaccaggaaaattccaaagaactcgtgtccctcgagctgaatctggtgatagccttggttctgaagatcgtgatcttctttacagcattgatgcatatagatctcaaagattcaaagaaacagaacgtccatcaataaagcaggtgattgttcggaaggaagatgttacttcaaaactggatgaaaaaaataatgcctttccttgtcaagttaatatcaaacagaaaatgcaggaactcaataacgaaataaatatgcaacagacagtgatctatcaagctagccaggctcttaactgctgtgntgatgaagaacatggaaaagggtccctagaagaagctgaagcagaaagacttcttctaatttgcactgggaagagaacacttttgattgatgaattgaataaattgaagaacgaaggaccctcagaggaagaaaaaggctagtccccaaagtgaatttatgccatcccaaaggatcagttacttttgtcagaaatccgccttgcctctaaaagcagattttgtctgcagtacggttcagaaaccagatgcagcaaattactattacttaattatactaaaagcaggagctgaaaatatggtagccacaccattagcaagtacttcaaactctcttaacggtgatgctctgacattcactactacatttactctgcaagatgtatccaatgactttgaaataaatattgangtttacagcttggtgcaaaagaaagatccctcaggccttgataagaagaaaaaaacatccaagtccaaggctattactccaaagcgactcctcacatc

SEQ ID NO: 8722 - DNA, 1113 bp, Homo Sapiens
  misc_feature (60)..(60): n is a, c, g, or t
  misc_feature (957)..(995): n is a, c, g, or t
  misc_feature (1022)..(1022): n is a, c, g, or t
cggggtcgcgggcctgattgcgccgtttccccgcgcagagctcgccggcgcccggggggncccggagcagcggccccggccggcccggcctcagcctggagctccagctacccacatgcaccttacctgggttccgcccggtccctgagtccccacaaaatggctgatggaggaagccccttcctaggtcggagggactgggtctacccttcctcaacccgagaccctagtgcctctaacggagggggcagcccagccaggagggaagagaagaaggtaaggaggggaccaggtgtgggggacctggagtggtcccaaggctgccatcctggatctgccacccgcccaactgagagagcccactctgtcctctcccctgcctagagaaaggccgccaggctcaagtttgacttccaggcgcagtcccccaaggagctgactctgcagaagggtgacattgtctacatccacaaggcaggtggacaagaactggctggcagggagagcaccacggccgcctgggcatcttccctgctaattatgtggaggtgctgcccgcagatgagatccctaagcccatcaagccaccgacctaccagggtgctggacgtatggagaggctgtggcccagtacacctatcaagggggacctggcaggtggagctgtccctcccgcaagggagagcacaatctgccctgatccgcaagggtgaacgagaactggtacgagggacgcatcacgggcacggggcgccaaggcatattccctgccagctacgtgcaggtgtctcgtgaaccccggctccggctctgtgacgacggcccccagctccccacgtctccccgcctgaccgctgccgcccgctcagcccgtcaccccagctccccctccagcctgcgcagcccaactgaccccaccggactggggggacagacctcccccccgtcgcactgggnnnnnnnnnnnnnnnnnnnnnnnnnnnnnnnnnnnnnnnaaaatcttgggcacccctgggtccagnctcttgtcccaactctccgaggtcccaagcccttccccctgggaccctggggggaccctccctcctccctaaacaccctctttcaaaatat

SEQ ID NO: 8723 - DNA, 766 bp, Homo Sapiens
gcagagcgcagtgtctcacctctctgcacttccaaggactcttgtcatctgccttaggcgggaaatgctgttgctggattgcaaccccgaggtggatggtctgaagcatttgctggagacaggggcctcggtcaacgcacccccggatccctgcaagcagtcgcctgtccacttagccgcaggaagcggccttgcttgctttcttctctggcagctgcaaacgggcgctgacctcaaccagcaggatgttttaggagaagctccactacacaaggcagcaaaagttggaagcctggagtgcctaagcctgcttgtagccagtgatgcccaaattgatttatgtaataagaacgggcaaacagctgaagatctcgcttggtcatgtggatttccagactgtgccaagtttcttacaacaattaaatgtatgcagacaataaaagcaagtgaacaccctgacaggaatgattgtgttgccgtgctcagacagaaacggagtctcggaagtgtagaaaataccagtgggaaaaggaagtgctgatgtcacgtgggttatgaagaagtctgaagaacgccttcatttcatgcaaatctataagctcctgcttttggctttaccatatgttgtgtctaatctccttctgagaaggacgaaaaactttcttccaagtgaagatccatataagaacacatgtatttacatgcctataatatgctggttgtgtatgctttgtcttttaagttattaaaggaacgtctaaaaaat

SEQ ID NO: 8724 - DNA, 821 bp, Homo Sapiens
gggagacccacggggctgccctcccctgcgcactcccctcgctgcccgggcccggagcgcagcgcggccgcacagattcacaatgttgaaagcccttttcctaactatgctgactctggcgctggtcaagtcacaggacaccgaagaaaccatcacgtacacgcaatgcactgacggatatgagtgggatcctgtgagacagcaatgcaaagatattgatgaatgtgacattgtcccagacgcttgtaaaggtggaatgaagtgtgtcaaccactatggaggatacctctgccttccgaaaacagcccagattattgtcaataatgaacagcctcagcaggaaacacaaccagcagaaggaacctcaggggcaaccaccggggttgtagctgccagcagcatggcaaccagtggagtgttgcccgggggtggttttgtggccagtgctgctgcagtcgcaggccctgaaatgcagactggccgaaataactttgtcatccggcggaacccagctgaccctcagcgcattccctccaacccttcccaccgtatccagtgtgcagcaggctacgagcaaagtgaacacaacgtgtgccaagacatagacgagtgcactgcagggacgcacaactgtagagcagaccaagtgagcatcaatttacggggatcctttgcatgtcagtgccctcctgggatatcaaaagcgaggggagcagtgcagagacatagatgaatgcaccatcccctccatattgccaccaaagatgcctgaatacaccagggctcattttattgcccgtggcaggtccctggggtttcaa

SEQ ID NO: 8725 - DNA, 1055 bp, Homo Sapiens
  misc_feature (77)..(85): n is a, c, g, or t
  misc_feature (95)..(145): n is a, c, g, or t
attcgggatgcatagcgctggctggctggctgcagttgagccgacttggaaatgtgaacgcaagaagcaggcttgannnnnnnnnctcccccctnnnnnnnnnnnnnnnnnnnnnnnnnnnnnnnnnnnnnnnnnnnnnnnnnnnacccacactcacgcacacctccaaaccgcacacccagacgcacacgcataccccagcgcccggcagttatgtattctccgctctgtctcacccaggatgaatttcatcctttcatcgaagcacttctgccccacgtccgagcctttgcctacacatggttcaacctgcaggcccgaaaacgaaaatacttcaaaaaacatgaaaagcgtatgtcaaaagaagaagagagagccgtgaaggatgaattgctaagtgaaaaaccagaggtcaagcagaagtgggcatctcgacttctggcaaagttgcggaaagatatccgacccgaatatcgagaggattttgttcttacagttacagggaaaaaacctccatgttgtgttctttccaacccagaccagaaaggcaagatgcgaagaattgactgcctccgacagggccagataaagtctggaggttggaccttgttatggtgattttgtttaaaggtattccgctggaaagtactgatggcgagcgccttgtaaagtccccacaatgctctaatcccagggctctgtgtccaaccccatcacataggggtttctgttaaggaactcgatttatatttggcatactttgtgcatgcagcagattcaagtcaatctgaaagtcccagccaggccaagtggacgctgacattaaggacccagccagaaaatgggacatttggggcttcccgggacaggctttgggccaatcaagggggtttattagtggtcccctgaagcctaggaagaggtgttaccacaaacacaactaagcttccaggggaccttgggcccaaagatttttctctctcctccccaatttggagaaagagtccgttctataacttacccggcattggaggctcccaggaagccaaatggga

SEQ ID NO: 8726 - DNA, 470 bp, Homo Sapiens
cggaatacacagcggtcacagtttctgcccgatcacattaggaagacacaagcactgaccagtgggctttgtcgcactggcagtcagagccgttacagtgctcttgcacggtgcccaggtaattacagacacactttcgacagtcctgccggagggcatcaccatagtatccaaaccgggcagaactgacagtgttccccttccgtgtggtacaggcacttgagacacctcccagtctccttgtcacaggcttctgggtctgtcgtgtcaatgttgttgtgacactggcaaggctgacacgaccccccaacttctgatggattgccaaagtatcctgaggcacagtcgtcacatctggaacctgtcacccgataaaaccaacacaagatgtttagcttattgactgaaagctcaccagtgcacccacactcatgcctagaggggtttgtgggtgaggtacgagctcgatt

SEQ ID NO: 8727 - DNA, 1217 bp, Homo Sapiens
  misc_feature (699)..(766): n is a, c, g, or t
  misc_feature (925)..(925): n is a, c, g, or t
  misc_feature (979)..(992): n is a, c, g, or t
  misc_feature (1096)..(1096): n is a, c, g, or t
  misc_feature (1187)..(1187): n is a, c, g, or t
gggctctgcaagccgcccggcccggggcccgcgccgaagccgccaccgccgcggttgaccgtttggcggatgcgcaggaagcggccgcgctggttctccttgaggtccaagtagtacttgcggttctcacgcaccaagaattcgctcttgagcgcgcgccgcggcccgccgccctcctcggcgcccgccgccagctgctcggggctgctaaggcccagctgcgccgtagtgttctatgaagtcgcccagcgagtcgcggaactcggcggccaccgccatggacagcgtgaggcggctcttggaaccgcccgcgcccaccctcagggatcttgaggaagcggccctcgggcgttctgcttcacatctaactagaagcgcctttgttcctggacgctccagccgccttcgagggccagcttccctgcgaactcttgcatcgccgcccgccggtggggaaaccgggcctgggaaaccccgcacgggcccaaccggccggaccgaccgacgacttcgccgtgccgggtctgtacgaccggttcccgacacaatccctttctaagaggccggcgccgacgcgttcgggcgggatttacccgagacaacccggcccggttgggcattcaataggggcccgtcccgcaacatcgatgtagtcgacggagatcacgcgcgcgcgaactctttcgaggctgcggggannnnnnnnnnnnnnnnnnnnnnnnnnnnnnnnnnnnnnnnnnnnnnnnnnnnnnnnnnnnnnnnnnnntttttacctggccctctaagaacaccgaccgccacacccttctcccactccagtaaacaaaacgctctctagactctccccggcccccgagggagcccccgcgccccagatgtgggggcggccaccccctcaaccaaaattaaaataaacgctgatcanaaaagggagtgcctcaccttatacgccctctctaatggcaaatcgcggtctgcnnnnnnnnnnnnnncagatactgggggcggagacttcttccccgcgggacctggagccaaaattaggccgcccccggtggaaagccaccacctctcctggactaacaagccagaagtncgagaagggcttatagcgcactccccaaaaaaaccgccatagagggctgcacggaggccaccaagaacggggtgttaatctctatgggggncccgctcacggcgctgtgaggcggcacagt

SEQ ID NO: 8728 - DNA, 506 bp, Homo Sapiens
tcgctgactctgaggattaccggaaatacaccagcgaatccactgttgatacgcaattacccctcttggatgcatctgcaacaagcactccccagcttcgaaggggcagcaaagaagttcacaattacaagaccatggggtcacgaccacagaagcgatatgaaacaggtcccgggacacagggaggggcagaaagaattctttgagtaagcctggaaggcggaggggctcaccaggccaagagcaggtgctaggccttcagtaggaacagtgcgagccaaggcacagaggccaaggggagcgagctgtagctgtgatggtgggcagctggaaggccgcacgtataatcaacaggggacccacatcaaaggggagatcttagccaaaaccagcacataggggccttcaattccatgaagaatttagatgttatccagtgagccatgggaagccattgaagcgtattatctagggtagttaagtgggcccagattttcattttaaga

SEQ ID NO: 8729 - DNA, 265 bp, Homo Sapiens
tcctcacggctccctctgaagtccactagctcctagcttgccctgcctctgctgggtcccctgcggcattctcacgtccaggtcccttccatgctgatgattcccttctctgccatcctcaggggcagaaagagatcatagtagtactttccctaggagagtaactgtcactacccaaacagccttgtttttagatgaaaagagccagtttgcgcaaatgcttaggagatgacaagcacatttcgctggtgtttccgaagtcctg

SEQ ID NO: 8730 - DNA, 417 bp, Homo Sapiens
cctagttagaagtctcagtaggtaggtaactaacagtatttcccaaataatggcacacaggagaaaataatgaatcaatagaatctaattaaaattactaccccaggaataagaagtactgaggatttattttattttgaattggttttaagtatggaataatcatctttacagttataaaaaaattagtgtttacaaaatgttgggcatttctgctttgacaaacaaacaggtaagtcccgtggccttcagaggcaggcagcagtagaaactttccaaaaagtaacaatttctctggatttaacatggaaatagaaaaatttaaagaataattaaattaaaaaaccatggtaaatgaaatgtggtgatgatatacagtttcggatgttaatactacttgaaacttctaaaactaga

SEQ ID NO: 8731 - DNA, 358 bp, Homo Sapiens
  misc_feature (229)..(229): n is a, c, g, or t
tagtgcagagcagtccttccaaagaaatccgtaatatttggattggcgccattttgcagcagaagagttgcacaagcctcctgcctcagttgcacagccttgatcagaggtgtcctgtcttcacggtcgcagaggttaagctcacatcttctggacaccaggagatgtaccatttccggttggcagtgggacagccaaatgtaggcgtccttcctcctgtctctctatngcgtatatacgtgagcagagtactcagttcttagatcatgtagcagctctgtgattcttcagatgatacggttaagggtatgggaatgcgagcatccgacatagcgtcatgagtgcacgctctcgctgt

SEQ ID NO: 8732 - DNA, 628 bp, Homo Sapiens
cctagttttagaagtttcaatagcaaactgttgttcatgcaacacttgtgcctcaaaggggaaggcacaggatttcctacaatgagccaccttataaagagttctttttgtacaaattaatttatgtcacatttaatttagtgtgcataacctcaaaactgaggtattattccaatttataaaaaccacttgcataacttttatgcaagttttaaaaatacaaagttttctccctaaagtggctcaaaatagattgttcatggctgcctacatctaagataaaaagattctaaaacaattgaacagattaggcatattattaaaggtgttcaaaccattacttgatttgtacatctactcaaacctcttcatcggtctttattcagcagtacatatgcaccaaattccattttagaagtttccatatcattttcatagaaaacaaagtttgaaaacaagtaacatttaaacacagcacggtattctaccacaactgaaacttttttcttcttcttctttacaggactcaacaaaatctaaaaatgaactatgctgtagatttacctcatgcaaagatctttatgttatctctgaaaatgaaaaggatggccttttaagcacattttac

SEQ ID NO: 8733 - DNA, 181 bp, Homo Sapiens
ctggttgactctcgaggatctccggaaatacacagcggaaccttggggaacagtccatacctggcgtgacaggcaaggaagatggagcagtaggggaactgaccgtggagagaactggtgtaacacagcatcacaaggctggggagaccagagtttcacgacagagaagacagtcaaaaag

SEQ ID NO: 8734 - DNA, 999 bp, Homo Sapiens
  misc_feature (482)..(533): n is a, c, g, or t
  misc_feature (619)..(653): n is a, c, g, or t
cagcccgcaagactcgccgcctgcccagctctgtcatgactaaggtgctttgtgaggacagccgccagggtttccacgctcattcccctccggacaaggtggacagctttggtgatagacaactgggaggtaaaactccacagagccattgccagcgactgaccgcccagggacaggagatggagacgttcagctgcaaaggctacggaggaacccccgcaattggaatctctccatgccttctgcagcatggaaacatactccgggacctaccggggctctctcgggccacctctgagtgcaagggaaaagagtgcagttcaaggaagggaatgtgtctgtcatcccaccacttgcgcgcaaggccagttccgggatcagcaggcttccttcaccagcacgggctcttcattagcaaccactgggagggaatgtgtgcggagtcatgtcaagatgggaaggcacatgttcctatcttgacnnnnnnnnnnnnnnnnnnnnnnnnnnnnnnnnnnnnnnnnnnnnnnnnnnnntttgactcagatgggttgagagggcaatggcaagcaatcttggtacatgtcagctgcatctcagagtctcgctttgtttgcccagnnnnnnnnnnnnnnnnnnnnnnnnnnnnnnnnnnntcctgagttcaagctgtcgctggaattacaggtgcccgcaacacagctgtctaatttcttggttaagtaacgtgaagagatggagtttccgctcttgtcacccaggctggagtgccatggtgcaatctcagtcaactgaactctggctcccaggttcaaggtgattctcgggttcagcctccaagtagctaggaataacggcatgggccaccaaaccgggtaattgcgattaaggagagaagggggtaccttgtgggcagggggccccaaaatccggactccagggatgacacggcctgggcccgcaagggcggaatacgggcgagccctgggccgggccacaatg

SEQ ID NO: 8735 - DNA, 503 bp, Homo Sapiens
actcacagccccctgccagaccaggggacctcggagaggcaaggacagaggttcaggatcttcctctccctcgggacccaaggccacaaaggagagctccgtggagagaagaaaatcatttgactcctggggacacagaggtgctgccacagaggctgatggacaaccaggcggagagagaaagtgaggctggtgttggtttgcaaagggatgaggatgacgctcctctgtgtgaagacgtggagctacaagacggagatctgtcccccgaaagaaaaaatattttggagagaatttcccagattgaaagaagatctgaaaggggaacattgacaagctccgtgccctcgcagacgatattgacaaaacccacaagtaaattcaccaaggctaacatggtgggccacctctactgctgtcatctctggagtgatgagcctcctgggtgtagcccttgccccagcaacatggaggaggaagcctgctgctctccaccgctgtct

SEQ ID NO: 8736 - DNA, 399 bp, Homo Sapiens
tgatggcattacaggtgtcagacactgcgctcggcaaaatacttgactttcttggaccccaagattttacttagaggaaatttttgtcctccctgctagtgtccctcatgtgctgtaatttctagtttcatactcccctggttgcaaggtaatattcagtgccgaccacagtatttcagatgttatccgacagtgcagatgagcaggggccatgtgttgtcttgatttttctcactgccatttctattgatgcagtgtagactttgaatcatactgttgacctttcttgagccttattgcgagctacttcctgctttatgaattctgactgtagcgatacctcaatcttatacctacttgagacttctaaaactaggggtatcagctcggtcgtatcat

SEQ ID NO: 8737 - DNA, 340 bp, Homo Sapiens
ccggcaatacaccagcgggaaaatgtggagtagctgtaataaatctactcccgtattgtgctttacagcagacctctttccctctacataccaatctatccactcgcataactactaagtggctcaatggcctatgtctcatgcttaatttggctgagctaggcccggaatccgggaaaccacaacagactgtactctgctcctgtatttcaggaataactgtcactaacctgcctctgtccgattcccaccttctatgaagtacacacagaggagcagttcattctttcgtaaagggatcggtggactttgttcgagatgccatttcaaaagaaatgag

SEQ ID NO: 8738 - DNA, 391 bp, Homo Sapiens
agtttcaatagcagaggaagggaagacagaaggggattattgggccagattaagggatgtttacagagttaggaaattcagagttccatggataatgggtcagaggagagggctggacatctggggcgattgaggcaatgggagggaagatgggattcattttgatggtctctaaatgaacttgtactaggtcaatgtttcttgaattaggaaacccacaagactacagccacatgctcaggggaccagagtgtactaatgaatttttaaatttgggattgtaattttaatgataatctaaaacttgatttcagttcccagattagtttatgttaattgggaattgttaccatatactgctattgaaacttctaaaactagggggtaaccc

SEQ ID NO: 8739 - DNA, 329 bp, Homo Sapiens
gaggatctcaaacgacccgaagacgaaatgtgaatgaaatactgcgatgaacattaaccgccccagctcccagtggtggtacggtctcaacagaggacgatgacttctatggtctcaggtaatcttcacaaaacccgaggagaggaactgtcagtcccaccccacgaaagcggctactgaatctcaggattgccccacgatcctggctctgcgagcgaggtcacgttcacaacggcgggaatttccgtagcggtgacacacggcacttccggccggccgtgagagtcggtgacgtggcggcgaggccgggcacggtcttcgggtcgttt

SEQ ID NO: 8740 - DNA, 435 bp, Homo Sapiens
aaccctagtgagaagttcaatagcgactcaagagccaagaattaaaatagcaagaatgaaacaacaaaactctattaaaagatgaaaaagatcagttaactagagctctaatggctttgtactgtatcaactcagctaactcggacttaaaaacatttcccagaattcccttccttatatagttctgggtactgtgggctataggagacattatatggaactcacaaatgaagcaagtcatattttttacaccgtgaaggtcaatggagagcacactgtgaagtttgcatgtgctgccgatctgttagctcaccttgctggcatggggaagaagctggacctgcagctccttcaactcccatcagaccttctctccacttctccaaatcctgggcccacaagtgcagctctgctattgaaacttctaaaactagg

SEQ ID NO: 8741 - DNA, 559 bp, Homo Sapiens
ctagttttagaagtttcaatagcacctagaaattagatgatcaaagaataaactctattctctatttgtggcaaacttataatgaatatacatttctacagtcagagatgaagacaagcaggttaaaaatgacatctagtaaacttgtcctcctctaccctgctgtgcacaatatttcagtcaactttcagaaagtggctggaccaagcatttaaatgccctgaggttgacctggaccaacttttaggcaaatcatccatcagatcctataagtcctgcagcacacttaattcagacaaataagacaataattccaaaaacaacttaacaataaggactaagaaagtgtttaattttgagatgtactattctcaaagacccaagtaagcttcaactagataagagttgagcccttatgcttgctatagttcagaagtgccaaaacatgagattagggttgaatttgcgccatcagctttctgctagctgttttcaactcaaattttcatgctattgaaacttctaaaactagggtccgagctcgattcgtatcatgtta

SEQ ID NO: 8742 - DNA, 397 bp, Homo Sapiens
cctagttctagaagtttcaatagcacaaacaggatattgacattgatgtagtcaagatacagacaatcctaccactacaaggatccctcctcttggccttttataactatacccgcttccctcctgccccacctctgccctcttaacccatggcagcaacttatctgttctccatttgtgtaactttataatgtcaagaatgttatatgaatggaataatacagtatgtaaccttttgggattggttttattcacccagtataattcgctggagatttcattcaggtggttttgtttatcaatagtttattcctctgtattgctaaatagtaccagttgagtatccctaatccaaaaatacaaaatacaaaatgctattgaaacttctaaaactagg

SEQ ID NO: 8743 - DNA, 662 bp, Homo Sapiens
cctagttttagaagtttcaatagcaaagacagatcctgctcctcttcaatccaatcctgtaggtttcttcagttacctcaacagggtcatactggctcctgaaatgggcaccattatttaaaagaaatagaggtacagagtcctcaagatttatgggcacctgagtttctgccccagtgcccgttgcaggtttcccaatcccctaaagacattcatggatgggtgagaggagctgacacctcccgctctgtgaccactttctctttggccatggaggaagtcttgctgcccctggctgtgacatctgaccccaggcccgttaatcaacaactcccagagcctccagacccaagatgtgtttgggaaccccaggacaatcctgaacttggcacttgccctggtgtgtgccctttgctgctgctttggaatcatctactgctgcttcagtgagggcaggcacaaggacctgggggcgcattgcccaagactgtcatcctcaaggatgatgccagctttcctccttgctcctgggccatctcacctcctctgccaggggttcctacctctagtgtggcccatgttgctctggctgtattcctaggcccatgttgctcttgccagcttcttgtccatcctccatgcccatgtcctccaggatgcac

SEQ ID NO: 8744 - DNA, 399 bp, Homo Sapiens
atgtttagaggtggagatattagggtaaatcagtatattgctcctgtcatcaaagtttttgttcatttgtgtgccacatcgaatagcagcacttctcaaagtttgtcaactggaaaaaagtgtttaaaactgtttttttcttaagcagatttggtgatgtcatcaatatctatgatatcgattggtaaaaggtctttctttgttgaggatttgagctctctttttaagagtttattttattttaaaggaacatatgctttgaataacaattctctgggcatgtttaactaacctaggtgggaaaaccatggtgctgtttaattgtaaatagattgatataagattggaccagtacttgatgtgtataattttagtatgtagggtttatgtgcttttttt

SEQ ID NO: 8745 - DNA, 1681 bp, Homo Sapiens
  misc_feature (679)..(679): n is a, c, g, or t
  misc_feature (682)..(683): n is a, c, g, or t
  misc_feature (912)..(965): n is a, c, g, or t
  misc_feature (1163)..(1163): n is a, c, g, or t
  misc_feature (1256)..(1256): n is a, c, g, or t
  misc_feature (1321)..(1321): n is a, c, g, or t
  misc_feature (1402)..(1402): n is a, c, g, or t
  misc_feature (1438)..(1438): n is a, c, g, or t
  misc_feature (1486)..(1486): n is a, c, g, or t
  misc_feature (1488)..(1488): n is a, c, g, or t
  misc_feature (1601)..(1601): n is a, c, g, or t
  misc_feature (1612)..(1612): n is a, c, g, or t
ggggaagagggaagtcgtggtggtcgcgagagagccggaaagatggtggttaccagatctgcacgggctaaggccagcatccaagccgcgtcggctgaaagttccgggcaaaagagttttgctgctaatgggattcaagcgcatccagaaagtagtactggatctgatgcccgaactactgctgaatcacagaccactgggaagcaaagtttaatccctagaactcctaaagctagaaagaggaagagcagaactacaggctcactaccaaaggggactgaaccatctacggatggagagacctctgaggcagagtcaaattattctgtgtctgagcaccatgataccattttaagggtaactaggagaaggcagatcttaattgcatgctccccagtgtccagtgttaggaaaaagccgaaagtaactccaacaaaggagtcttacactgaagaaatagtgtctgaagcagaatctcatgtttcaggtatttctagaattgtgcttcctacagaaaaaactacaggagccagaagaagtaaggctaaatctctgacagatccaagccaagaatctcatacagaagctatatctgatgctgagacatcaagctcagacatttcattctctggaattgcaactagaagaaccaagagtatgcagaggaaaattaaaggcnacnnaaaaccttggaaaaacccggcccccagacccccaaaaaggacgcccaccacccacggaagcgcgacagcacaacgaaggagcccccgaccacccccgcaccgcgccccagacgcacacgaccgcacgacaacaacaaccggacccgcgaccccccccaacaccggccccgcaaggccgcgcgcacccgcgaacaacgccgcgcagcccgcgcagcccacacaacgccgnnnnnnnnnnnnnnnnnnnnnnnnnnnnnnnnnnnnnnnnnnnnnnnnnnnnnngcgaacgacaacgacccgggaacagccaccgacccgggagacaccaggagaaccgcacgcccagcgcgggcgaccccgcagccacaccgaaaccgacgagcagccaaaaaaccccgcccgaccacacggacccgacgcacacccccgcgaccacggaaaaaaaccgcaacgcaccacagaagacggacaacacacccncccacccaagaccaccaacgccgcccgaggccacaacagaccgaccaccgcacacggcgccatatacgcacgcccgaagacgcacaagaaccngcgcagccaaacatgacacccgcacaacgagcgcccgacacccgagatccggcagacacgacacncgacgggtgacaccgcagcagcatacccaccgacgccacaccgaccgcccggaccggacgtagcagcccagcgaaaccccnctcccaacgagccctcctcccacgataagacaaacngaccgccagcgaatgcaccaccaacgccttgcgacccaagaatgcacngncacacgcgcggacacgaccgcgcgccgacacaccgcccccatgcgccgcacataataaaaatcaaacgcgcccgaaccagagaccacccacggacggcacatggacatccacngcgccacgccncaccgcccaccgcgcccagcccgggcaccgcgacccaatcattcccccgcacggcgccgcacaaccacc

SEQ ID NO: 8746 - DNA, 454 bp, Homo Sapiens
gaagcttgcggagcccaggtgaacaagctcagcaatcggacatctctggggaaaggaaggtggcacagaccatgttccctggttcctccctgccccttgccaggcttccttattccttactatgggaagaggtcatatcccttccctgcccctcgctgtctttagcaagcaggtttcactgcttcattagaagaggacaagtcaaaagtgaatcatttttcactacttaaggaataaatccaagagctttccagagactggctgctgcagccctgggaatgtctgtggaattactatgtggaaatggaactttgtgttatgctctagacattacagttatttgagtgttactcgttactgttgaggtcagtgcttcgtggcaaatggctgtactggatatcccagctctgctgcccttgttttgctgcatgttaaataaaaccattttcactgc

SEQ ID NO: 8747 - DNA, 803 bp, Homo Sapiens
gggggcgcgtcggccatgagcgagttgccgggcgacgtgcgggcgtttctgcgggagcacccgagcctgcggctccagacggacgcccgcaaggtgaggtgcatcctgacaggtcacgagctgccctgccgcctgccggagctccaggtctacacccgcggcaaaaagtaccagcggctggtccgcgcctccccggccttcgactatgcagagttcgagccgcacatcgtgcccagcaccaagaacccgcaccagttgttctgcaaactcaccctgcggcacatcaacaagtgcccagaacacgtgctgaggcacacccagggccggcggtaccagcgagctctgtgtaaatatgaagaatgtcagaagcaaggggtggagtacgtgcctgcctgcctggtgcaccggaggaggaggagggaggaccagatggacggtgacgggcctcgcccgcgggaagccttctgggagcccacatccagtgatgaggggggagctgcaagtgatgacagcatgacagacctgtacccacctgagctattcaccagaaaggaccttggaagcacggaggatggggatggcactgatgactttttgacagacaaagaggatgagaaggcaaagcccccaagagagaaggccactgatgagagcaggagagagacgaccgtgtaccgagggctggtccagaagcgcgggaagaagcagttgggctcgttgaaaaagaagttcaagagtcatcaccgcaaacccaagagcttcagctcctgtaaacagccaggttaataaaagcacatgccgtg

SEQ ID NO: 8748 - DNA, 1157 bp, Homo Sapiens
  misc_feature (94)..(94): n is a, c, g, or t
  misc_feature (103)..(103): n is a, c, g, or t
  misc_feature (704)..(723): n is a, c, g, or t
tgcaggaacatgattgcggagctgcggatagaactgaagaaggccacaacaagggtgtgtcacactgagctgctgctcagtcaggtttcccaanagctctcanacagtgagtcggtccagcagcagatggagttcttgaacaggcagctgttggttcttggggaggtcaacgagctctatttggaacaactgcagaacaagcactcagataccacaaaggaagtagaaatgatgaaagccgcctatcggaaagagctagaaaaaaacagaagccatgttctccagcagactcagaggcttgatacctcccaaaaacggattttggaactggaatctcacctggccaagaaagaccaccttcttttggaacagaagaaatatctagaggatgtcaaactccaggcaagaggacagctgcaggccgcagagagcaggtatgaggctcagaaaaggataacccaggtgtttgaattggagatcttagatttatatggcaggttggagaaagatggcctcctgaaaaaacttgaagaagaaaaagcagaagcagctgaagcagcagaagaaaggcttgactgttgtaatgacgggtgctcagattccatggtagggcacaatgaagaggcatctggccacaacggtgagaccaagacccccaggcccagcagcgcccggggcagtagtggaagcagaggtggtggagnnnnnnnnnnnnnnnnnnnngagctttctaccccagagaaacccccacaccagagggcaggcccattcagcagtcggtgggagacgactatgggagaagcgtctgccagcatccccaccactgtgggctcacttcccagttcaaaaagcttcctgggtatgaaggctcgagagttatttcgtaataagagcgagagccagtgtgatgaggacggcatgaccagtagcctttctgagagcctaaagacagaactgggcaaagacttgggtgtggaagccaagattcccctgaacctagatgggcctcacccgtctcccccgaccccggacagtggttggacagctacatatcatgggactaccatggagactccatcatgaaccaccagctaaaggaaatgatgggcccaattcaggggttaacttggccataattggttggggaccaaaaaacc

SEQ ID NO: 8749 - DNA, 1033 bp, Homo Sapiens
agctggaccgcaagcagtgggccatataggatttttattttgggctccatccagattttttccaagatcatttttaaaattcatttgtcttctgtttccagagtacatactttccgttctataggaatcttcactgccaatcatagtatctaccagtggctttcttagactattcactccaaagctgggactgatgtcctgccagtagagaatctacagaaataatttgaatgaattaaaaccaaatcttgatagcaggagacagcttcctgatctagatgtacaattagagtttaggttggaaattactttaaaatgtgttttttggggatgtcttcaatctctgtgtaaatacccacatgcgtatgcattgtaaaccaagtgtgtattcctgtgtatgaatttgtagaactgatttctgcttcaagagaagctgcaccgtaagtggtataaggtcccctccacctgtaaccctatatatgtctgtatatcatacactcctatttgtagtgataggatcgatttgggtatatctgctgagagacctaaaagttcatttttttaagtaccttggttaaagagtaaagattattcctcttattttttaaagaagaatgcacttgaacaaacatagagctgcatgggcaattcaaacaaatctgtgaagtgcagtacccattcagaaatcacacttcctgaaaaccgttcaaaagcagagtccagacgggctgttgatctcactgcctgtaggttgaagctcagattctgatcaattttgagaggagcagggctgcttcaaaagagcaatgtgaatacagtcagaagcttcagactggtctgtaaaaatggcgggtcccgtatttaccactaactagcaaaactgacagaaaaactcacagagaaaaaatgtaagaatccttcctgctggtgtgcactccttacaatagacttttgcaaatggagttttacagtctatatttaaaaaaaattgtatgtttgtaacaaataaagtatgcagaaaagtgaatgacaa

SEQ ID NO: 8750 - DNA, 1028 bp, Homo Sapiens
  misc_feature (738)..(738): n is a, c, g, or t
  misc_feature (809)..(809): n is a, c, g, or t
  misc_feature (832)..(832): n is a, c, g, or t
  misc_feature (904)..(904): n is a, c, g, or t
gggggagctgggggagcccccagcctggggcagcccagcaggccgctgaacaaacaccccagaagccagcactgtggcagggtgctggggagatgcccctctgagccttccctcccccctcagacctgaatgcactccacagttgggggctgcccctgccactcccctggtaatgcataaaaggggaggggaaggttccctggggcttgagctccctctgtggaggtgaggaggggagattccgttcacatccaggaggggcaaaatgactgatgtatttttatgtatctacacagagagtgcattttctctccagagatgctgtctggttaacaaaggaataacttaagaaattgattgattatcttaataaactgtgcccccccgccgcaccgaccgggacgggtatcgtctacccttaccgcgtactcccgaaccaccccatcaacccactatgaactctgcgaaccccgttgttataaagctcgtgtccccccggcccatcctcttcccaccgactttggcccgccccgtttagcccgattttattcttgtgggtggcccctccccctccctaccctccgaaagaaagatttttgcccaatcgaaccatcctttttttccgcgtcgcgagccccgccgcttccccgcttgcccggtagtaaccctaatcacgtttgtgcgcccccatgaaattcgcccgcccccccacgattacacaaccctaccttgtgggtnccccacgtaccgtacgcgtgcggccgtcgccattcccaccccacacgcacataacacacaaaacagcgacncaggccgtggcactccacccaanagtggtgccgcctttgtcagaaaccaccatcccgcccgcaatacgcttgactctctctcctacggcgatatnccaagtcgtgtggggggacccacacccgcaccaccaagatgcggcggcgtttactcatgcgcctagttaaccgcgcctccccattttatatatcgcatgctccctttgccgctccctctccacg

SEQ ID NO: 8751 - DNA, 258 bp, Homo Sapiens
gggaatgttgacaacaggctcgagattgtcctgggtcacataatgccagctgagcgtaaaaagccagcaagtatggaagaaaaagactctttaccaaacaacaaggaaaaagactgcagtgaaaggcggacagtgagcagcaaggagaggccaaaagacgatatcaagctcactgccaagaaggaggtcagcaaggcccctgaagacaagaagaagagactggaagatgataagagaaaaaaggaagacaaggaaccc

SEQ ID NO: 8752 - DNA, 779 bp, Homo Sapiens
ctctgcgagaggctgggaaccggcggcctcacctcctccgaccgcctcccactccgcagcggaatcggacatgtccaaaccaccgtgttacgaagaggcggtgctgatggcagagccgccgccgccctatagcgaggtgctcacggacacgcgcggcctctaccgcaagatcgtcacgcccttcctgagtcgccgcgacagcgcggagaagcaggagcagccgcctcccagctacaagccgctcttcctggaccggggctacacctcggcgctgcacctgcccagcgcccctcggcccgcgccgccctgcccagccctctgcctgcaggccgaccgtggccgccgggtcttccccagctggaccgactcagagctcagcagccgcgagcccctggagcacggagcttggcgtctgccggtctccatccccttgttcgggaggactacagccgtatagaggggcgcccggcgccccgggccccaccggcgggactcctggcctgactgcgggggttctttacatgctttccctggactcggggggaaggggccgttggctcacgaaaagacatcccccccacccgggctgcctcatctcgggcacaggtctacaccacccgctgccaaggaactgccgccacacgctatacccccaggttcgggcgctgaattagacccaccccactctttgatacgcaccaacgcctaccgaccagtacgcccttacccgcgaccccgcgtggcacccccgcgcctgtagcggagtgaccgctggcggc

SEQ ID NO: 8753 - DNA, 1551 bp, Homo Sapiens
ctgggaggcgccgggagcccgttcggttgcgggtgtctctggccctgcggtcagccctgggaacgtcccggagagctagattcctagaggcccgattccgctagcccggaacagacaaagccagcgctcccgcccgctccccgacttaggatccgatgccggcagcgtcctggggcccccgtagcggggctggaccatgagcctgctggacggcctcgcttcctcgccgcgggctccgctgcagtccagcaaggccaggatgaaaaagctcccgaagaagagccagaatgagaagtaccggctgaagtacctgcggctgcgcaaagcggccaaggccacggtgtttgaaaatgctgctatttgtgatgaaattgctcgtcttgaggaaaaatttcttaaagcaaaagaagaaagaaggtacttgctaaagaagctcctccagcttcaggctctaactgaaggggaagtacaggctgcagctccttcccacagttccagtttgcccctgacttatggtgtggccagctctgtgggaactatacagggagctgggcctatttcagggcccagcactggggctgaggaaccatttgggaagaaaactaagaaggagaacaacaagaacaaggcaaagagaacaacaaactggcaagatcatcaccgacgatctggctttcatgatgagagtgccatctatcccgttgggctatggcagtactcgaatatatgccagcatgaagtgcccagaccagaagttgtctatatacctggtcaagatcaaggactggtggtgtgcagcctcagtttgaaaattgttcctgaagatgacccccagaatgccattgtcagctcttctgcagatgcttgtcatgcagaactgctcaggactataagcactactatggggaaactaatgcctaacctgcttccagctggagctgacttttttggattttctcatccagccatccacaacctgatccagagctgtccaggagctcgaaaatgcatcaattaccagtgggtgaaatttgatgtgtgcaaacctggagatgggcagctacctgaggggctgccggagaatgatgcagctatgagctttgaagcctttcagagacagatctttgatgaagatcagaatgatccccttctgccaggatccttggacctcccagagcttcagcctgcagcctttgtgtcttcttaccagcccatgtacctgacacatgaacccttggtagatactcacctgcagcacttgaagtctccatcacagggtagcccaattcagtcttcagattgaacaagaagggatcagatgccacatcgtttttgtcgtgattaatttaacttaaactaaaattttgggtatatgaaagaaggcagcaattcagaagtaaagaagatactaacgtatttcatcatggaaggtcctgtggtgatggttttccctgggaaaaccttcagctgctttatttttagtaataaatttctcttgtcaattctgtttactttcatcttggtaatcgggatgtaatcttttttgcttag

SEQ ID NO: 8754 - DNA, 484 bp, Homo Sapiens
  misc_feature (143)..(143): n is a, c, g, or t
  misc_feature (206)..(208): n is a, c, g, or t
ccccggagttttttcaaaccaaatccccggggggggcccacgtaacccaattcccctttcggggaacaacctctcaacccctgcttagacaggaattttaattcattccccccattcccttttcagccccccgatgaaaaagnccaaggtcccacgaaaaaagattgcagagctgaaaagccagggtaaaaccccaaagaattgannnagtagcaggtgagggaggtgtttaactacttcattctccctcatcaataaatattgctatttacaaggcacaaaagccaaaggagaaaattgataaggaaacaggtcattcaaagtgactcagcattttcactgaacacagatccaaagttaaagctatccaagcatattgctgctggctttttcttcctcttgcaggactcaaaaaaggggctgggagaagaaaccatccgcccaagggaggcagcatccatccattataccaggcccctgccac

SEQ ID NO: 8755 - DNA, 640 bp, Homo Sapiens
  misc_feature (425)..(502): n is a, c, g, or t
atacccacaatctgacatgtcctaaaatgtaagggattatctctaaggggttgatggaagaaatatttagatgtaccctgttaacagccagtcattttgattaacttatggaaatcaagtgaataaaaggcaacataatttgggaaattttattctaatatctaataaaaacagtttgagtggttgaagacatctgcatgaaattgcacctaggtgcattacttgatataactctcccctaaaactgttgtaattgcattttttcccttttcttggcacccctttagaaatgtactgaagtctcatttttcacccatttcagccatgggacatttttcataatattaatgtaaagatgtttgtgttactgtttataaattacaattgtaaataaattactagtttgcccaaaactttgttcttannnnnnnnnnnnnnnnnnnnnnnnnnnnnnnnnnnnnnnnnnnnnnnnnnnnnnnnnnnnnnnnnnnnnnnnnnnnnncccttgcttggccgcctcgcccctcgaaaaagttttctaaaccattcgctttggcgcgccggccccagaaggtaagggaacatgggcatacctgtttccaaggaaatcctggccatgactagggcttggattctcccc

SEQ ID NO: 8756 - DNA, 547 bp, Homo Sapiens
gattttagatattgcttagtaccgtttttacattttggtctttactaagtaaacatcttagctttgaatatgaagttaaagttaagccatcagtaagatattcaaaccttgattttttttctcacatacagagtaattactgtatgagctgtattgaactattttctcatttgatcccatttgtgagtaatggcacctatttgtaagatggttgtgaggcgggtgggagttcagtctgtggccctaaaagaataggcctgtgtgaagttcaaatccaaaatgaagttccaaaaaatactacgttctagctgcttaaacagtctgtattttccacattatgatggattcaaagcaaataagagtcacacttcaaagtcagaagttgcattcctcttaaaggatatttgtactcggctgctactataagacaaaggttaacttgacaggctcaatgtctctgttatatattgtggaaaaattacctaaaatagctatcatttattaaatttctattttctgttaggtgctttacaaatgccatgtaaag

SEQ ID NO: 8757 - DNA, 1004 bp, Homo Sapiens
ggtattcaggtgtatgtggatcaagttgatgaagacatagtggcagtaacaagacactcacctagcatccatcagtctgttgtggctgtatctagaactgctttcaggaatcccaagacttcattttacagcaaggaagtgcctcaaatgtgcatccctggcaaaattgaagaagtagttcttgaagctagaactattgagagaaacacgaaaccttataggaaggatgagaattcaatcaatggaacaccagatatcacagtagaaattagagaacatattcagcttaatgaaagtaaaattgttaaacaagctggagttgccacaaaagggcccaatgaatatattcaagaaatagaatttgaaaacttgtctccaggaagtgttattatattcagagttagtcttgatccacatgcacaagtcgctgttggaattcttcgaaatcatctgacacaattcagtcctcactttaaatctggcagcctagctgttgacaatgcagatcctatattaaaaattccttttgcttctcttgcctccagattaactttggctgagctaaatcagatcctttaccgatgtgaatcagaagaaaaggaagatggtggagggtgctatgacataccaaactggtcagcccctaaatatgcaggtcttcaaggtttaatgtctgtattggcagaaataagaccaaagaatgacttggggcatcctttttgtaataatttgagatctggagaatggatgattgactatgtcagtaaccggcttatttcacgatcaggaactattgctgaagttggtaaatggttgcaggctatgttcttctacctgaagcagatcccacgttaccttatcccatgttactttgatgctatattaattggtgcatataccactcttctggatacagcatggaagcagatgtcaagctttgttcagaatggttcaacctgtgtgaaacaccttgcattgggttcagtacaacctgtaaggtgggg

SEQ ID NO: 8758 - DNA, 430 bp, Homo Sapiens
ctgcaggatcttaaacgacccgaagacctgagcacgtccagtactggaagtggacaaggtatagccaacttaggaagccatctcccagttctggggctatagaacagtaaagggagagggccgtggttctttgggaagggtagtcagagcgccagcactgaggagaagacagctgcattcttgggacttgtttggccctcaggctcaggcaccttccagtccatctttctgcccttctcataaagacccttgagcaccttgtggaaagactcaggctcagtgccatttttgcttagctccagatactttcggtacagctgaagggctgtgcgggcatcctcaataccgtcatgggtttccccttgaatcttcaggtccagaaagtaccaagcaaggaatcgcagggaaatcattcgtcttcgggtcgttt

SEQ ID NO: 8759 - DNA, 394 bp, Homo Sapiens
ggatggtgatctagaggatcccaggatgcgtagatcaggaagttgagcacagcaaactccaacagagcgcagaagcagaagacgaagcagatggcgatatagaaatccaaggctgtgatataggagacacgcgggaaattcttacgagaaaaggtgcccaacgtggtcatggtcagaacagaggtgatccctagagaggtccgggctggagcagactctgtcttgatccaaaaggaaacccaggagagcatcgtggtcacggaagaagggacatagttttgaaaggcaacatagccaaaccgcctgctcacattgaagaaaatcgtcatgaccatgaagtcacctgaaagacacaaaaaacatcactgcattacagtggatctacgtaaatcct

SEQ ID NO: 8760 - DNA, 931 bp, Homo Sapiens
  misc_feature (861)..(861): n is a, c, g, or t
  misc_feature (880)..(880): n is a, c, g, or t
  misc_feature (886)..(886): n is a, c, g, or t
  misc_feature (915)..(915): n is a, c, g, or t
acatggcggccaacatgtaccgggtcggagattatgtctactttgagaattcctccagcaacccatacctaataagaaggatagaagaactcaacaagactgcaagtggcaacgtggaagcaaaagtagtatgcttttatagacgacgtgatatttccaacacacttataatgctcgcagataagcatgctaaagaaattgaggaagaatctgaaacaacagttgaggctgacttgaccgataagcagaaacatcagttgaaacatagggaactctttttgtcacgccagtatgaatctctgcccgcaacacatatcaggggaaagtgcagtgttgcccttctgaatgagacagaatcagtattgtcatatcttgataaggaggataccttcttctactcattggtctatgacccctcattgaaaacactattagctgacaaaggtgaaatcagagtgggacctagatatcaagcagacattccagaaatgctgttagaaggagaatcagatgagagggaacaatcaaaattggaagttaaagtttgggatccaaatagcccacttacggatcgacagattgaccagtttttagttgtaacacgtgctgttgggacattcgccagagccctggattgcagcaagtctgtgaggcagcctagtttgcatataagtgctgctgcaacttcccaagacatcaccttgtttcacgctatggatacattgtatagacacagctatgatttgagcagtgccattagtgtcttagtaccactcggaggacctgttttatgcagagatgaaatggaggaatggtcagcctctgaagctagcttatttgaagaggcctggaaaattggcnaagacttcaatgacatacngcagantttcttccttggaatcattgactagcacnttgatatattactgtg

SEQ ID NO: 8761 - DNA, 479 bp, Homo Sapiens
cgacccgaagacacctcggggatttgctgctgacacattaggacgcccataccctggcttgaagaagccctgctgctcccaccaagggtaccaggcagcctccacataccgagggctgtaggagtcgggcatggggccactgacatctttcttttccccgggtggggttgggaggtcataggtaatgaccccaggatcccgtttctccctcttctctggttttggtttcttcgtgctcccctggaggtggctgctgctgttggatcttctgcttctgttggaatttctctagcttctcccgtttctatcgcctcgttcttgagcagagcagctgtctttgggagggcaggagcctcggggcctggctgatgagagagaggcctggctcctgagtatagaaccacttctcctagcacggctcggaattctggctgccggacacacgtgacaaaccagcgagtcacattattcctgcgtgt

SEQ ID NO: 8762 - DNA, 951 bp, Homo Sapiens
tttaattcatgggccccggggtttccccttggggaaacgcgcttttggggcccacgtctcaccttcgccttgagtgggcgcgcggcggcgccaaaacggaaggggtcttgggaaaactttcttcaaggggcccgaaggcgcccgcacaattatccctcaatttaccatggggttgggatccaccagggaattccccggagagggactttacttaatttgcgtctgtggccatgttaccattttaaaatgggggctgccgggccaatatgcccagctgggtttttctttaatagggcaataaggatagcaattcaccattcagggggattagtttcacccataccacaccattggggggatggcaaaaacggggtctaaggaaaaggggagggtgtttaagggaaaggaggagggtaagacccttgcatttgtagaagtcattactatttctcagtagtggtcatattggctttgccggcaacctcaggatgggattagagaaagaaaggagcatgtcctatcttagacacctgggtgggtggctgcctgcaaggagaaggaggcttagggacacatttcacaagaaaccagcacccacattggtcagatgaagcttcctcaattttcagccaccacttacacctttctgtaccggctgcaagaggaagaagaaaactaaacttataatgttgtttggcaaggagagattcaaacttaccatagtcaaaagaatctatgttaagttagtttgcaaatacaccatgaagaattcaggtacattaagtttctctagcttcctcttatctttctgggatttgccctgcataaacacagtcctctgcccaaacaatcccaccaaaacaggtcctcagaaaacaacttcatgtttcactcctgcgcagagtggctggcttcccagaaagccttaacataacagagaaccaggttacc

SEQ ID NO: 8763 - DNA, 501 bp, Homo Sapiens
gaggatccaaacgaccgaataattactacattactatattagacagaacatttctatcctaccactaaatatttcccgtgattccaaacttttcaaatcactttaaaacctccttatgtatatctcacaggacaggacttcctttctgttataaggggtaacattattaactcgagaatgtttttacgccagaagagttttcaagttgtgtgctatgcatgagcttgtccaacttgtcaaagggatttaaaaatttcactctacagaaacatgtttcagaaggagaattctgattggctgcagtcagaccacctagattgaactctgctttctctgcatcagggaccacacctaagattgtaaactgggtcacagcaatcaggaaggaaggagttcgtttctaaatacagctggaaaagtatttgcattacgtctctgatttttcaggtccatggtttattaagtacaatcatctctctgtgttgttaaaacacaggtgag

SEQ ID NO: 8764 - DNA, 521 bp, Homo Sapiens
tgttgtactacaccatcactctaagccacatactgggaactggaaacttccacatggagctgacacatgtggcaccactggtactggtggaggggcagaaaggggttctgtagaatgtcccaccaagggctgagcatgatcataaggagcaggagaacacactgagtccatgctgagtgtgggcaggagcacctttccagcattagggttgctgggatccacataggcctgcatgggataacctggtgggtaaccagcaaagggatgatgcggggcattataaccaagagagtcatagggcagtggtgatgtcattcccaggttctgcatctgttgctgttgtttctgagcctcccgttgagccacctcttgctcaaacaacttccggcgttcctctgtagaaagtttattgcggtctttaactcgtactttctttttagaagttggtgtatcatatctgtcatctggcctttttgttccccgctcataggcagaagagggtggtgagagggagcttcttc

SEQ ID NO: 8765 - DNA, 559 bp, Homo Sapiens
  misc_feature (438)..(449): n is a, c, g, or t
ctaacccctagtggagaacttccaatagcgtagatatattgtatgttcaacctgtttagtaaagtgatttctctgatacagtatctgaaaatattccttaactattttctacaactttgcatttgtctatcttagtattatattacatggatatgcggtaacttatttaactactaacttccctttgcaattccttttccttgctgtctagctcccatgtcttgaccaactttgcattcccctccaggaccttatgggcacatgggttcctatcatttcacgggtatgtagactcaggaatgtggcatcgacttctgggtggagtacagatgactgacacccccaccccgattcggaggaattattcaggggtgtgatataacacctacatacatttatttaacccgcctgggccataggagccaggctccatctccnnnnnnnnnnnnttcattagttattagttcctcgactcagtgtcttcttccccaggagaaagaattgcttgttattgctattgaacttctaaactagggtccgagctcgatcgtatctgtca

SEQ ID NO: 8766 - DNA, 406 bp, Homo Sapiens
  misc_feature (113)..(132): n is a, c, g, or t
gaggataccagacgaccgaagacttgacagagtcatccccagccagctggagccactgacccacctgtgtctgagtaactgggaaacaaggagtgtaggagtttgagagttannnnnnnnnnnnnnnnnnnnaaactttcatgcctttccatatttctgctcttagatattctgttaaaataaaacaacggctctttccatgggagtagtttctagcttgctaattcttttttgagagagtgtttgcatgaggttttaagtttttaaagtcttggctcttatattttgtaggagccctagactccagatagtggtctaatagaaaattagccctggctcctgcctcatgtccacagctgataatctgtgtgactttgaatggcctccttgtgtcttcgggtcgttt

SEQ ID NO: 8767 - DNA, 242 bp, Homo Sapiens
tcgagctcggtcccccattaaatggatgaactgcatgtccattatcttaagccaacacctctacttatgtactagatcccattctttcttctcccctttctctctgtattagcaacatttccttcttttactgtaccgtataaagatgctatattttctcccatctttaaaaaagaaaaagtctcttttaaccctatatctccctccagctactaactgtatttctctcttgtgctttaaag

SEQ ID NO: 8768 - DNA, 364 bp, Homo Sapiens
  misc_feature (106)..(115): n is a, c, g, or t
tgttgctctgaggatcccaaacgacccgaagacagaagagaaggggtaacatctttttagctgaaggacttatggcccttgattagggccgaagggcttaagatcnnnnnnnnnnctgcaaagtatctgaaaatgattaaaattattttgacagctgcaagtaattgggaagtaggtgaaaacaggaagttcaggcacagaataacctcactagttccagattccaccaataattcagtgttcatagtaatttcaacatgagtagctgatgtttattattatattacatattcattttcaagcaatagagaataaaactataactatccttttcaagtaagacccattaggtcttcgggtcgtt

SEQ ID NO: 8769 - DNA, 179 bp, Homo Sapiens
tagcgatatggacaatgcacgatggcatgtcgtggcaaaaacatggaagtgagactaatctttctctctggacggggcataacagtagctgttgtatgggctgtgtttcgaaatgaagacaggtgggcttggattttacaggatatcttggggattgctttctgtctgaattgaattaa

SEQ ID NO: 8770 - DNA, 288 bp, Homo Sapiens
aaacgacccgaagacccagttgcttggggaccctgaaggctgcataactcgtagccgggtctctgcctggaggagcgggctggtgttaattcactgacccggggagctgtgcctgcctgtcagcctctccagctgtgttggtgctgaaaacctctcttcctcattttggtccctgctatggcttttgattcaaggctgtggtttgagttctaccacaaagccagataatgtggcatgagcagctcacgcagggactgcctgcctcccgtcttcggtctgttggtccag

SEQ ID NO: 8771 - DNA, 245 bp, Homo Sapiens
gcggtccaaacaaccgaagacgagaatttggtgccacaggccttcccggtaggagacagaataacatcgtgtgtgtcatgttttagccaccaaaatctatcaagggcaaggacatgatggcttttattcttcctgctgcttctttctgctcaaccacagtttcaatcagaaccaattcaagtgaacactgcaactgctgactatcccccaacattctttttgatttagtggtcttcgggtcgtta

SEQ ID NO: 8772 - DNA, 387 bp, Homo Sapiens
ctagttttagaagtttcaattagcaaatggggtggaaagtagagttctcatttactcccgcccgactcatgtataaactctcccactatcagcatcctccaccagagtgtacgtttgttacaatcagtgaacttatattgacacttcattatcaccccaaatccacagtttatatcaagcttcactcttggtgtacattcaatgggtttgggcaaaagtataatgacatgtacccaccattacaatatcatacagaggagtttcactgctttaaaattcccctgtgctctgcctattcctccctctcttccccctaaccactgatctctgctattgaaacttctaaaactaggtgctatttgaaacttctaaaaactaatgggggat

SEQ ID NO: 8773 - DNA, 542 bp, Homo Sapiens
tatacatgttccagatatatcatgttccagtatcacccagtcttccagaaaatccacgtctgccgcaacaatccaagtcttccgagataatttgggtcttcctagaaaatctacgtcttccaaaaaagccatgtcttccagaaaatccacatcttccaatggcctccaggtcttccagactatccatgtcttccagaaaatccttgtcttcccttaaatctatagcttccaaaaaatccgggtcttccaggaaatccgtgtcttccagcaagtccacgtcttccaacaaagccatgtcttccagactatccatgtcttccagaaaatccttgtcttccctcaaatccatagcttccgaaaaatccaggtcttccaggaaatccgtgtcttccagcaaatccacgtcttccaacaaagccatgtcttccatcaaattaatgtcttccagcctacttgtgtcttccaacaaaggtacgtcttccaacaaaggtacgtcttccaacaaaggtatgtcttccaacaaaggtacgtcttccagaaca

SEQ ID NO: 8774 - DNA, 581 bp, Homo Sapiens
ccctagattgagaagtttcaatagcagtgagaacgcagtggcgggggaacatgcccatgctctgccccccaggcagggcgaaagagagcacggagatgaaggaggagaccgcagaggagcggctgcggcggcgagcctacgaacggggctgtcagcggctcaggaagcgcatcgaagtggtggaagaactacaggtccagatcctgaagctgttgctggacaacaaagatgacaatgggggtgaagcttctaggtatatcttcctgaccaagtttcgcaagtttctgcaggagaacgccagtggccgggggaacatgcccatgctctgcccccctgagtacatggtctgcttcttacaccggctgatctctgccctgcgctactattgggatgaatacaaggcttccaatcctcatgcttccttcagtgaggaggcctacatcccgccccaggtcttctataatggcaaggtggactactttgacctgcagcgcctggggggcctcctctcgcacctgcggaagaccctcaaagatgacctgcttcctaactcaacattgtgatcgacccactgcagcttc

SEQ ID NO: 8775 - DNA, 144 bp, Homo Sapiens
cattgctgcctgggggttctagtgctattgaaacttctaaaactaggagctattgaaacttctaaaactaggtgctattgaaacttctaaaactagggaaacttctaaaactaggtgctattgaacttctaaactagggtactc

SEQ ID NO: 8776 - DNA, 542 bp, Homo Sapiens
ctaggtacacacacccggcgttacatgcattttttatcaccacaaactgaaactctgtacccactgaaaaagagctccaaattccaccctcaccccagaccctggtaaccactatgtcactttctttctgaatttcccttcatatgagtgggatcaaacaagagtagtccttttgtgtttagcattcttacttagcaagccatcaactgctcgaacagtcactggggcaactacttattcgcccagtgtcctccagaaaagaaagatctggagggtcaggccactctttttcttcaaaataactggggtgcagaagggtagggatgaacctcttcctcctttgccactttagctttagctcaaaggaactccaactctttattatttgcaacagttagctttctttgtttcacatctctgccttgcagaaccatgacctatcaaggtgtcttgtcaaacaaaaactaatactttccctgggaaaaagccatgtggtagcaagtaccagaaatttatatggccaactatacaccactatatcc

SEQ ID NO: 8777 - DNA, 658 bp, Homo Sapiens
  misc_feature (546)..(546): n is a, c, g, or t
aaactataacatgattttattggttcttctaagtgccaagtttacaaaccacataatcctcaggtatggaattatctggacatttatggcacaatcagggctcttggactccattcattatctctaccctcttccaagtatttggtttcttcattgttctggcctctgtcctagtggtgtaatggacacatcagttcctgtttccacatctgtgcatacccttagcaagatcttctggataacttgctgcagcttccacatcagcacttgctgcttcaccttgcacttttatgttatggaaatggcttctttccttaaacctctggatcaagctctgctaacttccaggttttcttctgcagcttcctcacctctttcacctttttcttctgcagcttccttcacagaactgaagagaattaagaccttgctctggattaggctttggcataagggaatgctgtggctggtttgatctttatccaaaccattcaaactttctccatatcagcaatagggctgttttgctttcctaccacttgtatngtcattggagtagcactttaaattctttcagaacattgggcaggacagtttaaagcatatgtctgactgacatgtacacattttattcttgagtacaggctctttctctagt

SEQ ID NO: 8778 - DNA, 676 bp, Homo Sapiens
tttttttcccaaggttcaaatactttttattagacacggccaggcagagaagaccatgggagttcccgaggggccccagctttcaagggcgacgggagagacacaggataaaaggttaaaagtgcagaggcagagtctggggctcaggttgggtctagggtgtcctcaaacaggctgaggaggttccgaggctcaaaggaggggaaggagccccgaggaggctctgagttgatgtcacttaggtccagggcatccctgggaggagagagtagtgacactcaggatccaaaagctagccctgcccaccccagcccctggacctgcttacctgggtgtgcacctgctccggggggtggaggtgctccccacagtccgggccaggacagcctcaggggagagtgaaggcctgcaggagggcaggcgagacaaggagggtgtccagggctagggagtgccggatgaaaccagctctgtccctgtgcaggctccaggctcccgcctgacaaacaggcagggagccacagtcagggacaataaaaacttggtgcactctgaaagcagcacttggacagccttcaaagtccttccatctggctgcactccaaggccccctctgtccttttcagaacacatggacttggaggcagatttgaaataaacttttagtaaatgtaaa

SEQ ID NO: 8779 - DNA, 808 bp, Homo Sapiens
  misc_feature (639)..(639): n is a, c, g, or t
ctgtggttaccttctcattcatgtcaagtatgtggttcattcttagaaccaagggaaatactgctccccccatttgctgacgtagtgctctcatgggctcacctgggcccaaggcacagccagggcacagttaggcctggatgtttgcctggtccgtgagatgccgcgggtcctgtttccttactggggatttcagggctgggggttcagggagcatttccttttcctgggagttatgaccgcgaagttgtcatgtgccgtgcccttttctgtttctgtgtatcctattgctggtgactctgtgtgaactggcctttgggaaagatcagagagggcagaggtggcacaggacagtaaaggagatgctgtgctggccttcagcctggacagggtctctgctgactgccaggggcgggggctctgcatagccaggatgacggctttcatgtcccagagacctgttgtgctgtgtattttgatttcctgtgtatgcaaatgtgtgtatttaccattgtgtagggggctgtgtctgatcttggtgttcaaaacagaactgtatttttgcctttaaaattaaataatataacgtgaataaatgaccctatctttgcgcccacccacccgtagcgttagtgcggnggccgtggtgggccggcctcgggcccttcaagaaagtttctaagaccttttcgttttggcccgggggggccccagtagggtaacgggaaacccggggccactaacctggtttccttaaggggaaatccccgggccaatgaccaaggggctttggaattccccccccaac

SEQ ID NO: 8780 - DNA, 185 bp, Homo Sapiens
cagtgtgcaaacattatataaaaatagaaatactaactctacaggcagtatttcctgataaattatttaaatagcatatctacacaatctgagatatctattccaatggcaatgagaaaataatttataaaaataaagcaatggtataccagatgatagaaaaaaaacataactttcagaaatcc

SEQ ID NO: 8781 - DNA, 1489 bp, Homo Sapiens
  misc_feature (1221)..(1247): n is a, c, g, or t
cgccggaacctgggcgatccacgatgccgagtttgccacgctgcgacagcccataggcttgcccccccgggcattcgggtggactacgaacacaaactgaagccctaggacttgtcgcccgtttgcgctctcgccgaggcacaggctgctcgcggaccaccctgctccgaaaactaagaggtaggtggtagcccattcatctggttactgatactggccggcatcagtggactgtcggcaggtccttgagcaactggtgtgtgaaatgggacggacgtcaaaggacaagcgggatgtctactaccgcctggccaaggagaatggctggcgtgctcgcagcgccttcaaactgctacaactggataaggaattccaactcttccaaggcgtgacacgggcagttgacctgtgtgcagccccaggcagctggagccaggtgctgagccagaagatcgggggccaagggtccggccacgtggtggctgtggacctgcaggctatggctccactaccaggtgtggtacagatccagggggacatcacccagctgtccactgccaaggagatcatccagcactttaagggctgccctgcggacctagtggtgtgtgacggggctcctgatgtaaccggtctccatgatgttgatgagtatatgcaggcccagctcctcctagctgctctgaacattgctacacatgtcctgaagccagggggctgctttgtggccaagatattccgaggccgggatgtgacgctcctctacagccagctgcaggtcttcttctccagcgtgctgtgtgccaagcccaggagcagccggaactctagcatcgaggccttcgctgtctgtcagggctatgaccctcccgagggcttcatcccggacctgagcaaacccctgctggaccattcttacgatttcaaccagctggatggtcccacccgcatcattgtgccttttgtgacctgtggggacctgagctccctatgattcggaccgccacttacccacctggacctaaaagggcgggcttcaaagtaccaagtccacttccaccccaaacaacgcccccccatccccggccgaccataacaagggaaggcccttggaacgcttgcaaaaagggaaagggggacacccctggccacaaggggagaattccggcccacccagggaactggccccccatccacacagaagtgcggacaccgtttttnnnnnnnnnnnnnnnnnnnnnnnnnnntccgagtggcccacgccctttggtggggccccctggagaatggggcaaacacccccggatatatgtaccgcgtgtcccccctcacccccacctacggtgtgggccaatttggcaccccattctccaaaaacgggctccaacgcgcaccgcaaaaaacccgccaatctgtgatgatagaactttcggtctctaaaagaatcccaccaattataccgagggaccttggaacaacagaacgcttg

SEQ ID NO: 8782 - DNA, 696 bp, Homo Sapiens
atctgaaattattataggagtggaataaatacttattccgtggccgttatatttaagctccatcactgcttaacctttggtacttttattctgttaaacagaattgaagaaagagtattataccagagtgtagtaagctagggtgattgtaagaactctgtaatagaatgtcattgtggatgttacctttttcagatccaagcatataaaaagcctgtatattttttaaaaacacatcttaactccacgctttacgatattataaaagttgaatggttcctcttggtaaggatatttgcttacaagtgctaggaaataactcactgatacctgcgttaacatactttgttttgcctagagaggggcaataaaaatgaaccaaaggatatttccagaaaggattaagaaagctgtttaagaaggccatgactctttaggtgtgtatgtgtacctttcagcatcctaggaatttttatactaaaagcaaaatgttttttccagttagtcttcttcaaggaattactattgttccttttgtcacaggtaaaatcagtgttgggaattataatttgagaaaaatattacccagtaacattgaatgtagatggctaaacgattcttactcagtgtgatgtataatgatgcaacagggacccttgtaaattgtcatacgccaataaaatgtcacaagtaata

SEQ ID NO: 8783 - DNA, 888 bp, Homo Sapiens
  misc_feature (597)..(617): n is a, c, g, or t
gggagttaagctgaggtcgtctgagccctgcgacagcctggacagcaactcaggatggcatcaggcagggcacgctgcacccgaaaactccggaactgggtggtggagcaagtggagagtgggcagtttcccggagtgtgctgggatgatacagctaagaccatgttccggattccctggaaacatgcaggcaagcaggacttccgggaggaccaggatgctgccttcttcaaggcctgggcaatatttaagggaaagtataaggagggggacacaggaggtccagctgtctggaagactcgcctgcgctgtgcactcaacaagagttctgaatttaaggaggttcctgagaggggccgcatggatgttgctgagccctacaaggtgtatcagttgctgccaccaggaatcgtctctggccagccagggactcagaaagtaccatcaaagcgacagcacagttctgtgtcctctgagcaggaaggaggaagaggatgccatgcagaactgcacactcagtcccctctgtgctccaggactccctcaataatgaggaggagggggccagtgggggagcagtccattcagacattgggnnnnnnnnnnnnnnnnnnnnncctgagccacaggaagttacagacacaactgaggccccctttcaaggggaccagaggtccctggagtttctgcttcctccagagccagactactcactgctgctcaccttcatctacaacgggcgcgtggtgggcgagcgccaggtgcaaaagcctggattgccgccttgtgggtgagccctcaggctctgagagcagcatggagcaggtgctgttccccaagcctggcccaatggagcccacgcagcgcctgttgagccagtttgagagg

SEQ ID NO: 8784 - DNA, 1447 bp, Homo Sapiens
  misc_feature (379)..(379): n is a, c, g, or t
  misc_feature (385)..(385): n is a, c, g, or t
  misc_feature (956)..(956): n is a, c, g, or t
  misc_feature (1009)..(1142): n is a, c, g, or t
cgggaggtttatggggtgtgccccactcctcgcaaaaaatggacgggggcgggcactatatttgattttgagacccgcgtgggattccctgttggttggattccaagtaacgacccccgagactcccctttggggtttgtttaaaaaccggtttgagtttccccgcgggcggttgtttttttggtgggggaattccaaagcccttgtttcattgccccaggttttttcttgggggaaccagggtttgggcccagagttccgctttcccttcatggggcccggcggcacccaaaaaggaaatggttttaggaaaagcttttttcgaggggccgggagggcgggcccgaccaggggctgtgcgcgtttaaccgcgtggctntgtggngttggggtccaacgtcccccagccctttaattcgcagggagaaaggcaggttatccccccaagttaccccagaaggcaaggggggggccagggagatgatagacccccttctccaccccagccagcccatcccctcctgcactgttcccaagaaagctgcggccagcgcagttcactggacgttagtgggggctcaggtcctgggtgctggcgctgagggtccgaggggccgttgtccaggtgccagctggggaaactgagtcccaggagcccttggagcatccacgttcagtgtgttgagtgacatggctctcttcattcccggctgctcctgccgccgcctcgcctcggagccgggagaccagcttctcacttcctcgcctgatagactcacggatcttggagagtgagctgctgcggcgaagggcctgttctgcgtcaccagctgtgcctgtgttgggggcaccgagaggggcgggtaggtcctccttgtggaggatttctttgtacagctcttccgcttgttgatacttgttctgtttcaggtaggctgaggcctgcggagaagggngtgtctgggaacttttcggaccccagttcccaacactgcatccagtcccgccnnnnnnnnnnnnnnnnnnnnnnnnnnnnnnnnnnnnnnnnnnnnnnnnnnnnnnnnnnnnnnnnnnnnnnnnnnnnnnnnnnnnnnnnnnnnnnnnnnnnnnnnnnnnnnnnnnnnnnnnnnnnnnnnnnnnnncccactttctaatgtgctgacctggccgtatccttcccctgcctaaagccttgccctgggccagagtgggtttggagctcggccttacttcctgccctggggatggaggacaggcagcctcctgtttctgagcctgtctgctgtactttgggctggtggcatggcctcggtgcctcagtcttcccacacgcaaagtggagcgacagctcccacctcatagggacgctataagaactagcgatgtggggaccgggctaagaggggagccggccacagtgagctcaataaatgtctgctgctgccaa

SEQ ID NO: 8785 - DNA, 534 bp, Homo Sapiens
tgacggatctgccctcacacctccaatagctggctgaagctggcttcttgagcctcagatcccaggaagatccaccttctgagctgccttgtgcaaccctccccattaagcgtaggctaggaggtttccgggaggctgctcagctggatctggagccagctggctttgctccgttccctggctagtctgtgcctggtcaccagggaggctgagtgaggggctgtgaacagttgccggaagcaccccctccctccccggcccgtgcagcagtgtctgagctgtagtgaaagtttcagggcctgcaaaagaagaggcttgggcacaggactgaccatggctccaggggtttaggacccccagacctgtgaaggtgggagcagctcaccaccttcacgcaggctttgtatgttctctgagccttagttgattttggcccccaaaccaaatccaaaggttctggcccaccttgtcagaggcttccaccctgctcacatgttgggaatccctggaataaaatgcttgttcagtgtgaaa

SEQ ID NO: 8786 - DNA, 877 bp, Homo Sapiens
  misc_feature (283)..(283): n is a, c, g, or t
  misc_feature (588)..(588): n is a, c, g, or t
  misc_feature (593)..(593): n is a, c, g, or t
ctgttctagaggataccggcacagcagtacgtaccagactatttactctcacaaactcatgcagactaacacccaacgcctggagctggtcaccccccacaaataccagggcggaaggctacaggtgaattctgcctcacctctgctcaaaactggaactcaagcattccctggagggggagggtgtagggtttctggttcccagacaggatcctagccatacaagaatcctgtttccaaaggtagtcttttaggatacgctgcaggaccactaagagtcccnccagcttctaaagactgagggttagaaggctacattcggaaaaaacaagtcaaatatcccctcccagcccccttgaaactaccgatgaggtcatcgaccacagggcctgaggactgggtcagcaatcaggctctttgaccaccccctgccacaagaaatatccaggacattaacttactcaaaccaggaaccctatctcaccagaagagaaaccccaaggtaaccttaggcattcctttcagattcaggtaattacaaaagccaacccttagctcatagtgtcaacatctcctctaccaaccacncagcncaaggaccagtagcagaagcacatgggcgatgtctcccctccactgctctgacccacccctctggcagaaaatctaacaagctacaaaatgccagaaagacagggagtaggagaaggagaagccaagggtctctataaatcagccctgaatgcacccatttggctgccaagagcttctcactgccttgctagcagcctgccactgttccctggcaaattgaaaccacccacgcaaacactcaaaaccccaatctccttgctaataagatacaaccagttaaccc

SEQ ID NO: 8787 - DNA, 534 bp, Homo Sapiens
gggacctggacctctgggtaaccctgggtcgcctggattaacaggaaggctgagggtgtgggcaaggctgaagaaaggggactgggtacttggagactttgcctgggcccctgggaacatgtgttttgtggtgaataaattcacaaggcaagagctggtgtacaggtttaggaagaaggctctaagcaagttcttacagcacttgtttgtgacattcagtcagataatggccagaagtttttgttaagagccagttcttagaagaacctatgccaaggtcacccatagagtccattggtgtgaaagagaaaggcaaagaggtgtggcgggggagcgtaagatttggagtcagaagtctcagttctgtcatttgtcctggagcaggttattgagtctctttgaatcttggttttcacatctgtaaaatggaaagtcctgcttgtttcatgggatgggtgtgggaataaacaataaatgtcaaacgtgtggcagactcatacgaaaaccaaccaaaatacaaccaaaaaatcttgt

SEQ ID NO: 8788 - DNA, 859 bp, Homo Sapiens
ggctagaaagaagaggaaagcacacgtgaaaaggcctgaccttcataagaagacccagagtaaacacagcctcgctgaaatcctacgttcggaatactcaagcggcatggaggccgacctcgccaaggtcaaaaagcaaaacgcacctggagagcctggtggccggcccctgcagcacagtctgcagccgacaccctgctttggccgtgggaaaacattaaacatggagaaataacccaacataaggtgtacacgcgggacagcaagacttcccaaaaagtttaaaatctctctgggtcttcgagtggaacctggaagccccgggtggcagtggattgatgtccagttcttgtcagaggagccttgtgaaaaataactgcgcctttgcctgaataccacgtccccaagaatcagaggggccacagcccttctcctccatgggaggccctggagcctgatagaaatcagtggtgtggggcactgtagagactagccagctcccgacggaaggggtctgtgtcttgtattgatcccatcagtgcccggcactcccttcacccaggtgctgacgtgccggggttgagctggcaccccgggatgtgatgtaagaacgccctgcgcgtcagcctggaacgggcttgattgctgcccttaactgtgttctgaagtttcacagcttggcttcagcctatcagcgcatacattggcatgaattttgtgaattagggtgttaaaaactggaattgaatttgtacaaaaagagaatatatttatcactaattattttcttaatgtaggaatgtaccgttaaaaaggaccaaaagtttttggtctgggtcaaaaaatacgaatgtgttct

SEQ ID NO: 8789 - DNA, 546 bp, Homo Sapiens
atgtcccggaagaggtaaaattaaggcgtttggagaaactcatcacttatcttccgagaagaagcaacaaaagccaatcagacctctgtgggctgtacccagttgggtgctagtggaagggctcagtaaacgctctgccactgacctgtgtggcaggaatgatggaaaccttaaggtgatcttccctgatgcagagatggaggatgtcaataaccctgggctcagggtcagagcccagcctggggactatgtgctggtgaagatcacctcagccagttctcagacacttaggggacatgttctctgcaggaccactctgagggactcttctgcatattgctgacctgagaggatggcctcagagctgacttgggcaatcctccccaacaggaaggggagacattgcctgccactgaggaaacaggtcatgaaggtggagataagctgcaaggggcgaagcaactttatgtcagtggaaaacgtgtctctttaaagctgctatgtgaacagcttttacagtcattaaatttaccttaaattaagttt

SEQ ID NO: 8790 - DNA, 829 bp, Homo Sapiens
  misc_feature (691)..(704): n is a, c, g, or t
cgggggaaaaaaccccctccggggggaaaagttcccccgggggtgggcccttgtttcccccagagggggcgcccgaaaccccggaaaaagcccgggtattttccccgttttgccaaaaagtgagggccccggtttctgtgggaaaaactcccccccgaaatttaccccgtttaaagagggccccaaactttggccagggtttcccattatttcttttggggccccccagggcaaagggtttctttcttcttttggagaattttccaaggggaaattaggaccctttggcgttaaattaaagggaaaaattccttaattattgaaggtgggaggcccttccagtaagtatttaggatattaaagaccaggaacaaagtgcccatttggaaattagtcttttatcaaaagttatccaagtctatttttcatgagaattaccagggtattatctgcaaattaaaatgccaagcctccaaatcctcataggtatcaattaattatattttccattcctgtctcaacaatttcaacttcctgttttgagcaaactcatcagcttagatttatcaacatcttgttttaaacccttcaaagaacattatgaataaagagaatttaaaacgtttctcagctgagacatcctcattctcaaatgagaatattggcttaatttagagtttctacatggctnnnnnnnnnnnnnntgtttaaatacgtgatactgagttttccagtcatggtaaagggtttgtgctaactgacctcttctttccttgcagggctaactgcagctacctagcaaaattactagctggagttactggtgccc

SEQ ID NO: 8791 - DNA, 951 bp, Homo Sapiens
  misc_feature (19)..(19): n is a, c, g, or t
  misc_feature (306)..(368): n is a, c, g, or t
  misc_feature (397)..(474): n is a, c, g, or t
  misc_feature (641)..(690): n is a, c, g, or t
gggaattcccgcggatctngactggggtcactgggtgaagttccccgcaggaactgagtcagaccccgtctcagggccctgcacaagataggtgcctgctctaaggcgtggaccctcgccacagccctggcccgtcttgacgggcgagggttactgtacttgtcccaaccgtacagatgagaaagctgagactcagggcgagcaacccgggtcccagcggagcgcccggcacgcgccgacacttcagcaccagtcgcggtggccaccactgtgcgcggagatggctgcgacgcgtgcgcaggatcnnnnnnnnnnnnnnnnnnnnnnnnnnnnnnnnnnnnnnnnnnnnnnnnnnnnnnnnnnnnnnngacagaagaggagaagatacaggaaatannnnnnnnnnnnnnnnnnnnnnnnnnnnnnnnnnnnnnnnnnnnnnnnnnnnnnnnnnnnnnnnnnnnnnnnnnnnnngctgaaagagctagtcagcaatacaactgggatttgatatcagattcatacgattccgaagaccctgaccaccaaatgcaaaagagatcatgaaaattttactgggtaactgaagaagaattgtcccaaggacttggataaatgttaatgttcataacagtatgttnnnnnnnnnnnnnnnnnnnnnnnnnnnnnnnnnnnnnnnnnnnnnnnnnntatctacccatgcacatcattcatctaaaaaacccatttaatataatcatctagttatgtaaagatatacccaatagctacttaaaatagaaatattctatttcattattagaaattattattttaaaaggttgttaaaacatcaaaaatatgcttatttctagtaaccagagaacacagcagggttatgaaactttggattcctgtttgatttggcaggtaactagattaacaaaaatacaaggttttgagtttcaaaac

SEQ ID NO: 8792 - DNA, 325 bp, Homo Sapiens
gaactgaattctgccagcaaccgaaatggacaaggagacagacccgaacacaggccagccaacacctttcttctagcccaatgagtcctttgtttgacttcaggcctatagaactgagagataataaatttgtcttgtttaagccactaagtttctgcttgttgatatggcagttatagaaaactgataacagatagtttcacacatgtatctggcatttggcaggctatttggcttcagctgggatgacttgtctcctttctattcaccagtaaactaacctgtgcttcttcacatagtgtcttcggtcgggtatcctcaagag

SEQ ID NO: 8793 - DNA, 1067 bp, Homo Sapiens
ggaccggtccggaattcccgggatcttaaaggtacaggcctcagggtccctgctgtagacggggcgggggagagtacgatgggtggggcgtggtgggtcgtagggcgctcgagatggagcccccagcttccttgatggatcgcggggcgcgagtgccctagacaagccggagctgggaccggcaatcgggcgttgatccttgtcacctgtcgcagaccctcatccctcccgtgggagccccctttggacactctatgaccctggaccctcgggggacctgaacttgatgcgatgggaggctgtgcaggctcgcggcggcgcttttcggattccgagggggaggagaccgtcccggagccccggctccctctgttggaccatcagggcgcgcattggaagaacgcggtgggcttctggctgctgggcctttgcaacaacttctcttatgtggtgatgctgagtgccgcccacgacatccttagccacaagaggacatcgggaaaccagagccatgtggacccaggcccaacgccgatcccccacaacagctcatcacgatttgactgcaactctgtctctacggctgctgtgctcctggcggacatcctccccacactcgtcatcaaattgttggctcctcttggccttcacctgctgccctacagcccccgggttctcgtcagtgggatttgtgctgctggaagcttcgtcctggttgccttttctcattctgtggggaccagcctgtgtggtgtggtcttcgctagcatctcatcaggccttggggaggtcaccttcctctccctcactgccttctaccccagggccgtgatctcctggtggtcctcagggactgggggagctgggctgctggggggccctgtcctacctgggcctcacccaggccggcctctcccctcagcagaccctgctgtccatgctgggtatccctgccctgctgctggcaagctatttcttgttgctcacatctcctgaggcccaggacctggaggggaagcaagaagcagagagcgcagcccggcagaccctcattagaaccgaggccc

SEQ ID NO: 8794 - DNA, 237 bp, Homo Sapiens
gggtcgtctagaggatcccggattcgtaatctactcgagccctactgagacggaatccggattctcacaagatcccaggtgatttgtttgcatattaaagatggagaccagcgagtacactggtttgtggaaggaaaaaaagagaaaagagagagaagctctgccctaaatactaattagaatggatttacaccaagaatgaccatgagaaactggagatctactgaaatcctgggt

SEQ ID NO: 8795 - DNA, 1085 bp, Homo Sapiens
  misc_feature (147)..(147): n is a, c, g, or t
gtccattctcattctgaatctgttgactggagtgaattcagtggtcacaatcccaccatcaaataagaatcactttcctcagagtaaggagctgttccgatcttctcaatagttcacacaggtctctcagatataggcaccatgttntaagtctcacacaaaatgtctgtgtcacttaaattacacaatatggcagtgtttgtcttatggggacatactgaaaggggcaaagtagaaaacaacctgtttgcatgttatatgtgagtacattattgtactgtgcatgggaatgagggcattgcagcccttgttaaagaggaattccacccaattgaagccaatgtcagttcacagctgctcttggtgcctgagagtatctactcatataaccttattttgttagatcagagccctcttcatctacagtttggctcaaatggtttgaactgagtttggtcgaactgagtttggtcgtttatctcttgccatctgagctttatttctcagcctcaggatatgtggggtacttgaccgtttctatcttctctcgaactttgtaggagggatataggcccgtccttcccaatttcctgttgacacctttagaatagccatcccaatgatttccagccacaccaatgatatctccaggttccatgggaatttcatctgcagttcggggttggtgagcataaatggcaatttgattgtgggcattctggcccccaaaatagtagatgtcatctaaagaatggaagtttgcagaggcatcaggatgtagtgtttgcataatttcataagcaactcgacagacctgggatgaaaaagtacacactaggaagtctgcctgagagagaaaatgtatatccaggatcactccacgaagtgaattttctgtgtatcgattgtgcagtccagctgaccaggaaatagagttatcactaataaattcataattggggtactttgtttttgcctcctttaataaagaagggtcatctgtggccaaatacactctttttttgtccacttgcattctgcgtgcaagaagctgaaaatgttcttcaacatgcaccatgtactct

SEQ ID NO: 8796 - DNA, 382 bp, Homo Sapiens
agaggataccaggattcgtagatatctctcagccaaaggctacctctgagccaaactggatagaattggcctgaaatgattactgcaattaccagttatttattgcagcttttatggcctagcaatcctggttgtctctttctagaatgtgtgatgggaaattgccaatatgtacaattgcaggtgagttcctgtgaacatttcatgtctacacattcttgtaaagcatgggattgctgaatttttttctttgtaaatgttaactgcattttaaagaaccacaataatttaaatcttgattatgtgaagacataccccaaagagattgttctctatttctataccatcctgaacttgcttgattttgtctgatctacgaaat

SEQ ID NO: 8797 - DNA, 530 bp, Homo Sapiens
ttctgaggatccaggattcgtagatctgcatgtgctaaggccagactctccatgtatatcaccaaggcttcaaacacaaactgttccaccagagactcttcttccctgaattccctgtagatattattaaaggcaagtgatgctcccagcctcttgaaagcattggggtgaagcgcaaggctataaagtcgcttgaaaagcgatttggtgtttactggactcttctcctgctgctgtggtgttatttgcttaatggaccatttaaggaattctcgaatacaccgaccacaaaaatctcttaaagtactgtcaacagggtccacaattccatccaatatagcttctagtaaggcaacagtatcctgactttcaaatttcttgttgttagtgaaccagtgaatcagctgcataactagtggctcatacagttgccttgtcacctgatcaacatcacacgcaagtcgaagcagcacaggaaacgtccgcttatagagctggtacatgggtggggctccctgtcccccttctgg

SEQ ID NO: 8798 - DNA, 337 bp, Homo Sapiens
gaggtgatctagaggatcccaggattcgtagatctcctcatcgaagaggccgcgcttgtaggccacctccacgggcagccggtggctctcctcagggtcgatgatgccgtccgtggcgatctgggcctccagcaggcggatgccatggtccttcaggatcaggcccttcttcatggcctggaagagggagatgagcttcccagagtaggggtccttgtacccagtgacggcgcgctcggccgacagcagcttgtccttgaactcggggcccacaatgcccatacgcacagcctcctccaccgtcagcttcagtcccttgatggatctacgacatcct

SEQ ID NO: 8799 - DNA, 574 bp, Homo Sapiens
gagatctcgcataggagtccagtcatgctccacaaatactactgtgtcagcgcctgtcaaattaagtcccaggccaccaacgtgagtggtaagtaacagaacgtctatagatggatcattattaaaccgggaaacaatggaatgcctctgaccaggaggtatgctgccatctaatctcaaataagtgacagagggcaagtgaggtttgaggagatcatgctctactatatcaagcatgcttttcagctgacagaatatcagtatcctgtgctgggccacaacagactctgtgccactctcggaagtgctgccatttcccaaaccgcagtccaacagcaatggtttcaaagctgagagcttaggggcatgttgaatatcatgtagagaagaattctgaactgccagtttttcggcagtggtcttgaattctggatgttgaggtgttaagactaatgctggatggttgcacagtttacgtaagtactgtaatgcctggaatacgtggcctgtagctttaagctttggtttttcagtttcttcagaaagtgtagctgaagaaactgtttcctcgtgc

SEQ ID NO: 8800 - DNA, 202 bp, Homo Sapiens
caaatacaatctatcaacattatagtagaaatgagctgtgattttgactaggtattacaaaactgctgctgctatttgtatatattcaaataggatattacaatttttgagggagagaattgattgtaagtcctaaattacttgagaggtgtgtttggatctagaaatctaaaaatatgggttttgttattgtgatctacga

SEQ ID NO: 8801 - DNA, 263 bp, Homo Sapiens
tgaggaatccaggatgcgtagatctgtggcatgcaatagtatgagaggcggactacagagcgaaacctccaggaagaatctgtggataaccttgaactctacttgatggtgaaatatcttgaggatgcaaatgtactgagtaaaaatctatcaaagactttgttgttggtgatgagatccacttacttcacttgaattcaacaaatattaattgagttgtttcattggggatctacgaatcctgggtcctctagtcagccccg

SEQ ID NO: 8802 - DNA, 352 bp, Homo Sapiens
gctctagaggacccaggattcgtagatcataaaacccattcctgcacctagtaatttatcctgcttgttccagcactggaagttgatcctgtatttttacctggtgattacctgggcagggctacaacctgaacaaacatttattctagccagaaaacacttcaaatggcaagatgactctttcaatatttactaatctgctattagcttaagccagtacactcataatgactttcaaacatacgaagaaaggttaataaatctgaacgacagctatcgtactcttaagtcaccaggttagtggcaaataatggtatagagcatataatgatctacgccctcctgggatcct

SEQ ID NO: 8803 - DNA, 420 bp, Homo Sapiens
  misc_feature (224)..(233): n is a, c, g, or t
ctactaagttcattcctaggaaactgcctaatgggaatgatctgacaagtgtacacaagcaaagtcattgcacctttgttctttaatacttaaaactagcccaaatgccctgtcagtaagggactggtttaatagatggtacctttatgcaatttgtttctaagtattcgttaagagagtgaggaatctctggattattagggcaagatttctaaacttgggtnnnnnnnnnngttgtgcaagcatttttgtggacaacttgatgctctaaaatataagtaacaccacattactaacagtggctttgttaggaagcagaattatggaagaactttcatgggtggctttacatatttctataatgttttaattttctataagcatgtatttcgtaaacttaaataaagaaaaaagaacact

SEQ ID NO: 8804 - DNA, 1440 bp, Homo Sapiens
gggggtggcgactgcggcgcatggcggccctgggacatcttgctggggaggcagcggcggccccaggcccgggtactccctgcgcgtcccgcggagcccggcttcccggcccagtttccagcgcccggaatccttccactgtctgtctctgcccagagcaacctacgtgcagtaacgctgactccagagcgcacccgttgggcgatgaaggcggcacagcgtcgaaaaaacaaaagaataagaagaaaacgcggaacagggcctctgtggcaaatggaggcgagaaggcctcagagaaactcgccccagaagaagttcccctaagcgctgaggcccaggcacaacagttggcccaggaattggcttggtgtgtggagcaactggagctgggcctcaagaggcagaaacccaccccgaaacagaaagagcaggctattggagcaatccgaaccctgcgcagcaaaagaacgcccttgccccggaagaggcagctgatgcactccttgtttggagactatagggctcagatggaagccgaatggcgtgaggccctgcgggctctcagagctgctgcttattcagcccaggtgcaacctgtagatggagccaccagaaagaagagccaaagggtctgcaggcctcgctctatatggagagccaaagccactctggacatgcctgatgaagagtttaggttcaatttcttttagcgtctccccgaacctgaaacaatccccctcccttggggtggtgtaggggtttgttttgagtgcagagcctttccaggacttctgttgtcagagaaccctggagttggtctgtccctggctggtccaaggatttgtagctgttgtgaaggtgtgagaccatcagataggcaaaagaccccgttcgttttctgatgaaatgttctctctttcagaagagagagagaggtgcatttagaaaatatgcaataaattgaagtgagtgttcaaagtattgtagaaggaatattgtactcagtctttaggattagattaagtggctgttggtaacaaagattagtggagaagctgtataatcgtacactggttttcacttttgaaaggaatccctgtcaaatggtttagtgcttaatgctgttatgtcatattgccctaatctctatttttgataaaattggataaggagtgaaagagtatgctgaccacctatgttagaggaagtacagaagatgcaggggtgtggtatccctggggtccagtccctcacctggtaccttttgtgcatgttgccttcattcctgagcaggttcatcctccgggaaccagcatgtcacctacaggcaggctctgtcttaagaacaagaagttttgcgctaacagttttgggcgaaactggttggcctggggatcttggttaatggtgccttcagttcaggccttgtcctggatggac

SEQ ID NO: 8805 - DNA, 497 bp, Homo Sapiens
agaacacaatcacctattcacttctcatgcacccgaatgctctgaaagagcctgatgaccagaaccgtattttagtctccattgtcttgcattgggatttgagaagaaaatcagaaaggaaagatctggtattttcctggcctaaattccccctggggaggacagggagatgctgcagttccaaaagagaaggtttcttccagagtcatctacctgagtcctgaagctccctgtcctgaaagccacagacaatatggtcccaaatgaccgactgcaccttctgtgcttcagctcttcttgacatcaaggctcttccgttccacatccacacagccaatccaattaatcaaaccactgttattaacagataatagcaacttgggaaatgcttatgttacaggttacgtgagaacaatcatgtaaatctatatgatttcagaaatgttaaaatagactaacctctaccagcacattaaaagtgattgtttttgggtgat

SEQ ID NO: 8806 - DNA, 784 bp, Homo Sapiens
ttattttatgttcttacagagtatcttaaaagtgccttaggcgaacctgtccctctctaacaagtgtatctcgattaataacctgccagtctcagatcacacatcatcatcgaagtcttccccagttataaagaggtcacatagtcgtgtgggtcgaggattctgtgcctccaggaccaggggcccaccctctgcccagggagtccttgcgtcccatgaggtcttcccgcaaggcctctcagacccagatgtgacggggtgtgtggcccgaggaagctggacagcggcagtgggcctgctgaggccttctcttgaggcctgtgctctgggggtcccttgcttagcctgtgctggaccagctggcctggggtccctctgaagagaccttggctgctcactgtccacatgtgaactttttctaggtggcaggacaaatcgcgcccatttagaggatgtggctgtaacctgctggatgggactccatagctccttcccaggacccctcagctccccggcactgcagtctgcagagttctcctggaggcaggggctgctgccttgtttcaccttccatgtcaggccagcctgtccctgaaagagaagatggccatgccctccatttgtaagaacaatgccagggcccaggaggaccgcctgccctgcctgggccttggctgggcctctggttctgacactttctgctggaagctgtcaggctgggacaggctttgattttgagggttagcaagacaaagcaaataaatgccttccacctcaccgcaaa

SEQ ID NO: 8807 - DNA, 1628 bp, Homo Sapiens
  misc_feature (1290)..(1317): n is a, c, g, or t
ataaggcaggctggtacggtccgggatttaggatggccgagccccgcgggccgctgccgccaccgccgccatgaagaagcagttcaaccgcatgaagcagctggctaaccagaccgtgggcagagctgagaaaacagaagtccttagtgaagatctattacagattgagagacgcctggacacggtgcggtcaatatgccaccattcccataagcgcttggtggcatgtttccagggccagcatggcaccgatgccgagaggagacacaaaaaactgcctctgacagctcttgctcaaaatatgcaagaagcatcgactcagctggaagactctctcctggggaagatgctggagacgtgtggagatgctgagaatcagctggctctcgagctctcccagcacgaagtctttgttgagaaggagatcgtggaccctctgtacggcatagctgaggtggagattcccaacatccagaagcagaggaagcagcttgcaagattggtgcttagactgggattcagtcagagccaggtggaaccaagctcacaaatcctcaggaaccaactttcaggggcttccatcaaaaatagatactctaaaggaagagatggatgaagctggaaataaagtagaacagtgcaaggatcaacttgcagcagacatgtacaactttatggccaaagaaggggagtatggcaaattctttgttacgttattagaagcccaagcagattaccatagaaaagcattagcagtcttagaaaagaccctccccgaaatgcgagcccatcaagataagtgggcggaaaaaccagcctttgggactcccctagaagaacacctgaagaggagcgggcgcgagattgcgctgcccattgaagcctgtgtcatgctgcttctggagacaggcatgaaggaggagggccttttccgaattggggctggggcctccaagttaaagaagctgaaagctgctttggactgttctacttctcacctggatgagttctattcagacccccatgctgtagcaggtgctataaaatcctatttacgggaattgcctgaacctttgatgacttttaatctgtatgaagaatggacacaagttgcaagtgtgcaggatcaagacaaaaaacttcaagacttgtggagaacatgtcagaagttgccaccacaaaatattgttaactttaggtatgtatgattgagctacaatgactctggagtgaagataagtttaatgcccagcagagaagtcatttaattcaggcatacttggcacattnnnnnnnnnnnnnnnnnnnnnnnnnnnncacatcactttggagagtaacttggggctactgggaatgggatttcatgtatattatgatgaatttgaagcatcagtatcatgcctgacattaatacgtaagttggcttatcattttcccactacagctattagcaataaatttcttgtgaaaagtttgagtgactgtatgttgggtttggagtccaaatcatccagtatgttaaaaggcaaaattaatcaataattgtacattctgtaatgtcttttatatatgctacttaatttaaagtataaatcatcttactaaataaaatttcaaagaatggagat

SEQ ID NO: 8808 - DNA, 939 bp, Homo Sapiens
  misc_feature (16)..(16): n is a, c, g, or t
  misc_feature (227)..(259): n is a, c, g, or t
  misc_feature (855)..(858): n is a, c, g, or t
ggctggtaccggtcgngggtgttatggatcagagctcaagctcctgcctgcaactcctgcctagagttgaagaaaagcaaactggccttgggggcacagtgtcatcataccctcaccccatatgtttggggtctgcttgaggattcataaatcagccactctggattgttgaggaatggccatggcagccacagaaaaaagaatttttctctctgagccaaggttgnnnnnnnnnnnnnnnnnnnnnnnnnnnnnnnnncatttcattggaagatctccaatggactgaacagctccagtcagcagcagttaccacaaactgtgaatctgggccccaccactcttccctgttaaccagttctgtcagcatccccctctccagcagcacttccatgaagttggttctgagactctggccgtgaacacccgtttcttcagtgatttgttttgggcttttggctcaaaaccccaggctcttgtttttgtctagactcttattctgtttcctgagcagcaggaggtagggaccactttgatgtcagacttctggtagctggacatgttctcgagatgggtggctgttcgcgacttttgtaccagagtgaaattgttagaaggagggtttctggctgtggttctaaatggagccccaggaaagttgccttctccccagggtttgtgctcagtagagccctgtggatcacagtcttgaggtcctctagcaggggtgagggagagcagcgacttcagctgagtccctgccagtggttaagcaaacaatggtttcaaaattcaaggtccccaaatggcagcattttatgttctgacctgtttgtgttatatagtggtgttttnnnncctctttggaactcttgtgttgttaataaaatgaaatgattactttttaattaaaatgaaaaaagtacaaaaataacccac

SEQ ID NO: 8809 - DNA, 1032 bp, Homo Sapiens
gtacatactgatataataggaagtacttcaggagcagaggctgcaacaaaataattactgtcccagtgttcacctgttatcacaaactcttggcaggccagccattgccagctgaaatgacacttgcccagcttttaactctcctatatgaccgaaaacttcctcagggttaccgctcaatagatctgactgttaaattgggatcaagagttataacagaccccagtctatcaaaaacagattcttataaaagactacaccctgaaaaagatcatggagacttacttgctagctgtccagaagatgaggctctcactccaggtgatgaatgcatggatgggatactggatgaatctttgcttgaaacctgtccaattcagtcaccattacaagtttttgcaggaatgggtggactggctcttattgctgaaagactacccatgctatatccagaagtaattcaacaggtgagtgctccagttgtaacatctaccactcaggaaaagccgaaggatagcgatcagtttgaatgggtgaccattgaacagtcaggggagttagtttatgaagcaccagaaactgttgcggctgaacctccacctatcaagtcagcagtacagaccatgtctcccatacctgcccattctttggctgcttttggattatttcttcgtcttccgggctatgcggaagtgctactgaaagagagaaaacatgcccagtgccttcttcgattggtattgggagtgacagatgatggagaaggaagtcatattcttcaatctccatcagccaatgtgcttcccaccctttcctttccacgtcccttcgtagcttgtttagcactacaccctttgacactgatgatggtgtacttctaaggcggatggcattgggaaattggagccttacaccctcatcttgtctgtctctctgctttgaccaccattcccacgagttccaactctagcgtgaatcaaactgagccacaggggtcaagctctcataaccctacatcaacagaaagaacac

SEQ ID NO: 8810 - DNA, 914 bp, Homo Sapiens
  misc_feature (436)..(464): n is a, c, g, or t
  misc_feature (763)..(764): n is a, c, g, or t
ctttgtctttttaaccttaagctgtttaagttgaagcattctcagatgtttggggggaaacatcctcttaaaatgggtccttgtgcttgccttctggggaggcggtcctgagcaggtgaatcataaggcatttatgcatatgttatatgcggactgcacccacctctcccccccagcctttgcctcttgggttgttgtgctgctttccccttactttgctacatttctatagttaagttggttttacttgaatgattcatgtttagggggaaaatgaaaatctcccttaaaatttgtttcaactcctcctgcaaataaaataaatgaagtggcagatgtaaaaaaacccacccaccgaaacccacaagagcccccaagatataaccatgcccgcacaccacgccaaaaaagagcaacgctcatatcctataatatnnnnnnnnnnnnnnnnnnnnnnnnnnnnngccatcgccacacccgcacacattctacttatcccgtttactattccccccaaaatataacccacctctttctggccctgtacttcctctcccccgctaaagcacaccctccctctatattaacaacagtttttctccggtgtgggtccccgcagttcgcctccccaaaatatatttctgaacgatcccccggccgcaccaccagccgtcgttctctttccccgccacccgcaaaggtcggagcgaacaatacataccgccgccgctgcttcttttttcttctaatgagtaaaaacccnnccccctctccgagcggcgagcgaaatgtgtaaggccgcccccatcaaaagaaaaccgcccccgcgcaagtatcccctagaacatttcaaaattggaaagccccacccttcaccccgcgcgcgccttccttacccgtgcattctttatacc

SEQ ID NO: 8811 - DNA, 225 bp, Homo Sapiens
acctgctgcttctcctcctcgatggggtcaaccgtcatcctttccctcgtcctggctgttctccaaggtcagtcctgcccagggtttgaggtcacagagaagaatgggcagaagggagcccctgatgcaaattttgtgtctcccacacaggtgtctttgccgaggtgcagctgttgcagtctgcagcagaggtgaaaagacccggggagtctctgaggatctgta

SEQ ID NO: 8812 - DNA, 627 bp, Homo Sapiens
  misc_feature (241)..(258): n is a, c, g, or t
cgttccttaagaaaaggaaattcatcttgcgcacagtcctttctggaagagtttagaaagcaaagaattcaccgactcagcaggaagcagaacgagctgttccttcttttgacacgcacaagctaatcccctagagagtggggatgtgggaaacggagggtaattaattctttggtcactggttcactgctgaatagccttggtcagttttggctctctcctattttagggggaaaaatannnnnnnnnnnnnnnnnnaaaaaataaaatgttcgcacaatgggagaaaattgctttaagtgttacaccttagccaacagagcccaaactccgtgtttccgttctttctctttcggtttctgctgagggctggtgacacactggcctcttgtcagtggctgccggcagggccaggaacagagtagaacctgcagcacagctcagtccagaaagcgctggcaggccttcttccaccggcacgccgtgcaccactggtcccggtgctcgaagccatacacctttgcggcacttcttagcctcccctcgggctttcctggcaccactctgggcccggggtggagaagtgacgatcagatgagatttcatcgcaggtgctggctgctgggg

SEQ ID NO: 8813 - DNA, 741 bp, Homo Sapiens
  misc_feature (152)..(152): n is a, c, g, or t
aaaaatttctcaaagtactggctgaaagagtgggggatacattaagagactgcaaataaactggcaatcacaagaacttttttagataaaatggagttgttccgaaatgtatacatttttcattccctaaccagaccttattcttgtctttntaaagaaaatcaaatcttctcggccacctagagatgatttcctttgtatcccaccagatggttcagatcttctttaaatggatcatagccttgttcttttaaacaacgcagtccccagaaaagctggtccaggggaggcagttcttcccaaggaacccactcccaactttcatttttttcaggctctacattctttggttctgaatcatgagtcacatccacttctcctttcattaatatagtaacataatggtaattctccttctcaatgaaagaattcacaactgaggcaaagtgaacatttttcaggtgaagagctgcttcttcccaggtttccctttgagcacattcttcccaggtttcaccgaactccagatgacctccagggagttggaaactgccagctccaaccgagcctttcctcttccccaggaggacgcaacgcggatgcttgcagctggtcaccacgactccgactccgactcctggccgccgcccgcgcggctgtgcgctggccgtcatagcgcgcgggaggacgcgcctggcagcggcaggaagtgacacgctcactaccccgtcccgcggccgc

SEQ ID NO: 8814 - DNA, 498 bp, Homo Sapiens
  misc_feature (32)..(32): n is a, c, g, or t
acaagttttgtatttgggaggggtgtttgttnttctttagagatcatacctactttcctgcctttttgataagtaaggcatgaaatgaaacaaaagttttgagctgtaaggtgcctataaaggatgtcactacagcattcacaatgctaggtgtgtaagatgacatggctgttaccatgtactaaagaaccccatcatgtgagagatcgctcaaagtcattaacacaaagcagtgaaaatcatccagcaaagcagtgcttatgagagactagaattcagagaaatgcaaggtacgaacttctctctaatccaagggtattctgctgtgatcttctaatcagtgatgattgtgcttatgcacacgacatcttcatgggagagaccaggctgattgcaaaataatgacaaccaaccagtttacctcaacatagctcactctgcaatgtcagacatgcagtgtagagcagtcacaaagtcaagctatgaatacagggaatg

SEQ ID NO: 8815 - DNA, 326 bp, Homo Sapiens
attagaaatgaccaccgagtatattctgtttattgtttatgatttacacagaaaatgatgggctggggttatagaacaataaaccaaccattacatttagacctgggcttttgaaaaacttgcattccattttaacaattcgtatgtatctaacaaatacataaatccagatcacaaataatcttaagagttaaacaattaagaaacacaaagaataccacatagatctacctttaaatatcagcattcatattataagaaataagaaaatgttaaaaaaataaaattaggttaagtcacaacataaaatagagaaataagatacc

SEQ ID NO: 8816 - DNA, 780 bp, Homo Sapiens
  misc_feature (367)..(404): n is a, c, g, or t
gggagctggagggagcccaccatttgcacccacctacccaccctcacccctgttcagatgaatttccagaaagagctaaggctcataaggttcccttttaagtattatttaatagttgaggccagatacttacatgcaagtctgggttatggttgttttgcctttctcagcttgtgaagtcattctaaagctagaggaagtatgtgatatacacatggactaaggctcaggtgacactatggctagattaacatctgggattaggactggaaacacatgtcattttgaactaagggaaactctttgtcatcctaatttggaatttggtccctggatggctagggatccatgaaccaggcaggtaccnnnnnnnnnnnnnnnnnnnnnnnnnnnnnnnnnnnnnnaattaagatgggctaagatggggcttgcaacattaaacatgagctgagcatccataagcattgaattgggattaaataaagatgttgggcaggaactgaacactgctaatatgatgataaatatgcctgactaaagccactacagaaatccaaagattggctcttaaaatttgttttgtggaaagactaattctctttgatactgcagaggcagtggccatggatctgttcctctgtgctaaatgtcttgtggcagggtgtgtttgtgggggagtgttcactggtactcttgagtggcctgaagtgacccattctatgaattgttaattaaggtgccaaaaaaaattaataataaagcttggttttttgaaaaccc

SEQ ID NO: 8817 - DNA, 213 bp, Homo Sapiens
gtggcgttctagaggatcccaggatgcgtagatttaggtagggactctggtgctgtaccaaacagcattcaaaaggccccagaaaggcactcagtaatcctcatggttgctgttaaggatcacactgaattaggaaatcctttatttagaggcagaaaggaaaattctggtacccctttaaagaaatattatatggataaccttgctgttcaa

SEQ ID NO: 8818 - DNA, 777 bp, Homo Sapiens
  misc_feature (16)..(16): n is a, c, g, or t
  misc_feature (55)..(55): n is a, c, g, or t
  misc_feature (107)..(107): n is a, c, g, or t
  misc_feature (286)..(286): n is a, c, g, or t
tactggggctcagatntacaagtttccccccaaaaatgtcgagtatttctcattnttctggctccaaaagggatttcttcaatgtccggagttactttgaagttcancgatgaagtttccaaagtgttctaaaatccttccccatcccacagcatgctctgggggctgagccgggagctgtctcagctgtgcagccacgtattctttactatcacaaaaggaatcgagaaggccgtccgtgccatcctccccaaaatctggagcactgctattcgccacttcagtntcgtctagcacactcatgtccatcatgcccatattctgcaggttctccagacttgcttccatgtcctcctgcccgtctctggaatcgtcttccagtgccataatcttctgggccttcctcctccatcttcagatcctttaacacatctcttggctgacttcttgctggtggctgctaactcgatgccaatttcatcacgatcttgcccctcttctgtaaccgccttcttgagccgctccatcaggacgctcttgttgccgcccgtgtccaggttccgcttcttcagctccgcccgcacatcgatcaccctgcagctcgctgagccgcgctcgtcccagtctccgcaacgccctgggccgagagaagccgtgccatgggcccgagtcgcccgacccgggcagagtctccgccatcgtcgcgttcccgtcttcgccaccgactcagtcgcacaccgccggcagctatagcggctctgaacacaaaatggcccc

SEQ ID NO: 8819 - DNA, 512 bp, Homo Sapiens
agctgtgtctcagctcacaccaagggtgggggttggatgctcttcttccctgttgtgacagacagatgccctgtcattatgtttttatgtgaaatttcacagtgaaagaaggaagccactcttgagaatacagcaatttaaatcaggttgtaatttttaaaaagtgatttacaaaaggtctttcccaaaatactgccatcataatcatctagggtggggagaaaaatagggtgcggagggcagaatcacccctcatccttgctcttccagcagggaacactcattttcacacccttgtgcctctgcagccccaccctttgttgaggtttgtgctgggcatgtacgttccacagagtctgctggtttccagtgtgacagaaatctcatttgtgataaaccttgattttgaattgtagtacatgaaactttaaaaaaagcagacattaaaactccctgtttttttccctaggaaaaggagcattccatcttctggcatcactgtccttgggact

SEQ ID NO: 8820 - DNA, 238 bp, Homo Sapiens
tctaagaggatcccaggattcgtagatcatcaactatatggctaccacctttaagctaatgaaatcataagagctacagtggtaatctcttatactggatatggcaagtgctgagaaaaaagcactgctaactaagctcagatgctgggtaagacacttaaggccagcgctgtgactgaaccatctggtttaaatgcactttctggccctggcttctccctgtccctttcacttcatg

SEQ ID NO: 8821 - DNA, 761 bp, Homo Sapiens
ggggcctagcgcaatggcggcggccgcggcggagcagcaacagttctacctgctcctgggaaacctgctcagccccgacaatgtggtccggaaacaggaagaggaaacctatgagaatatcccaggccagtcaaagatcacattcctcttacaagccatcagaaatacaacagctgctgaagaggctaaacaaatggccgccgatctcctaagacgtctcttgtcctctgcatttgatgaagtctatccagcacttccctctgatgttcagactgccatcaagagtgagctactcatgattattcagatggaaacacaatctagcatgaggaaaaaagtttgtgatattgcggcagaactggccaggaatttaatagatgaggatggcaataaccagtggcccgaaggtttgaagttcctttttgattcagtcagctctcaaaatgtgggactgcgggaagctgcccttcacattttctggaactttcctggaatttttgggaaccagcaacaacactatttagatgtcatcaaacgaatgttagttcagtgtatgcaagatcaggaacacccgtcgatcaggacgttatctgctagagctacagctgcatttatacttgcaaatgagcataatgttgctctgttcaaacattttgcagacttgctaccggggattcctacaggcggtaaatgactcgtgctaccagaaatgatgattctgtccctaaaatccctcgttgaggattgcagatactggtccc

SEQ ID NO: 8822 - DNA, 446 bp, Homo Sapiens
  misc_feature (327)..(346): n is a, c, g, or t
caggatcgtagatcgggcaaagaggcttaaatcagctgcaaactatttggtctcggcttcacaactctgaaataactgctacatcttaagttcccttcgaccgctagaaaagtgtgggattctatcaacctgcacgctggaaagggctgaaagtgcagggctgacttcacatcagaatcttctctttcatgaggatcctggctttgtcaaaggaggtgaatttcaaaatgtatgattcggtcactttagtttgtgacagggtcagaccttcctaatccaaattcaaggtttttctctttacagtacaggaaaatctgggtgcctgcnnnnnnnnnnnnnnnnnnnngggggttctacaaaaccggggggacccttaaaagccaaccggagggctgtgcaggcggggacagggccgcggtaaaaaacggggaaccggattacacggg

SEQ ID NO: 8823 - DNA, 249 bp, Homo Sapiens
cccaggattcgtagatcagagatcgcacatcacaacagctaccatcataataggacagggacagggctgctacctatgaagccctactatactcaagtctaccagaagatttgggtagaaatggggttgataagcctcactatttataaaatcaggagtgctggtaaaagaagtaaagctggccaggtacagtggctcacacctgtaatcccagcaccttggatctacgctcctgggatcctcgaccct

SEQ ID NO: 8824 - DNA, 364 bp, Homo Sapiens
aggggagattcaatgatggcggttcataggtccccatgcctttgcaggcttggtgcagctataagggcatctcgatccacatcaaaaccctgaggacgctcgctttagcctggtcccaaatgtcagcagagccaaggacgaatgtgccaagggtccacaaacctggctgaatggttgtaacgattctgtcaacgggtctctttaaaaagtgtggagaaggccaagcctctggtggtaaacggcacacaggtgctgactaaagcaaggcctccagtcaccaagggcaaattgctgtggtaacttaaaagggaagaatagaaatggaccatgatgtctcacattctttaatttttttgcaaagaaa

SEQ ID NO: 8825 - DNA, 342 bp, Homo Sapiens
cagattgataaaaaaataataaataaagtaacaggatctttctagaacaattatatctgtggtatgacaatcatactcattatactttgtatggctgactcttttacaatgagagcttttcaaatattctcaaattaaaaacaaataatagccatttgaactaggactcagttcagcacctagcaagaaagacagcattggccttccctgggtataacacaggggccgtcttggcccttcctccaaggaattttcagccaggaagcgggctcttgagaaaacagatgcaaatacatctgtctccttggaatgcaaggtctcctaatcatgaagatgcaaaca

SEQ ID NO: 8826 - DNA, 397 bp, Homo Sapiens
ttacctactattcttgccagtggtgtaacattgagcctcttcgctgcatctgccgtcatgagaaccagagcagctgctccatcattcagtgtactggcattggcagctgttactgtgcctgaaagcaaaaatgaggttgaagtcaaaacattccttcacaataaatgtatttggttcaattcaacaaatacctattgcctgggctgctaaatgtttaaagaaattacaaatatgggtggagacaattcctgccctcaggaaacatgtacacagctaactgcaagacaatgtaagaatgcctttttgtgtacataaaacagttttctcaaacatcacaaacatgcatgatggcactggataaatgctcgtcgactactgtgtatggggtccggggatc

SEQ ID NO: 8827 - DNA, 252 bp, Homo Sapiens
ctaggaactgtacaaagttggtaattcttgggcatacagtgatttcagggtgaggacactaaaacttagagaatccaagggtcttgggataaggtcatgatagctaacagaaccataagaaattcaactcattctatagtttttgtgtgctttctaccacacaccagtgcttcttaagtttcagttatttacatatattatgtaagttcctagataaatctatacagtgaagctgaatctcctgggcgtccg

SEQ ID NO: 8828 - DNA, 503 bp, Homo Sapiens
ggggagaacagcacactgacatgcagggccagctcaggcgctaccacgagctacacatccgtccattcgtttaatcttcacagcagccctggaggtcacccaggcatggaatgcacagctctgccagacagaaagcgctttggatgcctgagaaacaacagcttgtccgggctactgatgcgaagagaggccatggtttcctttttctctgctctgaatggcagccttgacgtcacaacagctaggaaccactggagggacaaataacaaggcgcaagccagaagcgccctgctctgtcgcaggggcagggccattttcatccagttctgatgtcttctgtggccgctgcgagtcggcgggagtagagacaaatgactggagctttaggcgtaaaggcggtctctctctaggctgatcaaacagccctttgcccagtgctaattgccttcacggaacctggataaactacagttcccgaattaaacttgtttctgatgaacta

SEQ ID NO: 8829 - DNA, 1161 bp, Homo Sapiens
  misc_feature (938)..(1076): n is a, c, g, or t
cccgcatccctcaacaccacttacagttgttgctcagtcggaagtctgcagccaaagagtctgtatgccagtcagtcctgggtctcatcctcaaggagaaagccatgaccgacactttcactcttcaggcacatgatcaattctctccattttcgtctagcagtggaagaagactgaatatctcgtataccagaaacatgactcttaaagatggtaaaaacaatgtagccatagctgtaacgtataaccatgatgggtcttatagcatgcagattgaagataaaactttccaagtccttggtaatctttacagcgagggagactgcacttacctgaaatgttctgttaatggagttgctagtaaagcgaagctgattatcctggaaaacactatttacctattttccaaggaaggaagtattgagattgacattccagtccccaaatacttatcttctgtgagctcacaagaaactcagggcggccccttagctcctatgactggaaccattgaaaaggtgtttgtcaaagctggagacaaagtgaaagcgggagattccctcatggttatgatcgccatgaagatggagcataccataaagtctccaaaggatggcacagtaaagaaagtgttctacagagaaggtgctcaggccaacagacacactcctttagtcgagtttgaggaggaagaatcagacaaaagggaatcggaataaactccagcaaggaaatggccagttaagtagtgtcttctctctccaccaaaaagaggaagtgcctccagcttttctgggggtctcataaagagcagttttactaaatgattgtatgcttatgctgaacacctttcatattggagaatcatgcatttgggtcactaattatctcaaaatatttcatactaataaagttgaattattttttattggaagccnnnnnnnnnnnnnnnnnnnnnnnnnnnnnnnnnnnnnnnnnnnnnnnnnnnnnnnnnnnnnnnnnnnnnnnnnnnnnnnnnnnnnnnnnnnnnnnnnnnnnnnnnnnnnnnnnnnnnnnnnnnnnnnnnnnnnnnnnnngggcgcggggccccaagaggaaagagaacggggccatagttgtccccaaaaaaaccggggccaagactagggttggaatccccac

SEQ ID NO: 8830 - DNA, 954 bp, Homo Sapiens
ggtaccggtccggaattctcgggatcggagctcggagcgctgagctgacctgccggagccgggcgtgggctgcagcctcggagctcccggaacgatggtgaagttggggaacaatttcgcagagaagggcaccaagcagccgctgctggaggatggcttcgacaccattcccctgatgacgcccctcgatgtcaatcagctgcagttcccgcccccggataaggtggtcgtgaaaactaagaccgagtatgaacctgaccgcaagaaagggaaagcacgtcctccccaaattgctgagttcaccgtcagcatcacggagggtgtcaccgagaggtttaaggtctccgtgttggtcctcttcgccctggccttccctcacctgcgtcgtcttcctggttgtctacaaggtgtacaagtatgaccgcgcctgccccgatgggttcgtcctcaagaacacccagtgcatcccagaaggcttggagagctactacgcggagcaagactccagtgcccgggagaaattttacacagtcataaaccactacaacctggccaagcagagcatcacgcgctccgtatcgccctggatgtcagttctgtcagaagagaagctgtccgagcaggagactgaagcggctgagaagtcagcttagcgggatgggcaagttccttacaatgtgtcacttgcaaataacaaagggactttgagggacatttcattaaatataattactgatactttagaggttactcatttacggtgcaattgcttctgtttgctaatgctgctttgcaaataaaacttgctgccgaccacccacgggcataaaatcaagtgcatttcagcattgcctaaagagctctgacaccacttttcatgttaagatcttcatttagctcctttactgggatttattggatgctgtaaaaaaataaatttacactggatatgtg

SEQ ID NO: 8831 - DNA, 1083 bp, Homo Sapiens
  misc_feature (263)..(271): n is a, c, g, or t
  misc_feature (310)..(318): n is a, c, g, or t
  misc_feature (439)..(447): n is a, c, g, or t
  misc_feature (645)..(645): n is a, c, g, or t
  misc_feature (859)..(859): n is a, c, g, or t
  misc_feature (925)..(925): n is a, c, g, or t
aaattattttatttttattgatgtacattgatagatgccataaatcagtagcaaaaggcacttctaaaggtaagtggtttaagttgcctcaagagagggacaatgtagctttattttacaagaaggcatagttagatttctatgaaatatttattctgtacagttttatatagttttggttcacaaaagtaattattcttgggtgcctttcaagaaaattaaaaatactactcactacaataaaactaaaatgaccagaacgnnnnnnnnnggagcaacatatgtcaatattacgtgaactaccggtagnnnnnnnnntcgtaccccgcttgatcccagcccgacaactaatagacacgccccccctgtgtggggccgccctccggcttcttagaaagatatttttttagaacacctcccgttctggcgcgccccgcgnnnnnnnnngtagggcaagaggaccaagttggggcaattgtcgctgccgctccctaaagggaaccccccccggttttcaccgcaaatgcaggcgcgcccggtgaccatcttccccccccgcaacagacaaaatacagcggccccgcgggggtgggacaaaaacccgcggtcgcctggtctttgagagaacacaaatacaccccctcntcaatgatggagggagagtattctctcagcggggcctggcctcgcgtcacactgggggcggccctctgctcgcccgcccatgcaggggggtgcgcgccacccgtgcccagaagcgcccccattatcttgtcaaccagtttctccccgcccccgcccccgcggtgttccgctgccgttttaatccaacgcgcagtggtgttggccgcatatttanatgtccggcccagttgttttccgcgcgcgccccacatgtggaagaacctcatctcccccgcacacncggctgttttaacgacaatacttcgcgaaaccatgcccgtccgggggcacgcctgtaagcgccactctgctgccgcacttctcgcacgtatgaaataacttcccgcccaccgagagcggaaaaacccgggggcagcacagatatcttctctcgtcctt

SEQ ID NO: 8832 - DNA, 440 bp, Homo Sapiens
cagcccccccctaaattaaatttctgcagcatccctttagctttcaatctccccagccccctgaacccggaaaaagcactcgctgcgcgatacacccaagaagaacctcacagccgagggtgcccctcctcggaggacagccacgcgctacactggctctccgggccacccccaggacacagggcagacgaaacccacccccagcacacggcaggaccccccaaattactcactacggggggctgtgccataggccacacaggaagctgccttgtggggacttacctggggtgtcccccgcatgcctgtaccccagatgggtgggggccggctttgcccatcctgctctcctccagccgagggaccctggtgggggtggctccttctcactgctggatccggactttttaaataaaaacaagtaaaatttgtgttttaaa

SEQ ID NO: 8833 - DNA, 848 bp, Homo Sapiens
  misc_feature (386)..(394): n is a, c, g, or t
  misc_feature (531)..(533): n is a, c, g, or t
  misc_feature (535)..(539): n is a, c, g, or t
  misc_feature (542)..(545): n is a, c, g, or t
  misc_feature (548)..(548): n is a, c, g, or t
  misc_feature (550)..(551): n is a, c, g, or t
  misc_feature (553)..(553): n is a, c, g, or t
  misc_feature (589)..(640): n is a, c, g, or t
  misc_feature (664)..(664): n is a, c, g, or t
  misc_feature (675)..(675): n is a, c, g, or t
  misc_feature (680)..(689): n is a, c, g, or t
  misc_feature (769)..(769): n is a, c, g, or t
gaaggcttaagcacaagaacatgccctgtcatgccagtggatgtgccatgccatattctccagaatttttaaactacaatcgaaagatcagctgttgtaacgtgtaaggtcatgacaatttttgtatttatattggaaatcagatttctataactcttatttgtgtacagaattctcaatggatttatatattgtgaaatttttatctgagattgggatgtggattatgcttaacagtgagagctgaaatgagaccatttactttgtttaaaatgctgtactgtgcaagtttggaaatgtaaattaatttactgtatataatatcttgagtttgtttatacctccaagtttttacactgaagataaactagctttaattcaaaacnnnnnnnnnctttataagggaataagctgttgagctaaacctgtatacttgtgctttttattttctggatgcacaatgaaagtttatacttgtatctcactgcatcatatctgattgcagaaattaaagcacaatttacaagcaannnannnnnacnnnncanannanaaaccaccaaaaacacacaacaccccaaaaacacannnnnnnnnnnnnnnnnnnnnnnnnnnnnnnnnnnnnnnnnnnnnnnnnnnnaccaaaacacccggcgaccccaanacaccccccanacacnnnnnnnnnnttttggggggcccgcccctcgggccctttaaaaaaattctttctaaaacccttctttgtgggggggcccgcggccccccncggggaggagggcaaccggggccaaaaagtggttgttcccaagaagaaaccccggggacaagaaaaaaggggggttggt

SEQ ID NO: 8834 - DNA, 553 bp, Homo Sapiens
gggggtttatcatgttttaattttagagacagggagtgatgaatcatcaccggttgtccccttatctaactccataaaagtgggaatttcaaaagaacaccctcatccaaggagctggggcagacttcattgattctagagagacctgtttcagtgcctactcatccctgccctctggtgccagcctccttaccatcacggcttcactgaggtgtaggtgggtttttcttaaacaggagacagtctctcccctcttacctcaacttcttggggtgggaatcagtgatactggagatggctagttgctgtgttacgggtttgagttacatttggctataaaacaatcttgttgggaaaaatgtgggggagaggacttcttcctacacgcgcattgagacagattccaactggttaatgatattgtttgtaagaaagagattctgttggttgactgcctaaagagaaaggtgggatggccttcagattataccagcttagctagcattactaaccaactgttggaagctctgaaaataaaagatcttgaacccat

SEQ ID NO: 8835 - DNA, 773 bp, Homo Sapiens
  misc_feature (232)..(270): n is a, c, g, or t
tgataggtactgcagcaaagccatgttgatgtgtagatgcatgacttcctcactaagctgctgcacaccagctttgcctgcatgattcaaatttgtgcctcagtaaaattataaattattgcatgtcataccttgaataatggaaacggcaaacattaaacctgtgattacccataatgtactttaataataaaaaacatggcagccaggtgcagtagagtgcacctgtggnnnnnnnnnnnnnnnnnnnnnnnnnnnnnnnnnnnnnnntttgagtcccgcctggtcaacaagcgaagaccccatgtgtctgtctgtctctctctttttttaaaggacagaggctaagctgtaaggttagccatggttctgcctgggctttgcttctgcgcttctgtgcaggctgagctgtaaggttagcatggttctgcctgggctttgcttctgcgcttctgtgctagcaggtgcccacaaaatgtctttttgaatttcttaatttttgggttctggatgcaattcgtgcacgccaagaaactacttgcttgtcagtattttaattctgtagtacatgtgtgtgaatatcagccagtacttacagtaggaggatgaacagaaaaactgagaagacctgtctttcaaaagatgggtttatccactttttaagggaaaaagtgacagtttggcatgggatttgaaaagtggaaattgtggaaaaattgagctgttgaagtcccacatataaccagatttaataaagcttcacatgtgaatta

SEQ ID NO: 8836 - DNA, 436 bp, Homo Sapiens
  misc_feature (144)..(144): n is a, c, g, or t
agagctgtctgagaatgtgtgagtggactgggtcttcggcactgcctgcattggctcagggcagtcaaccgtcgcagaggatgaggggcaacactcaggcaacctccccggccctggaggcagaaaggcccaggcagaaccacntgactgggaggaaacagaaaaagcagaggagagccaggctgcaggcgtgtggatgggaccagctcaggcagacgctgtctcatacccactctcccctctcttgccagggcctggcctggtgtctctcaggagcctgggcatgagacaaaagcagagattgttctcttgtggtaccacaggctgtaaccagtccacccagtgttgttttagaaatttaaatcggttgcccatctttttaaattggcaacatcgtttaccacattaaaatctagatgccctgcttctcttgaaa

SEQ ID NO: 8837 - DNA, 886 bp, Homo Sapiens
  misc_feature (169)..(184): n is a, c, g, or t
gaaagaataaatgaaacatttttctggttacttttttaaaaatttaaaatggaagggaagaataggggcagggcattattaggctatttctgatgcttcagtgttataaattcaacatagaggctgacaacctaaattcatggtgtaacacagctcttttccttttccnnnnnnnnnnnnnnnnggtatctgttcaatgaaaataaggtatgacccaagtttttacctagtctgactagaagtattccacttcaaggtctgaagtaggacttttaccttaaaaaacaacaacaaacaaaactatcacacaggatagataagaagattggttaaacagttttgtgtagatctttttggtgctgaactatgacatgagccttatagattgtaaaatagggatagttggaactaatgtacagaactaaattttttaaactttatttgctgttaaattctgtgaagtttcagttatctaaaataaatatacacaaatatgaaatataatgtttcagattgcaaggtaatatgtaatagtagtgtttgtaagatactcttgtctaatattaactagtagtattttgatttgtacagtcataatttgttaaaatgacttcatttaacattcactgatgtagattaataatgtaagttctgatttaaagaatggtggcaaaatggtgcatgtaatacttttgcaagtgttggggagatcggtatgttttgaaaagagtaatttaacttttgggtgccaggaaatgggttttctcaaagtccattgccggcaatgggcaggcctgcaaatactggcacagagcattaatcatacaccttattaacggtgaggtgaataactttgaaataaagttttagagaaatgttaaaaaaa

SEQ ID NO: 8838 - DNA, 430 bp, Homo Sapiens
tctcaccattatataaatccaataacacattgctttgccatatgtctgcttcctttaaaaaatgcccacagccaactgatgggaagtgctggcaccatcctgtcaaagtgttctcatggaatttggggtcactggacatcagctcctacctggggtttgatagttcagtgaaaccatctggcagccagcgttccagaaaatctgaggcatgtaattactggaatcgactcggcctcccttggggtaaatgcaactcatttgccgtttgttataattgacaaattcaattgcatgtgtcttcaagtagccaagaccgactgattcattaaaagaagacatgttataatgaatattgcgttctgtaaaagaaaagcaaagatggattcaggaactctggccatcaaaccctcaccgaaaaacagcaataaat

SEQ ID NO: 8839 - DNA, 766 bp, Homo Sapiens
gtgatggtgcattgtgtggtagaatattatgcatatgtttaaagaatcatattttctaagattatttggaagcatgtttggtaatgtcaagtggagtaccccagatacattttagacatttatcgtcatcatctgctctgagtggaaggccgttcagagaggctagaggttcttattctggctataaattatgtgagtaaaattgtgctaaccagttaaaagtactgtacacccatgctcaatatatagtcctggaaatagcaattgaaacatgtcttctcacaagagaaaatgacagttttaatgatgtatttgatgaatttaaactttaagtcaggtgctgcaaattggaaagaagacttgtggtgttttaagttgctgtggacacttttaagaaacttagaacccatggaacccttgtttatcgccatgcaaattacaatcttgaatgagtgttttttaaaaataaagtattagaaaaatgtgtagtaaagatgtaaaattaaaaaatggaattctccattaactgtggattttactaaatagaattactggtgaagcagatttatccatcgagactatctggtatgcgttatgtatgtagtctgttgctgctgaaagatgtctgtgtgcctgtatcaacatgtgacttcatgtaaagtttctttgtgttcacagttcttagcaaatgcagttacaatccatagatagccagcagtggatgttactccaggaaaatgcaggattaaaattgtccttgtggaaa

SEQ ID NO: 8840 - DNA, 401 bp, Homo Sapiens
  misc_feature (364)..(364): n is a, c, g, or t
tgtcgtcagtttggcctttcctactgcagccaggtgagagcttaagatgtcagtccccaatatcttcacagagtgcctttatgaccagtttggagaattacgatggtaaggggaagaggcagatatgaagaggaatggttaggggaattgtcattcataactctgtgctatattacttgaggggctaagaaaaatgtatggtcagtgaaacacagtagtgtacccttaaatgccttataaaagaccatccatccagtctgcgcttttgactgtgtgcaagtatcagtaataatgcttttgggggctcagatgaacagcgaacaccaatcagccaggactctggaaggaaagctccaaaaatgangaagtcctttcaacaccattttccattactgttctca

SEQ ID NO: 8841 - DNA, 417 bp, Homo Sapiens
aagtccttttgcatactatttcacaagtacatcacatcagctttcatatagctttatattattttacatcagttttacactgatggagaagctaaggttcagaaaagtgaccaactcaaagtcgtaaagtgtagtaggatttggcctcagatctttgactccgttgtgtgcagattctgctgtattagtgttccttctaaatattgtatgcagttttcccagtgttacgagattggtgttgctatccatttgttgtgaatgaagacttgtcctatagtacatgacagggctgagagtggactgtagttcttagctgaaccctttctactgtttaaaacaatcatcaggcctatcctctgctcccaggggaatgtgggagagaaaagggttcttggccaggctgtaggtggtggctca

SEQ ID NO: 8842 - DNA, 164 bp, Homo Sapiens
ctattggctggcagaagagaaccaggataaattgttgaggaagagaagccagttgcagaactgtacatataacatgccatttttatttcacctcctccacccactcaatgaacttgccagtctgtgaacaataatatgtaatgtttatcaaatctagcgtgggc

SEQ ID NO: 8843 - DNA, 637 bp, Homo Sapiens
gcgaccgccatgcccgcagtaggttctagggggcggtgctggccgcagtggactggcctgcaggtgagcactgccctgggctctggctggttccgtctgctctgctgccagcaggggagaggggccatctgatgcttcccctgggaatctaaactgggaatggccgaggaggaaggggctccgtgcacttgcaggccacgtcaggagagccagcggtgcctgtcgggaagggttcccaaggtgctcccgtgaaagagcatgggcaaagttgtctgacacttggtggattctctgggtccctgtgggaccttgtgcatgcatggtcctctctgagccttggtttcttcagcagtgagatgctcagaataactgctgtctcccatgatggtgtggtacagcgagctgttgtctggctatggcatggctgtgccgggggtgtttgctgagggcttcctgtgccagagcccagccagagagcaggtgcaggtgtcatcctgagttcaggctctgcacggcatggagtgggaaccccaccagctgctgctacaggacctgggattgcctgggactcccaccttcctatcaattctcatggtagtccaaactgcagactctcaaacttgctcatttaaaaaaa

SEQ ID NO: 8844 - DNA, 356 bp, Homo Sapiens
ggattctgttgaactgcacaatacctgaggtgtttgagcaagcttattttaggaaatattcctcaccttgaaatttactgaatgtttcttccatatcagacacactgacacagcaatctccctgtaagcatagtcatctctaagtagaaaggaaaatgtaggttctccctcttagtcatattttgtctgatgtttatattctttgtatgtgcatacacatacacaatatttgtttatattctttgtatgtgcatatgagtgtgataagttagttttggtttttacctgagagatatttagagcagcagatatctttctctctcctttcagtaatctcccgctggcccgggatcctc

SEQ ID NO: 8845 - DNA, 455 bp, Homo Sapiens
  misc_feature (23)..(23): n is a, c, g, or t
ggatgaacccacaactggaagangtgagttctaatgcctaaatgaaggcctgtaaaacgctttgcaggccccatgggaggaagaaagcccccagatcatctgttaccccagagacagggcacttattattggagcctccttacttccccctgtgtcgggcttccctgcatgccttggtgggcagtcctattatctggggaggggagcccagggctcatgccatggctcaggtggatgcttggaaacaactccagactttcttccacaaacacttgggtggccacgaggggacaatcccatcaaaagtgtaaattttatttgatcatgtggcctctctgttgctaatctctcctggaaacatctgccacatttagtgtgtgtatgtgtattcattctttctccataacttcttaaagtttcttcccctcattattaaaatgaatttaccagtaaga

SEQ ID NO: 8846 - DNA, 202 bp, Homo Sapiens
tgctgagattataggcatgagccactgtgcccggcctatatgattatttcttagagtttgattatactttaacctctcctttagttgtatttcattgaaattggcattcatgattagttctatatttgtgatactattttttaaagactccagatgttcctaggtggttccacattttctaatctgtattaatctaccggtg

SEQ ID NO: 8847 - DNA, 508 bp, Homo Sapiens
tgttgggacatgcgttaggccagaaccgacttttggaaggacgagagaaagcacagagaacaccaccttgatgtgggggcttgattttggcactgccgttggtgaaggaagcccagcggggccctgtgctcccccaagtgaggtatggaaggtcagagcttagtagtgtttcccaaggcaagaaccttgagccttcttgcttaagtgaccgcagcgtcaggttttttcagtgttattcttccaggccaagagagacctcagtcaaatcttcagaaatcccattcacggcaaagctacagtgccacatagcttgagcttctctgggaggtccatgctatacccagcacatcacctgccaggacagggctgcaggagcccatgtgcttcttctgaggagggcactggggtcctcccagccctgagagccccgtcagtactgtgcccacagcacagctttgcatcctttgtccacactgacaacgtgcgagccagagggcgaccacgccac

SEQ ID NO: 8848 - DNA, 357 bp, Homo Sapiens
tggcggcccgccaggagatcagtggatcacagattagcgttttctctattactcaaaatatgggatcggtttcaagaagttagaatttcacatacttcatgctagagagggaaacagaattctagttgctagaaaagatcaaggtgctattggttcctttgaagttaactgtctacccatctccgagggctgcatggggcttttggttaagatgtatttccagtcaccccaagccagaacccatcaacagcatccagttggacaacctgtgtatgtttcaggcagagtgtttctgagttgagaatgttttctccttaagttggaatagaaagcattagtgctgaaataaccttcaat

SEQ ID NO: 8849 - DNA, 447 bp, Homo Sapiens
  misc_feature (16)..(16): n is a, c, g, or t
  misc_feature (255)..(255): n is a, c, g, or t
  misc_feature (434)..(434): n is a, c, g, or t
gggaagggaccgcagnggaagggggcggaggcggcgtcacatccgtatccgctcactgaagattgagctgcactcacgctcaggccattggcagagcatcgacttcaagcaagtgctacacagctgagttccgccagccacagagcaactggggcatcgagatcaacgcctttgatcccagtggcacagacctggctgtcacctccctggggccgggagccgatggggctgcatccagttcatggaagcttcgangtcctagagaacacaaaacgttcccggcggaacctgggtctggactgcgacgagcacttcaaagccgagtcccgctgctgccggatatcccctcacagtggactttgaggcttttccggctggggactggatcattcgcacctaaagcgctaacaagggccaactaactgcttccgggncagttgcgagtac

SEQ ID NO: 8850 - DNA, 591 bp, Homo Sapiens
cgtccccaaaccaaggaaaagaatgttgccagaagaggagagtcaggctgtttcaaactctgctaagaagctgaaggatgttgcatattgagtagagtccattggggttaccagtcaggctgactcagggatcctctttggcagaagtagttccaatgaagtgggaggaggaagggaggagcagaggccaaatgagcgtgaggagtgtttaggagttgacagaaagtgtatccacttttttgagacgtttagccacggaagagggagagacatggggcagtaggtggaggaggagatgaaattaagggagtgtatggagttttaaaatggaaagcttgatcctgtttaaatgctgttttatgcccctacgagggcgaggttaaacatacagaatagaggcataactgatagagccaagactcccacccaggagcgggtttcgagcgtcacctctctaattcaatcccaaaggaaaagaggatacactctgggtccaggtacatgctgaggtttggtggcaggactttgaaggaggtcccatctgatggcttctatttctcctgtgaaatagtggaaccgtctacgttagag

SEQ ID NO: 8851 - DNA, 464 bp, Homo Sapiens
aagtagcaggtacactccatttcagaagctgtgtcttctctgccacacctaaattggcatacattacaaacaggttgaaatactgctgtaaatgacgcccatgctctgaaacttcccttctcaagagatttagtactgctcttagtaagtgatcactcaagcttaagttgtcataagcctgactagaaggtccaggagaggcaaaaggtgaaggaccatggcccatcttgcaaggaaaaatgtgcaataaagactataagttttgcaaacgcacccctcacttctcgcacttaggccactccagaaggtattcggagaagcgatttgaaacattaaaaaggacgttatgagcaaaccaaaaacgtacattcttgctgtgacgaaggagaatacacaatgcatcataccaatcacctggcagagccacggactactttctttgtgtgtgtcctcactacatgcat

SEQ ID NO: 8852 - DNA, 148 bp, Homo Sapiens
ggagtcacctcccccgagaggcctctggaccaccccatctgagcaggccactcttccttctctatcttaccatcttgtttctgtcccagtagttagggctacctccagtaatcctatttgtccctttactgttgagtgcgtctcgctt

SEQ ID NO: 8853 - DNA, 381 bp, Homo Sapiens
tgctagtaagcacctgtaaagcttcattgttctgatagtctttttgattctcttcccttgcagatggacccccatgagaacatcttactgagcactctcgagataaaaaatgaaatggccacatctgaggctgtgatgggacttggagaccccagaagcacaatgctagcctatgatgcctccagcatccagtatcggaaagctgggttgcccaggcatagttttggccgaaatgctctggaacgacatgtggcgcaaaagaaaagtcgcctgaggagacgcgcctcccaactgaaaatcaccatccctgacttgactgatgtgaatgccatagatcggtggtcccgcatattcttcccagtggttttttccttcttcaac

SEQ ID NO: 8854 - DNA, 413 bp, Homo Sapiens
aatgatgaaggtaatgtagtgccattgccatccatgcccatattcatgcccattccactcataggtcctgcaggccggatccccatgtgttgctgaccatccaacacaaagctccccatgggctgaccctctggactatatgctgctccttggctcactgaaggatcaagaagaaaacctgctcgatttgactggtcaatcatgggctgtactattcttcttctggcattaataaaccagttgtttacttggagaattgtaagtcctgtgtcttgcgctaactgtttcttctgctcttcggaagggtacggatgtgtgagatgctagaagagccatgctctcatgatatttgttgctactttggggaaaatgcctcttttcttctggcgttttttgtccttatccagatcatc

SEQ ID NO: 8855 - DNA, 419 bp, Homo Sapiens
gatagtgatattcccacagcccagaggaaacggtttactagagtagaaatggcccgtgttctcatggagcgaaaccagtataaagagagattgatggagcttcaggaagctgttcgatggacagagatgattcgggcatcacgagaaaatccagccatgcaggaaaaaaaatggtcaagcatttggcagtttttcagccgacttttcagctcctcaagtaacacgactaagaagcctgaaccacctgttaatctgaagtacaatgcacgccacgtctcatgttactccgtccgtcaagaaaagaaagcagcaccttatctcagctacctggggataagtccaagcctgtgatttccttagtgaagtatctgaagctagtttagcctcactcagagaactgagatgagagcagtatctta

SEQ ID NO: 8856 - DNA, 652 bp, Homo Sapiens
ccaatgagtcagtcctaccttgtaagcattatgaggtctctcttccgtggcagtggggaatttccttgctgatattgaaatcttcagtttgggattcgtgattttaccatggtgccattcttgcctctctctctaaatgccttgggaccatcatgtctaacccttcgctacagacattggtgagcacagcttaggccatggtgatgttcatactgtagtgtccaaacaggaggaaatcacccttccagtccctttctctccacactctccttcccctccacttctggctgcatataaccagaggcctcaccagaggggctctgaatgaccacataaaggaaatccgtccaataacccaaatatccacactggactgttaggtgcacgagaaataaaattccattgtgtttgaatcttggatgacagtttagcctatcctaacaccctgcctgaaatttcacttttgaaaatatactcctttgaattaaggctttttttctttgttcatccccaataaaagacatacctatctgggatatataaagtatcatgctttcttagtaatttgttcttaaatgcttcaatcagagatatactgagaactgattacagcatgagtcaggaaggagaggacatttgcaaagcgaggaaa

SEQ ID NO: 8857 - DNA, 1179 bp, Homo Sapiens
  misc_feature (557)..(567): n is a, c, g, or t
  misc_feature (1086)..(1094): n is a, c, g, or t
ggaatatccgaggattctgtatcttaggcacttaatgaaagcttcataaaagccattggtgttggactaggatttgaattgcagcggcttgaatttgatctatctccattaaacttggatataggccaagtttataaagaaacacgtttattcctggatggagaggaagaaaaagaatgggcatttgaggaaagcaaaatagatgagcaccattttgttgcagttgctcttaggaaacccgatggatctagacatcaggatgttccatctcaggatgattccaaaccaacccagaggcaatttactattctcaactttaatgatttaatgtcatctgccgttcccatgacacctgaagatccttcattttgggactgtttttgcttcacagaagaaattccaatacgaaatggtacaaagtcatgatgattccctgagtaacaaagggaaatgaaaactgtttgtgatcttccgtattcactgaaaaataaatgcttgtttagtatcaaattttatttcacgaaagtttttttaaagaacagaaacttttccaattnnnnnnnnnnngcagacttctggttcaagatagctcactggaatacatgtttacctctttctttcctaaattgcattgaattgataggaaggatggcggaatcttaaagtgatacatgctaactgtagaaaaaaatagaaaatgcacataagcaaaaggaaacatttaaatgctatctttcaaagataactactcttaaaaccttgagtatcttttcagacctttttcttggcaaatgaatccatattgacatatttgattttttttaaaaacatggaaacgtactgttttggaaaattcttttttaactgcacatctactgttcataaatataccctctggtaacataacctttttgtgggttctaaatgaactctgggtggaataactaatacaaggttaagatggcttttgggcccgcaggtaaccagtggtcccaaattataattggcgctaagtaacccctagggaaattgggtttgacataaccacagggggttccacggggtggtcatttaaagaacaccccnnnnnnnnngcccttgacccccccattgggggttggtttttggccctttaagggatatttcccaccctctctcaaattacaaaaaagaattggc

SEQ ID NO: 8858 - DNA, 1413 bp, Homo Sapiens
  misc_feature (586)..(594): n is a, c, g, or t
  misc_feature (833)..(833): n is a, c, g, or t
  misc_feature (1024)..(1024): n is a, c, g, or t
  misc_feature (1257)..(1266): n is a, c, g, or t
atccagcttattcttttattttcaagtccattcttggggctggtggggaggcaggagaatacccctccctaagcccttagtgtgtgccgagcttgctttgtgatgttggcaggggaggggagacctgggtggtgactgagttccctttatcaaacccttcaatgggcacaaaattgagtgcttgattttaggttttatttttttatgaatgtccaaatctgtgtttccccctgccctcccagactgtgtggccagttgaaagtgtctggtttgtgttcatctctccctcatttctggagcagggcctgagaccctgccacatctcctatgctctgcatccacgcctcttttggacattaaaggttgattgatcacaaacacccccgaacagaaggcgtgccccgcatggtcggcccgccctcggccctccaggaaaactttctaaaaccacttcgctttaggcgcggccgggcccacgcaaggtaaaggggaaaccttgggtacatcagcctgggctttccttagagaagaatccttggcgtccattggactaagggggctttgggaatttcctccacccacaatnnnnnnnnnccccccccagggcgcggacataaccccgaagccgtttttctttgaataaatatataatctccccagaaatcggggagaggcttctctgcgagaggggcgccattctgtaacgtttggggggcattcctctattttcagacagcacgcgcgggcgagtgttcccccaatagagcctgcgcagacgcctctctcggataatagtaatccccagaagaaatattataaccacagctgcgcgncccgcgggagcccgcccttgttgggggacccgagagttttttgcatattctcccgggcgcaagaggaaaaacaccgtgtcggtgtcggcgtcgaacagatttgctgcccacagttgtatacagcggcgcagattgttttttcttttcggtcgcccgcgagtaaaacacctgggttgggggaaacaaaagcncccccctaattatccttagcatgaaaataatagaggggagtaacaatcggtcgtatctgtcacagacgccccctgtcgtcacaaattgtctcaccccccggccgcgccgcccctttttctcacggccgcgccccccttgggggggcgcgcgccccctttttgggccgccccacatcacatatcagtttcttctggcgccctccacgtgggcgcgcgggagaataacaacagannnnnnnnnnccgggtagaaagaaaaaactatgtgagtccgtcctcactattgcggggcgcctcaacccctttttttaaacggccccaatacacaacccgggccgggcgcgaagacccctccacccccctcaggggtgaaatatgcgggccgcattg

SEQ ID NO: 8859 - DNA, 922 bp, Homo Sapiens
  misc_feature (49)..(49): n is a, c, g, or t
  misc_feature (266)..(267): n is a, c, g, or t
  misc_feature (483)..(733): n is a, c, g, or t
gccccggggtttttcttcttgggggacccaccctttgtggcccccttcntcccttttttctcttttggggggccccgggggccccaaaaagcaatggttttttgaaaaatttttttcgaggggcccgagggggccccaccaagggttctcttttccggcggggccggggtttttatccgtctacctccgtccccctctgtcttcttctcccttcttccgcctctcctttcgtcctcttggttcgtgttctcttgcgccgctggtcnngtgaaacaggagatctttttaatagaaaaatgccacagcaatttaatcaaagtctgaacaaggactttgcctgctgccacaaataccatgacaaactgtggcattatgagaagcaattaatgatgaagatatgataaataaaacatgagttggccagaatatttttactgatgtcttctcatttgacttcctggtataagatggtcaatttatcannnnnnnnnnnnnnnnnnnnnnnnnnnnnnnnnnnnnnnnnnnnnnnnnnnnnnnnnnnnnnnnnnnnnnnnnnnnnnnnnnnnnnnnnnnnnnnnnnnnnnnnnnnnnnnnnnnnnnnnnnnnnnnnnnnnnnnnnnnnnnnnnnnnnnnnnnnnnnnnnnnnnnnnnnnnnnnnnnnnnnnnnnnnnnnnnnnnnnnnnnnnnnnnnnnnnnnnnnnnnnnnnnnnnnnnnnnnnnnnnnnnnnnnnnnaaactctatctcccgcggcaggagcgattcagcgccactacctgcttcgcctggttgtggtgtggctgctgcgccaaccgaaaggcctccttaatccgcagcagtctcttttcgctcccatggctctgggactctgtccggactagccctgtccgcgctcggctacatccggcccgcccaccagctccc

SEQ ID NO: 8860 - DNA, 350 bp, Homo Sapiens
ttaaaaaccaatacagtataacaactatttacatagtgcttacattgtattaggtgttataagcaatctagagatgatttagcaagtatacaggaggatgtgcctaggttatatgcaaatactgtgccattttatatcaggaacttgagcatctgcagatattggtatcggagggcggtcctggaaccaagcatccacggatactgaggggtgacatttcatgaagtgtagatcattgtattcagagattgtaaatgaaaaaaatatagaaactatttagttttggtagattttttttctgacaatgtgaccagactgaatttcctcataaagaaaaaatggcgtgcaaa

SEQ ID NO: 8861 - DNA, 791 bp, Homo Sapiens
ttgttaaaggtgcccattagtgccactggaaaccgccagacttgtgccatcaaaggcctggtgaagctgctgaccgggttgcagagcagcggggcccacgacaagagggggcttctgaggaaagaggacctggtacttccagaatttctgcagctgcccgcccaagggcccagctccgaggagaccccaccacagaccaaatcagcagcccagcccatcgggggatccttgaactccaccaccgactcagccctctgacagctacccaacagtccaggacagctgcatggcacccggcgggccgagcatgccatgggtccgctctgcatgccctgtctgtgccatgagtgtccctggccccttcctgccatgggcaggcccgcaggaagagccggtaggggtggaaaggggactcagatgagacacaccccacagctgccaccgccttgtccctcaacaagctcacccccaatcccttgcagccaggccacaatgggggaggtgagtccagccccttggaacaggcttgcccaacatggagggatggcgttggcagtgccagcctccccagcctgtgccaagcttcaacaggggcaagaggaggggccggcccctcctcaggaagctggtatgagtaaggccttgagggtgcaggcaggcagccctgtaccccacccacatagactatactgtacatacagattttgcagtaggcttggggcagctgggtttgtccttgatgtatgatactgttattataataattattattattctgcgaaacaaaaacc

SEQ ID NO: 8862 - DNA, 1099 bp, Homo Sapiens
  misc_feature (28)..(28): n is a, c, g, or t
taggctagtagagctggggtgaatcggncgagggtcaagaacaattgtctctggacggcagctatgcgactcaccgtgctgtgtgctgtgtgcctgctgcctggcagcctggccctgccgctgcctcaggaggcgggaggcatgagtgagctacagtgggaacaggctcaggactatctcaagagattttatctctatgactcagaaacaaaaaatgccaacagtttagaagccaaactcaaggagatgcaaaaattctttggcctacctataactggaatgttaaactcccgcgtcatagaaataatgcagaagcccagatgtggagtgccagatgttgcagaatactcactatttccaaatagcccaaaatggacttccaaagtggtcacctacaggatcgtatcatatactcgagacttaccgcatattacagtggatcgattagtgtcaaaggctttaaacatgtggggcaaagagatccccctgcatttcaggaaagttgtatggggaactgctgacatcatgattggctttgcgcgaggagctcatggggactcctacccatttgatgggccaggaaacacgctggctcatgcctttgcgcctgggacaggtctcggaggagatgctcacttcgatgaggatgaacgctggacggatggtagcagtctagggattaacttcctgtatgctgcaactcatgaacttggccattctttgggtatgggacattcctctgatcctaatgcagtgatgtatccaacctatggaaatggagatccccaaaattttaaactttcccaggatgatattaaaggcattcagaaactatatggaaagagaagtaattcaagaaagaaatagaaacttcaggcagaacatccattcattcattcattggattgtatatcattgttgcacaatcagaattgataagcactgttcttccactccatttagcaattatgtcacccttttttattgcagttggtttttgaatgtctttcactccttttaaggataaactcctttatggtgtgactgtgtcttattcatctatacttgcagtgggtagacgtcaataaatgttacatac

SEQ ID NO: 8863 - DNA, 779 bp, Homo Sapiens
  misc_feature (545)..(552): n is a, c, g, or t
  misc_feature (555)..(558): n is a, c, g, or t
  misc_feature (562)..(616): n is a, c, g, or t
atgtctcggtggatgacacgggaacttttcggcctggagtggtgtgtctaagggactggctgagagtctgcagccagactacagtgaacgactctgcctcgtcagtgagattcccccaaaaggaggggcccttggggaggggcctggggcctccccatgcaaccagcatagcccctactgggcccccccatgttacaccctaaagcctgaaacctgaaccccaatcctctgacagaagaaccccagggtcctgtagccctaagtggtactaactttccttcattcaacccacctgcgtctcatactcacctcaccccactgtggctgatttggaattttgtgcccccatgtaagcaccccttcatttggcattccccacttgagaattacccttttgccccgaacatgtttttcttctccctcagtctggcccttccttttcgcaggattcttcctccctccctctttccctcccttcctctttccatctaccctccgattgttcctgaaccgatgagaaataaagtttctgttgataatcatcnnnnnnnnaannnnaatnnnnnnnnnnnnnnnnnnnnnnnnnnnnnnnnnnnnnnnnnnnnnnnnnnnnnnnccttgtggggccgccctcggccctccaaaaaatttttcaaaaccatttctttttggggcggggggccccaataaggaaaaggggaaaatggccctaaaactgggtttcccaaggagaaaacccggggcccaggaaaaaaggggcttggggatttcccccccac

SEQ ID NO: 8864 - DNA, 507 bp, Homo Sapiens
  misc_feature (126)..(126): n is a, c, g, or t
agagggggattggtggatgattttaatcagggggtaaggggaacatttattccatggaaatctgacttccagttgtgcaaaggtatgttaagacattaaggaccaattgctggaaggtttcaaatnatgtgtacacacacatagacgatacttttgtgtgtttatttatatgtatatttcacaaaagctaatgcccacagaggaaaatgattattttaacttctgggttatcatctgctggcagggtctgatcaggtctagagtatttaaggaaaagtctcctgtcttctatctccactagaagtactgcagcttgagagctgaaaggaacttgaaaaatgttatccagtcttcacttagcccatttttatcggcattaggaaatagggttcagcaatggttattgatttagcagtctggtcttatatgatctgctttctaattatctatctagtattcctatattatactggaacttcaataaattataacctatgtgaatatcat

SEQ ID NO: 8865 - DNA, 717 bp, Homo Sapiens
  misc_feature (520)..(589): n is a, c, g, or t
  misc_feature (594)..(595): n is a, c, g, or t
  misc_feature (599)..(599): n is a, c, g, or t
  misc_feature (601)..(605): n is a, c, g, or t
  misc_feature (607)..(610): n is a, c, g, or t
  misc_feature (614)..(615): n is a, c, g, or t
  misc_feature (627)..(627): n is a, c, g, or t
caatggtttttttagccatttgactggctctttaaatagtctacaagacattcacgtttaacatcacttttagtgaaataaaatgtgccatactagtatgtgcttcaaaagggcaaatgtgctttagtgccctaaggctaaattttggtcatttgacatcagagatgttgtaagtattgcacttaatacgcacctatttctcaatagtgttattttttggctagcattttctttaccactatcttgttgatagctttttgttctctaaggttgaaacatgacagtgcttatctcaaacagattacccatctgcagaactaaggaaagcaatttatgtatgaaagaaattcttgaattcgtcattctcaacctttgaattaaagcttagactaaatagtaatatatcgtgggaaggattttggttttgtgatatttctgtgaattaaggaatagatgttaaccattattttgtagaaaagtgatttgtatgtggttaattataaataaaactggtaccagnnnnnnnnnnnnnnnnnnnnnnnnnnnnnnnnnnnnnnnnnnnnnnnnnnnnnnnnnnnnnnnnnnnnnnaaaannaaanannnnnannnntttnnaaaaaactatanaccctcaaaaaaatctttcttacacccatctctttggggcccccggggcccccggaaggggaaagggcaaaccggggcaaaaaccgggtt

SEQ ID NO: 8866 - DNA, 1177 bp, Homo Sapiens
  misc_feature (812)..(812): n is a, c, g, or t
gtctgaattcaaaatggcctcatctcctgctgtccttcgagcgtcccggctgtaccaatggaggcctgaagagttcggcgcagttcctggggtctccacagctgaggcaggttggtcagatcattagggttcctgctcggatggcggcgacgctgatcctggagcctgcgggccgctgctgctgggacgaaccggtgcgaatcgccgtgcgcggcctagccccggagcagccggtcacgctgcgcgcgtccctgcgcgacgagaagggcgcgcttttccaggcccacgcgcgctaccgcgccgacactcttggcgagctggacctggagcgcgcgcccgcgctgggcggcagcttcgcggggcttgagcccatggggctgctctgggccttggagcccgagaaacctttggtgcggctgctgaagcgcgacgtgcgaacgcccttggccgtggagctggaggtgctggatggccacgaccccgaccccgggcggctgctgtgccagacgcggcacgagcgctacttcctcccgcccggggtgcggcgcgagccggtgcgcgtgggccgggtgcgaggcacgctcttcctgccgccagaacctgggccctttcctgggattgtggacatgttcggaactggaggtggcctgctggagtatcgggctagtctgctggctgggaagggtttgctgtgatggctctggcttactataactatgaagacctccccaagaccatggagacgctccatctggagtactttgaagaagcagtgaactacttgctcagtcatcctgaggtaaaaggtccanggagttgggctgcttggaatttccaaagggggtgagctctgcctttccatggcctctttcctgaagggcatcacggctgctgtcgtcatcaacggctctgtggccaatgttgggggaaccttacgctacaagggcgagaccctgccccctgtggcggtcaacagaaatcgcatcaaggtgaccaaagatggctatgcagacattgtggatgtcctgaacagccctttggaaggacctgaccagaagagcttcattcctgtggaaagggcagagagcaccttcctgttcctggtaggtcaggatgaccacaactggaagagtgagttctatgctaatgaggcctgtaaacgcttgcaggcccatgg

SEQ ID NO: 8867 - DNA, 1153 bp, Homo Sapiens
  misc_feature (694)..(779): n is a, c, g, or t
  misc_feature (809)..(827): n is a, c, g, or t
  misc_feature (884)..(972): n is a, c, g, or t
cgtggccccaggcaggatgcccagtctttgagctgaaattgaaaggcagtgaggctgagggtgccaaaatttccccagggttcacccaaaggggaaggggctacatgcccccagctgtgtgcagggaggacacatcagcccactaccgctgccaacaccaatgcctaaaacttgtttcatacatgggggttttctatatatttcagcggggaaaagcttacatttaaccttttgaaaaaataaatacgtgattagcctcaactaaacattgctgactataaagacagtatattcaccatgtcgctggcaatatgtcattgcgtaacaccaaataaccccccagaagtagccagaggccagtttgaacatcacaattctaagtgttttagtaactatttctggcgtgagtcaacagatcatgtagatagagtcaattattgtttgtggagtttttcagctataggggaggggaactattaaaatccatttgtttctattcaataggtaataaaaattagttgtccctgggtttgggaaacttaaatgcccattacagccctggggaagggttttctgtcttatggagtgagtcttagcatttaagttatacagttgctgccttaaaatagtagcctgctacaatgacttctttgggtagccattttcataagaaataaaatacaagatatgagtnnnnnnnnnnnnnnnnnnnnnnnnnnnnnnnnnnnnnnnnnnnnnnnnnnnnnnnnnnnnnnnnnnnnnnnnnnnnnnnnnnnnnnccttggcggcccccccggcccccaaaaaannnnnnnnnnnnnnnnnnnggggcgggggccccaaaggaaaaggaaaagggccaaaactgtttccaaagaaaaccnnnnnnnnnnnnnnnnnnnnnnnnnnnnnnnnnnnnnnnnnnnnnnnnnnnnnnnnnnnnnnnnnnnnnnnnnnnnnnnnnnnnnnnnnctttacgggatttttccacgggggtcccaccgagctcaatttcaatttaacccccgccctggccttttttgaaaaaagggtggaattccttaaacattctccccaaaggggaacccctccccaacgggttttattaaaccggaaatcccccggggggattaaaaaccctttggcccccttt

SEQ ID NO: 8868 - DNA, 520 bp, Homo Sapiens
  misc_feature (481)..(481): n is a, c, g, or t
ctgcccaccctgccttaggactccctgatgcgctcctggaacggccccagtgagtggcaccttagtgtgggtcgtgcctgcagatggcacccaaggccgggaagggcagtaactgcacacgcggcgctgtcagagatgggggtgggggatgcttctgggggccctgcctccccattgtgtgcccagaacatacctggccccaacccgacacttccctcgggcccttatgaaggactgaggctccagggtgagaaggctcacttctgccccaggcacttgcgtccagcagcagaggggacagggggcaggtgtgtgactgggtacctgggtacccaggcctgaccagagggagccgggagggcaaaggtcaggagggggaagatgtttctgggcctaccaaggttcaacaagagaaccggagcctggggaaatgttacttgctggaaccttgagaaggttgaaggaagttctgattcccccngttacttcctagcaattttcctcctccttgcccttaaaa

SEQ ID NO: 8869 - DNA, 331 bp, Homo Sapiens
  misc_feature (75)..(75): n is a, c, g, or t
agccaagccagccacatttccctgtgtcttgcttagagccaccattagactcaggacaggaatgctttcaggaantcgttgtcacccctttcaactggagcaggacggaaggttgtctgtacttgggagggagtggggagtggtgggaagggagttgcttgtcacacgaatcaggaaactgctctccctcagctgggctggggtctccagggacctgagctacatgcaggttgtgagctggaaaagaaagttctagactgtggcccagaatagggctggggcagctcccagagaatgaatagtgctgtttcctattggactgataaaaaaa

SEQ ID NO: 8870 - DNA, 375 bp, Homo Sapiens
  misc_feature (49)..(49): n is a, c, g, or t
  misc_feature (68)..(68): n is a, c, g, or t
  misc_feature (286)..(286): n is a, c, g, or t
  misc_feature (299)..(314): n is a, c, g, or t
gtcatacattttgatatttgagccattcctaaagatttggggttttctnaaactaaagaatctagganccttgccttgcgaccaatcattggagccacgtgagctggatcgtgggctgcacctggggggagggtagggaggaggggcatgccacctaatgatcaagccctataattagcttctcattagagccgtgatggtgatgtgtgctgtctaaaatccaattgttgtgggtagagaagaatgagtttgtgactaaggagagactaaactttttgttttcctntacccagtataannnnnnnnnnnnnnnnttaatctatttttattagaagtttttctgctctttcttacataaaagaaccccaagcatgc

SEQ ID NO: 8871 - DNA, 420 bp, Homo Sapiens
taagatcttggtggcattcagggattggcacttctacaagaaatcactgaagggagtaatgtgacattacttttcacttcaggatggccattctaactccagggggtagactggactaggtaagactggaggcaggtagacctcttctaaggcctgcgatagtgaaagacaaaaataagtggggaaattcaggggatagtgaaaatcagtaggacttaatgagcaagccagaggttcctccacaacaaccagtacagatgtccagtagacctactggatatgcaggcctgcagctcaggggagagctgggttaagaaccgtcaaggcagtaatcatctgcatttagatggcgagtgaagccatgacaggggctgaaatggcccagcaagaataaatcaaaccatgagatacacatacatt

SEQ ID NO: 8872 - DNA, 663 bp, Homo Sapiens
gacgtggccgatgtcccaccccctctgcctctcaaaggcagcgtggcagattacgggaatttgatggaaaaccaggacttgatgggctcgccaacacctccacctccccctccacaccagagacatctgccacctccactgcccagcaaaactccgcctcctccccctccaaagacaactcgcaagcagacatcggtggactctgggaacgagcagtgacatcgcaaggctctctggaaagagggtgctgcccctccccatctccatgccctctccttctgtgtcccctgagtctgctgtctacctcattgggcctgtgatgttaacatttcgtgcgactgctttttcttcaaaggagttcagttctcaccatggagcgagtggcctttagcgtcatggagcaaggtgggtctgggaggtagatatgggtccgggatgtgccatcgtagttaccagagttgggggcctctgagtgtgtctggctctgagagagtctgagtcttgcccaaacattctttctttttgtgccaaatgacttgcatttgcaaagagctcaattgctctgagctcagccaagtaggagaggctaggccatcactcttgtgaagctgagtagtgatgatgtataagaatcctcctcactgtcatgggatgttgcatcca

SEQ ID NO: 8873 - DNA, 498 bp, Homo Sapiens
tgatatccgggacggggctccggctctgccgccgggggctgcagtgcaatggcgcgatctcacctcactgcggcctcctgggctcaagcgatcctcccactgtgcccggcctgaagacagcctttagagaaagaagcaggcggagatcttccgaggacagacaagatttctggagtttggaaagggtgagagactgggtcagcgaaaggaacattccggtctttatgtagagatgcaacgtatagatacagggatgagacccaaaagagccggcagaggtttgtcatcgtgctcgcaaggcaactgccggaggctgatcccgtaaaggatacacatacctagagcggagcctaaagatgcatccagcatgacgggtggagccacgatgcttggactcgagctctgctcctgtgcgttccgtgatcaatggcttatactacctgcacctcactttttcccgggcaaaaaaggaagcttgctgacggtgcgttggcccaa

SEQ ID NO: 8874 - DNA, 425 bp, Homo Sapiens
  misc_feature (235)..(235): n is a, c, g, or t
aggcatgggtcaatgattgtttattgaataaatttactactggagtaagaagtggcttagagtccagtgtaacatggtggctgggagtgtgagtggatgaatggggggcccgatataggaactggggcctcggggatgaggccgagttccatcctgccttcttccacgaccatccttaccttcccacccccaccgctcccattctgcagatgagaaaaccgaggctccgaaaagnaaaaaccactgcctggattcccacgcctcttctttaactcatttgcaggtgagggcagggaaggaaaatcctaagggtcagcattggggagggggggactctcctaaatttcattggggcaacaggctgcaggtgagggggctgacaggaggagggtcggggtgtaataacttaaaaaccgtaggtgaca

SEQ ID NO: 8875 - DNA, 510 bp, Homo Sapiens
  misc_feature (54)..(54): n is a, c, g, or t
cttggaggagtatccacatcctcagcgggagctggagctatgatgctagattcntttgactctaaactcatacacctgtctacatgttttggtcccaattaacctagcaatggcacagaaattgtcatagtaagtgccaatgaggactctaaacattgaggcttcagcaccactccactccacattctcaggaggttcaatatttggcttcatctttattggtgtttgacaccgagaatttgcttcagaggagctcgaagtttcatctttcttctcttcttcttctttatcattgttctctccccccgtttcagtccctgcttccctatcactgtctgtatcctttgattccagcacattaatggtgggggtgctgggcctgctactgttattgggaagccgtcctcttctgcggcctcctggacgttttggtggggtctttatccgctcagcggtgagagcagcagcaaactcctttgctccctccaaatgctggtaacactgtggtcc

SEQ ID NO: 8876 - DNA, 646 bp, Homo Sapiens
gcgagtcctatgttgaaatctggaatgtctcctgagcagagcaggttccagtctgactcttcttcatatcctacagtggactcgaattctctcttgggccagagtagattggagactgctgaatcaaaagagaaagtggccttaccccctcaggaggatgctactgcatcacctcctagacagaaagacaaatttagtccctttccagtacaggataggcctgagtcttcactggtattcaaagacacacttagaaccccgccaagagaaagaagtggtgctgggtcatctccagaaacaaaagagcaaaatagtgcattgcctacgtcaagccaagatgaagagttaatggaggtggtagagaagtctgaagaacccgcaggccaaatcctgtctcatttgtcttcagaacttaaagaaatgtccacaagtaactttgaatcatctcctgaagtagaagaaaggcctgctgtgtctttgactcttgatcagagccagtcacaggcttctttggaagcagtagaagtcccttcaatggcctcatcttggggtgggccacatttttctccagaacataaagaactgtctaactccccactcagggagaacagctttggatcacctttagaatttagaaactcaggcc

SEQ ID NO: 8877 - DNA, 227 bp, Homo Sapiens
gacccggatcatcacaacgtcaaccggcacacatcggtgaacgaatagcatcacacactggaagtggataaagcatgatcaaatcgtggcgctctatgtcgcactcaccctcctgggctcttcacgcttcatccatgggcatctctgggctccagcaggacccatccccagcaggagctccccgaatcacgtcagtgatcccctcaccaccacctcctccaccatgg

SEQ ID NO: 8878 - DNA, 537 bp, Homo Sapiens
ggattagaggcggtgggggtgagggcgtagcagaaacttgcactgtgctttgctctcccacctggatgccagaagagcgggaggacagcatgtgcaggaaattgtggaggagaggcgtccggcgaactggctgtgattgcaggagggcacgctgacggtagtgggataattctgttccatctatggggatctctggttcgtcatcaccctgcaacgtggaccagcatggggcagggggtagagcaaggcagttaggtagaacctccaagtaaatcaagaaaaactaaccactgacaatcatccaaggaaaacaatgttcataggtaggaaacaactctctacccctgaagcactgacaactggcctcagattcaaaataatcacatggtattaaattttccactcccaattagcagcatatctgaatgagtgcagctgacaaaccaattgtcttacaaaagacatctccccatgacatggaagcagtgaggggaagcaaaatgtcaaccagccagaggcacatgagtgacaagctat

SEQ ID NO: 8879 - DNA, 1139 bp, Homo Sapiens
  misc_feature (673)..(697): n is a, c, g, or t
  misc_feature (699)..(699): n is a, c, g, or t
  misc_feature (855)..(855): n is a, c, g, or t
  misc_feature (939)..(947): n is a, c, g, or t
gggtccggaattcccgggatctgcgccacgtctgaggcggctgtggccacgtctgaggcggctgtggccgcgtcggtgtccgcgtcgaggagccggggcagggcacgatggcggactgggctcgggctcagagcccgggcgctgtggaagagattctagaccgggagaacaagcgaatggctgacagcctggcctccaaagtcaccaggctcaaatcgctcgccctggacatcgatagggatgcagaggatcagaaccggtacctggatggcatggactcggatttcacaagcatgaccagcctgcttacagggagcgtgaagcgcttttccacaatggcaaggtccggacaagacaaccggaagcttctatgtggcatggccgtgggtctaattgtggacttcttcatcctctcctacttcttgtccaggacaaggacgtgagccagtgggagctggtgtctgtgggtgccaagggcagccagggtcttccctgcctggtgtttcgggctccagaggacttacctacaaaatactcctttgcaatgataatagtgggtcaggaatcttcttcctgtgtggcaggaggctgcgagctgccatgtgacctgatgagctcatgttggctggtcccatgtgtgaaagggactctctcggggaaaccaaggcccagnnnnnnnnnnnnnnnnnnnnnnnnnangtgctagagagccaggcagagctggggccacagcgtgtctggagaagccaggtctgagcagagcagctgttgaatcccagacgtggccaccctgtgggcttgcagccccttctccccccgcgcttgggactctgacatctttaaggctgcacggtncgggtcctttgtctgggtgagggcctggtctgtgatcccaggttcccgggaactgaccccggaaaggggctgtggaaccctaannnnnnnnncatctccctccgacgaaggtttctcaccccggaaaatggcagttacctcctgggccatggttggctgaacattgggccaaacccggggaagggcacccctacacggggtactcggcccccttcccagaagggggaacccttggggggaaaagcggcctttggaactaaacgaatgggacttgccgccccttg

SEQ ID NO: 8880 - DNA, 425 bp, Homo Sapiens
aggagaatgaaagagagaagaggcccaagcttgaaaatctgcctgacacagaagaccaagaaactgtggactattaattcagtcagtgaaggaaaagagaataatataatgataaccttagaaacaaatatggaacataatctaaaatctgaggaagaaaaggatcaggaaaagcaacagatgtttgaaaataagcttataaaacctgaatgaaattaaagatactattttgcaaacagtagatttagtttctcaagagactggagaaaaagaggcaaatattcaggcagttgatagtgaagttgggcttacaataggaagacactcaagagaaattggggtaatgactactatactccgaaaaaatctgatcaccgatacaagtgagtgtgactaggaacaatgctgacgccccagaatatgca

SEQ ID NO: 8881 - DNA, 545 bp, Homo Sapiens
cccccaaaaggcagcccctttatttaaccccgggggctcggggaccttaattgcgggaccccttcagggccccgtgacccatcccggtcccaaccccccctccaccgctgggcccatcagtgtgtgttggggggatgcttggcagctgggggtgaggagacaacaaacctcgggaactggagccagagctgcggcctgactgacgccttttgatgctcacgggaaatttctgcccaggatctcagccccaggctggttgtttctacaaatctctctcaaatgtattattttggtgacaaaaatgaaggagctttgtaaatttttttaaaattatgaatcatatcaagtagttgtttacatttcttgaaaaaataggaactcgggcagcagaatcagattggcagaatctttagactacacaggcaataatcaagtctgctgttttggcctttcgtagtagaagtggttgtagtgtttagatatctgtttggtcttgcttcttgtattgcatttttttcaataaacaacaacaaaaagaactctca

SEQ ID NO: 8882 - DNA, 1353 bp, Homo Sapiens
cttggagtctgggaggaggaaagcggagccggcagggagcgaaccaggactggggtgagggcagggcaggtggcgcctggccggggagaagcgcgggggctggagcaccaccaactggagggtccggagtagcgagcgccccgaaggaggccatcggggagccgggaggggggactgcgagaggaccccggcgtccgggctcccggtgccagcgctatgaggccactcctcgtcctgctgctcctgggcctggcggccggctcgcccccactggacgacaacaagatccccagcctctgcccggggcaccccggccttccaggcacgccgggccaccatggcagccagggcttgccgggccgcgatggccgcgacggccgcgacggcgcgcccggggctccgggagagaaaggcgagggcgggaggccgggactgccgggacctcgaggggaccccgggccgcgaggagaggcgggacccgcggggcccaccgggcctgccggggagtgctcggtgcctccgcgatccgccttcagcgccaagcgctccgagagccggggtgcctccgccgtctgacgcacccttgcccttcgaccgcgtgctggtgaaacgagcagggacattacgacgccgttcaccggcaagttcacctgccaggtgcctggggtctactacttcgccgtccatgccaccgtctaccgggccagcctgcaggttgatctggtgaagaatggcgaatccattgcctctttcttccagttttacggggggtggcccaagccagcctcgctctcggggggggccatggtgaggctggagcctgaggaccaagtgtgggtgcaggtgggtgttgggtgactacattggcatctatgccagcatcaagacagacagcaccttctccggatttctggtgtactccgactggcacagctccccagtctttgcttagtgcccactgcaaagtgagctcatgctctcactcctagaaggagggtgtgaggctgacaaccaggtcatccaggagggctggcccccctggaatattgtgaatgactagggaggtggggtagaacactctccgtcctgctgctggcaaggaatgggaacagtggctgtctgcgatcaggtctggcagcatggggcagtggctggatttctgcccaagaccagaggaatgtgctgtgctggcaagtgtaagtcccccagttgctctggtccaggagcccacggtggggtgctctcttcctggtcctactgcttctctggatcctccccaccccctcctgctcctggggccggaccttttatcagagatcactcaataaacctaagaaccctcgggtaccgagc

SEQ ID NO: 8883 - DNA, 496 bp, Homo Sapiens
gctcccagcgtcccctcggggttcaatcctccaggacctgtgtctgatgcctgcatgtgggtacctgggctccatcaggttctagataggcctccgccctccactttcagggctccaggcccagcttctcatgtctgtggggagggtctccagagccttggtctgtggctgagctgtggaacttgaaggcctctctgcatcttgtcactcgtggcccctgcaccttgggtcatgacctgctttatgtggcaacccctgtgacagctgctaagtcctagaaaacacgtaacaggacgtgaggtgccctctgcgccgtgtgggcgcgtgcggggagacccgggccccaggacgtgaggtgccctctgcgccgtgcgggcgcgtgcggggagacccgggccacatgcgagcggggccccgagacattctgcactcgggaattgcggggattatcaaatcccgcttcagtgggaaacgtgagcgaaacccaaggtgagtg

SEQ ID NO: 8884 - DNA, 801 bp, Homo Sapiens
  misc_feature (54)..(54): n is a, c, g, or t
agcagttacgcaacctactgggagaacagcccaccggcctaatggtactccggngtgtcctcaaggtggtgactcaccacggggacgggcgagcacctagggaacgcgtggtggcacacggggaacacccgggggcaggtgcgaacttatggcacgacccaggaaccattggctggaaggactacacggcctataggtggcacctgactcacaggcccaagactggctacatcagagtcttagtgcatgaaggaaaacaggtcatggcagactcaggacctatctatgaccaaacctacgctggcgggcggctgggtctatttgtcttctctcaagaaatggtctatttctcagacctcaagtacgaatgcagagatatttaaacaagatttgctgcatttccggcaatgccctgtgcatgccatggtccctagacacctcagttcattgtggtccttgtggcttctctctctagcagcacctcctgtcccttgaccttaactctgatggttcttcacctcctgccagcaaccccaaacccaagtgccttcagaggataaatatcaatggaacgcagagatgaacatctaacccactagaggaaaccagtttggtgatatatgagactttatgtggagtgaaaattgggcatgccattacattgctttttcttgtttgtttaaaaagaatgacgtttacatataaaatgtaattacttattgtatttatgtgtatatggagttgaagggaatactgtgcataagccattatgaataaattaagcatgaaaaattaagctga

SEQ ID NO: 8885 - DNA, 629 bp, Homo Sapiens
  misc_feature (17)..(17): n is a, c, g, or t
caaaaaactatttttanaatcctgctagattttataatggatttgtgaataaaaaatacccagggttctcagaatggaataaatatcccttttaatagttatatatacagatatacaactgttagctttaattggcagctctcttcttttatcttcttttcactgggcttttaacttggtgctttttcttgttttgcactggtggtctgtgttctgtgaataaagcaaagtaagaatttactaagagtatgttaagttttggattattgaaataagaggcatttcttagttttccagtaggatctaaaatgtgtcagctatgagtaagactggcatccaagaagtttatattatagatttaggtcctaatttttataaatcacaaggtaaaaaaatcacagaacagatggatctctaatgaaaaagggatgtctttttgtttatagtcatgtggcaagatgagagtaaaaccagagagcaaacctctataagtgttgagtatatgtatacatttgaaataaaccagaaatttgttaccttattttctttggattcttgtctggttccaaaatgatcatttcttcttcttcactatctgagagtattatgggagcatctttgttttttat

SEQ ID NO: 8886 - DNA, 1166 bp, Homo Sapiens
  misc_feature (489)..(491): n is a, c, g, or t
  misc_feature (495)..(605): n is a, c, g, or t
  misc_feature (616)..(631): n is a, c, g, or t
  misc_feature (660)..(702): n is a, c, g, or t
  misc_feature (781)..(791): n is a, c, g, or t
  misc_feature (802)..(865): n is a, c, g, or t
  misc_feature (925)..(934): n is a, c, g, or t
  misc_feature (966)..(984): n is a, c, g, or t
  misc_feature (994)..(1003): n is a, c, g, or t
  misc_feature (1026)..(1040): n is a, c, g, or t
  misc_feature (1069)..(1069): n is a, c, g, or t
cttaagttctaacaggaataccattgtggttatagaactcagggctgctaaagcaactactctagacccatagttctttttagttagatgtattgaaacagacaaaaatattaacgtcagaaaaagctcttgccaattagaggatcttcttaatcctcagcaattaagtttggggtttgaggggggcaggtcaattgttacaacaaaagtgaatttgggcatcataagaaatcaattatgatttttgaaagatttatctaaatatatcaatatagcatctctttaatgttagtcatttattagaaagatcctttatcgtgatttgcttaaacctttcaataaattgcactttaaaggattataaataatccatttaaaaattcaagtacacacatcagtgttggttactatgcagagaatgtcattgtgtatagttaaatgtaatctgttatgtcagctgtattttttattaaaatcatgtcaagaaannnaaannnnnnnnnnnnnnnnnnnnnnnnnnnnnnnnnnnnnnnnnnnnnnnnnnnnnnnnnnnnnnnnnnnnnnnnnnnnnnnnnnnnnnnnnnnnnnnnnnnnnnnnnnnnnnncctggggcggnnnnnnnnnnnnnnnnaaaaaagcttttcaaaaacctttctgttnnnnnnnnnnnnnnnnnnnnnnnnnnnnnnnnnnnnnnnnnnnccataaagtggttttccccaagaaaaaaccccggggggaaaagaaacaaaggggtgtgtggattccccccccaccaatnnnnnnnnnnncgccccgccgnnnnnnnnnnnnnnnnnnnnnnnnnnnnnnnnnnnnnnnnnnnnnnnnnnnnnnnnnnnnnnnnttcttctggcgaggggggcgctctttataagcggggggggtctctctccaccaccacaannnnnnnnnntctccccacaagagggcggagggctccccacnnnnnnnnnnnnnnnnnnnttattaaagnnnnnnnnnngcgcgccccgcggtgggcccacnnnnnnnnnnnnnnnaaaaaaaaaacaacgggggtgtggggagngaattaactcttcctttataaataaaacgcatattattttctcgcgccgcggccgacactagatgttgggagagacacacacctctcctctccacac

SEQ ID NO: 8887 - DNA, 628 bp, Homo Sapiens
ccccgtcgatttccagcagcgctgctcaatgccttttacgccaagaataaatgtccagagcctaactgcagggtgaaaaagtccctgcacggccaccaccctcgagactgcctcttctacctgcgggactggactgctctccggcttcagaagctgctacaggacaataacgtcatgtttaatacagagcctccagctggggcccgggcagtccctggaggcggctgccgagtgatagagcagaaggaggttcccaatgggctcagggacgaagcttgtggcaaggaaactccagctggctatgccggcctgtgccaggcacactacaaagagtatcttgtgagcctcatcaatgcccactcgctggacccagccaccttgtatgaggtggaagagctggagacggccactgagcgctacctgcacgtacgcccccagcctttggctggagaggatccccctgcttaccaggcccgcttgttacagaagctgacagaagaggtacccttgggacagagtatcccccgcaggcggaagtagctgagggcaagggtcccgatgagggtcccatggcctgctccctcaggaacagctccagcaccaataaagaggcatcttaccaaaaaaa

SEQ ID NO: 8888 - DNA, 544 bp, Homo Sapiens
gggtgtgtccctccgtggctacagagtggtaaacaaatctcacctttggggctgcgtttcatcacctcgtccacaatagtcaatcctaattgtggtcctgcctcttttctaagcatatggctaagactgtatgtgctgaattcctgggcctcctgcagaagcagaaagcctgctggggatggtgccagctgtgccttggctgttgtatttgaattgagatttttactatacaaagccacctagggcctggggatttgggtcagttgtagttgcctctcccccaccctcttttcccttcccaaaggtgggtgttgaactaggggggatattgctgtcctgagggaccctctcatttctgacatttgaagaaaacgtataaatctttcttaaccgtgaaagcaaaagcctttgggtttattttgggatagttaggagctaaggtagaatataatttttttccaaaaacttacttacaaacaaaaagcctaatccctctattttaagatttctgaaaaaacactccatgttatattctggggaaagc

SEQ ID NO: 8889 - DNA, 538 bp, Homo Sapiens
aaatggatggagcccaggggcgcctcctgccagtgtcctccaggcactcaaacctagcccttctgaagccgacctcacgtgaccttcacagcccctcctgaaggcgcctcactgatgacggtgggtggaataacagcccccagagatgtccaggtttggaaccccaggacgtgggaaagtgttaccttgcgtggcaaaagggacccggcgcctgtgcttcagttcaggatttcgtggtggggagatgaccgtggatggttgaggtgggccctgagtaatcatgggggcccttataagggaaggggagtcacgagggtctgcgcatgaagcaaggaagcttctggctgtgaagatggcaagaaggcctggggccaggcgatgaggtggcccctggaggagctggaaaaggcattggattctgccccagagcctccgtggagaaacaaagccgcactgacaagacttcagcctggtgaaaaccattttggactcctgacctctagaactgtaagataataaattggtgtggttttccccc

SEQ ID NO: 8890 - DNA, 882 bp, Homo Sapiens
  misc_feature (660)..(671): n is a, c, g, or t
ggatccccccttgcgctgggattggcatttcagaatatgttcatagttgaaacagtaggatagatatttgtcatcttgacaagtagccctttgcaatttatacttgagttcactcctggtcaatggcacatggctggaaaatgcagaaagcaaattcacttacagcctgaggcttataaagcttgtacagctgcctcccggcagtccaggaaaactgcaaaaaaatgggaagtaaggtcctggcaggcagacccggcatgtagccgctggccatcttgaatcctagggcatgaagttgccccaaagttcagcacttggttaagcctgatccctctggtttatcacaaagaataggatgggataaagaaagtggacacttaaataagctataaattatatggtccttgtctagcaggagacaactgcacaggtatactaccagcgtttggatattgatatatacatggcaaatctgaatattgttttatgagaggcctggcaatgggtaaaacaccaaacttgaaatcagaacataggtgcaaatggccactcctgtagtttcttttctgtaaaatgggatctggacgaatgataccaaacgtttctttctaacattgtattttataactctggcctatgattgtgttgtgtcttgcattnnnnnnnnnnnntttgagagtggtagaattacttctgttatctgaaatacctgagatgcactttaaactgttgaaatgtaagctctgagggcagggaccgtatcttatttactgttagtatccgttgcatctagtgtggtgcacctggcacacagtaggcactcaataaatatgtattgattaaaaacaaagacgtcttcaatgcccaaaaaagggcgccgct

SEQ ID NO: 8891 - DNA, 728 bp, Homo Sapiens
  misc_feature (665)..(686): n is a, c, g, or t
tccccgtacttgcgctggatatacaggcactttttactatttggccttctaagcagattgggaaggaggtattttctggctttcgctttcctccgacttaataggacttgccttctccctgggcagggagagaggctgggttggtgctctcccttactctactcatactgacttagagcctctggctgctgtttgggcatccaagaaggggaggggaaggaatgagctaaaaacaaaacagaatgaggtgggaaagggagattttcttctttacagaggaaaataggaaaccctccaagaattgtgcaagtaaagacatttgttgaatgcactgagtcccttggtgtagtagcaataaggaaaaatgaaattactttcctgtgcacacagtccagcctaattggtatgtgatgttgcacttagcagccatgtggtgggcatgtgtgactactctggttttcactttagtttctaaactttttatccctctcaagtccagcatggatggggaaatgtctctggatccccacagctgtgtacttgtttgcatttgtttccctttgagatttgtgtttgtgtcctgctttgagctgtaccttgtccagtccattgtgaaattatcccagcagctgtaatgtacagttccttctgaagcaagcaacatnnnnnnnnnnnnnnnnnnnnnnccaattttgtgttttataaagccaccagtggcttctatttct

SEQ ID NO: 8892 - DNA, 810 bp, Homo Sapiens
tcagtcggtacccgtggggcactggaatgaattagattgggtgtgatgaacatcatccatggtatataccctaccatttagcgttgccttataaccaaggcacactccccataagagtttactgcagagaaagaacagcaaaacagccaccctccttgaattcacaactcattatctgcaacaggttttctttaaatccaagacacaggatgggaaatgggtttccccaccaggtactcagaggtctgcaggaagtgactcccgggcaaggcagacttcagtaatccctgaagcgtgagcatgtggactgcatggctgggtggggactggtggatgtctctggagctccagaaccttggagaattcctcatggaattcccctcccagctcttagtgggctctgtggggtcaggaggagcccttcctccaggttttccttctttcctcctcagcagagaaactggagaaaggacattaaactcagtgcagtcgatttgagtgctgaaatatttccagaatcaatggtggtgctaaactatctccatgtttctagcatttttaatagtggagttggtttgtttttaatctcatcacaaaaatgcagtgcccttggggaagggaccagccccttggcctgccactttccaggtgtcctttatcactttgacgggactctttggtctgcagaaaatgctctgtcttggcatgcttctagactgtaagatttgggttttgttttgtattttatgtttacatgcatcttatatttccctgaaaactaaataaagttttgggcctttttaaccgaaa

SEQ ID NO: 8893 - DNA, 450 bp, Homo Sapiens
caggagaataatccgactggcatttgtggcagtttttgaaatgtaaatgtattcatgtgtgttcttgtaaatacgtgtcgctcagatgtcctttgaagtgggagggaatcaatccggggataatttcaaatggaatagagtattttgatattgttcattcagagggtgatgtgtacatatctatattgtatatatgtgatgaaaatgcattggctttttgtgcagatacaacctgctctctgtactgctgttggacagtcagtgttttaatgtttctacagttttgctattgcacgatttcatattttgcctctatgatgaacggcaaccattatttgtaactgtttagtgctgtaaagaaatattccaagtgtcattaggattgttgctgccagaactgatatgcatgaatggcacttaaaataaatatattatgttaactctgaaaaa

SEQ ID NO: 8894 - DNA, 378 bp, Homo Sapiens
  misc_feature (18)..(18): n is a, c, g, or t
  misc_feature (96)..(108): n is a, c, g, or t
aataattgtgtaaaatanccatttgtatagggtgagcaaaattttcacttttatcaaactgggcaatgttaagggttctatctctctgtagacttnnnnnnnnnnnnncctgaagaggaaaatacggggaattcccacatccttaatgggaatcagatcctccattaggctggacagtcaaaaggctccttattaacatgcttataacttaataagtatatataaaatggaataatttaattgtacacaaaaaacaagaaaattctcaatttagttattgagttattacacttagaaataagtcaataatgtttcattcttcgtttgaagaatcccaatcaatatatcagtgtgaacaaagcttgatattaactgaaa

SEQ ID NO: 8895 - DNA, 398 bp, Homo Sapiens
tgggaagtaggcaaaaggcacatatatttaaaaaaagtcctttacatatgtacatcagaacttgctataaatacatagaaaccgcaggcgccaccctgccagctccgcggcctggggcctgggagaggtgagcgggcaataacttaggggtcagggaagggctgggggagggagaattgcatatattagcaggggtctgccccacggagcccccgagacgcggggccctgagcacctggggtttcctgagtttctagctcttgggaccacccggtttcacggatttcaagggtttgggcccactgagcccttgtgggtgcccagtcccagagcagccacccggagccccttcctacttgggaggagaggcacagagagggccctgccacgccccggcc

SEQ ID NO: 8896 - DNA, 531 bp, Homo Sapiens
  misc_feature (34)..(34): n is a, c, g, or t
  misc_feature (49)..(49): n is a, c, g, or t
  misc_feature (74)..(109): n is a, c, g, or t
  misc_feature (115)..(115): n is a, c, g, or t
  misc_feature (179)..(179): n is a, c, g, or t
cccaccatcccaaaccggagctgatattctcacntacccagtcccctcntcttaatattcctattttggcttgnnnnnnnnnnnnnnnnnnnnnnnnnnnnnnnnnnnngaggantacttgcagcattaacacttctcttgttgatttaacaagtttcctatggagctttaaagctcantactttgttcttgtccttgtggacacaaattttctaacgtgcaaaatgggacctttgtgtcccacattcaaatcctctctagtaatttctgcaaaggttgagaaggctggcatgatggagagaacggtaaccatgaggaaagcttcttggagtaaagcactcctctctccaatgcagagggtaaaactattaacatataagcaaaagaaacttgggctaactgagacccttaaaggagttcccctttagtccaataaaaggccaacttcaaatctttacaccagataaggtagtcaagatcatatcatatacccagagaatgactgcttgtatggacatttcctacaaggga

SEQ ID NO: 8897 - DNA, 873 bp, Homo Sapiens
  misc_feature (547)..(604): n is a, c, g, or t
ggggggagcggctgccatcctacaagccacaccccctcctctgagctctgaatatgggacccagtgccaggagctggaagacaaggtgtttctgccaaacggggacctccatccagagaaaaggaagaaggtgcagggtgggccaagaggcaagtgaaggttggcctgagtctgggccggaaactcagaggatgtttctcctctgctgggagctgtagtttcttatcaaaatagatattgttccaccatccccctccttggcccttcaagtgggctgaagcccttggaaagtgacataggaagtccccagatcttgcccttctcactccagaggctagtggtcacagacagctgggaatggcagccacagagggtcccctctgggagaaacagcttcaccccagcctcagggccctgggccatcactgcagtggccctgggaggtgaggaagaagctggctagaggagggggctcccacctaccttttatttaagccagcattctttggtcctgcttgcaataaaacttcagtttataggaacacgnnnnnnnnnnnnnnnnnnnnnnnnnnnnnnnnnnnnnnnnnnnnnnnnnnnnnnnnnnttgcccgacccctccttgtaggcccgcccacctcacccgcccacccttctcgctgtggcgccccccctccgatcccagcacccctcccctcttggctttctgcgctgaatgcctcccgggccacgcacaggaagacatgttgttgacccaccttcttttctaaccactgcccgcgcacacccaatccagtccaaaatggggccggtaccacgccgtggagctcccatccccccccgtctctcccccatctgcgtgaccagccacgcccg

SEQ ID NO: 8898 - DNA, 838 bp, Homo Sapiens
gtcacaggagaccggtctccgaggctcatggcgatgctggtcctagtacccggacgagttatgcggcctctgggtggccaactttggcgcttcttgcctcgcggactcgagttttggggcccagccgaggggactgcgagagtcttgctgaggcagttctgcgcgcggcaagcggaggcgtggcgtgcctcggggcgccctggctattgcctgggaacccggcccctcagcactgcgaggccgccacccccgtggtcgcagaagggccccggagactccacgcgcccctcgaagcccgggcctgtttcctggaagtctttagcaatcacatttgctattggaggagctttactggctggaatgaagcacgtcaagaaagaaaaggcagagaagttagagaaggaacggcagcgacacatcggcaagcctttacttgggggaccgttttccctcacaactcatactggggagcgtaaaactgacaaggactacttgggtcagtggttattgatttattttggcttcactcattgccctgatgtctgtccagaagaactagaaaagatgattcaagtcgtggatgaacatagatagcattacaactctgccagatctaactccacttttcatcagcattgacccagagagggacacaaaaagaagccatcgcaaattatcgtgaaaagacattttctcccaaactgggtgacttgactggcacgagagaaacaggtccgatcaagtggccagagcaatacagagttggataacaaggcctggcccaatgacgatcattacgatacatagtggattaaaaataataatgactgattggaca

SEQ ID NO: 8899 - DNA, 424 bp, Homo Sapiens
ttcctttcacctggggaaggatttggctttggggaggtaagagcttgaaacatgggatgagagaggagtcactgctacctctgatttgctcaaagccatgggagttgtttagaattctctaccttctactgtcacctaacaggcaggcttcatctgcaggccttccaagtagtggaagttcacaggtagaaaatttaggtccctgaatccgtgggttccgctgtctcagcccattcagaacaattcttttaggtacctggccctcacttggagaaagaaagtgatccagaagaacagtctagtgaccaggagatctgagggtagggtgggagtgacgctagagcaccaaggggggctctacagctgtgttctcatggaggacaggcttctgctcattctggttttcccactcttgtggttacca

SEQ ID NO: 8900 - DNA, 486 bp, Homo Sapiens
atgggatgactcgtggcccagttgtgcgtcttccacgtgcttgtgactctgcagaagtgaaagcctggctcgaaacatctgaagggttcgcagtgataaaggaggcatttgacagcactagcagatttgcacgtctacagaaacttcatacaagtatagctggacgcaacctttatatccgtttccagtccaggtcaggggatgccatggggatgaacatgatttcaaagggtacagagaaagcactttcaaaacttcacgagtatttccctgaaatgtagattctagccgttagtggtaactattgtactgacaagaaacctgctgctataaattggatagagggaagaggaaaatctgttgtttgtgaagctgtcattccagccaaggttgtcagagaagtattaaagactaccacagaggctatgattgaggtcaacattaacaagaatttagtgctctgccatcggctgggagcaaggagtg

SEQ ID NO: 8901 - DNA, 467 bp, Homo Sapiens
tcagtcggtaccacctctgacgagttcccagtgtgagaccacgcttttacaagtacacacaacactctgacaagttccctcctatacgacgttcccagggacgtattcattttcctcttccatgtctgccagcagtgatgggaccactcacacagaaactatcacctcacttccagccagcaccagtacactccacaccacagctgaatccaccacagcacacactaccaccacctcattcacaacttccacaactatggaatcaccttcatccagtgtagcaactacaagcacaggtcagaccaccttctccagctctacggccacattcactgagaccaccacattgactcctacgactgacttttctgaagaaactctcacaacagccatgacttctactccccccatcacttcttcaatcactcccacaatacagtgacttctatggaactcggtcagaggtg

SEQ ID NO: 8902 - DNA, 620 bp, Homo Sapiens
  misc_feature (400)..(400): n is a, c, g, or t
  misc_feature (494)..(494): n is a, c, g, or t
  misc_feature (596)..(596): n is a, c, g, or t
ttttttattgatgcagatggttctgctacattttatttaatatgatgtaacacttggtaatctagtaaactgtgatgccgggcaattaatcaaagggaggaagagacaaaggtccctatcaatgcactttttgttggtgacacactggaaaccttaggaatcaagttgtctgatgctaagagaactttaaactctctctaaatagaacacacctactgattgcttgagggacttctctgatacttatgcatagatactctttttcagcatgttggaggcaatattttatactttctaaagggttctgaagaggcaataaggaagagtggggatttttctgcccctgtaaaggtatcattttctatcattggtatccattgttccctaagcatcttctganacctaaatgtgtgtaaatgcatatttaaaataattacccatctttcagtcaatacacagccaactcttgattatctatgagaaacgtaagtganatttactctcaaacttcactctaaaagaatcatccacctttgatacacttgtttgttttacatcccatgtacactacagcctatcaagacgaagttataaancaaatgttgtttcctctgacccat

SEQ ID NO: 8903 - DNA, 265 bp, Homo Sapiens
taaaaacatgacatgtaaatgatagaagtagaataatcatagaattccctaaaatatttctgtttactaacatatattgaccaagtacatcaagcaggagagatcttccttcattctgttatagtccacatcattctaattttgctcagttgttattaagagcatattcctaaaccatacacttttgtttcaataaagttttattttgttgagatgaataaaataacaaagttataagctgcataagacaaaagttcaattgttc

SEQ ID NO: 8904 - DNA, 1199 bp, Homo Sapiens
tggaccggtccggaattcccgggatcttggtggaaggtgggtgtgtagtcgtggtactttacgcctcggtgtttagggaggagcctaaggtaaggagtcagaaacggggagtaaccgagctgcggcttttatataaggtcagtggtaggtaaggaaggggccttaacctctgctggtgaccagaagcctgcatttctgcattctgcttaattccctttccttagatttgaaagaagccaacactaaaccacaaatatacaacaaggccattttctcaaacgagagtcagcctttaacgaaatgaccatggttgacacagagatgccattctggcccaccaactttgggatcagctccgtggatctctccgtaatggaagaccactcccactcctttgatatcaagcccttcactactgttgacttctccagcatttctactccacattacgaagacattccattcacaagaacagatccagtggttgcagattacaagtatgacctgaaacttcaagagtaccaaagtgcaatcaaagtggagcctgcatctccaccttattattctgagaagactcagctctacaataagcctcatgaagagccttccaactccctcatggcaattgaatgtcgtgtctgtggagataaagcttctggatttcactatggagttcatgcttgtgaaggatgcaagggtttcttccggagaacaatcagattgaagcttatctatgacagatgtgatcttaactgtcggatccacaaaaaaagtagaaataaatgtcagtactgtcggtttcagaaatgccttggcagtggggatgtctcataatgccatcaggtttgggcggatgccacaggccgagaaggagaagctgttggcggagatctccagtgatatcgaccagctgaatccagagtccgctgacctccgggcccctggcaaaacatttgtatgactcatacataaagtccttcccgctgaccaaagcaaaaggcgagggcgatcttgaccaggaaaagacaacagacaaaatcaccattccgttaatctatgacatgaattccttaaatgatgggaagaagataaaatcaagtttcaaacacatcacccccctgcaaggagcagaagcaaaagaggttggccatccggcatctttcaagggctggcaattttcgcttccgttgaaggctttt

SEQ ID NO: 8905 - DNA, 384 bp, Homo Sapiens
tagcacacgagccctgaatggatcaggtaggactaggataaacaagtcaagagaagcagtgctctcctttcccaccttttattcaaattctctccattctcttctcatcactcttttgcctttatgtccatcccctaacactcaaacccaggatacccaaatagctcaaccctaagacaatctcagaaaagccaggccccaggtaaagagaaaaagaaccagatttagaaaaagcaatgggagaaaccagctccaaggagtggacaggtgtggaaaatgccagaaaccctcctgactccacacaagtagggcaggtcagttgctcttctctagtataagcttgagggcagtccagcccaggtggacatctctgggcttggggaa

SEQ ID NO: 8906 - DNA, 615 bp, Homo Sapiens
  misc_feature (126)..(126): n is a, c, g, or t
atacattccccagccttgtcagctgtccggatctgcagggtggccccagaccccgagagccaagaataccctccctcttacatcatgcaacaccccacacctcctgtgcaggaaaaggggcacccnttaaaactaggccctcctccgtaggagcccaataataaccatgagcatggccctagtcctggccgctcactagcagctctgctggcctctgtccccttgagaagagtttattttctctactgtgcagatggggaagctaaggccatgcttagcaggtttgcctagtcacacatctgctctgttctggcccctggcttggtctggaagggacaatacagctttctgaaagttgttcacctacccctggctcttttgaaagagcaaaaacatattctaatgagtcactgctttctcctttcagggagataaggtcggccctgagatagaaccttctccactctagccatttcccttccttaaaaactctgtcatgtctacattcaaaccccaaattttcaactttgtctccttattcagagcctgggcgagaatccttagccaggatgtcatcaccaaggtgggtcagtacataagtggatcctctagaac

SEQ ID NO: 8907 - DNA, 213 bp, Homo Sapiens
cagaacgccatacactaaatcgtgtctggtagcagagctgggggttccgctggatcaagacccctcctttcaagatctctgtgaggcttcgaagctgcagctcccgcaggcctcctggggaggcccctgtgacaggggtggtattgttcagcgggtctccactgtctagcacggccagggcatagttgtcctcaaaaagctgagtgcctcgca

SEQ ID NO: 8908 - DNA, 627 bp, Homo Sapiens
gtccgcttcgctccgtcaatggtccctgttcacatcctccaggctcttcttcgtggggtcccgggaaggccacctgccctccatcctctccatgatccacccacagctcctcacccccgtgccgtccctcgtgttcacgtgtgtgatgacgctgctctacgccttctccaaggacatcttctccgtcatcaacttcttcagcttcttcaactggctctgcgtggccctggccatcatcggcatgatctggctgcgccacagaaagcctgagcttgagcggcccatcaaggtgaacctggccctgcctgtgttcttcatcctggcctgcctcttcctgatcgccgtctccttctggaagacacccgtggagtgtggcatcggcttcaccatcatcctcagcgggctgcccgtctacttcttcggggtctggtggaaaaacaagcccaagtggctcctccagggcatcttctccacgaccgtcctgtgtcagaagctcatgcaggtggtcccccaggagacatagccaggaggccgagtggctgccggaggagcatgcgcagaggccagttaaagtagatcacctcctcgaacccactccggttccccgcaacccacagctcagctgcc

SEQ ID NO: 8909 - DNA, 387 bp, Homo Sapiens
gcgtactaccgatactcggtcacatcaactaaagtagctaagctactgtaatgatttgaaagtttgttatgagagaattatgctttgtcaagccaactataaggcagctttctacaacagttctgcaaaatgtttccaccacattgagcaaagctgacactagacactagctacacgtgggaataggaagatgggccaggctcagagccgccgcaaaggatgaagtccactcagatttgaggcaatcctggggcaaagcactgagcaaagcaacttctctggtaatctcctcctcagccattctctacccaggatttcagaacacagaacagaagaaactgcaaaagccctgcaggatatatcacagctgttaacattctgactttc

SEQ ID NO: 8910 - DNA, 208 bp, Homo Sapiens
cgctgagcaataccaccaggtcctgtgcccaggcccctcccaggatgaccccttgcatcctctcaataagcttcaggaggcatggaggagtattcactacccacctgagactgcaagcatcatgttgatggctaggatggtggccacagtgaagcaggcgaaggacaagatccggtggatcaactcttatcccagtttgtaccattca

SEQ ID NO: 8911 - DNA, 464 bp, Homo Sapiens
agactcacaagggcttccacagtctgatctgcctgactcttcaactgggctcttccctatcctgcattacactatgctataggcaacaaaactagactaccataatcacaaataccccatatactgcttctcccctttgtgccctgcctcaggatcaatcctctgccttcaaagctgtctattctgtcactttccccaattcagcctggctaacccctgaacatctgattataggatctgtctctcgctcctcagagctgacttgggtatcctttttacatatgtacctgtagtagcctgtgtatactgccatcactatgctgtctactatgcatgagatgtagaacaaattgagtgcagagactacacctcaactgccatgatgaacatcacatacagtcagaaatatacttactctatacatgtgtgaaagttacctttagtagcctggtagctgataggtg

SEQ ID NO: 8912 - DNA, 280 bp, Homo Sapiens
tctcctaagaatagcaaaagaaatgtgaccagaaatatcttcttccaggtggattacaccttataggaagtaaaggctaaaaaccacagacccttagtcacttcataataaaaatttgaaagccagcagcaaaacttcctctacgataatcatttttgtcccagcatattttacaagctgggatggagtgcccttcctgggccaaaagtattcttgggatatggtaatgggagtttcctacataacttctgaccataaactaatatgctcagtcctggta

SEQ ID NO: 8913 - DNA, 985 bp, Homo Sapiens
ctcaagttcttttattcatataaataaagtttaaaggaatgggggagattaacatttcctgttttatgtttgtgaaattgtttgacacaaccttgacagtatcctttaatggcatgaggttaattgtactgttaaccaactttctatgttctggaactagtattatagtgaaaacatttacagtaagttgatgtttacaacctataagcaggtgaaatctgtgtatgtgacctgtttataagttgtattagcttagctcttgtgaacagtgtggaaaagtaagccatgaggagagcgatttaaccacctttaaaggacctaagatgtgctttttaagcacagtgtggatcacagaaactcactaagacaggacttcagcagccttttgtgtttggacaagtcagcataaataaagaatgacaaggcagcagcaagagcttcaactacagagaagtgaaggcataagatactatgatgatagtgagcaactttccaaaagctagttaaatctgcttattacaactgaaatatcgaagaaagtctagcaggaaggagctcttcgccttttggaacatcaatgagagatagttgccacagtcactaggtctagcatttagacctgcaaggaagggcaataagcattaggtaaggcttgaatttgaattttttcactaattaaagagtaattttttgtaaagcaaggtaagagtaatctttttgatttgcaggttgaatgagaaccctacttgcctaaatgaggaatgtctttcctaccatctaaaatacgaaggtttctggctgggtaaggtttgtagttgacagtaaaacctgatgacaccatttgtttccctgcaagtctacattacatatttcacaactttgtccctctctagtaggcacattggaaaaattcttcaactgaaaactaccttggtaccatgtcctacacgttttaaaccttagttttaaaaattcccctgcaaaa

SEQ ID NO: 8914 - DNA, 530 bp, Homo Sapiens
agccatttgggaaaaagaaaagcttctagtttttttgtacacattctttctgtgaggagattgagtactctgcagctggcgaggagttggttgaggcacttcttcaaggccaagggggaacacagtgctttgtttccagctcactttgtaccccttcacctctgcagacacggggagaaccccggacccctgggcatgcatgctggcggcggcatgccgtcccttccacaagcccatgctgctgcagagggaccctgtgtttgcaaaacccagtggactgggctgggtctgctgtctgagcagctcctggctccggggggaactgcacacaagtccactggcctggcttggccccaggcattgcaattgacagacatttgcatttcatacggtaaatgaggactcagcacagccaaccataatcagcatgtctgggatagactggtctagaataaaaatgaagtttccattgctttgtttgctttaaaaattccacaattaaaatatctgtcattgaaagcttaaaaaaa

SEQ ID NO: 8915 - DNA, 840 bp, Homo Sapiens
cgaaatggccggcagcccgaactctccagcagtgagtccgatgtgggtcctgaccggctcatgtcactcagaatgaagctgcactccggcccctgcacagcctgggttgagcatatgcggaaacgtacctacgcctgacagccccccagcccaattcccgctggagggagcctggggcctgcagcagaaggggatggggctggctccaaggcaccagaggagacccccccagccaccgagaaggccgagcacagcgaactgaaatcgccttggcaagcagctgggatctgtcccctgaacccgttcctggtgcccctggagcttctgggtcgggcagccacccctgccaggtgaggggcatggcgggcaggaggccacaccaggccccccgccctgcccctcggttctgctcggctggccctggctctttctgaggatcccgtcatgggggaaggtccttgagatgatgctcagctgtggggcgggcctctaagatgccccatactttgggggtctcagaaatggaacccccgttgtacaggggttgggtgggggttgcaggactccactcacaagcctcctgatgtcaaggacaggcggacagggctggcctcccccagtccccaagccccactgtgccttgttgtctgctggggggccatagctggcactgcccaccgtaaaggccctcgcacattttcccccttcctgtacacctcggggccagcatcctcaccttcttcaactgaccagtcgtggttactccctgctgccaggtccttccccttcccgggggtattctgtgaccatgaataaagttatcattctctttctctttca

SEQ ID NO: 8916 - DNA, 854 bp, Homo Sapiens
gctgttttgaaggacaatcctttattttacttgagaccttacatctttgttctagctgacagtaaatctctgggtttctgttacgaactcttaagagggctgaaacttctgatattcaggtggatcacctgaattctctcagctgtcaatggcttggagaacatctcatgggcccaagtcatcaaataacctgttcctctctgtaagggcagtgtgagggactgctgtgcaaacccaagcaatcccaacctggtgctaggtcatttcacttttctgaaaacctcacatcaggctgcatcctcttctgtccctggcaccaggctttgtttacacttggagcccaccttggtgtgggtcaccgagacagtgtactcctctcctgccagcctccccttccccgaggtgtggtggcatgcagtctcaggaagagcttggtacttgtggggacttctgttttctccctgtggagatcagtgaagactgggaggaaagctgcttcaacctgagtccggctcttcagcaggctgcacaagtggaagcaactaattctggtgctcaggctgggctctccacccaagttaggcctgctctggcctaatggatcttactgtatgagcaggacggctgcattggattgtacaactgttttgtgatgcccccagacactgtcatcctgggccgagaagaacctgctagcttgacacaccccatgggcttatccttaggttttggaattggtcaacagtgaggcagtctcccttcctgaccattcttctccacccagtcacagataagggaataaccttggccatatatttgctcaataaagattgaaggaagcatggtaaaaaaaa

SEQ ID NO: 8917 - DNA, 625 bp, Homo Sapiens
  misc_feature (66)..(90): n is a, c, g, or t
  misc_feature (142)..(156): n is a, c, g, or t
  misc_feature (429)..(437): n is a, c, g, or t
gtcgtctagaggatctcctcggatgcaagtgtctgtgcattaaaacaatttaggttccccatgggnnnnnnnnnnnnnnnnnnnnnnnnnggaaggagattcctttgaaacacatactcccttgctccaaacttataacaannnnnnnnnnnnnnnaaattcactacacaaactctgtgattaggtaagaaaagcgacaagggctctccttgcctttttttaaaccattaaagtaaaatccataattttctacagagtacaacacaagttcacacaaaaaagacattttctttggcaaatcaaaacaggaaagaaaggaaaagcccaaacaagataaaggaaaagcatttctacggctgaatcacgactgagttgatcgaatcccgtggtagctgcagaacagactgtgcgtagggtcatagtggcaannnnnnnnnctcttcacatcgtgaaatcactttacatggttttctagtagaaaaggcaaaaaactgtacaaaacccctagtgttaaatacaacgtttgtaccaataaaaaaactcacacaggtatgtctccaaaaggtaaagtaacttaaatagacctcttaaaataatcacaaaaagcaggggaaatcagaaggca

SEQ ID NO: 8918 - DNA, 487 bp, Homo Sapiens
atttcatcacaattcatggtgctaaaatgaaaacctctgcactttaatttttttcagtaatttccagctatttctaggtataaagagcagctcgtttctcttatttattttagtctcatgtgtcaatactttccgatgctttgcttaattcatgtatgtgtgcagtgctgcaatgcccagacaaacgtgagcacacccaccggtttctaaaatggaatagacaggaaaagattgtgttttatatcatccctatctattgtaacccaaaagacctaccatcgcatcagtgaagtccgaacacatctttgtttgaaaggcttgtcaatttcatattccttgaattggcttcttggtgaggattttctgacagagtgatacccatcaattttctatccttagacaatgtagtgtgaagttcacagttgacaaacaacaattaatgtttcccttggatgttttgacaaaaataaacctcatcattgttatc

SEQ ID NO: 8919 - DNA, 410 bp, Homo Sapiens
ttttactggtttcaacttcaaaacactaccgtctggtttctgatctgtggactttgctaaagcagtttcatcccaatgtacaggaaatacaggaaattataatcagcccacacatcaaaaatgatagtatacccgttagcttcttcaatactaacatatatagcttcatggtagcatgtataaaaatgttcagcagtaccaactgccaaaccagtgtcagtggatagtacagtcagtcctaaagaggcagcaccccattaaaagaaagttgcatctattttgctcagttgtagccaagtgaacccatgctaccaatttcagatagaattgttttaagcttatttaagaaaaacaacagcctattatcaaaaagtaaattactgtttgaggctacttcaacctgaatggag

SEQ ID NO: 8920 - DNA, 445 bp, Homo Sapiens
gttaggtggtggggtttctcagcccggcggcgggaggcgggccggcctcggcttcctgtcggaggacgcgcaaggatccgggcgtcggagtgtgtgcgagtgcgtgagtgtgtgtcggtcgcacggcgtgtgtctccggccgcgggttccgcctcctcccctgccgccgctgctcacggtgtaagtcaatgtgaagcagcagctccagccccgggataaacatggcgacgtctctgcatgagggacccacgaaccagctggatctgctcatccgggccggtaaggacaggggaacttttctcccgtgcatcggtgcagcaggagagggggtgcacagaaggcggggtgactcccctgtagcagtctgtgctgggggtacagtgtccacctcacagtcactggggcggctgggggaaaggggggagtgaatgaagtaatggaggcg

SEQ ID NO: 8921 - DNA, 320 bp, Homo Sapiens
gggtgtgatgcagactaagggttttgtggtcaaatatccttaagaaacaaagttaagtcagtttcctttctgcaaggacttttcagccttcaatgtgtgctgtgcatggtgaatccccaaaaataatccttgagtctgtagcatttcctgaacttacatgaccaggatactctattttgcagatcaccccacagagctagggttccaccgagtatactttgcttacgttgacttagcatatctgaggtcttcaaggataaaaactgccaccccaacacccttccaaagagtctgatcaaaagcaaacgacctgccgtgtc

SEQ ID NO: 8922 - DNA, 705 bp, Homo Sapiens
ggcgagaggatagcactgctggcagagggccgcttggtgaaccttagctgctccacagtgcttacatgtgtgctcacaatcactgctactactcaggctcttgccgtgatagagctatacaatgctcctgagggtcgctataagcaggatgtctacctgttgcccaagaagatggatgagtatgtggccagcctacacctgcctacctttgatgcccacttgacagagctgacagatgaacaggccaagtatatgggactcaacaagaatgggcccttcaagcctaattactacaggtattaagttcctgtaactcaaaccagaatttttaaggaatagaactccaagccttttctccactactatacaagaaagaattcagcaagctgcttctccaatcaaagctgcctgccgtgctcaccccgtgtgttaggttatttatttattaaaatcaagaatcctgtgcctgcagtgttggcccagagtgtggttactgccctgagggccatgaaagccacagaggatgggctgaggaaggaaagaaatggggttactgctcccagtgcatcatttgcatcattccccattgactgaatcctcagcagtggccgtttttcctcttgtccaggctcacgagttagtccagggattccatactccttattcctggttttctggaataaattttcagcacctgctgtctca

SEQ ID NO: 8923 - DNA, 649 bp, Homo Sapiens
  misc_feature (494)..(494): n is a, c, g, or t
gggccccgcccccgaccccgcgcgaagagtgcgcaggcgcgccgacagccgagttttctgcgcttccttctccctctctccagacgtcgtggtcgttcggtcctatgtcgcgccgggccctccggaggctgaggggggaacagcgcggccaggagcccctcgggcccggcgccttgcatttcgatctccgtgatgacgatgacgcggaagaagaagggcccaagcgggagcttggtgtccggcgtcccgggggcgcagggaaggagggcgtccgagtcaacaaccgcttcgagctgataaacattgacgatcttgaggatgaccctgtggtgaacggggagaggtctggctgtgcgctcacagacgctgtggcaccagggaacaaaggaaggggtcagcgtggaaacacagagagcaagacggatggagatgacaccgagacagtgccctcagagcagtctcatgcaagtggcaaaaaacgaaacaaaagaacnaagtaaaacatggtcggccgcctcggcccctcgaaagctttctaaaccatttcgtttggcggcgcggccccagtaaggtaaggtgaacagggtcataagcggtttcctaggaaaacccgggccaatgaactagggcctgggatttcctccccaat

SEQ ID NO: 8924 - DNA, 504 bp, Homo Sapiens
tgcacgggggtcattcataggactaatgtatctcatgatctactgtgcacatccacagcctgtggccacagtcccctgctaaagttgctcaggtgttctagtcctgacttcacctttttgatttggtgtgtgccctagggtatgtacccttccccatctgagcctcggtgtgtccatgtgtctggtgggggatgggtggactgtatgatttccaaggactctaccagtcagtggttctgatgtcatcgggtggaggtggtgttctatacctaaaggatgacctgctccagaaacagcaccagcacagcatgtattttcttctcttctgaaagttctggcttgtagacccctcccctcctttgcaaaggtatgggatagaggggtcagatgcagatctctactgtaaaatgggctccctggtatctcctgtcttccctactgctccaaaccctaaattttggttgtacattttatttgaaaggaaaataaatttttttttgggcc

SEQ ID NO: 8925 - DNA, 645 bp, Homo Sapiens
  misc_feature (552)..(593): n is a, c, g, or t
ggggagtagcggtggcttaagccgcgcggagcagcgcaacctgggtcgctccctgcttcgccgccgcctccggaccgagccagcggagtcagtgtcctagagaccctgtaacaccacaaagcggacgaaggagtccatgttggggaacttggcagcggagtgactgggacctgggaacctactgtggggccgcggccggaccgagcgcctcgacctcggtctgaggaaacccttttccaaagagaaatgaagaagaaaactgtatgtaccctaaatatgggagataagaagtatgaagacatggaaggtgaagaaaacggagataatactatttccactggtctgttgtacagtgaggctgacagatgcccaatatgtcttaattgtctattagaaaaggaagttggttttccagaaagctgtaatcatgtcttctgtatgacttgtattcttaaatgggcagagacactggcttcatgtcctattgaccgtaaaccttttcaggcagtgtttaaattcagtgcattggaaggttatgttaaggttcaagtnnnnnnnnnnnnnnnnnnnnnnnnnnnnnnnnnnnnnnnnnnctcatttgagaaaacggtcctcctgtcatgaaaattctaaaagctgtataag

SEQ ID NO: 8926 - DNA, 528 bp, Homo Sapiens
  misc_feature (25)..(25): n is a, c, g, or t
ctgaagtcaggatatcaggaagtcntgaggagggactctggaataaaaacccttgcctctttccaggccaatttctcgtgttggaaagtcagaagacccagtcttggctttactttcttggggtgaaagagaaatagggtaggctcagaacatgctcatgttattaaggcagcaatccccctggcctttgaggaagtacttatgagatgggtgtcactgtctgaaggttctccaaattgtctgtgaactgcttaggtaggagtgcactgcagtttcctgctagttcccaccatgttgtgccccaactttgcttctagatctctggggtgggaggagtgaccttctcaatggaaggggcctccttggtctggagaagagatctgaggtcccaccttagaaatgaaagggaaaccctcagggagccatgacccagggaccttcacactcccccatgtttgttacttgttatccctcccccaacctgcctctgttttccccagagtgattagcagtaaaacccttcaatga

SEQ ID NO: 8927 - DNA, 668 bp, Homo Sapiens
ttgcatggtgtttatggacacatggggaatccagattctacagtttgtcagggcttgactgggtttctaggcattcaaggtccccctggccccaaggtagtatccggtgcctttggtttaaaagaagcaaagggtgagcctgcagctctcggggagccgggcagtccagggagctcaaggcctcgtctggcgctgccaagtagaggttgctgctcttctcagatggcaactcgcagggcgccacgcccgctgccatcgagaaggccgtgcaggaagcccagcgggcaggcatcgagatcttcgtggtggtcgtgggccgccaggtgaatgagccccacatccgcgtcctggtcaccggcaagacggccgagtacgacgtggcctacggcgagagccacctgttccgtgtccccagctaccaggccctgctccgcggtgtcttccaccagacagtctccaggaaggtggcgctgggctagcccaccctgcacgccggcaccaaaccctgtcctcccacccctccccactcatcactaaacagagtaaaatgtgatgcgaattttcccgaccaacctgattcgctagattttttttaaggaaaagcttggaaagccaggacacaacgctgctgcctgctttgtgcagggtcctccggggctcagccctga

SEQ ID NO: 8928 - DNA, 595 bp, Homo Sapiens
tgaccacagagatttgaatggtttaataactctgtcttcgtgagctggatggcaagctctcacactttacccgcagctgtgctgtgcactcccacacagtggtctgagcagaggcggcgtgggaccagaccctcccacagccagcctggccaaggtggcacagaccagagctctgtgcagacaagcacccaggggtctaggaatgctcccccttctctccaggggccagaggggagaaccaagctgctcagccttccttgctctggccagcaggaggcccttctcctggagcagccctcgtttctgcctgtcatgcccgagggacacaaggccatccactgtgctcctgctaacatgggcactgcttgggatgtgctcccactctgaagttgtcccccacccagggcctctcccttcactgcacaggacagcaagggcagcttgtgctgggaagaaccgaagaccctcggccaatgccaccacagcccttggtaaagaccgtctgccaagcccctccgcagtctctgaaatctgaggactggctggtggctccttcccccgtgacagtgaacttggctgcaggcgacaccctccc

SEQ ID NO: 8929 - DNA, 482 bp, Homo Sapiens
tagtagaagctcacttgccacctctcagaggggtcccggattgcatccatcacaatcccaaagctagagttggggggaactggagggagcaaaacactgatttgatactagtcagtttgcttgaaactagttcacctaaagcttagatctcttaaaaccaatttactgaaaacttgtttgcttaaagttaatgacttaatgactaatttgccaaaagctcaattcctattttggtgtgtttatatccatttaggtgtcctattcttttttgtcatgctttggatatttcaaggatttatatctattcatccaagagtacttctgagttattatcagcaacataaatttatcaaatttgcagcactttgtaaatgatgagattgcttcctacctttatggatgtctttttctatgttatctaccattcaaaaacttttttaaaaagtttaaagtttctagcaataaatacaattggtacagac

SEQ ID NO: 8930 - DNA, 531 bp, Homo Sapiens
gatctaaggatcccccggtcgcacagcttctcaaggatggaaacagccccattgggtactcttacgcatttgatagagcccttgcccagccttcatggaaccttccatcgacaagggcacaggagctgattttgactatcacgcagcgtccttaatgagccagcctgccatttccacagtgaggggtggttctcatggtggctgtcgactccccgcaggagatcatcatgaaatccaacattgacaagaagttctctgcgcactacgacgcggtggaggcagagctcaagtccagcaccgtgggtctcgtgaccctgaatgacatgaaggccaagcaggaggctctggtgaaggagcgggagaagcagctggccaagaagtgagcagtccaaggagctgcagataaagctggagaagcttcgagagaaggagcgtaacaaggaagccaagcggaagatctccagcctgtccttcaccctggaggaggcagaacgcgggcggcgcgcagaaagaggaggcggccatgtatga

SEQ ID NO: 8931 - DNA, 593 bp, Homo Sapiens
aatcaaaacagcagcaaacttaaaagggatttatttgtgatttcctatatatatttagcttgtaaatacaagactgtaaatgtattaagagacaatttctgttaaagttttcattgtgtttcacttcaagtactgcacaagttaaaatctgataaaggatttacattcggttatctgaaactccccatctcagacttttgttttaatgtggtgggtaacttcatcatttccatagataccaccagcaggaaagtgtctcttttatggcttctaggactttcattagttagtgtgcatacagttttcattttctatatcattgtcattatcattgctatcttcatcactttctaatgggatgccagtggcagctgaagcacctttagtttctcggtcaagaggaaaaaagccagttcccactgaaagtgtcttgtctctggtagaagagtacatatgctgctttggacacaaattggtcttcagaagcagtggagacactactggcatcaaaatagtaccattttccatcatctttatttttttgcaaagcagtatagtgtcctccttccatcccttcatagtgggtgggaaca

SEQ ID NO: 8932 - DNA, 883 bp, Homo Sapiens
  misc_feature (177)..(177): n is a, c, g, or t
ttgcacaagaataaacatataagcggtttaaggtagcgaggcctgggtggcgaattcggcacgacggtcaaagtctcccggagcccaatttcggggaagcggtgagttctgaaagaagttcctgcaccgtagtttcccaagtctgcgaatccccaaccatgagcgcctcgtggcgtnacttgtcctttacccagcaaggatgggagcaggtgctggccaaagtgaaacgagctgtggtttacctggacgccgcctgcgcctgagagcctgcactggggctgcggatccacccgtctcctggaggcggtggggggtcctgactgtcacctgcgagagttcgagcccgacgcaattggtggtggagccaagcagcccaaaggcagtgtttgtgctgagctgcctgctgaaaggccggaccggtggagatcctacgggacatcatctggccgcagtcacttccagtattgtgtggtggtcacaaccgtgagccacgctgtccaccatcacagctaatcatgtcccagcggcggcagcggccgagatggaggggcagcagccggtgttcgagcagctggaggagaagctgtgtgaatggatgggcaacatgaactacacggacgaggtgtccatgtcccgtatattgcttgcccctgattgctcccacactttgccttgactccaggctttgcatcccttatcccactgataccccaggatgtgcacctccttaatagcgcccgagcggacaagaaggaacgctgggaagcctgggtgatgtggactccactacgctaaccccaaagctgctgatgcacaatcagatgactagtgtcaggcctcagaacttcttgttgtgaccatttagggagtacgggaagagaga

SEQ ID NO: 8933 - DNA, 372 bp, Homo Sapiens
aatagtcaggcttgatagtgatgtcaggacgcattacaagctgtaaccgatactgactggccattggcaccatccttgactaaccttcctctttttctctagtgtgcctatggtgaaatggcaatagcattcacttgtcgtattttgcagtgctcaggaagtgggacgttaactttgaaggtgcttgtttgtattagctctgctaggtttacctctacaacgtagatttcagcagctatgctgatgtgacactacattctagttcttaagattttttttccagatccccccttccccagctagacatacgtagcatacttgtcatcttattcagtctttctgtaacctgctgctgctttatagtcctcctgg

SEQ ID NO: 8934 - DNA, 559 bp, Homo Sapiens
ggccttatctgacaggtcaaatctcataaagcaccaaaaaattcatactggagagaaaccttataaatgcagcgactgtggaaaatcattcacctggaagtctcggctcaggatacatcagaagtgtcatactggagagagacattatgaatgcagtgaatgtgggaaagcattcattcagaagtcaacattaagtatgcaccagagaattaatagaggggataatccatatgtttgcactgaatgtggtaaggccttcttccacaaatcccattgtattacacatgagagaattcatactggagagaaaccctatgaatgcactagttgtgggaaatccttcactaagaaatcacagctccacgtacatcagcagattcacacaggagagaaacccaataggtgtgctgaatgtggtataggctttgacgtgacagatcaatatctctttacacaccagagaattcacactggagagacaccttataaatgtagtgacctgtgggaaagccttcacctaggaagtcaggtctccatatacatcagcatcccatttggg

SEQ ID NO: 8935 - DNA, 635 bp, Homo Sapiens
aggagaagagacataacaaggagaggaggataaacgtaggtcgccgacatcacctgagaaaggacagatgacacaggggcgttacccagtagacagctaccaaagaccatcatatcacgcaaccctgtagagatcatgagcacgccctctgcatgtggatatggggaaagccaggcatgaaggggtgtgtgaaaaagaacagcctctgtgactgactgcagtaagctcacaagttagtcactgtcagacttagcaagtcagcctgcaaaggttgtgctgatctcttggacacactacctactcaggttcccatccatgcctcctgcctgcccccacccccagccccaccagtgagacttctgattggaagtctatagacataagaattcaactctgacccatggatgagaggatgaggcaaagaaccaatgggttatctagtacacgatcaataactacctacccacaatgattgtcccaggccaatgtcacaagacgacattacttccaaagaaccaagtcatcccttgcttctgcgggcccagtgccacgggtactgtcctgagtggtttggaaggtgggtagccgctgatacagggacaggcagatgtgcagacacttaccaccctggtcca

SEQ ID NO: 8936 - DNA, 238 bp, Homo Sapiens
ttcgcgtattcactgcactcatatggcctttctccagtgtgaactctttggtgtcgaacaaggtgggaggttctgataaagtctttcccacatttactgcacacaaaaggcctttcaccagtgtgaaccctctggtgtgcaatatagtcagaacttcgactaaagaatttcccgcattcaatgcactcaaacggcttgactcagtgtgattcgcgatggggtcctctagatcagccga

SEQ ID NO: 8937 - DNA, 435 bp, Homo Sapiens
atgggtcgatgtgagtgcgcacaggcgcatgagcatctctgggcatcgagaataatcagagttggacctgctcataaggcccaatccagctgtcggccagttcccgcagggtgctatacctccgctcaaactcctccttggtgcagtgctgcaacagctgacccacctcctcggtgaagtgagtcactgccaggtgcttatccagggtctcactccacttgctgcccaggatgctgtatagactggtagcacagcctgccgtacactgagccgacagcatgtcggtctggagcacctggcggcgcgcactgagcatgtctaggatgtggcggcaggacaggtggaacgcctgtataaagtaacatctgcagctgacagggggctggcgctgcaccttatgggtatcttacaggatctgtatgtacatcttttctg

SEQ ID NO: 8938 - DNA, 436 bp, Homo Sapiens
atatgccacgggagacgtttctgtcaagtaatagagctgtccacgcatattctgattcactgcaggccacatacagccaccaggagtctctgtgctcgtgcctcaggtctaaacttgactgtaagtcctacaggcttagagatcaatgtatatcagaacatatccagtttccaaagatatgagtggcaccatcaatataaattagttctccagtaatgtcaaagggcacacttagcagtgctgtcagaacaaccagaaaaaccacattcaaaagggaacacagcctaaggcacacaactcatgataaatacctgggaaaaaaccagttagctctgcctttagctgttcccaccccaattttcacgattaaaactacaatcgacatactaattagtcggcagacatctctataatgtttatactcctaaaaaacatg

SEQ ID NO: 8939 - DNA, 444 bp, Homo Sapiens
  misc_feature (129)..(129): n is a, c, g, or t
  misc_feature (402)..(402): n is a, c, g, or t
  misc_feature (410)..(410): n is a, c, g, or t
  misc_feature (427)..(427): n is a, c, g, or t
gtgactgttccagaaccaccaccagagccagaatcttcaattacgttaacacctgtagagtctgcagtagtagcagaagaacatgaagttgttccagagagaccagtgacttgtatggtatctgaaacntcccgccatgtcagctgaaccaactgtgttagcatcagagcctcctgttatgtcagagacagcagaaacatttgattccatgagagcctcaggacatgttgcctcagaagtatctacatccttgttggttccagcagtaactactccagtgctggcagagagcattctggaagccgacagccatggtgccccagagtcttcagctatggctgtccctggaagtcttcgggctggtgaccgtcctggaagtcttcgactgtgactgtcctggangtcttcgnctgtaactggtcctggnagccttccggtttgtga

SEQ ID NO: 8940 - DNA, 519 bp, Homo Sapiens
atcatcataaaataaataagcaaatacctgtattcagttttcacaatctctctaacatagtcaaatccacaacctcataccaaagaatgttttcggaaagcacttgatgtccctctctgggctgacagtctactgactgtctaaatgagactcagaaacctgaaagcttggttttcattagctccaaactatcagttcctaaaaaggcttagaggacatggaagacaaaagtggctatcctttgctaggaattatcagaataagtacctaaattaatctctccaggattttttgttttctcttcagcatatgcccaaggtatgtatgatatgagcagcctgaagctattctgaatgacaaggactagttttaggtaacctccaattgaattgtatttatttttcctatggagatccagagacgttggttttcaaatggagcaaacagcactgtgatactgactttgtttattaaaaaataattgtttccaaattaatttcaactcataatgagttaaag

SEQ ID NO: 8941 - DNA, 528 bp, Homo Sapiens
ggctgggtcttctacccacaaaataatctgacgtacattggcacaaggtaggttcttttctccagtgataattctcacaggattatgcagaagctggcttgctagctgttctatgctagttggaattgtggctgaaaccaaaatggtctgacaatcattaggaatgttttccaaaatgtcaagcacttgttgttgaaaacccatctttaacatggtatcagcttcatctactaccacaatctttacaccacagagttctacagagctctgctttattatatccagaagtcgcccaggggttgctatgataaccttaacatgttgttgcagacgataaagctgtgggggtaagggtaagccccctacaagaagcacagttttcatgcgtggcaggccactcatcaattctttagcttgtctctctatctgaatggctaactctctgggttggtgtaagaatgagcgcagatggagttttgctctcgaataaagctcgcatgataacaggaaaaacagctgcttttcttg

SEQ ID NO: 8942 - DNA, 607 bp, Homo Sapiens
ttactgcaagcccagcaacttaagtccacacctggtaaatgaccagctgactggaagacctgtattctagatagacaagtataagttagtgaaaagagaatacatgcacctaatagtatagttagactgatcctgcagtcatagctttccctgtgtaataccataaaattatggaagatcttcctcaactagagtataggatttagacatttctataccaacacggacattagtgttaagtgcagttgaattaattacactgaaaactgtattccaggacttcagaacagaagcacgggaatgaaacacacatactaaaataacctcagcacaatttgtgatacatcacactaggaacaggaaactacttttataaatgaactttttgaactgtacatacacagggctaacaatgttagataatccagattcttatactctcatgattacacatacaagtttctcaattattgaataatctatttcatattatggaagcatatctttctgtaagactcactcatatatattatactgatgcaaatattaagtagggcataaaaataaatttatcaaagatagaattttatgtactcatatttagtat

SEQ ID NO: 8943 - DNA, 410 bp, Homo Sapiens
agcaataatagaaactggggactactagaaggggaggaaaggaagacagtaaaaggtgaagaatgaacaaaaagaaagaaaaggcccactccgatcgccggctgggacaaaaacgactttcgctacaaaatatgaaccctgtacagacagcatcaagtggagtgtgagtagcggggttacctgccccctggggtggacagagggatggaaggctagggaggaactgggggctgcagtaccgtgtgctcagaattgggtagggggcaggcgatgaatgaggtcggtccacgctgcagaaccaggccgagggcgaggggaggagggagagagggggctttccctccaaacagtcccccatggcttggagaaaaatggtcttgcatctgtctgccgtatgctcgcgcggtacc

SEQ ID NO: 8944 - DNA, 217 bp, Homo Sapiens
aagatctatcaaaggcagatcagtaagcaaggtctttgtggggcagttgtcgacctcaccaagacatctgaacatattcagttttcagtagaagaacttaaaaatttgttcaccacttacatgaaagttcagattgtgttactcatgatctgcttgactgtgagtgtacaggagaagaagttcatacaggtgattcgttggaaaattcatgtctcta

SEQ ID NO: 8945 - DNA, 408 bp, Homo Sapiens
atctgataatgacacatagaagcaatgctacaagatgtgttgcttgtaagaatccggataaaccaagtccatctacttctgttccagctcctgcctcttttaagtttggtacttcagatgacaagcaaggctccaaagagcggatttgagggaatgttcactaagaaggagggacagtgggattgcagtgtgtgcttagtaagaaatgaagccagtgctaccaaatgtattgcttgtcaagaatccaggtaaacaaaatcaaactacttctgcagtatcaaaacctgcctcttcagagaccaagcaaggctccaaagagcggatttgagggaatgttcactaagaaggaaggacagtggtgattgcagtgtgtgcatagtaagaaatgaagccagtgctaccaaatgt

SEQ ID NO: 8946 - DNA, 427 bp, Homo Sapiens
aaacaatttggtcacgatgcacctttgatataaaagcatttttaaactttattattaatactcaggacattaggaatttccagatttttttcagtagcatttgtagaaccacttttggtaacaaatacagtagttaggaatatgcatccaattcagaatgcataataatgtttatcctgaatcctttccggctaaaaacagggctggcgctgtgatgagatatagaacgagaatctacaaaaaacactgtaacatgtttgttttttcccagaggctacatcctcttttgctggaatactttataaatacatattaaaaagtaaggcaacaactccaaacagtccaagctgtttgctcaactcgtttcccaattagatttgcaatcccggtgatcaatttcatggttgtattgtttagtgtttgtctt

SEQ ID NO: 8947 - DNA, 1220 bp, Homo Sapiens
atcggcagccatcgcgctttgcagttcggtctcctggtgtacggccaacgccaagtaggggattgcgttccctccagtcgcagaccctatcagatttggatatgtccttcatatttgattggatttacagtggtttcagcagtgtgctacagtttttaggattatataagaaaactggtaaactggtatttcttggattggataatgcaggaaaaacaacattgctacacatgctaaaagatgacagacttggacaacatgtcccaacattacatcccacttccgaagaactgaccattgctggcatgacgtttacaacttttgatctgggtggacatgttcaagctcgaagagtgtggaaaaactaccttcctgctatcaatggcattgtatttctggtggattgtgcagaccacgaaaggctgttagagtcaaaagaagaacttgattcactaatgacagatgaaaccattgctaatgtgcctatactgattcttgggaataagatcgacagacctgaagccatcagtgaagagaggttgcgagagatgtttggtttatatggtcagacaacaggaaaggggagtatatctctgaaagaactgaatgcccgacccttagaagttttcatgtgtagtgtgctcaaaagacaaggttacggagaaggcttccgctggatggcacagtacattgattaacacaaactcacattggttccaggtctcaacgttcaggcttactcagagatttgattgctcaacatgcataacttgaattcaatagacttttgctggttataaaacagatgttttttagattattaatattaaatcaacttaatttgaatgagaattgaaaactgattcaagtaagtttgagtatcacaatgttagctttctaattccataaaagtacttggtttttacagtttataatctgacatcaccccagcgccatttgtaaagagcaactttccagcagtacatttgaagcactttttaacaacatgaaactataaaccatatttaaaagctcatcatgttaaattttttatgtacttttctggaactagtttttaaattttagattatatgtccacctatcttaagtgtacagttaataattagcttattcaatgattgcatgatgccttacagttttcaataactttttttcttatgcaaaaaaaatgcaataaaacaaactctaatgtttggcaa

SEQ ID NO: 8948 - DNA, 986 bp, Homo Sapiens
ggagtcctgcatgccaaaatcattgcagctataacattgatgggtcctcagtggtggttgaaacctgtaatgaacaggtttacgcaaatggcatccggaacattgaccttcactatattgttcgtaaactggcagctcccgtgatctctgtgctgttgctttccctgtgtgtaccttatgtcatagcttctggtgttgttcctttactaggtgttactgcggaaatgcaaaacttagtccatcggcggatttatccatttttactgatggtcgtggtattgatggcaattttgtccttccaagtccgccagtttaagcgcctttatgaacatattaaaaatgacaagtaccttgtgggtcaacgactcgtgaactacgaacggaaatctggcaaacaaggctcatctccaccacctccacagtcatcccaagaataaagtagttgtctcaacaacttgaccttcccctttacatgtccttttttgtggacttctctctttggagatttttcccagtgatctctcagcgttgtttttaagttaaatgtatttgacttgtgttctcagcattcagagagcagcggtgtaagattctgctgttctccctggatcttctgacattactgctgtctgagatttgtatatgtgtaaatacaagttccttgataccctaaaaccttggattaaacagaatgtgcattgtacatctttaaacaaaatgtatattaatttattaaatctagttgtcactttattttggacctgctgtgatctcgacaggaaacgtgccacagagcagtagtgcgcaggcaagacttttcagtgacgccttgtggaacgcagttcatgatgtcctagcagctctcactaagggaactgtacattctttctttcttggctattcagaccttaccaagaacgttaaaggaaacaagtagaaatcagcagtggagtgtctgtggtaagaaaacatgaactttatgcttc

SEQ ID NO: 8949 - DNA, 490 bp, Homo Sapiens
  misc_feature (471)..(471): n is a, c, g, or t
ttggggagggggtgccccagcagacacgttttaattttattgcggaagtgatggaagtggttcatcacttacaggttaactacacatttgaggtgaattttagaccacagaaacaggaagtagtaaacatctgtgatgaaactttgatacttcaagatgcttgtcttagggaccaacattctctcagactagcagattatttccatggtgaatgagtcttcttattaatggtgtgtgaactatatacatgatgactgaaagcagctcataagataaaattcatcaccttttctgaggcactgaggctgagtaaatattgactcaccccagcctctctacttaaggtgaacagatgtggattggctggagcagaactgtttgcccctgtggactcaccatagttattttcatcccccaagtcagttcttaaatcgcccagtgttgacagaaaaaaatgcctcctctcccggngaacaggaataaacactgg

SEQ ID NO: 8950 - DNA, 1017 bp, Homo Sapiens
taacgggggtgcccaataggattaatcgggacaatagtccttccctccatgggagggttcccagaaacaacaggggaaggcaacaatcaggtagaatccgccaaagaatgggaaacaaagccgcgtgagtggcaaggaaaaacagccgtcataagcggcttaaagggacctgataaaacccaggccgattcctccgggagcagtgggtgcaaaactcgaagagacacatgaagagcaagaagcgcatccaagcaactagcttcgaaaaaatcccgtacctaggaattataacacagtattctacccaggttcaagaacaactacctagagactgtttcgtggtaagtgaaggagcaaatactatggacattggacggactgtgcttcagaactaccttcctcgtcacaggcttgatgctggtactttcggaacaatgggagttggtttgggatttgctattgcagctgccgtggtggctaaagatagaagccctgggcaatggatcatctgtgtggaaggagacagtgcatttgggttttctggcatggaggtagaaaccatctgcaggtacaacttgccaatcatactgttggtagtgaataacaatggaatttaccaaggttttgatacagatacttggaaagaaatgttaaaatttcaagatgctactgcagtggtccctccaatgtgtttgctgccaaattcacattatgagcaagtcatgactgcatttggaggcaaagggtattttgtacaaacaccagaagaactccaaaaatccctgaggcagagcctagcagacacaactaaaccttctcttatcaacatcatgattgagccacaagccacacggaaggcccaggattttcattggctgacccgctctaatatgtaaataaagacgccagttggtggtcttgagttttctctttcttgcaagatgaaattttattttccacagcaaaattactctactgttaaaattgtgcaaaataaaataaacatttaaaatgaca

SEQ ID NO: 8951 - DNA, 840 bp, Homo Sapiens
tgcccgcttctaacccgagatgctgctgccggcgccgctgctccgtcgcgccctgctgtcccgcccctggaccggggccggcctgtggtggaagcacacctcctccctgaaggtggccaacgagcccgtcttagccttcacgcagggcagccctgagcgagatgccctgcaaaaggccttgaaggacctgaagggccggatggaagccatcccatgcgtggtgggggatgaggaggtgtggacgtcggacgtgcagtaccaagtgtcgccttttaaccatggacataaggtggccaagttctgttatgcagacaagagcctgctcaacaaagccattgaggctgccctggctgcccggaaagagtgggacctgaagcctatttgcagaccgggcccagatcttcctgaaggcggcagacatgctgagtgggccgcgcaggggctgagatcctcgccaaggaccatggtgggacagggtaagaccgtgatccaagcggagattgacgctgcagcggaactcatcgacttctaccggttcaatgccaagtatgcggtggagctggaggggcaagcagcccatcagcgtgcccccgagcaccaacagcacggtgtaccggggtctggagggcttccgtgcacggccatctcgccctttaacttacactgcaatctggctggaaactggcctgggcaacaggacctgatgggcaccggtggtcctattggaagcccagtgaacactgtcaatgcctggccagctattgcatgctaacggatacttcgaggaggctgagctgtcccccaaacatcattccaagttgtgccagatagatgtggcca

SEQ ID NO: 8952 - DNA, 279 bp, Homo Sapiens
gggagggccaactccagggattccttccacgacagaaaaacatacaagactccttcagccaacatgatggtactgaaagtagaggaactggtcactggaaagaagaatggcaatggggaggcaggggaattccttcctgaggatttcagagatggagagtatgaagctgctgttactttagagaagcaggaggatctgaagacacttctagcccaccctgtgaccctgggggagcaacagtggaaaagcgacaaacaacgagaggcagagctcgaacac

SEQ ID NO: 8953 - DNA, 605 bp, Homo Sapiens
gttgtgccagtgctgatctgtcttgatgtgaatgtgaacaatgggaacctgagctgagcagttaatgctagggtgacagaaactggacctctcccaagacatgtgacagagtaatacagcagccaacttcttcgccaaattaaagttttacaagatttaacctgtcatcaagacctgggattttggtgaaggacagaataacgggctcccagattcacaagccccaccaagaggatcaccccaggaacgcttggaggctgaggagttcactgaggctactgcatcttgagactcaggatgaagacccagcttggggctgtcaaaggttttttgcatgtctgacacccatgactccacctggaccttatggctccacccagaagcaattcagcccaacaggaggacagcttcaacccattacgatttcatcactgccccaaccactcagcagcaagcacctgttacctgtccatccccaccccttcccccaaactgcctttgaaaaatccctaacctatgagctttgaataagatgagtacgaacttcatcgcccatgtggcgtggccggcctcgtgtctattaaattctttttctactacaaaaa

SEQ ID NO: 8954 - DNA, 913 bp, Homo Sapiens
  misc_feature (199)..(253): n is a, c, g, or t
  misc_feature (389)..(443): n is a, c, g, or t
gggggggagattccaaaacccctatttcttgtgcccggggttttctttgggggaacaaggtttgggcccaggtttcccctttcccctaagggggcccgggccgccccaagaaaaggttttggaaaggtttttttgaagggcgagggcggggggacaaaggtggaggggtttttgaggtgtgtaggagaatgcgcggtcnnnnnnnnnnnnnnnnnnnnnnnnnnnnnnnnnnnnnnnnnnnnnnnnnnnnnnncatactaaactttttattaaaacagtccttacaacatatttaaaatggcatgttccacagtcaaatatttaagaaaaaaaatctatatgcaattattggcgcacaaatttaagaacataattaaaaccaagccagnnnnnnnnnnnnnnnnnnnnnnnnnnnnnnnnnnnnnnnnnnnnnnnnnnnnnnngatatatcttcaaattcatgtcagtgacctggaatacctgagatttcaagttgttggttttccagatgggtacaaaacatttttcatccactttataaggacacggcagatccagaaagaataactttggttaataaatgctgtctcccaaagatcaaacagaaatcctcaatgggattaaggcttatcttcagaggcttcttccaagtgaaggttggtctgtgatgtaaggaatgattcccacgtagcaaggcactgttcataataatggatattctcctcagccatatctgtaaatgctaacttgatatcattttgcatattttgtttccatctctcccaatctgctttcagggcattattagcacattccactttctcttcaagttttccaatctcctctggaagcagatcagtatctgcctttttataggtcaaaacttcaactttggaatccagttctgcttgac

SEQ ID NO: 8955 - DNA, 284 bp, Homo Sapiens
gtgggggacacacacaaatttcggggccataccacccttcaccacaccctcctgcgctcagggtggcttgcagtccctggcccttctggtgggcatttggtatgtcctttctctcggggtgatttctgatgtttttactctatatagtgaaaagctagggagagcgggtcttctcccccctccctctccagtcccctcacaatcccagatgggttctaatgcagctgctggggcctgatgccctgagttgtttgtgattcaataaagaatccataagaaaaaaa

SEQ ID NO: 8956 - DNA, 1131 bp, Homo Sapiens
  misc_feature (520)..(640): n is a, c, g, or t
  misc_feature (657)..(717): n is a, c, g, or t
  misc_feature (722)..(873): n is a, c, g, or t
  misc_feature (885)..(896): n is a, c, g, or t
  misc_feature (913)..(1037): n is a, c, g, or t
agtaatgcggccactctgatcaacaatcgcaatgcccggaaacactttgagaagctggagagagtggatggccccaagcacagtctccttatgcgttgaatattgccaaatgctctttctgaaaatgctgaattgccttttttgtttgcatcctttatttttaatattcataatgtcgtgtgcttaaaagtgggctttgaagtgtgtgctgcttactcctttcatctttctccccgcttccccagtctttaaacattggacgctatttactcagctacccagtagagcttgaagctgacctttctgagaagttggtatggtgtaacactaaagtaggtggttcgtgtgtgttctcattacctggttatgatagatatgcacatcaaagcctttaccagtatcttcctgtattccgtatcagattgcaaagacggaatgttactattttatcagcaaggtattaaaatgcatttataaattcttcttggcttcattcatgaataaacgtgttagcaatttnnnnnnnnnnnnnnnnnnnnnnnnnnnnnnnnnnnnnnnnnnnnnnnnnnnnnnnnnnnnnnnnnnnnnnnnnnnnnnnnnnnnnnnnnnnnnnnnnnnnnnnnnnnnnnnnnnnnnnnnnccttttggggccccccnnnnnnnnnnnnnnnnnnnnnnnnnnnnnnnnnnnnnnnnnnnnnnnnnnnnnnnnnnnnntgggnnnnnnnnnnnnnnnnnnnnnnnnnnnnnnnnnnnnnnnnnnnnnnnnnnnnnnnnnnnnnnnnnnnnnnnnnnnnnnnnnnnnnnnnnnnnnnnnnnnnnnnnnnnnnnnnnnnnnnnnnnnnnnnnnnnnnnnnnnnnnnnnnnnnnnnnaaatttaatttnnnnnnnnnnnngggcactttttgggaannnnnnnnnnnnnnnnnnnnnnnnnnnnnnnnnnnnnnnnnnnnnnnnnnnnnnnnnnnnnnnnnnnnnnnnnnnnnnnnnnnnnnnnnnnnnnnnnnnnnnnnnnnnnnnnnnnnnnnnnnnnngggggaaaacacggggggacaaaaaaagtttccctatttggcccccgttttaaaaacaacagggggggaacaccctcccccggggttgtggggg

SEQ ID NO: 8957 - DNA, 738 bp, Homo Sapiens
  misc_feature (363)..(389): n is a, c, g, or t
  misc_feature (401)..(510): n is a, c, g, or t
  misc_feature (514)..(514): n is a, c, g, or t
  misc_feature (516)..(543): n is a, c, g, or t
  misc_feature (545)..(545): n is a, c, g, or t
  misc_feature (601)..(655): n is a, c, g, or t
ttcttttttgtaccaaagtcaactgcacgtgttttatatttttaagagatcgtaggcaattagagatcgaagcctcctatctccacatctctgaagaagttgaggggtgggggagagaatgacttctgccttcatctgcagtaacggggggacctatactgacctcttccccagccatttagaaacaagttctagggtgggttggaaaatctccaagagccctgacctcatcttccacctcagcaaccatgacctgaaacctcagcgtgaatttgggggatttttcagtggaacccttgcccccaaatgtcgaccagcccccaaatgtcgaagaattttcttcttgccaattttgttgtttannnnnnnnnnnnnnnnnnnnnnnnnnncctggaactccnnnnnnnnnnnnnnnnnnnnnnnnnnnnnnnnnnnnnnnnnnnnnnnnnnnnnnnnnnnnnnnnnnnnnnnnnnnnnnnnnnnnnnnnnnnnnnnnnnnnnnnnnnnnnngaanannnnnnnnnnnnnnnnnnnnnnnnnnnncnttgggggggccgcccctcggccccctccaaaaaagttttttttagaaaaccttttnnnnnnnnnnnnnnnnnnnnnnnnnnnnnnnnnnnnnnnnnnnnnnnnnnnnnnnccaaaaagcgttggtttccccaaagagaaaacccccggggcacaagaaaaaaagagggggtgtggtgggatttcccccacacc

SEQ ID NO: 8958 - DNA, 476 bp, Homo Sapiens
ctcttttctggctgtgttttagagaaagggatttgagctataggctcgcctcctgttctcattctcacaaagctgccttgactgtggcctgcaaccacgagtgccatgctttcaggtcttctgtggcctactggccttcaagacagaggcctgccccagtgtgccacagatccatgtggatggagcctccttcagaggggtcacaggtctttgagactcagcctgggctttaatgtgtaggaaaagccttctggccacccagagagccggagccctgcttgctgtattctctgctcccttcttcctgctgggttttagccataatagggcccggtacgatttgggagtgacatttctgtaaagaagaggaaaaatcatttttctataatttgtaaagttgtgaaagagccactaccacagttttttacattgattattggaacatttcagaataaataaagatattttcttaatga

SEQ ID NO: 8959 - DNA, 511 bp, Homo Sapiens
  misc_feature (272)..(284): n is a, c, g, or t
gggaatattaactgtgttatttttatacactttttaagccttaactcgccattgatttaccagtttaacgtttcctggggtttctttgcccatggggttctctgcccccacccccggccctttgtttgacttgcgtcgtctgatactcagtattgtagctttttgtccgcatgttactccctgtaaatacgctgttatacatactgttaacacccctttgctttttctatgggacctccaggccaccataattagaactagttaccttattnnnnnnnnnnnnncagtctgttggcttctcagtctgcatcttggaggcagggaggtgagggcaggtgcccctcagacacttcaggaaggtagtttgcattctatttaaaaaagggagtggggagcaaatgaaaatcaaatgtggggggaaaacactaaagggggcaagaaacaaaggaattacaaaccctctgctctttgtatttctctgttgtgaagaataaactgtacctgcaaccgg

SEQ ID NO: 8960 - DNA, 362 bp, Homo Sapiens
tttccgaaaccactcgccctccactgactgcccctgtaccacatcaaacagtctcctctcctccacgcctccggggtctgggaagtctcacctcactgatttcacgtagaaaagaaggcggaggcccagcagccgccgccgccagctccccaacgtgcaaatccatttcagtttgaccgtgaacccccttccagttcgtgtcctcctccgcccccgcccctagctcccgctgctgcgcttccaacggggttctcgggtcatttcctagcgccggtcacactggctggcctcctcccctcaacatctcctcctccggctgcagagggggcaaggggaaaagagggaggaaaaaaaagcccccc

SEQ ID NO: 8961 - DNA, 449 bp, Homo Sapiens
  misc_feature (361)..(361): n is a, c, g, or t
tctcctcaactaaatgcaactcagatcaacatggaaaggtaacacgtaaagcagggacagtggcaaaaaccagacaggatgccgggaagaatattttaacttaagattcagtcagagataaaagattaaaataaactttgtaattatctttccacatgacacatttataaattcctgtaatttcctgtgccaaaatatattttcaggcatctcttttgatcatttaaacttatttttaaaagctttacatatttccttttacacaagtaatggaacacagaccagtcagctgtattgctaaacattacaaggatattattacttgttttaaacaagtacctgccatagcacattctggatnatctgggaatatgattctgacagcaaagcaaactgactaaaatgagtcccatttactgaaacgacactagacaaaactgcttctcaga

SEQ ID NO: 8962 - DNA, 437 bp, Homo Sapiens
gggtttctaataatttttttaaagtcaagaaagataagagcaccattctatttctccccacacacataacttaaagaagggtcagatacaattgagctgaaaaagagacagactgacctggttcttcctctgtctccaaacaggagagtatactatctgaaaagcacaggccactacaatggaagttttcggatttacaatctttcttagatatattttgaacttggtaggggaaagagggcaaactcataattgtctatactgctttgaaaataagatccactctggtggtgggtctggaaataatcaggattcacttactcgtaagcatatcaaagatattaaatgatcttaccttcagagacatctagaaagattggctaaatgtgtgaaattcttaaaattaactgggctctcagttattgctagaaaatgat

SEQ ID NO: 8963 - DNA, 498 bp, Homo Sapiens
tttcatttaaagtgcatctgtatgcttatatatcgaggcaaagtattctacagaaaagggatcctttccaaaacggaggttcttgggcaattactttgggaaatcacctccctgatctgtgagcattttcaaattttgtgtcaactgaagttgctccttcacaccttgtcttttcagcaaaatcacaatactcgctctctagccaaaccctgaaaaaaacctttgggtttggaggacaatgcatgacctgagacagcgctctgtacagattagtgtttctgttgacagaatgagctcttaggtctctgtaaaccaccacaatttcatcaatgaaaattagaagctcaagatcatctcataaatagttcaagaccctcacaaacattccccccaaccataactgcatacaactgcgtactcctctgacaccatctggctcttgtaaacaccggggcaccaagatgagtgagactgatgccactcaaaatacactaccta

SEQ ID NO: 8964 - DNA, 488 bp, Homo Sapiens
gatgcttcaggctccttccagccaggtccagcagtgttaccatctgcttctcctgggaggacaaaccaggcacccccaccatgaaggggctgcaggcaccatgaactatgttaacaaccccagtctgtactacagaaagggctgcagccacatgagaattcagtccacacaagccccatggccgtgttccccacttcagccacagggctcagggagccccatctggcgctaaggggaactgctggggtgtgggtgacacctggcctttggcgttctgccttggggaggtttctggttttgttacggggtggaagaataggacctgggggtctcggatgcaacctgcagaccccgtggctcacccaaccccaggttctgcctcccagaccagaacgggcatggcctggtccttggcaccgaggtgcctgctctgtaaatatcaagggattacaactttaataataaagcagaacttgaaaacaaaaaaa

SEQ ID NO: 8965 - DNA, 992 bp, Homo Sapiens
gagggcaaggtctttgggaagctttcacggtgtcccgttagtgaatgaacttggacggctctggagcaagcccatgacgggtccccagcttgtctccatcagcaagctggttccacatcgtttcttcaagcctccttgcggtacaaatgggcctctcggggatcatgatggccttttctcgggctttgccttagaggagaaacttgtacgaatgaaattgagccgataaaatttgcacgccccagatcctgggggcgtaaagtcatccatagaaatgccactcttatctgtcacgcccccttcgatggaggaagtggcgctctcatcgccagcatctgtggcagacgcttctgcttttccctgactgcctgccaccatggtggccagtccatctcctggagtccgttccagagcttgctgggcctgctcctggctggcggcctcctgggccgccctgggtgtggcttcaccttgcagagcagcttgcttcaacctgcgggactctggcttggccatcgggtttccactcgaggacggtgaccaacctgcagctcctctgccggtggcggcactcgagtgtcccctcacaccccctgtggccttgctggcatcttttctccgggtgcggccatggcctccagcccccctcttcttctcggtcaggtggaagatggatggcacggccgtgggcttcagcaggcgatgctggtcctccagcctcttggagaagctgtctttggtgaaatgctcactacagagaaatgaatacttagtgggagtccagttatccctctgaacagcttttaaccattggattagacgttttgagtcctttagggggaacctgtggaaggagacggcgcgcttctcgccctttccctgccggttggagcagttcacggccgcacagcagatcaccatcgcgggcccttggcccagccgcgcagccaggccccggcccatagccgcccgcccgcgctcgcggaccgccc

SEQ ID NO: 8966 - DNA, 1027 bp, Homo Sapiens
  misc_feature (500)..(543): n is a, c, g, or t
ataacctccctttgtcatgccatattgggtattcaggtaatagcctataatcctccctgtggttggactgaagtctctgtattgcggcgtgtataccaaaatgcatgcccctcttctgatttcaggtttgagtatcttagctctagcacaattacttggactagtttatatgaaatttgtggcttccaatcagaagactatacaacctcctaggaaagctgtagaggaacccccttaatgcattcaaagaatcaaaaggaatgatgaatgatgaataactgaagtgaagtgatggactccgatttggagagtagtaagacgtgaaaggaatacacttgtgtttaagcaccatggccttgatgattcactgttggggagaagaaacaagaaaagtaactggttgtcacctatgagacccttacgtgattgttagttaagtttttattcaaagcagctgtaatttagttaataaaataattatgatctatgttgtttgcccnnnnnnnnnnnnnnnnnnnnnnnnnnnnnnnnnnnnnnnnnnnngggagaaggaaggacgcagaagagagctcccataaggatgccacaaaggggggcgcaaaaacacagaggtgtgatactcgaaaaaatggtgggccacaataagtggagcgagcaagagtgaaacacgataacaacaaccggcccggcacctgtcgacaacgcatacaaaccgggcggacatagccggccaacacagggcgcaaggtagggagagagagtgatacccacacacaaggcccgctagcctgccagtatacccacccacgctggggggacacacaccgtgcggcaaacccaagagactatcaccaacgaagtataagagccgccacaaactgagaagcaacctcccaaacaaagccacaaacgcggcgcgaaaaaacagcggccgcgacaatgcggcacggcaacctgagagacagggccagacaacaacccgcacaccagccgcgacgacacatcccaccccgctaacacccagaag

SEQ ID NO: 8967 - DNA, 406 bp, Homo Sapiens
  misc_feature (57)..(57): n is a, c, g, or t
  misc_feature (155)..(155): n is a, c, g, or t
ccgaagcccctctcctcccacccagcacacgggccagcctccaggccagccctccgncccctcccagctctcagcaccccggaggtactccagcagcttgtctccaatccaagctcccaatcacccaccgccgcagccccctacgcaggccacgncactgatgcacaccaaacccaatagccagggccctcccaaccccatggcattgcccagtgagcatggacttgagcagccatctcacacccctccccagactccaacgccccccagtactccgcccctaggaaaacagaaccccagtctgccagctcctcagacctgggcagggggtaacctgaaatgcacagccacatgctggaaccttaccgagaccgagaccagtaccaaagccaaggaaccggcccag

SEQ ID NO: 8968 - DNA, 658 bp, Homo Sapiens
  misc_feature (205)..(205): n is a, c, g, or t
  misc_feature (294)..(294): n is a, c, g, or t
gccattcagccatggaagatatattggaaaagcagccttttccccataaggtgacttcagtggctgggactgtctccaactgggccattaaacggctgattcttattattggcaaaaaagccattcctcttagctattgttgagccttgttaccgtgtgacagttttatatccctgactcccaagtatgaatagggaattgttangtaatgtaacttccatgtctctttggggattcctgaaggaaactgggagaggaaacaaatttctctccttggccccacttgtcactgtngggaaccaagttgccggttctttgtggactgctgcagaaacataaagcagcattttcccggttgtacaatagctgtcccatagagcaggtatcttttggtaacattacctaacacagttctgctttccccgagaaacccagaatgaggaaactacagcttgaattgcagcctttagaattgctagtaggaaaaactgccagaggataaatccacttgagtattttattacccagaacacaagattgattcagtagttcagagccaaaatgaactaatttgcccagaaagttggaattgctaatctgcctagaaaaccaaagtggaagtaggctatctgcctaggaagttggaggagaatagctt

SEQ ID NO: 8969 - DNA, 462 bp, Homo Sapiens
  misc_feature (19)..(19): n is a, c, g, or t
  misc_feature (28)..(28): n is a, c, g, or t
aaattgccactcacacctnggttggagncattgggccagctgtgcctgtgcgagaaggtgctgtggtctgggcaagcccctggaaaagcacctttgctgcctgtcattgttgcctgaagaaggctggagttgctctgagagccagtttgggtttggagtattatatttggcttctatttttattattttggatcaccattctcccttatcccttcttgcctccctcccttctaaacatgtgtaataactatacagagactgctacaaaattgtatatagtttttggatcaaatagcatgaggagagaggaaaccattaaaagttggggctcctactctcctttgctttgtaaattcaaaagttgggggtgggtaagagggatagttaaaatgtttacaaaactttaggctccctcggaacttttgccagtgtggaggaaaataaaaaagaacttaaataaaa

SEQ ID NO: 8970 - DNA, 469 bp, Homo Sapiens
  misc_feature (349)..(349): n is a, c, g, or t
  misc_feature (431)..(431): n is a, c, g, or t
ttttttgactgtaacctgctttattaacacagaaactgcaccacacacatttgaacctcatagccaatgaacagacccagcacttagcaacttctccctcctgcgccccagagaagggagaaaaagagggagcagaggagcaccagctacttcccaaacagcgccacggggaagtcctcgccatcacttgttgcttgtgcttgcagctccccgctctgccccagctctctcccaacatcttccatgagttgctccaggtccaggtcactggaggcttcgtcctcaagggggacacttccagcctcctgggtcaggggttcccggtgtctgggctcttctttcgcagatngaggggcaggcccccttacacgctgataggcccaggttctttggcactgttctaacttcttttccctctgaaaagctggctncaaggccttgctctggggagctttaaattttttcttag

SEQ ID NO: 8971 - DNA, 756 bp, Homo Sapiens
tcggggggagatacttacggctaggtagcgaggcctgggtggcgaattcggcacgagggaaacaccaaacaccccaaggaagatgataggctccatcttgggccacctgagctatagggcaggctaatggaatcaaccatttctgagcactaaatgtatcatgaaaagttgaatggcctgctcataagtttagctcattcactggaaatggtagaattgatgttcaatgttaaactggaaggagcttggtttgtgtgtcagtggttatattagtgggtagtgtaacattttatccaggttggggtgaggggagatggccacagtagcaagtggtgacactaaataccattttgaaggctgatgtgtatatacatcattactgtccgtagcaatgaaggatacagtactgtgttgtgggtgagtgttgctattgcccagcattaatatttgggtgtgtatgtttgaggctatgaaacacgcaggagtgtttttgtgctattaattttaagagaaagcagctttttcttaaaattcactgttgagaaacttgcatgtctggaggcggtgtcctctccgacctgctcgggtcctggatgagtacgagttatggtcccggtcacaggcctgatctcttatgtgttcatagccattcgctctcccatcagaactgtttgtcctggaatgtgtcctcctgttctggaaatggcccttattttaaactcgctgtcggggtttgcccaagggcttttcccgaat

SEQ ID NO: 8972 - DNA, 435 bp, Homo Sapiens
  misc_feature (29)..(29): n is a, c, g, or t
  misc_feature (39)..(39): n is a, c, g, or t
  misc_feature (111)..(111): n is a, c, g, or t
  misc_feature (126)..(126): n is a, c, g, or t
  misc_feature (183)..(183): n is a, c, g, or t
tgtcccaagcacaagtgaaagctgccccnccagggagcngcccatcaagtgaaaaagcttgctggtggattaagccgccaagggccttcaaagcccttaaggcgcaagaantcgcgcggttggctngcacgcgctctgtctccaagcgcctcgcgttccttggtacggccgctcgggtctccncaggcgcgccgtggcgcctcccaccagcgcgatcacgttgtggcccgctcgctgcaaatgaaacaggcccagcagcgcaagtagatgacccacatgaagcgagtctgccgtggggtcgaagccacagtaaatggtttggggaaaactcgccgtgccacggtcgaagagctctgggagctctattttcgtccccgtctccgggaagaagtccttgaacagacctcgagccttctgcgctgccagtaacccctg

SEQ ID NO: 8973 - DNA, 546 bp, Homo Sapiens
cccaccccctccccctccatgtgaagatttgggtgcttaacatatcatttttttccctgccggaattttagcattgatatgaaccatggacaagtatattctgctgccacaaagactgtaaagtgcttcatttcaacagctgaggcaagccaagtgatcattaataaagcttttcttggttccttcagtggtgttggtagtaaaatggaaggtgtcttgctgcaggtaactaatgaagaagtggtcaaccacagagtcttcaagaaataagaaattctgtaccatctgaaagtagttcttgttggtgccttcatttaaaaagcactctttaaaataaaagggaaatgttttctgataaaacaaacatttagttgaggttcttgatataaaacaattacaaaatgagtgttgtttgtaaaacagtaacatcaaattggctagagagataaatgtatcatgttttaaattaggttttgtgagtagacagattacaattctattttaaatataaagtttataaaataaatactttttgtatccaaaaaa

SEQ ID NO: 8974 - DNA, 435 bp, Homo Sapiens
ggcctctcgtctccttcctggtttgggcggaagccatcacctggatgcctacgtgggaagggacctcgaatgtgggaccccagcccctctccagctcgaaatccctccacagccacggggacaccctgcacctattcccacgggacaggctggacccagagactctggacccggggcctccccttgagtagagacccgccctctgactgatggacgccgctgacctggggtcagacccgtgggctggacccctgcccaccccgcaggaaccctgaggcctaggggagctgttgagccttcagtgtctgcatgtgggaagtgggctccttcacctacctcacagggctgttgtgaggggcgctgtgatgcggttccaaagcacagggcttggcgcaccccactgtgctctcaataaatgtgtttcctgtcttaaaa

SEQ ID NO: 8975 - DNA, 547 bp, Homo Sapiens
tctttttccttatttttttctttcaaataactttaattatttaatcccatactgattaaaatatgtctgtctaaagggatctactactatttgcttttaaaaagtgttccctatttattaggaaaaagtgaagcaagcaactgaatttatatgtaaaaataacatttagacctgtggatcaaagattattttcaaaaatgagatatcaatttggtatcagtaaaaagtgtcttttctcttagtatataaataaataaaatgcaaattaagagtgtaagcagttgtgaatcattacaagcagtctgggataactaactcctagggataaccatttctatcctgttccaaagtcttattttatagtttgaaaagcactttgcacacagttcttgtatataaaagtaaagatgtaattataggatatagtgttcctgctttgtttaataagaacctcatttaaacttgacagctatggtatttttttaatgataacttcttttctgtttattgtaaaactaagttaaaaataaaaggttaatgagaaatg

SEQ ID NO: 8976 - DNA, 468 bp, Homo Sapiens
tgctccgcctgctgctgcggctctgacgaggacccagccgccagcgcccggcggccctaccaggctccagtgtccgtgatgcccgtcgccacctcggaccaagaaggcgacagcagctttggcaaatacggcagaaacgcctacgtgtagcagctctatgccgtgggccccgctgtcttcccactgccccaaggagaggggacctgccggggcccattcccctatagtaacctcaggggccgccacgccccgctcccgtagccccgccccggccacggccccgtgtcttgcactctcatggcccctccaggccaagaactgctcttgggaagtcgcatatctcccctctgaggctggatccctcatcttctgaccctgggttctgggctgtgaagaggacggtgtccccgcacgtttgtattgtgtataaatacattcattaataaatgcatattgtgaccgttaaaa

SEQ ID NO: 8977 - DNA, 307 bp, Homo Sapiens
tgcttattaatagtttaatgtatgaaggaaacatccagatttctgaatatgaaggtacatatctcacattaatttaagtctacataaagtagagcctctatactgacatattgaaatttactttctgcttagccttttctgttatgtaaacaattgtacatttatttgccattctaaaacttcaggatcaagtttacataattttgctaaatttccgtgtttgctcagaagcagtttacagtactaaaaccaaccagccaaagaacagcttcaacagaaagttatgtccaaaggggaagagggaaag

SEQ ID NO: 8978 - DNA, 426 bp, Homo Sapiens
tcattgtatggtgtgaattctccaatatatttaatgcatgggtccaagaaccagattaaacataggagttatttcacttgtcattatatctcgtaacccattggaggaatctgtgtgcactatccctgtaactctgagatttgtgagtttagagaacctgtttctcagaataagaatgctactattaggggacaaagaaagagtcccattaaactttaatctatgactgtcatccagttactttgagctccacttgccaacagaccagtgatgaagaaaggaatcaccattctggcaagagtcatcgactctgatcatcaggaggtgatagagctgtattgctcagaggagtcaaggaaatatatgtgttttacttagtgatctgctgagtcatttgttccaacaataaaaggatgagtgcagcaa

SEQ ID NO: 8979 - DNA, 1743 bp, Homo Sapiens
gcagcgttgccggttgtattcgctggataccagagggcggaagtgcagcagggttcagggtccgacctccgcgccggtgctttttgcggctgcgcgggcttcctggagtcctgctaccgcgtccccgcaggacagtgtgtcaggcgggcagcttgccccgccgccccaccggagcgcggaatctgggcgtccccaccagtgcggggagccggaaggaggagccatagcttggagtaggtttggctttggttgaaataagaatttagcctgtatgtactgctttaactcctggaagaatgacagatgacaaagatgtgcttcgagatgtgtggtttggacgaattccaacttgtttcacgctatatcaggatgagataactgaaagggaagcagaaccatactatttgcttttgccaagagtaagttatttgacgttggtaactgacaaagtgaaaaagcactttcagaaggttatgagacaagaagacattagtgagatatggtttgaatatgaaggcacaccactgaaatggcattatccaattggtttgctatttgatcttcttgcatcaagttcagctcttccttggaacatcacagtacattttaagagttttccagaaaaagaccttctgcactgtccatctaaggatgcaattgaagctcattttatgtcatgtatgaaagaagctgatgctttaaaacataaaagtcaagtaatcaatgaaatgcagaaaaaagatcacaagcaactctggatgggattgcaaaatgacagatttgaccagttttgggccatcaatcggaaactcatggaatatcctgcagaagaaaatggatttcgttatatcccctttagaatatatcagacaacgactgaaagacctttcattcagaagctgtttcgtcctgtggctgcagatggacagttgcacacactaggagatctcctcaaagaagtttgtccttctgctattgatcctgaagatggggaaaaaaagaatcaagtgatgattcatggaattgagccaatgttggaaacacctctgcagtggctgagtgaacatctgagctacccggataattttcttcatattagtatcatcccacagccaacagattgaaggatcaactatttgcctgaacagaatcatccttaaatgggatttatcagagcatgtcacccttttgcttcaatcaggtttggtggaggcaacctgaccagaaacacttcgctgctgcaagccagacaggaaaaagattccatgtcagataaggcaactgggctggtcttactttgcatcacctctgctttcctccactgccatcattaaacctcagctgtgacatgaaagacttaccggaccactgaaggtcttctgtaaaatataatgaagctgaaacctttggcctaagaagaaaatggaagtatgtgccactcgatttgtatttctgattaacaaataaacaggggtatttcctaaggtgaccatggttgaactttagctcatgaaagtggaaacattggtttaattttcaagagaattaagaaagtaaaagagaaattctgttatcaataacttgcaagtaattttttgtaaaagattgaattacagtaaacccatctttccttaacgaaaatttcctatgtttacagtctgtctattggtatgcaatcttgtaactttgataatgaacagtgagagatttttaaataaagcctctaaatatggtttgtcattt

SEQ ID NO: 8980 - DNA, 1109 bp, Homo Sapiens
gggctcctcctcttgcgctgtcctgttaatggcgggcagtagccgctgaggggattgcagataaccgcttcccgcacggggaaagtctaccctgcctgccactttctgctcgccgtcagcgccggagctcgccagcatgtctgtggtaccgcccaatcgctcgcagaccggctggccccggggggtcactcagttcggcaacaagtacatccagcagacgaagcccctcaccctggagcgcaccatcaacctgtaccctcttaccaattatacttttggtacaaaagagcccctctacgagaaggacagctctgttgcagccagatttcagcgcatgagggaagaatttgataaaattggaatgaggaggactgtagaaggggttctgattgtacatgagcaccggctaccccatgtgttactgctgcagctgggaacaactttcttcaaactacctggtggtgaacttaacccaggagaagatgaagttgaaggactaaaacgcttaatgacagagatactgggtcgtcaggatggagttttgcaagactgggtcattgacgattgcattggtaactggtggagaccaaattttgaacctcctcagtatccatatattcctgcacatattacaaagcctaaggaacataagaagttgtttctggttcagcttcaagaaaaagccttgtttgcagtccctaaaaattacaagctggtagctgcaccattgtttgaattgtatgacaatgcaccaggatatggacccatcatttctagtctccctcagctgttgagcaggttcaattttatttacaactgaattcctgcgcagtggagaagtaaaagaagccgcttgtctctgtgagcacagctatatacagtgtagaataaatgtggtagaaaagtttttttggttttatctcttttgcgatccctaaattgccacctttctattgtttgaatagtaaaattaatatgaagaactagatagtggtgtaaacaaatgtgataatgtttatttactttcggttctgctcatacttttttgtacaacattaaagaaaatggactttttttattaaaatttctcattaaacttctaaaattat

SEQ ID NO: 8981 - DNA, 535 bp, Homo Sapiens
cactccaaagccaagacaagcagtttcctggaaaaagaaggctgcgcggagcccagagtggcctggatcctgcctcatttcctggaccagctccttaggtggttactggattgccaataaagcagagcttattaaagtcaacgagctcaggcttcatcgcccgccattggtatccaagcaccagtctgtctgggatttcatttgccagatggacaaaggagaggttgttccaatacatatcctgagtggtgggggtggggagagaaggggaagaatgctctctagagaattctctttgtcctctgaagtaaatagagatcatgtcttccccagccacactcagtgatctgaatctcttggactgtggatttttcctttacctgctgtgaagccttgaaaagtatgaattagcttgataatgatcctctaaagatgttcaagagttaaagacgtgtttaagttcttcaggcaatccaatatgactacgggtttaaaaaaatatgaaggaaactgaaaatcatagttcccaagaatt

SEQ ID NO: 8982 - DNA, 434 bp, Homo Sapiens
gaaattctgcatctggtaggtccaaggtagtttgttgttagaagtagcaggatcgccttaataataataatagttttgtagcatgaagcctgagcattgtccaaagtttggaaatgtgaacgctgatagtcacatctgtccatctttccacatttctaggatgctgacagacagcaccaagaagtaatcgcaatttatcggacacaccttcttagtgctgcacagggtcacatggatgaagatgttcaggagcgtctgctccagatcatacaaatgcggcaggggcttgtgggctagccgttagcactgactgccagtatctgttttatctggctggtgctgaacattctttgtgcaactccatggtctttctgggccttactgtgctggtataattaaaataaaatatattttgttctagaaacagacaagag

SEQ ID NO: 8983 - DNA, 590 bp, Homo Sapiens
  misc_feature (363)..(376): n is a, c, g, or t
tttttttccctttgggtctggcagcacatgccagccaagtcccaaactagtttattagtttaaccaaaaggtaaacagatgatggagatgcagaaagacaagcatgcgagcagctaaaagcattacccggctgtccaccaggaaacaaatttaagacatttaaagtggcattaaataaatgaagctaagttttagctacttggaatttccattgtctttaaaaaaggtaaatatatatatattttacattgcagtatataaatctagactctacatatacagtataaatacacaggatgaacacgggcacaacatatatgtcttggtggtcacgccctcaaccaggccaatggttttatttannnnnnnnnnnnnnaccttcgcaccaagaatatcaggctgaggctacatatacttcaacctgcatgagggctgccaccctggccatctctcctacaagcacagaagcacaaatcgaacagggattgaaaacagaagaaagtgctttttgactagttgaaacccagtcagtctttacaatgtgtagtccaatctcctggaaagaccaaaggaaatcggaggacttcctg

SEQ ID NO: 8984 - DNA, 850 bp, Homo Sapiens
caccattgttgaaggcagtgacagcacacaagtgattaaatatagtttatttgttccaaatgactaaattttacctcatttattaatctggtcattaaggaatatatttaagtaatattatgtaattattctttttatgcatgatacacctagaaaaatgccttttgtttctattgatggctttgttgtttggagctacttttgattacttattgcagtttcccaatttagtctttactttatctaactcacaaagtaaaattaactgatcacatggcaactactgtatttaaatagttctggaaaaatgaaagtgctttttgctgcttggtaaatgggtaatgcccttgattccttgactgtaggacatagctgatctaaagtactctgtcagttttaccttcacccatgactgtcattagttgtcaaagttgaaaagtactttagctgtgagaaatccttgtatgtttttattataagaggtataatcatcctcaaagcctgtttttattacatgatgtggactgattattttttctatcacagtgttaacagatggattttattgtaaatacaaagaaaacatattgattattgtagtattcttatgtcacctggccttttgcgtgagattatttattatttctagcaaggctttcttcctttcttattgcccagagactgactgatacatcttttgttatttttacacataaattaaacatagcctttttggacaaattcactaaatattaatgtataaaatgtaattgagtaaatttttatcagaattttaaaaataaaagagcttatgactcagtagaactcagtagaagcttcactatttaaa

SEQ ID NO: 8985 - DNA, 609 bp, Homo Sapiens
aagcactacttgctgtagctgagacttgtctagagtcctttgttttgcacttttgacccaccccttcctggatcactcctttgcactccactcccctcgttctgtcactttgaacgaagtctgagtgaggctagtgactccttgggtgtcctcaacagtgaattcactgtctgcgtgcagttattacatgcatttgtgcatttctactacaatggcatctttatgtctctgtaacattggccttttcatggctccacacttgggtggaaccatattctcttaagatcacatttagtaagcataactgtagggactattaagagatggcatctcatcgatgagagagaatcacaatcagaatggaagcactttgagtatctgaagagtgagagcattcatgtttgacaggtcctgcttcccactatccttttcctgttattattcaaattttacacaaggactaatcctgggtgtctctgagacccatctcctgcctagacatccacctccagagcaacactggccccacagtaaaagaggaatcttgtacctcaggcaggcccatctagagctatagctccttcccacagcaaaggtattgtggacgac

SEQ ID NO: 8986 - DNA, 1035 bp, Homo Sapiens
gtaaaaatggtcaaggcaggaggcggctccttgggcggttgggtctggacaagtctccaggcacgagggtaatatggcgaagacctacgattacctgttcaagctgctgctgatcggggactcgggggtggggaagacctgtgtcctgttccgcttctccgaggacgccttcaactccacttttatctccaccataggaattgactttaaaattaggaccatagagctcgatggcaagagaattaaactgcagatatgggacacagccggtcaggaacggtttcggacgatcacaacggcctactacaggggtgcaatgggcatcatgctggtctacgacatcaccaacgagaagtccttcgacaacatccggaactggattcgcaacattgaggagcacgcctctgcagacgtcgaaaagatgatactcgggaacaagtgtgatgtgaatgacaagagacaagtttccaaggaacggggagaaaagctggccctcgactatggaatcaagttcatggagaccagcgcgaaggccaacatcaatgtggaaaatgcatttttcactctcgccagagatatcaaagcaaaaatggacaaaaaattggaaggcaacagcccccaggggagcaaccagggagtcaaaatcacaccggaccagcagaagaggagcagctttttccgatgtgttcttctgtgaggaacaccgccttactctgagcctcgctcagcccagctgactgtgcctgttctgagtgagcccctcactcagccggggccctcccacctccaacgccccgcccacgccgcggccaccgggcccacggccaccagaatgcaattgagaaatcgtttattttagtaactgtctgatctttttcaactttggagatggaataagttaaaaatttgctatttttcctgtaacatctgctgaacgggcccaccacacgttgtacttcagagagagagagggagcaaggtgtgacgtcgacaagccagtgtcggctctgctctgggctctgttggggctcatga

SEQ ID NO: 8987 - DNA, 402 bp, Homo Sapiens
  misc_feature (154)..(154): n is a, c, g, or t
  misc_feature (309)..(309): n is a, c, g, or t
  misc_feature (342)..(342): n is a, c, g, or t
cagaagagagtatcaagaaattggtggagcaatataaactgccatttttgcccacccctatgggaaagggtgttgtccctgacaaccatccatactgtgtaggtgcagccagatccagggctttgcaatttgcctgatgtaattgtgttatttnggtgccagactaaattggattttacattttggactgcctccaagatatcagccagatgtgaagtttatccaggttgatatctgtgcagaagaattggggaataatgtaaaacccgcctgttactttgctaaggaaacatacatgcctgtcactanaacaacttttaggaggaacttgataaaacaccnatggcaagtatccccccagagagcaagtgggtggaaaactcctgagagaaaaaatggaag

SEQ ID NO: 8988 - DNA, 1362 bp, Homo Sapiens
ggcacaggtgtcctgatggcaaatttcaagggccacgcgcttccacggagtttcttcctgatcattgggctgtgttggtcagtgaagtacccgctgaagtactttagccacacgcggaagaacagcccactacattactatcagcgtctcgagatcgtcgaagccgcaattaggactttgttttccgtcactgggatcctggcagagcagtttgttccggatgggccccacctgcacctctaccatgagaaccactggataaagttaatgaattggcagcacagcaccatgtacctattctttgcagtctcaggaattgttgacatgctcacctatctggtcagccacgttcccttgggggtggacagactggttatggctgtggcagtattcatggaaggtttcctcttctactaccacgtccacaaccggcctccgctggaccagcacatccactcactcctgctgtatgctctgttcggagggtgtgttagtatctccctagaggtgatcttccgggaccacattgtgctggaacttttccgaaccagtctcatcattcttcagggaacctggttctggcagattgggtttgtgctgttcccaccttttggaacacccgaatgggaccagaaggatgatgccaacctcatgttcatcaccatgtgcttctgctggcactacctggctgccctcagcattgtggccgtcaactattctcttgtttactgccttttgactcggatgaagagacacggaaggggagaaatcattggaattcagaagctgaattcagatgacacttaccagaccgccctcttgagtggctcagatgaggaatgagccgagatgcggagggcgcagatgtcccactgcacagctggaatgaatggagttcatcccctccacctgaatgcctgctgtggtctgatcttaagggtctatatatttgcacctcctcattcaacacagggctggaggttctacaacaggaaatcaggcctacagcatcctgtgtatcttgcagttgggatttttaaacatactataaagtctgtgttggtatagtacccttcataaggaaaaatgaagtaatgcctataagtagcaggcctttgtgcctcagtgtgaagagaaatcaagagatgctaaaagctttacaatggaagtggcctcatggatgaatccggggtatgagcccaggagaacgtgctgcttttggtaacttatccctttttctcttaagaaagcaggtactttcttattagaaatatgttagaatgtgtaagcaaacgacagtgcctttagaattacaattctaacttacatattttttgaaagtaaaataattcacaagcaaaa

SEQ ID NO: 8989 - DNA, 852 bp, Homo Sapiens
tcgtttctcattttgaagttgtaaactttggtagacatgggtgccaagtctgaataacataaccctattggttacaccaaggaggagcttggatttctatctcctgaaggcagcagggacaacaacagctgctacatcttagtggtctctccagagttatgacttcttgacccatattatcaataatcctcaaggtaaaaggtctagatggcccacagcaatttcgggtacagcaatcagtatcttccgctgcaaagtaaaccctctgtccaaagctgttcttaatttcatatttgttattagtttcaaaacctgttaaaacttccagaagttcaatttgctgatgaatcagtatctgatctatctgacttaaatattctaatccaggtggacagtttaatggaggctgtggcgctggcatccatggtacccctgcagctccaactggctgattatatactggctgattatacactggctgatttgggacaggaaagccagctgggccaggacctgaatggccggctggtgggggtgggtagctgacctggggcccagggtagccactatatcctggaggtccttggaatgctgtcggtggatactgaggaggatacccaactggcaagtttgtttccgggtgagaagcattcatctgtgagttttgtttgtccatgattaaaacagttctctggctgccgctgtttccgctcccgagcgagacaaggtccagagagccggggccaggcgatggcttcctcttcactgcgcctctagactagcacgggcacagctgctgcgcaaccttctcagaagtcagccggaaaagggtctgggagtaacctttgcgcc

SEQ ID NO: 8990 - DNA, 1098 bp, Homo Sapiens
  misc_feature (857)..(871): n is a, c, g, or t
aagaagcagaagaagcgcgggcggccgcctgccgagaaactctcccctaacccacccaacctcaccaagaagatgaagaagattgtggatgccgtgatcaagtacaaggacagcagcagtggacgtcagctcagcgaggtcttcatccagctgccctctgcgaaaggagctgcccgagtactacgagctctatccgcaagctccatggacttcaagaagaaaaaggagcgcattcgcaaccacaagtaccgcagcctcaacgacctagagaaggacgtcatgctcctgtgccagaacgcacagaccttcaacctggagggctccctgatctatgaagactccatcgtcttgcagtcggtcttcaccagcgtgcggcagaaaatcgagaaggaggatgacagtgaaggcgaggagagtgaggaggaggaagagggcgaggaggaaggctccgaatccgaatctcggtccgtcaaagtgaagatcaagcttggccggaaggagaaggcacaggaccggctgaagggcggccggcggcggccgagccgagggtcccgagccaagccggtcgtgagtgacgatgacagtgaggaggaacaagaggaggaccgctcaggaagtggcagcgaagaagactgagccccgacattccagtctcgaccccgagcccctcgttccagagctgagatggcataggccttagcagtaacgggtagcagcagatgtagtttcagacttggagtaaaactgtataaacaaaagaatcttccatatttatacagcagagaagctgtaggactgtttgtgactggccctgtcctggcatcagtagcatctgtaacagcattaactgtcttaannnnnnnnnnnnnnnattccgaattggggaacacacgatacctgtttttcttttccgttgctggcagtactgttgcgccgcagtttggagtcactgtagttaagtgtggatgcatgtgcgtcaccgtccactcctcctactgtattttattggacaggtcagactcgccgggggcccggcgagggtatgtcagtgtcactggatgtcaaacagtaataaattaaaccaacaacaaaacgcaa

SEQ ID NO: 8991 - DNA, 678 bp, Homo Sapiens
  misc_feature (127)..(127): n is a, c, g, or t
gcaaagatacatctatcatgaatatgtaggtcagcacacttcctattctttctctgacatttttgtaaacctgggtgagtttgggttcccaagtacttcagtagtctgtgcaatagttcaggcactntccaattcttgctgggcaaggccaccttgtagtacataaagtcgacatgcatctacaaaggatcctccttcaccactcaatggtgattccagcagcagttcaaaaagccagtgaagtttcctggggatctctgctttcacaggatgttgctatacaagctccccagtcattataagtttctacggtaatattggacagtgctgttctaagcagagggcacagaagctcccaaagcttctccaccttttcaaatgtccagtgcttagaacctctgattaaaccagctataatttctgcaacacatcgctgggtgctttcatgtgaatctgcaaccaaatgttctaaatggggcttcagaactggcaggaaggcatcatcaaaattcctgaatatacccttaaagagacaaaaacgtcgtggattaaacttatcttttccttttctgtcttctaatgatagaaaagtaattaactgctcaacaaatttaggatcagaaaaatgatcaaatataatctgttctgcctctgtcatatcctccctgcttctgccaa

SEQ ID NO: 8992 - DNA, 210 bp, Homo Sapiens
tcccccatttaaaaggatagtacctactccctctaaccacctcaccccattcttgaatgacattttatccttcggaaagaacaaggctgtgatgtagtgactattgtctgtgtctcctgggggggtctgttcttgtcacaaatgtatttggggacgttggaggcattcattttctgtaataaagtttcttaatccctcttcccaaaaagt

SEQ ID NO: 8993 - DNA, 604 bp, Homo Sapiens
  misc_feature (322)..(322): n is a, c, g, or t
  misc_feature (494)..(494): n is a, c, g, or t
  misc_feature (518)..(519): n is a, c, g, or t
taatctcttcttccttccctgggttccaacgcctaagctgctttgatattctgggtggcataatgaagtggcccctcccccagatgttaccagtcaccaaccatgacccttccctgcaaggcagatgggacccttctgattctcttacggtgggggggtttgaggtgggggggcacacaaaaaccaacaaccagcaaaggggaaccactacagctctccctactcttcagacaaaattcagtctcagtaacctgtcctgtcaccccaccctgctctcagcccccacggccatgcttcttaaagaccctcggcctcgtgaagnaccatttcagtgtccggcagacggcaggctttcagcacacgatggctgaatacttacgaatggggcatttatagcacttcctttcagccttccacatgtacacatatacatcaggcaagattaagcttgcagggaacaagcccacgcatgtgggattttgtgttctgaaagngatttccaaaatctccgctctccnnatgctctttcatgagattcattcctcaggcttgacacagaaagccaactgactggtgtgaggcaagtaggaaggtagacacgaca

SEQ ID NO: 8994 - DNA, 350 bp, Homo Sapiens
  misc_feature (32)..(32): n is a, c, g, or t
  misc_feature (48)..(48): n is a, c, g, or t
  misc_feature (93)..(93): n is a, c, g, or t
  misc_feature (97)..(97): n is a, c, g, or t
  misc_feature (101)..(101): n is a, c, g, or t
  misc_feature (103)..(103): n is a, c, g, or t
  misc_feature (106)..(106): n is a, c, g, or t
ggaaccaagcagaacacggggcagtgaccgtngggggcacgtcggtgnggatcctgggtgtgccgggtagcgttggtggggtccctggagggnttgngcantnggnacgggaataagatctttctgtgccattgtgggaaggccttctcccacaagagcatgcgggaccggcacgtgaacatgcacctcaatctgcggccgtttgactgccccgtgtgcaacaaaaagttcaagatgaagcaccatctgactgagcacatgaagactgcacacaggtctcaagccctacgagttccgattctgcgccaagaagttcatgtggcgagacagcttcatgcgccaccgagtac

SEQ ID NO: 8995 - DNA, 609 bp, Homo Sapiens
gggcaggaggccctggcctggagagaggagaagcgggagtcccagctgagttcagcatttggacccgggaagcaggcgctggaggcctctccatcgctgttgagggccccagtaaggccgagattacattcgatgaccataaaaatgggtcgtgcggtgtatcttatattgcccaagagcctggtaactacgaggtgtccatcaagttcaatgatgagcacatcccggaaagcccctacctggtgccggtcatcgcaccctccgacgacgcccgccgcctcactgttatgagccttcaggaatcgggattaaaagttaaccagccagcatcctttgctataaggttgaatggcgcaaaaggcaagattgatgcaaaggtgcacagcccctctggagccgtggaggagtgccacgtgtctgagctggagccagataagtatgctgttcgcttcatccctcatgagaatggtgtccacaccatcgatgtcaagttcaatgggagccacgtggttggaagccccttcaaagtgcgcgttggggagcctggacaagcggggaaccctgccctggtgtccgcctatggcacgggatctcgaagggggcaccaca

SEQ ID NO: 8996 - DNA, 465 bp, Homo Sapiens
ccacctgcagtgggtttactgctgttccatctccccagactgcagcatgctgtgctctgcagctggagagaagtcggtctttctatggagcatgaggtcctacacgttaattcggaagctagagggccatcaaagcagtgttgtctcttgtgacttctcccccgactctgccctgcttgtcacggcttcttacgataccaatgtgattatgtgggacccctacaccggcgaaaggctgaggtcactccaccacacccaggttgaccccgccatggatgacagtgacgtccacattagctcactgagatctgtgtgcttctctccagaaggcttgtaccttgccacggtggcagatgacagactcctcaggatctgggccctggaactgaaaatcccattcatttgctcctatgacatgggctttgctgcacatttttcacatgtggagtcattgccacagggaca

SEQ ID NO: 8997 - DNA, 487 bp, Homo Sapiens
  misc_feature (436)..(445): n is a, c, g, or t
tgggtcatgattgttctgttgacttacacaccagaaatgcaccacgaccaaccatatggcaaatgaaccaagcccagttgttgcagtgattggttgtctttttctagacttgggatctgcaagaaggccaattgcctaaaatttctgagaacagtgcacaagattattttatcactacaagcttttaactttttaagttattgtacaagtattctacctaaatcttccaatttcctttaaatggtaagagtttctaaaacagacaataatttaacaagctcagctctgctttatctgagtttagtggtcctaatatatatgtagagaaagatggtggggttgttcacctctgtacagaccatctgtatgttaggtgacattgattatgggttataatcagggaaactaattgtatttagtgacaaaaataaaaagnnnnnnnnnnataattctaaaaaggagcacagagggcattacagggccttgt

SEQ ID NO: 8998 - DNA, 544 bp, Homo Sapiens
atctaaataagacatttaataaactcatatttgtatataaccctccacaaaccaaagaatgcatgtgtatattgtgtacatataacattcacataaactgaccaaataatgattttaaaagaagtctcaaattctaaagaattgaaagcatacagaccatgttctgagaccataatgtaatgaaatatatgaataaataaataaaaaaaccgtgctctttgatagtatggcttaacattgtaaagatatccatcctcctcaaatgttttttataattccaatcccaatcaaaatcccaaccagaattttttaggggttaatgaatttattctaaaacatatgaaaaatgggttcacaaatggtgaaatcatttttcagaaagaaggacaaagaagtgagactggtcccatcaaatattaagttacactataaagccatggaaatttttttaatcatggtattggctcaagagtagaccaacagaccaacagaaccaaaaagagctcagagactcatgaatataagggaattacgaagaaacagg

SEQ ID NO: 8999 - DNA, 628 bp, Homo Sapiens
tttcactttctgcattatccccacattttattcattcatccaaattacttcttcagtgcctcaggagtattcttctacaccagctgctgttaaaatgtacaatgaactctagtcccagaggaatacagaagtgctcttattaccagttttcccacttgtggccgcctttgcaaagatccatattctaatttaagtccccaacctctgaatttggttttaagtttacctagtgactgactactctctttataaaaaagaccttatacttaatgatcatttccaaaggagaccactccttaacttttactgcaaacccaacaagatgagacacttaaacccagacagatgtaacaaaggatttttgttgtctaagtcccaaagtattatatagaaagttcctgcttttatgggtaaacttattaccttaatatgttctgtggtttgctgttaaccaagattctcccatttaaaatgccacagaccgaccctcaaggcagatccgaaagcctagtagttagttgcactgggttgttttgacaagctaccacacgtcttaagtaaatagtaaagcctttatttttgtgttaagaacagcattttgaaaataaaacctatctgcccatgctta

SEQ ID NO: 9000 - DNA, 540 bp, Homo Sapiens
gcagctgcagccccggcggccgaacgcccgcggcgcgggactccatcgtcagagaagtcattcagaattcaaaagaagttctaagtttattgcaagaaaaaaaccctgccttcaagccggttcttgcaattatccaggcaggtgacgacaacttgatgcaggaaatcaaccagaatttggctgaggaggctggtctgaacatcactcacatttgcctccctccagatagcagtgaagccgagattatagatgaaatcttaaagatcaatgaagataccagagtacatggccttgcccttcagatctctgagaacttgtttagcaacaaagtcctcaatgccttgaaaccagaaaaagatgtggatggagtaacagacataaacctggggaagctggtgcgaggggatgcccatgaatgttttgtttcacctgttgccaaagctgtaattgaacttcttgaaaaatcagtaggtgtcaactagatgggaagaagattttggtaatgggggccatggtctttggaactgctcacaagccgtt

SEQ ID NO: 9001 - DNA, 440 bp, Homo Sapiens
tctgaatgataaaggcctaagtgataactctggacaagggatttggattttgggagtagtgcagaggtagaggcatttttgtgatttattgttctattttttcttctagaaaaatgtaagtagtcatatataattttaaaatataaaggagaagaggcaaaatgttgaatggcacctgaggatcctatattcatattggatcagtattaacatccaggttttgattgttgtactatggttacctggtagattccctttgtatataggaaatagacactggaatagtaaggagtagtgggtcaagatgtctgcaacttattgttcagaatcactcacaaatgggaaatctgatataaggacaaaatgggagcactgtggcctatttttacaacttttgtgtacatctgcaattgtttcaaaataaaatgtttaaaagggaa

SEQ ID NO: 9002 - DNA, 875 bp, Homo Sapiens
gacagcagcacagatgaggaactcctatagatttctggcatcctctctctcagttgtggtgtctctccgtgctaattcctgaagatgtctgtgagaaaaattattggaggaaagtgaagtaactcctcattcaagaccctacatggtcctacttagtctctgacagaaaaaccatctgtgctggggctttgattgcaaaagactgggtgttgactgcagctcactgtaacttgaacaaaaggtcccaggtcattcttggggctcactcaataaccagggaagagccaacaaaacagataatgcttgttaagaaagagtttccctatccatgctataacccagccacacgcgaaggtgaccttaaacttttacagctgacggaaaaagcaaaaattaacaaatatgtgactatccttcatctacctaaaaagggggatgatgtgaaaccaggaaccatgtgccaagttgcagggtggggcaggactcacaatagtgcatcttggtccgatactctgagagaagtcaatatcaccatcatagacagaaaagtctgcaatgatcgaaatcactataattttaaccctgtgattggaatgaatatggtttgtgctggaagcctccgaggtggaagagactcgtgcaatggagattctggaagccctttgttgtgcgagggtgttttccgaggggtcacttcctttggccttgaaaataaatgcggagaccctcgtgggcctggtgtctatattcttctctcaaagaaacacctcaactggataattatgactatcaagggagcagtttaaataaccgtttcctttcatttactgtggcttcttaatcttttcacaaataaaatcaatttgcatgactgt

SEQ ID NO: 9003 - DNA, 856 bp, Homo Sapiens
gtggaacaacggggggaagcgcccccgagcgccaggaacattccctggagccaaagggtcaatgtgttccccaagcagaagggcagggtgcagcggaggcgtgtggggctagatgtgtgacgggggcccccatgcgggcacacagtccgcaatccgtgaacatggagggtaccaagattggtaactgtgactagtggctgcccctccccctctctgaagaagaatgtggcgatgggttatgtgccctgcgagtacagtcgtccagggacaatgctgctggtagagcttccttcaggaccctgcttctgagtgacggaccagctcacacaatgtcttgtttcagtccatgatcccactgacctactcttgcctgctggagggtaatgagaagctttggttctgccatctctcccactctgccaggtgctggctgtggagcaaaggctcacctttgtggagaggataaaacctgcccaacctacctcaccatggtttttcacattgcaaagggtaataacatgggcagtgcggacttaggctaccccctccagtttgctttccgtaaatgcaaattgtccttactgcaagtcaggaatgattgctgactcacagtagggctgctatgcctgtgtgtaaacttggggatggctgagggaacatagactcactcttccacattcccaagttggtctagtgtgctgcccagtagcaaaccatggcagactcaccacctattctgagttccagggctgctgtagggcagggtgggcttcctcccagacttgccttaccctgggctgatctttgcacctggtatgcattaatggactccacttaacctgagaaatacttctac

SEQ ID NO: 9004 - DNA, 426 bp, Homo Sapiens
  misc_feature (360)..(360): n is a, c, g, or t
ctggaatgaggaagcgttgttgacgaccatggacatcatccacgatggatttggattcatgctggcttttggagacttggtgtgggttccctttatttacagcttccaagccttttatttagtcagtcatccaaatgaagtgtcttggccaatggcttctctaattattgttctgaaactttgtggttatgtaatcttccgaggtgcaaattctcagaaaaatgcattccggaaaaatcccagtgatccaaagcttgcacatttaaaaaccattcatacttcaacgggaaaaaatcttctagtttctggatggtggggctttgttcgccaccccaattacttgggtgatctcatcatggncttggcgtggtccctcccatgtggttttaaccacattctgccttatttctacataatttatttcac

SEQ ID NO: 9005 - DNA, 869 bp, Homo Sapiens
  misc_feature (16)..(16): n is a, c, g, or t
  misc_feature (22)..(22): n is a, c, g, or t
  misc_feature (45)..(45): n is a, c, g, or t
  misc_feature (64)..(64): n is a, c, g, or t
  misc_feature (327)..(338): n is a, c, g, or t
attggagtcagagctnttgttngcaaatacttgtccatatttgcntccatttcttacatttacnaacttgcgtacactgggattatacaaatattttcccaagagtgaaaagaagataaagacaacagtactaacaggctgcacttctattgtcgggaattcctgccgaagtgataaatcgatcaatggatacctatagcaaaatgggcgaagtcttcacagatctctgtgtctactttttcactttaatcttgtgtcatgaactgcttgattattggggctctgaagtaccatgaagcctgtagaactgagaaggagaagcttacnnnnnnnnnnnnatcctcttctatattgcagtgtctctaaaggaggcaaattggtttacaccttcatgtaattcttttactttaggggttgtaaagctactttattagatatagaatggcagattctctgatttaaaagggctgagtttgtattattactgatatgaagaatagagtaccaatgtcattaattgatttttcttgttaatcagaattcctattctgtacctttcctctaacttctcagatttgtaattcttcttttgggagctgagctagtgcttttaggagaacagataaatgtggtctcagccagccctagagactgcttcttgtgtttgtgtcattctgtcctgagaaatgaagtcatctgaaaaataaaatgaaagaaactgaattgtctaatgttaactctgcacattgtaacttttcttgttgagttagtatcttaatttttactccagcacaagtatttaatcaaagaaaagattcatacatgtgaaattggaaggtatttataaaatttttattgctgtataccaa

SEQ ID NO: 9006 - DNA, 432 bp, Homo Sapiens
  misc_feature (27)..(27): n is a, c, g, or t
  misc_feature (58)..(58): n is a, c, g, or t
  misc_feature (66)..(66): n is a, c, g, or t
  misc_feature (88)..(88): n is a, c, g, or t
  misc_feature (112)..(112): n is a, c, g, or t
  misc_feature (140)..(140): n is a, c, g, or t
  misc_feature (196)..(232): n is a, c, g, or t
aaagtttgctgaccctgcattaagggnactccatcccctaccctttcttgaacgcacnagcggtgncaaaggttagtcgactttgggnttaagctcctaaatggacactagnagtgtcaaaggattactgttacttaaangccactagtagtgtcaaagggttagcttgaacttttgagctaagctcctaagggcnnnnnnnnnnnnnnnnnnnnnnnnnnnnnnnnnnnnntcgatattaagaaggcaaaatgtaggttctctattagttgaacagaacaatcaaggaaccctgtgtctggccaaatttcgtcttagagcattctagacaaggagccccaagtggtctttggcagcaaatgagcaggcagaaaagtggaattcagttccagtatttagcccagtctctgctgcttaaaaggccttttgaga

SEQ ID NO: 9007 - DNA, 918 bp, Homo Sapiens
  misc_feature (21)..(21): n is a, c, g, or t
accaagctgggtggagacctnggcgggagtgaacgttatccaagttgccacctacggtaattgctgcctggccgtgtccgccgacggaggacatttttggttggggaaactcggagtacctgcagctggcctctgtcactgactccacacaggtgaatgtgccccgctgcttacacttctcaggagtggggaaggtgcgacaggctgcatgcggtggcacgggctgtgaagtgttaaacggagaaggacatgtttttgtctggggctatggaattcttgggaaaaggtccaaacctaagtggaaagtgccgtccctgaaatgattccacccactctctttggcttgacggagttcaacccagaaatccaggtttcccgcatccgatgtggactcagccactttgctgcactgaccaacaaaggagagctgtttgtatggggcaagaacatccgagggtgcctgggaatcggtcgcctggaggaccagtatttcccatggagggtgacgatgcctggggagcctgtggacgtggcatgtggcgtggaccacatggtgaccctggccaagtcattcatctaaacctccctcacctgcttgggcggccccgtcccgggaaccactggcactccttggcagaggccagcgcgtggccagccccccggggttcttggatggtggtggcggaggaccctgcgtgcagtgtgacgctctgtcctgaatcccttagcgggtacctaccaggaggatcagggcaaggtccctctccagctgcaggtgaggcctgcggaaactcagctttggatggcaacctttggtgggccgctgtggcccgcaacgtctctgttctctccaagtaacatgcgacggtgtctgggtgtcacgtctcgcctgaaaaacccgtcttaagaaagcttaac

SEQ ID NO: 9008 - DNA, 600 bp, Homo Sapiens
tcagtttgaatgattgtggtttaaaccaggataggagcaaaaaacacttctttgaattggataaataatctatgcattcagtcataaattaaatatgattaactccctttcttggtatgtcctgtatattgatctatccagcatccaaaacctgttatctacccttacatagtggtacgtttgaggcattccatttacctacagtttccattgagccaatgtatgggtttcagtaggttccttaatgatgtaacattgtcaatttttaatgatgttatgttgttatgtatagaagtccagtctccatcatctgaatcaaaccaaaggatttaattacagagtgaatctgggaccttacctaagttagatctagtacccattaaggctttctatgcatacagataagtcaccagtaataaaacttagagtaaccagaagctatcccgtggcttccagtgcttcttcccaatgccaaaccagctggccatgagtattagtcagatgacttatgttaaacctttttgtaaagtcattttcctgaatgggtcaacaaatcatatataggagctggttctagcattaattgcaattcttcccaag

SEQ ID NO: 9009 - DNA, 424 bp, Homo Sapiens
  misc_feature (214)..(214): n is a, c, g, or t
ttaacagaacagaacaacccaaaatgtcaaggcaattatgaagagaactttgagggttaatctttaaaactacaaatcaaaggttttggttaatagataactggcaagaagtaagtacttttctgctgagtgttcatacaaaagcaaaattccaaaacaaaatccgactaaaatagaaaaaggtctaagcgctcacgagaagggatgcgagaanatacaatgctcaaatgtttctgtgttattaaaatacagagccattttacgcctccaagctatgttaaatgctctggaaaacgggagaaattatcgtgaacaacagtatccaatgtgtggggcgctgtgcatgcaatgtgtggacagaaactcgggatgtcagagtagcaacacatcttcaggcgtgctggagcttagatctgactctgga

SEQ ID NO: 9010 - DNA, 958 bp, Homo Sapiens
  misc_feature (85)..(122): n is a, c, g, or t
  misc_feature (150)..(174): n is a, c, g, or t
  misc_feature (181)..(427): n is a, c, g, or t
gcaaactggaatatgacagtggtaaaaaagcggctggtacggtcggaatcccgggatatgtcgaccacgcgtcgcctcatgaggnnnnnnnnnnnnnnnnnnnnnnnnnnnnnnnnnnnnnntgagacactgcacccaaaccccaccacnnnnnnnnnnnnnnnnnnnnnnnnngagacannnnnnnnnnnnnnnnnnnnnnnnnnnnnnnnnnnnnnnnnnnnnnnnnnnnnnnnnnnnnnnnnnnnnnnnnnnnnnnnnnnnnnnnnnnnnnnnnnnnnnnnnnnnnnnnnnnnnnnnnnnnnnnnnnnnnnnnnnnnnnnnnnnnnnnnnnnnnnnnnnnnnnnnnnnnnnnnnnnnnnnnnnnnnnnnnnnnnnnnnnnnnnnnnnnnnnnnnnnnnnnnnnnnnnnnnnnnnnnnnnnnnnnacaggagtgagccactgcgcctggctgatcccagcacttttcaaatgatgccgctcaaagccgtgactgggcctactttgaacagcaaacttgttgctgctgttgtcaacctgaaggcctctcaaatgccagcttcaagcagggtgtgaattgcacagtgtcagatctcaggagtcctgtgttgagagtgtggctttcagctgcggggagctgcacttggtggggaaagccaggcaggtcaccctcacagccagataatgtggaggtcagaacccaaggaagggagtgagacctccatccagtgggggacctggcacccatcttggggacctgagaaagcgttattaaccttgggggtgaatgtgggtgggcagaggaccagtgcctctcagggtaggggagagcactgagatgtttgatattgccttcactttttttccgtgaattttctaaaggcagagtgatggtttttcgggaaacggggttgcggtaaatgacaaatggcactgtattggtggtcaattgatttga

SEQ ID NO: 9011 - DNA, 1123 bp, Homo Sapiens
  misc_feature (30)..(30): n is a, c, g, or t
ggtagcacggtgaaggagatggcccatccntccaaccgaggtacagacactgctgcctgaatcctaacggtgggcatcctggtttttgtagaatccagatgaaaggcgggcaggacaccagctggggccatctggaacataagaatggccagtgtgttaaggcctaaatcctggagttgaggcaaagatgcacttgccctggtccaagacccactctggggcagaatgggaagggcctgctgaatcactgcaggccctcccgccttgatggttctctgctgctgggattctagaggtacacaggaagacagctctcccaatggcttcagggttttgggtataaaatgaggattcaatgaggactccccagtcgcccccataccacgactgcttagctctgcaatgttccttcttttatctgttggataaagaggtttctctcatcttctggagtcctcccattctgagcccggacaatacacgtgggccgatgaaggttgagcatgtatatcaaatgctgcttctcgttcttgagctcctcaatctgagccttcagttcagcattcacactttccagcttctccgactctttctgcaggcactccgtcttctccttcttcttgtttcggcactttgcagctgcaatcttattgtctttgctcgtcgcctctgttttcctttcatcttcttcaggggctacctcggcttttgtgatggacaccccgaggggtctgtcgctgacagtgactgattccagcgcagaggacatccggtggcagaggtgcttgttctggatggcaaacctcagctcttccttgacaaagggcgtcaggttagcaaaaccctcaaacaccagtgacccaggaggggacaggcaggggacgatggcagaagcactcacttccgaggcagagacctggcctgggtgttgaagcatcattttgctccaggctccgctcggggcggccagggtcgggacggggtcgggcgggctgtttgtctggccggcgggcgagcacacgaggactcacggccggcgcgcgggctgaagggtgcgctcgggcggcggcgagagaagagagctgtgcagtgcgcgcctggctgcgatcccgggaattccgga

SEQ ID NO: 9012 - DNA, 256 bp, Homo Sapiens
tgacaacctgcgcccagccagcttctccaagttttaaaggattaaagccctcaaactctcaggcttaaatcaattccctaatgtggggatatgttctccaagtatgcctaccaaagccatacaagaataaagtgagcagcagcagcagctaggggtcaggcagatttctgaagcatgattggttcaaaaggcgggctgtccccatcatcctgagccatcggccttgccaaggggcctgttggagccccagagggaa

SEQ ID NO: 9013 - DNA, 456 bp, Homo Sapiens
  misc_feature (232)..(232): n is a, c, g, or t
  misc_feature (332)..(332): n is a, c, g, or t
  misc_feature (355)..(355): n is a, c, g, or t
  misc_feature (391)..(391): n is a, c, g, or t
  misc_feature (402)..(402): n is a, c, g, or t
  misc_feature (413)..(413): n is a, c, g, or t
  misc_feature (430)..(430): n is a, c, g, or t
  misc_feature (443)..(443): n is a, c, g, or t
ggttgattggtcatcttaccaaagaatatgggaacatactatattcagagcctactgaaagacaatgccatttttacagtagaagtcactggggaaaaacaatttgcttaataaacattcactttactgcaaactttaagggaatgcatccattacacaactgggaacaagagccacatgttcacatacacatatctatcctatgttactcgtgtgtgtgacggaggcaaanaaaaaaagcagtgtttttactgaaataaaaatgtacctgttttgttgcagagccttgaaaaagaaaagcttaatccactctgcattttcacaagcaacanattttgtgtccctggtgtatccncctgataatctatttttaaagggaacattttcaggncacccggaaanaataagagggnagaaatattccccttangaatggaatccgnaccttggctaaat

SEQ ID NO: 9014 - DNA, 715 bp, Homo Sapiens
  misc_feature (17)..(17): n is a, c, g, or t
  misc_feature (34)..(34): n is a, c, g, or t
  misc_feature (45)..(45): n is a, c, g, or t
  misc_feature (103)..(103): n is a, c, g, or t
  misc_feature (122)..(122): n is a, c, g, or t
  misc_feature (134)..(134): n is a, c, g, or t
  misc_feature (148)..(148): n is a, c, g, or t
  misc_feature (606)..(645): n is a, c, g, or t
gaccctctgaacgagtnctgcccaaccctgttcntgctcatctcntccatctgggggtctcgcaccgctggcccccacacccagttcgtgcagtggttcatgnaggagtgtgtggactgctnggagcagggtgnccgtggcagcgtcntgcagttcatgcccttcaccaccgtgtcggaactggtgaaggtgtcagccatgtctagccccaaggtggttctggccatcacggacctcagcctgcccctgggccgccaggtggctgctaaagccattgctgcactctgaggggcttggcatggccgcagtgggggctggggactggcgcagccccaggcgcctccaagggaagcagtgaggaaagatgaggcatcgtgcctcacatccgctccacatggtgcaagagcctctagcggcttccagttccccgctcctgactcctgacctccaggatgtctcccggtttcttctttcaaaatttcctctccatctgctggcacctgaggagagtgagcagcctggaccacaagcccagtggtcacccctgtgtgcgcccgccccagcccaggagtagtcttacctctgaggaactttctagatgcaaannnnnnnnnnnnnnnnnnnnnnnnnnnnnnnnnnnnnnnnattttgtaatatgtgagggaaatctaccttcgttcatgtataaataaagctcctaatggcaacaaaaaaa

SEQ ID NO: 9015 - DNA, 612 bp, Homo Sapiens
  misc_feature (68)..(68): n is a, c, g, or t
ttatcattgattatagaagacagggataatacctttatctctggccactcaaaaatgcagtgccaggngtgctaaacctagaggccaatactgatgacctggaaggtgatccatatgattgtcaccacaaagtgcttttacacaaaaacttgaaaatttgaaaaacatgatttttttaagtttctcatctcaccagttcttggtatttatattgcaaatctatcaaagtaagaaataatttgtgctgtatacaaattacatggggaacataaaggagtgagatccttctgtgataaaatgaattcaccactctggttacccaactacagaacctcctttgatcaggccagtaggttgtgatgcaggctggagcccccgaatgccccacacacactgcagcattgaccagaccatccgaaacctgcgtccctggtgatgttctcaagcctcggaagtggcaaatggaaatgatatggccggttgcggttgtaggagagttgtgacttaggcaggagtcgacctcctcaagtaatggaacgatttcaaaggcaggctgccctgaccaaaaatatctgccatgaataaaggtgcctgaaatcctgctatgaaaaa

SEQ ID NO: 9016 - DNA, 499 bp, Homo Sapiens
ccggtgccatcgggggcctgctggagcaatttgcccgtggtgttggactccggagcatcagcagcaatgccttgtgaagaagccagcccatgacattttcctgctcctctctcagctgagcccttagcagagaatcaaagccatgcctggccgaaggggtacttccaggtcaggggaaatttcagtcccccatctccatcatgaacatggcagccccaaagctgagcaaggccaaagacagggttttccaacccccagcctcttgactggtgaccaccaccccttcttgtcactgtctcccacccaccccatctttgctgggattcccatcaactctcagaactgtgtggggtttccctggggccttgtggaagccatgacttcacaaagaccctacctgtcagttcttgtttctggggaggagggatcacctgcactgagaatgaggcagtttgacacagatcacaaaataaaatcaaagttttaataaatagccaaa

SEQ ID NO: 9017 - DNA, 1619 bp, Homo Sapiens
  misc_feature (26)..(26): n is a, c, g, or t
  misc_feature (30)..(30): n is a, c, g, or t
  misc_feature (32)..(32): n is a, c, g, or t
  misc_feature (892)..(892): n is a, c, g, or t
  misc_feature (894)..(894): n is a, c, g, or t
  misc_feature (1010)..(1010): n is a, c, g, or t
  misc_feature (1169)..(1169): n is a, c, g, or t
  misc_feature (1195)..(1195): n is a, c, g, or t
  misc_feature (1365)..(1365): n is a, c, g, or t
  misc_feature (1368)..(1368): n is a, c, g, or t
tgagcttgggtgcgagtgcacgcgtngtangntacggagagtatatatagatctctatctcttagcaaaggtgaatgccagatgtaaatggcgcctctgggcaaaggaggcttgtattttgcacattttataaaaacttgagagaatgagatttctgcttgtatatttctaaaaagaggaaggagcccaaaccatcctctccttaccactcccatccctgtgagccctaccttaccccttctgcccctagcccaaggagtgtgaaatttatagatctaactttcataggcaaaacaaaagcttcgagctgttgcgtgtgtgagtctgttgtgtggatgtgcgtgtgtggtccccagccccagactggattggaaaagtgcatggtgggggcctcggggctgtccccacgctgtccctttgccacaagtctgtggggcaagaggctgcaatattccgtcctgggtgtctgggctgctaacctggcctgctcaggcttcccaccctgtgcggggcacacccccaggaagggaccctggacacggctcccacgtccaggcttaaggtggatgcacttcccgcacctccagtcttctgtgtagcagctttaacccacgtttgtctgtcacgtccagtcccgagacggctgagtgaccccaagaaaggcttccccgacacccagacagaggctgcagggctggggctgggtgagggtggcgggcctgcggggacattctactgtgctaaaaagccactgcagacatagcaataaaaacatgtcattcttccaaacccgcgcgccccgcacctctgatgattaataaagcgcttggtcggcccggcgctccgggccactgtagaaggtgtttattaagacgtgcttccgttttggagngncacgggtccctaactcaaggttaaatttcccacctttggtgccccataccgctgggatttccccctagagagagacaacctctctggggcccccattacacactaatcgcgcggcntttgacggaatagtgctctcgtccgctgtagtgaccagcactgtacctccgtcccctcggcctggtgcggagacctaaaaaacccgtcacacgcctctcatgtacgctcgctgcgaagaaaacagtaagaagggttccccccacggaaaaggtgttggnaatctggctctcccccccactaatanggttccaaattatacacgtgccgtggaagatcattcccagttactgccccgccgcctcgggggagacaggctctatccgccacctccacaacggactcttcatacaccttcatgcacacaatgtctgtatggggggcacgcccttcgccgctcttcccgtcgcccggtcnttnttacatcccacaagatagaagtccactgccggtctagctgaaaagagggtaaaggcgcggctcgagagagtgatgctcttggacggcggctcatgtcgggtggtgcctctcatcatttcccccccacctcgatcctcccctcatcttgacttcaacagcctctgcgcactgctcccccccgacagcgcggacagtcagcaagacaacgttagcgggcacaacacctgggcgtacataacacaagccgtccg

SEQ ID NO: 9018 - DNA, 1035 bp, Homo Sapiens
gggtccggaattcccgggattgtggatcctgccctccctgtggcttctcctgcttggggggcctgcctgcctgaagacccaggaacaccccagctgcccaggacccagggaactggaagccagcaaagttgtcctcctgcccagttgtcccggagctccaggaagtcctggggagaagggagccccaggtcctcaagggccacctggaccaccaggcaagatgggccccaagggtgagccaggagatccagtgaacctgctccggtgccaggaaggccccagaaactgccgggagctgttgagccagggcgccaccttgagcggctggtaccatctgtgcctacctgagggcagggccctccaagtcttttgtgacatggacaccgagggggggcggctggctggtgtttcagaggcgcaaggatggttctgtggatttcttccgctcttggtcctcctacagagcaggttttgggaaccaagagtctgaattctggctgggaaatgagaatttgcaccagcttactctccagggtaactgggagctgcgggtagagctggaagactttaatggtaaccgtactttcgcccactatgcgaccttccgcctcctcggtgaggtagaccactaccagctggcactgggcaagttctcagagggcactgcaggggattccctgagcctccacagtgggaggccctttaccacctatgacgctgaccacgattcaagcaacagcaactgtgcagtgattgtccacggtgcctggtggtatgcatcctgttaccgatcaaatctcaatggtcgctatgcagtgtctgaggctgccgcccacaaatatggcattgactgggcctcaggccgtggtgtgggccacccctaccgcagggttcggatgatgcttcgatagggcactctggcagccagtgcccttatctctcctgtacagcttccggatcgtcagccaccttgcctttgccaaccacctctgcttgcctgtccacatttaaaaataaaatcattttagccctttc

SEQ ID NO: 9019 - DNA, 954 bp, Homo Sapiens
tggctagcccaggaagggccggatcagcacaggattatgggggccctgtgcttttgggcactgctcgggaaaatgtataatggtgaacaagctaccaaagggtccggagagagatggcaaaaataatgtggcattcatgaactactttttacaaggcaaaggttgatgcctgcctaagagctcttaattagaactgaacggctgcccagaagctgccttcttggcccgaacttacttaacccagtcaggtttcaagggtagtgaaactctggagagagaatctctcaaaagtcaatcagaaagcagcagaatcccttgctgacccaacagagtatgaaaacctgttccctggattaaaagaagcctttgttgttgaagaatgggtgaaggaaacacatgctgatctgtggccagccaaacaatacccacttgtcacgccaaatgaagagagaaatgtcatggaagagggaaaagactttcagccctcaagatctacagctcaacaggaacttgatgggaaacctgcttctcctactccggttattgtggcctcccacacagccaacaaagaagaaaagagtttactcgaactagaagtagatttggataatttggaattagaagatattgacacaacagatatcaatctggatgaagatattttggatgattgactgtaatgctttccatttacctgactaaacagatcattattatatataggtattgattgctaccctgaccacagtgctttggactatgagaaacttcttagatttttatatgtaaatgctgtggaccactgggagcacaatgcccacatcatcttaagaagagtttatgtgcagcatttaaatcactgtgttttccttgttaactaaaacagacatgggctttgatttttttcatactattagaccatatctcataaaaccttttgaattaatgcaaaaa

SEQ ID NO: 9020 - DNA, 1264 bp, Homo Sapiens
  misc_feature (109)..(109): n is a, c, g, or t
  misc_feature (465)..(497): n is a, c, g, or t
  misc_feature (500)..(509): n is a, c, g, or t
tctactgttcgttccttgatactacaatgatcgtatgattgctgtttttcaattctctgttgtgtgagtgagtttctgtttattatgttattaacatttcagtgtgtgntaccagggaaaggaaggttaaagttaacttttttaaagtttttgtttccaaaccgtaggatggaggcccacgtcagtgggaccagcactttccccagctgtggggcaaagaggcgatttatggctcaaagacaacctgtaaataaccctccctcagtcctaaaatgcagtgtctaaatttacagaaaaacccacaggttcctggcaggcaggcacagcagctggcagtcccggtgctggcagacgcaggacccactgcacacgatgctttagtggggctgccctccatcaaactctccgctcccccctcctcccaagtgccccaaggccccagttccaagcaaccagaccagtgcnnnnnnnnnnnnnnnnnnnnnnnnnnnnnnnnnttnnnnnnnnnnccaacccagcaaaatcttataaaaacgaaccaggtagcccaaaaatgcccacctgtctctctatgtacagtaatacaatatttgtcagtcactatatacaatattataaaaaatgccgcagacagtacaaattaaggcccttatttctcacaaggcatcacaagcctcgatcctctagtgtagacccggtgggagagaagatgccacttaaattattgcaccattttgaaaaacaaaactcgtcaaggaggatcgtggtcttttcccaccgggccttcagtcacagacgggggctggggtggtggcgtcgtcgtcgtcgtcatcgagggagaccctctgtagccacgctgtgcccggcccggttctctgggtccaataaataccagtcacagtttgggagggggccgcccccggcgcgtgggacccgccacggccgcgcgcaggtgggcgggggcgtcccggctacatgtgccgtttcatgtgcagcgccaggtgatcggagcgcgagaaggcacgatcgcacagatggcactggaatggccggtggcccgtgtgctttcggtagtggcgcgtgagctcgtctgagcgcgcaaacttccagccgcagccgtcccagttgcagtggtagggcttctcacctgtgtgcgagcgcagatgcgccttcagatgcgaactcttggtgtaggtcttgccgcagcccgcgtagctgcaggtgtgagtggcggtgcgtttgcggggccaagagcggcggccgc

SEQ ID NO: 9021 - DNA, 569 bp, Homo Sapiens
  misc_feature (64)..(64): n is a, c, g, or t
  misc_feature (98)..(98): n is a, c, g, or t
  misc_feature (142)..(142): n is a, c, g, or t
aagcccttttcaaatagactcttagtattttggtcttaattcgcaatgcattgattcagccccnagaattattgcccagaaatagaacttcttccccntggtgttgggaagcccaggaggggtggaaaagctcaggaacccntgagctggttcatctgttggcatattggggtaggttaatttccctggagcctgagagtctttggcccagatttcagctgcgtctgcctggctcttttgctgcagctgtgagattggggtctggttccagcagtctgtcactggtcagcctgagtatcacaccctgagctctggggctgggagtttcttcccacaccctctcccttgtgccttaagttgcgatggctctgagtatacaattaatcggaggtgaggggtgggtgtcacagctaatcccaaattcaaaaattagtccaaggtgctgcaaaatataaatttgatgtcagtagaaagtcgtatcctaaaatgtaaaaactgtaagtgtacagtagttaatgagctcagaacatctgataactgcaatttaaaatgggcaaaaagttaaaaaa

SEQ ID NO: 9022 - DNA, 401 bp, Homo Sapiens
  misc_feature (390)..(390): n is a, c, g, or t
gccgaaaacgagctgtgtttcctgatgacatgcccaccctgagtgccttaccatgggaagaacgagaaaagattttgtcttccatggggaatgattacaagtcatcaattgctggctcagaagatgctgaaccgcttgctccacccatcaaaccaattaaacctgtcactagaaacaaggcaccccaggaacctccagtaaagaaaggacgtcgatcgaggcggtgtgggcagtgtcccggctgccaggtgcctgaggactgtggtgtttgtactaattgcttagataagcccaagtttggtggtcgcaatataaagaagcagtgctgcaagatgagaaaatgtcagaatctacaatggatgccttccaaagcctacctgcagaagcaantaaagctgtga

SEQ ID NO: 9023 - DNA, 816 bp, Homo Sapiens
gggagaggtagacaggacctgtgaaaagcagtggttagtttagggaaaatacctaggagccctgtgatttggagagtgaaaactctttattaccgttgttactttaactctttccaggatggcctgcctccttcgctcatttcagagaatttctgcaggggttttcttcttagcactttggggcatggttgtaggtgacaagctgctggtggtccctcaggacggaagccactggcttagtatgaaggatatagttgaggttctcagtgaccggggtcatgagattgtagtggtggtgcctgaagttaatttgcttttgaaagaatccaaatactacacaagaaaaatctatccagtgccgtatgaccaagaagagctgaagaaccgttaccaatcatttggaaacaatcactttgctgagcgatcattcctaactgctcctcagacagagtacaggaataacatgattgttattggcctgtacttcatcaactgccagagcctcctgcaggacagggacaccctgaacttctttaaggagagcaagtttgatgctcttttcacagacccagccttaccctgtggggtgatcctggctgagtatttgggcctaccatctgtgtacctcttcaggggttttccgtgttccctggagcatacattcagcagaagcccagaccctgtgtcctacattcccaggtgctacacaaagtttttcagaccacatgactttttcccaacgagtggcaaacttccttgttaatcttgttggagccctatctatttattgtctggtttcaaagtattgaaggaacc

SEQ ID NO: 9024 - DNA, 706 bp, Homo Sapiens
  misc_feature (149)..(149): n is a, c, g, or t
  misc_feature (416)..(463): n is a, c, g, or t
  misc_feature (672)..(672): n is a, c, g, or t
  misc_feature (689)..(689): n is a, c, g, or t
gtggcagaacgcttcagtgagctggagcatctggacaggctctcggggaggagctgctcggaggagaagattcctgaagacggctccctaaacactaccaaatagctcttctggggcaggctgggccatgtccaaagaggctgcccctntcaccaaagaacagaggcagcaggaagctgcccctgaactgatgcttcctggaaaaccaagggggtcactcccctccctgtaagctgtggggataagcagaaacaacagcagcagggagtgggtgacatagagcattctatgcctttgacattgtcataggataagctgtgttagcacttcctcaggaaatgagattgatttttacaatagccaataacatttgcactttattaatgcctgtatataaatatgaatagctatgtttnnnnnnnnnnnnnnnnnnnnnnnnnnnnnnnnnnnnnnnnnnnnnnnngccataccttgaaaagagacaaggaaaaacatcaaatattcccaggaaattggttttattggagaactccagaaccaagcagagaaggaagggacccatgacagcattagcatttgacaatcacacatgcagtggttctctgactgtaaaaccagtgaacctttgcatgaggaaagaggctccatgtctcaccagccagctatggcccncattgcccttgcttttngcaaaataatccatccc

SEQ ID NO: 9025 - DNA, 355 bp, Homo Sapiens
ggtggaggagcagcatgaggtcaatgaacagctccaggcccggatcaagtctctggagaaggactcctggcgcaaagcttcccgctcagctgctgagtcagctctcaaaaacgaagggctgagctcagatgaggaattcgacagtgtctacgatccctcgtccattgcatcactgcttacggagagcaacctacagaccagctcctgttagctcgtggtcctcaaggactcagaaaccaggctagaggcctatcccagcaaatgctgctctgctctgcccaccctgggttctgcatacctatgggtgacccaattattcagaccaaaaacagagaggggtaagagtgatggtgat

SEQ ID NO: 9026 - DNA, 427 bp, Homo Sapiens
  misc_feature (231)..(231): n is a, c, g, or t
  misc_feature (295)..(295): n is a, c, g, or t
  misc_feature (300)..(300): n is a, c, g, or t
  misc_feature (357)..(357): n is a, c, g, or t
  misc_feature (380)..(380): n is a, c, g, or t
ttttctctggataagttccatttattaatcattgtacaaaaaaatcttggcattcatttgaagagaaaagaagttgctatatccaaatatttaacattttaacattgtgaaagttcaacgtttataacagggctttttaaaatggagaaaagttttggaaaatttttaaaaagaaacttatgatttattagagtacaggatccaaaacacgtttttagaaaaatataaagngcccaaataccaacttacacaggtgatacaggcttcctggagccccatgaagcattcatgaagnaaggnctttaaaaacaggctagatacatatggacagctgggtcagtaaagggtaaaaccatncttcctggacttggaggggtccnaggaaaaagggaaatccatctaaccggaaaaccaacaattgcaactc

SEQ ID NO: 9027 - DNA, 111 bp, Homo Sapiens
gggcagtctatgggtcttttggacaagaagagtttgaagatctctgggataaagtgagtattcttatcagtttggtgtcttagtgtgttcaggctgcttaacacaatacca

SEQ ID NO: 9028 - DNA, 718 bp, Homo Sapiens
  misc_feature (205)..(258): n is a, c, g, or t
  misc_feature (608)..(608): n is a, c, g, or t
  misc_feature (708)..(708): n is a, c, g, or t
gtcttaataattctccatcttaaaaagtaaaaacacacatatacaattttaaaatcaaataaaattaagagatgagactagatcagcagtcaccaaatgccacataccatggtaagtgaccttaagacagtataaaagaacactgatttctgggtctcaatccatacatactgaattagactcaaaggggatgaggaggagcccnnnnnnnnnnnnnnnnnnnnnnnnnnnnnnnnnnnnnnnnnnnnnnnnnnnnnngactcaacaaatctttaagacccctaaggccttttctggcattaagatttgggaattgattccccaggtgctctgcagccaggctgggcagatctgggcaagttcccagatgaaggagaagcctctgacaaagctccccagggccataggattatctgccgagcttgcagaggagacagaagcacagctggccctgtctcagcctaggaaatggagtaactttccccaaggtctaagacacagaagcatgagtcacaggagactgaaactgttagaggaccgggggctgggataaatcattctttgtggtctcctgactacatcaacagctagctgccttagactaaagnaccccacaagagtcctttcctgtaaaccctttaacatcaaacagtcttcctgacttcaaatgccaggaagacgtaatcaccctggctgattttcataagnaaagcctgta

SEQ ID NO: 9029 - DNA, 747 bp, Homo Sapiens
  misc_feature (46)..(46): n is a, c, g, or t
  misc_feature (48)..(48): n is a, c, g, or t
  misc_feature (56)..(119): n is a, c, g, or t
  misc_feature (643)..(643): n is a, c, g, or t
ttgactttagagattcagtactcaattatttggctccagcatggananaatttgannnnnnnnnnnnnnnnnnnnnnnnnnnnnnnnnnnnnnnnnnnnnnnnnnnnnnnnnnnnnnnnacatttgcatattagtgcttgtgtgtgcttgtatatatatttgtagaatctgtacagatatcatatcattaattgctaatgacgcaagatattgtaatttaaggtgatttctagaattgaggtacaaaatgtactttacaagatgaagccttgttccttttctctaatggccaaatttgatttgtcttcacagtggcttgctctggcatcagatttctgcagatctgctttaaagctgtacatttttgttacagtctaagatgtgttcttaaatcaccattcccttcctggtcccttcaccccccaggggggtctcacactgtaattagagctattgaggagtctttacagcaaattaagattcagatgcccttgcctaagtctagagttctagagttatgtttcagaaagtctaagaaacccaccccttgagaggtcagtaaagaggacttaatatttcaatatcctacaaaatgaccacaggattggatacagaacgagagttatccctggataactcagangctgagtactgctccagggtggttgtgcaatcttatattgatgcttgtgaatctgccatttgattttgtaggataaataaattatgtttaatattaacaacttc

SEQ ID NO: 9030 - DNA, 537 bp, Homo Sapiens
gcttggtttaccgatggatgggctagagatcttgtcgtttcttggaagtcacagggaagattgaagagaacgcttgagcatccttggcaacagcccaggtgggacctggatgaagctttgcactcaagtattgtcaagggaagcttccctgtgaaccaaagttctcaggccaaggtctcgcccaccaaagccagaaagtgcaagcacccgtctacccagctctaacttgtatgtgtgagacagaccaggcttcgggggtaggaggatctgcagttgttcagccgtctttctgctggtgttgtctttctgccatcagagaagggacacacagcccgttcgaaggtgtgcagagggctctgagcgccaggatggccagggctgtttttgctactgaaggagcatgtgtcctgaactcccacttgcagggacagtccccaccctctctatagccggcactgggagcagccgccagcagggaaatctggcctgagcacaaggatgctatagggagagatcacttcagtgtgtttgatacag

SEQ ID NO: 9031 - DNA, 468 bp, Homo Sapiens
  misc_feature (35)..(35): n is a, c, g, or t
cagggaggggactggggaagtgcgcacacagcccncacagacaacacgcacccacacagacacagagggaaggggttgggatggggacagggtgcacagccagggcggggtaggaccccagcccctcccaaaacagcctctcctactcccatagacccctttcttctccccttccccacggtaggaacatagcgtgtttatattttatggccaaactattttgaattttgttgtccggccctcagtgccctgccctctcccttaccaggaccacagctctgttccttcggcctctggtcctctctggtcccctcctgggtttcttacgtagttgatttttcctctttagtctcccccgacctgcgcccagccccgtggcccctgcccctctcctactctctgtggcagtttcatatttgctaagacgaatttgctcattaaacattttgttgtattttactttaaaac

SEQ ID NO: 9032 - DNA, 1759 bp, Homo Sapiens
  misc_feature (157)..(182): n is a, c, g, or t
  misc_feature (350)..(350): n is a, c, g, or t
  misc_feature (515)..(515): n is a, c, g, or t
  misc_feature (541)..(541): n is a, c, g, or t
  misc_feature (585)..(585): n is a, c, g, or t
gctggtaccggtccggaattcccgggatccccagccgaaacggctgctggggcaagaaacttcttgttagaactttccacctccggcttccccctccacctcttttaccgtcccaaccttaggagacgctttttctcccccagaggagaatttatcnnnnnnnnnnnnnnnnnnnnnnnnnnctcacccggtgctttgcatttgggaagaggtgatttcaagagtggccaggtgggacgcctctctcctccttattcggtttactatttattgttcggggtgttttttaattcctgtattgctcggcccggggagtttcgccccctgcccggctccgcggcgcggaggantggtgtggaaacggctgggcgcgctggtgatgttccctctacagatgatctatctggtggtgaaagcagccgtcggactggtgctgcccgccaagctgcgggacctgtcgcgggagaacgtcctcatcaccggcggctgggagaaggcatcgggccgtcagctcngcccgcgaagttcgcgaagcgcggcngccaagaaaagaattgttcctctgggggccggactgagaaatgncctgaaggagacgacggaggagatccggcagatgggcacttgagtgaaattacttcatctgtgatgtgggcaaccgggaggaggtgtaccagacggccaaggccgtccgggagaaggtgggtgacatcaccatcctggtgaacaatgccgccgtggtccatgggaagagcctaatggacagtgatgatgatgccctcctcaagtcccaacacatcaacaccctgggccagttctggaccaccaaggccttcctgccacgtatgctggagctgcagaatggccacatcgtgtgcctcaactccgtgctggcactgtctgccatcccaagcgccatcgactactgcacatccaaagcgtcagccttcgccttcatggagagcctgaccctggggctgctggactgtccgggagtcagcgccaccacagtgctgcccttccacaccagcacccagattgttccagggcatgagagtcaggtttcccaacctctttcccccactgaagccggagacggtggcccggaggacagtggaagctgtgcagctcaaccaggccctcctcctcctcccatggacaatgcatgccctcgttatcttgaaaagcatacttccacaggctgcactcgaggagatccacaaattctcaggaacctacacctgcatgaacactttcaaagggcggacatagagacaggatgaagacatgcttgaggagccacggagtttgggggccacagcacctgggcacacacccgagcacctgtccattggcatgcttctgctgggtgagcaggacagctcctgtccccagcgaagaatccggctgcccctgggccagtcccaggacctttgcacaggactgatgggtataactgacccccacagggaggcaggaaaacagccagaagccaccttgacacttttgaacatttccagttctgtagagtttattgtcaattgcttctcaagtctaaccagcctcagcagtgtgcatagaccatttccaggagggtctgtccccagatgctctgcctcccgttccaaaacccactcatcctcagcttgcacaaactggttgaacggcaggaatgaaaaataaagagagatggcttttgtgatttcctttgttcaaatcttccgtgggcagttgggagggagccagtcccaaccataaa

SEQ ID NO: 9033 - DNA, 910 bp, Homo Sapiens
  misc_feature (115)..(115): n is a, c, g, or t
  misc_feature (203)..(203): n is a, c, g, or t
  misc_feature (252)..(252): n is a, c, g, or t
cccagaaaagccttcccagatgcagctgatacgcccccactggcttacctgcttcttgaagccccatgaccaggatggctctcagcgaatggacacaacatgatggcgctccccntgccctcagaaatcagcagaggagatgtccaggcggttgctatgaggaaccaaaccactggtgctctattgtctactatgagctcacnaatcgtgtgggtgaagcgttccatgcctcctccacaagtgtgttggtgnatggtttcactgatccttccaacaataagaaccgtttctgccttgggctgctctccaatgttaaccggaattccactattgaaaacaccaggcggcatattggaaaaggagttcatctttattatgttggaggggaggtgtatgccgaatgccttagtgacagtagcatctttgtgcaaagtcggaactgcaactaccatcatggatttcatcctactactgtttgcaagatccctagtgggtgtagtctgaaaatttttaacaaccaagaatttgctcagttattggcacagtctgtgaaccatggatttgagacagtctatgagcttacaaaaatgtgtactatacgtatgagctttgtgaagggctggggagcagaataccaccgccaggatgttactagcaccccctgctggattgagatacatctgcacggccccctccagtggctggataaagttcttactcaaatgggttcacctcataatcctatttcatctgtatcttaaatggccccaggcatctgcctctggaaaactattgagccttgcatgtacttgaaggatggatgagtcagacacgattgagaactgacaaaggagccttgataatacttgacctctgtgaccaactgttggattcagaaatttaaacaaaa

SEQ ID NO: 9034 - DNA, 1826 bp, Homo Sapiens
tcccgggatggcagagcgtgagtacaaagtgatcggcctcggccgcacgtagtagcccccctactccccggccaagtcgagggcctccctcttcccgcggagtcgcaaccacgggtagctcgtgtaggtaacggcaggtccaggcctccgcatgagcggagggccccccgcgcgaccttgaatggcccgggcgcgcgcggtcgtgtgggagttgtagtcctccgtccccgtccgcgcggactccgtttcccgtggtgccccgggcggcccgcttccggcgcagttagttacgagtcggcgcacgcggcctcggtccggttgactttgcggagccatggagggcggcttcggctccgatttcgggggctccggcagcgggaagctggacccagggctcataatggagcaggtgaaagtgcagatcgccgtggccaacgcgcaggagctgctgcagaggatgacggacaagtgtttccggaagtgtatagggaaacctgggggctccctggacaactccgagcagaagtgcatcgccatgtgcatggaccgctacatggacgcctggaacaccgtgtctcgcgcctacaactcgcggctgcagcgggaacgagccaacatgtgaccggcgagcgcgggccaccccaccctgttcatttccataaacgtgctttgagaggcggggtccgcatgtacgtactgcctgcccggggcttaggagggtggcaccggtgctgggacacacgggactgtgtcctcgccaccccccgccctgccccctgccagccagtgcagcttggatctcgggggtgtggggccctgtgccttcctgaagtgctggcagcccagtggcacctccttcaggcctttggggtattcccctagtgtgcccaagtcagcctcatattctgggcggacagcttgtctggacttcggagttgggggtggtcagacaccacaggagctgtcacctcctgcggatgggcaaataaattggtggaggacggagagaaacctctttatttccctcctgaggggtctctgggaagaggtgacgcgtgtccctggaaacccagctcggagggtctcagcctcccctgggttgggagaagtccatctttccccttagtgccaccgggctgctgagtcacgaggaatgtgttgctgctgccacccctgccccaaaggctaagggggacagccttccccttgtcagggcttgctttgaccctgcttcgttccaccccgggtcctggtggagcaccaggcaggtggtcctcgctgtgacactgaggtgctgagccagtgagctagggtggaggggctagtgtttattggaacaaagggtggtaccaaaatgcatccccatgacccacagcccccccacacccgtccttgggtagggtacggtggggtggggtgttgggtggcctgctgctcctgttgctttcacgtagagtctcggcctgggcagtcacgtggtggtcacgtcctggatgttgctgtcctatccagcctctcacagctgccacccgggtatagacacctgggaagtgggggccggccacagccatagccccagctagtgacccagttagcaccacgtccagaggctccctgcaggccagggtccccagcgtcacgctgttgggcgagagaagaagggggtcagaggccggtacttccctaagcaggccttgggtcatgggcctctaggagtgacctagtgactcgcttgggaaccgatttcactatctggaaatgcgtcaatgccaaggtgccgaccttatggacacccgcaagtgttcccgaattgaacggtgctccaa

SEQ ID NO: 9035 - DNA, 1204 bp, Homo Sapiens
  misc_feature (646)..(688): n is a, c, g, or t
ggggactccgggctggagctgtcctgggggagcttgtttgcggcagcggctgctgctgccactgctgtgctgggggcccggtcgccaggcaaaaagccctcccacgtttgaggggagtcatgagccgtttcctgaatgtgttaagaagtaggctggttatggtgtccatcatagccatggggaacacgctgcagagcttccgagaccacacttttctctatgaaaagctctacactggcaagccaaaccttgtgaatggcctccaagctcggacctttgggatctggacgctgctctcatcagtgattcgctgcctctgtgccattgacattcacaacaagacgctctatcacatcacactctggaccttcctccttgccctggggcatttcctctctgagttgtttgtctatggaactgcagctcccacgattggcgtcctggcacccctgatggtggcaaagtttctccatcctgggtatgctggtcgggctccggtatctagaagtagaaccagtatccagacagaagaagagaaactgaggccagcattatcacctccaggactttctcgttttccaccttggccatcttcttccttcgtcgtctctcctctttaatttcttttctattccatcatctgccnnnnnnnnnnnnnnnnnnnnnnnnnnnnnnnnnnnnnnnnnnnaagatatgcatactgaaaagtatataacatgtacgtacaatttaaagaataattttaaagtgaatactacgtaactccatccaagtcaagaaattgccagcttctcggaagcccactgtgtctccttcccctacctgcaacctcttccaggctcccttttccagccttcccctttttcccttttattttcatgccttgatttgacttgtgtggtgggaacatgtgaactatgaaacttaaacctgctgcccacccagagcagctgtgaccaagggctgcctcaaggggttgtccacgcaggttgggctcctctctgctgctggacccaagactctgaaccttccaagggacaggcagttcttctaagaagggctcccctgtgtgtgagcaagaccacagctctccttctatctacagatgcatgagggttggaagagtctgggctgtttttagaccttctggtcagctgtatttgtgtaacaacttttgtaataaatagaaaaaccctctgctctg

SEQ ID NO: 9036 - DNA, 452 bp, Homo Sapiens
  misc_feature (65)..(125): n is a, c, g, or t
  misc_feature (205)..(205): n is a, c, g, or t
  misc_feature (264)..(272): n is a, c, g, or t
tgattccttttcccttaaaggaaacaactaatacacattcttatatggctttatgtagtaatagnnnnnnnnnnnnnnnnnnnnnnnnnnnnnnnnnnnnnnnnnnnnnnnnnnnnnnnnnnnnngtataacaagattgcttaacttctacttgccaacatctgccttgctggacttgtatgggattgtcttcttgatttgaatngtaccgtctttgttgacacagtagggctgggcagtgtttaatccttccattttatagannnnnnnnnaatcaggcctttgggacttcattcataattttgcaataatctcttttcccttgtcatgcaagccaaaaatataccagtaaaacagattctgacgtgtttgtagttatcaaatgaatggctcgaaacacttctcaaaaggatatacgtattgaccccaacaataaatgtttgtggctagtg

SEQ ID NO: 9037 - DNA, 1151 bp, Homo Sapiens
gtggaccggtccggaattcccgggatgccgcggagggtcaggtcgtttctgcgcgggctcccggcgctgctactgctgctgctcttcctcgggccctggcccgctgcgagccacggcggcaagtactcgcgggagaagaaccagcccaagccgtccccgaaacgcgagtccggagaggagttccgcatggagaagttgaaccagctgtgggagaaggcccagcgactgcatcttcctcccgtgaggctggccgagctccacgctgatctgaagatacaggagagggacgaactcgcctggaagaaactaaagcttgacggcttggacgaagatggggagaaggaagcgagactcatacgcaacctcaatgtcatcttggccaagtatggtctggacggaaagaaggacgctcggcaggtgaccagcaactccctcagtggcacccaggaagacgggctggatgaccccaggctggaaaagctgtggcacaaggcgaagacctctgggaaattctccggcgaagaactggacaagctctggcgggagttcctgcatcacaaagagaaagttcacgagtacaacgtcctgctggagaccctgagcaggaccgaagaaatccacgagaacgtcattagcccctcggacctgagcgacatcaagggcagcgtcctgcacagcaggcacacggagctgaaggagaagctgcgcagcatcaaccagggcctggaccgcctgcgcagggtcagccaccagggctacagcactgaggctgagttcgaggagcccagggtgattgacctgtgggacctggcgcagtccgccaacccttcagggacaaagagcttggaaggcgttcccgggagggagctccagcactttccaaaccccaaaatcggagaaacaccaacccctaacccaaaggcaagctgggaaaattgcccccccaaaaaagctgaagggcaccccaaaaaaacctgggggcgaaacggccaaaccgtgtgtgaaacccgcaacccccccaagaaaacaccccccctgccttggaagggggcggggaaccaagggaacctggggccttaacccgggggaaaaaaagacccttttggccggggaacccggttcccggcgagggatatcttcccaaaagcttc

SEQ ID NO: 9038 - DNA, 878 bp, Homo Sapiens
ccgcgttggatgagacacgtgggtaaaaaagcaggctggtccgcgtcggatttccgggatatcgtcgaccacgacgtcggggacaggaatctatgctcatacttctgcttcccagaggtttgccaatctaaaggcatgtcatgtggcctgctttcctgtccaccatccccacctctgatgctcatgatgctattcacatagatctcttactgctgcttctcctggcttactggcagaaactagctcactcaaggctgccatccttcacttgcagcctccctgccattctccttcactggttggcaaccttgagagttcacaagaaaatcaacctctgtggtggtcaactaaaggtattaggaaactaagtctgtggctcttctctgctgatggaaacagaagggcgccaagcaatgcctaaaaagatctcgccaataattcttgtctttgggtgttggagccctggattctggtgctatagctcctggtgccaaagtctggatctttccacatttcagcagcaccaacatctgctgctactcaaaatgtcctgttgaagagggacagctgtgatgcccttttgctggggctgccatcttgaaatctgagtgcaataggatttgcttgtaacagttatttcaggatattttgtttctttaatctgcacactttctagatagattttatttttaagtgtcctcagcattgcagaaaataacattgtaatagcaagtaaaggctggaggctgtttctctgggcttcaaatggctggcaaggctggctctcaaatcccaaagttgggaggcatgtttctgaaaagcaactgaggtgtgactgtttggacccaggcctcatcatcaggggtcctggaggaagc

SEQ ID NO: 9039 - DNA, 374 bp, Homo Sapiens
  misc_feature (89)..(180): n is a, c, g, or t
  misc_feature (187)..(187): n is a, c, g, or t
  misc_feature (189)..(189): n is a, c, g, or t
gctcaagcaatcctctcacctcagcctcccgggtagctgtgaccaaaggtgggcatcagcacgcccagctaattttttggttctttttnnnnnnnnnnnnnnnnnnnnnnnnnnnnnnnnnnnnnnnnnnnnnnnnnnnnnnnnnnnnnnnnnnnnnnnnnnnnnnnnnnnnnnnnnnnntgacgcncnacgcccggccagcactaaacatctttaggctgtttgggaactgtctttggtgtctatatcacacatttgcaagtatctttacaggcagcaaaactttcattgttgaatgaggattgagtttttgtttgtttagggggagaaaagtacaaagtatatgttcaaattggaagatattttacatttaa

SEQ ID NO: 9040 - DNA, 491 bp, Homo Sapiens
cccgtggtggggaagtgggtccaaagtaagggttctcattgttgccttttaagaggcctaagtcctgcattaactcagtccaaccattaagtgatgcaggctgctcttccctcatgtgagaaaaacctgtttccctctggttcttcctggctttgcacctggtggctattacaaagcagtactgcagtatgtcttggacctggaaagttggacatgtgtgtggctcaacagttttctcgggggagttcagtgaccttttggtggccaccctctgttctcacctgtgagttcttgcaggtggcgacttcatctgcaaggtcacttacatagccccactcagctgcttcggaaagcgtgacgaagcagtagtcctcagtgtgtgtgtaagtgaagaggaccttgtggtagcagggaccatgcttcattcgtggctgtgtccccatctgagggcctggtatgcagtaagatcaataaatacttgtgggaatgca

SEQ ID NO: 9041 - DNA, 869 bp, Homo Sapiens
ccttcgggtactttcaggacaccttatgcagacacgagatcttgtacaaccagataaacctgcaagtcccaagtttatagtgacgctggatggtgtccccagccccccaggatacatgtcagatcaagaggaggacatgtgctttgaaggaatgaaacccgtaaaccaaactgcagcctcaaacaagggactcagaggtctcctccacccacagcagttgcacttgctgagcaggcagcttgaggacccaaatggtagcttttctaacgctgagatgagtgaactgagtgtggcacagaaaccagaaaaacttttggagcgctgcaagtactggcctgcttgtaaaaatggggatgagtgtgcctaccatcaccccatctcaccctgcaaagccttccccaattgtaaatttgctgaaaaatgtttgtttgttcacccaaattgtaaatatgatgcaaagtgtactaaaccagattgtcccttcactcatgtgagtagaagaattccagtactgtctccaaaaccagttgcaccaccagcaccaccttccagtagtcagctctgccgttacttccctgcttgtaagaagatggaatgtcccttctatcatccaaaacattgtaggtttaacactcaatgtacaagaccggactgcacattctaccatcccaccattaatgtcccaccacgacatgccttgaaatggattcgacctcaaaccagcgaatagcacccagtcctgcctggcagaagatcatgcagtttggaagttttcatgtactgatgaaagatactctacagaacttgtcaaatctttgaaacttggaatatattgctttcataatatgaagttttattgcctatctaaa

SEQ ID NO: 9042 - DNA, 705 bp, Homo Sapiens
taaagcatcattaaaacagcctcaataaacaggccgtatttagcccaaatcttgttcaggagaacagcatgggctccgtttgaattttgttggattctggacgtcctcctcctattatataggtctgagagttgtctttgttaataaaatttagctttgtttccccaccagtgataatgacatgaagcactaggaaatgatgcaataaccgcagtgcatgaggccttcctcctggggaaggtgtgagacaggaggggagcaggactcccccatactcagtccagtggaagcgcagaatgcctgctcgtgttggtaaaaataagacaggaatgtaagaaaaaaagtcttcacgctcaacgtgactatctttggaattcatttcattaaggttttcacaaaatacaaagctcaaacgtaatcatctatgtccaccacaaaacagaatcaaataagtggttagcacaacaaacatagtgatcttttccattttaaaaaatataaataacaatgttcaaggttttacagttttcttagtgtgtgtctttttaaggctttatgttgcagacccttcattaatggtacttgtaccctgccatcaggatacactgcccaccagcaaggaaggccactgtggatacattcctgagggggacacacactgatccatgttgcctcagcctgttaaaaactaaatgatcaaacacc

SEQ ID NO: 9043 - DNA, 525 bp, Homo Sapiens
aggtgctccctcccttcctgcaggcccaccatgccagcagagggtgtggttggaggcctcagacaggtccctgaaggagtctgaggctccagaggatgtcatatgggagttttagagagctgtgtcccaaggatgaaggtgtggctgtgggtctggctaggattgaagccatctggaccttttctagatatgactccaggacccttgagtgtaatgcaaaaatttggagaccagctatgcctgccctctgtgggtgccttagcattgcgggagggtggtgcttggtcaccgttgcatttgttatagaaatggccattcgccataaatctgactgcctgtgtttgtgttggtgggggtaaggggcagtggtgtgaagggaccaaaagggcctcaggctcaaggggtgggatgcggctcctgcaggagagaggttgagacctggtcaaatttatttcctatcaatcactgaatctcagggataatgggtcaacccagaactgagatgtctgtatgacagccactcct

SEQ ID NO: 9044 - DNA, 530 bp, Homo Sapiens
  misc_feature (37)..(37): n is a, c, g, or t
cctcacgtcaagttcaacatcagccgtgggcaacaangttgagcccctgtctctacattaaaagtaaaatcaaaagtctctggagagaattgtgttggtccagctcgggttagttgtccattcaaccggtgatacaggcagagttggggagtcatggcttctgaagcccacagtatcggactgggagcaggtctcagagaagcaagaatcactgtgagcaaggagttacttcaaattaatagccttacaaatctattagaatacatcggatggcagagagcttctagggtagaagtttgtacatgcaggccaaggggaactagagaggctgacaagacatatctctggggagagcaccgtagctttcaccagtgttaaaggggaccccaaaccttgcattaacaacctttaagccagcacatgtgcgtgcatgcgtgcacacacacacgtaactcgttttttataatacacaaccatcctattaacatgagctaaacaatctaaaccatttagttgttgggtagtacaga

SEQ ID NO: 9045 - DNA, 1229 bp, Homo Sapiens
  misc_feature (560)..(733): n is a, c, g, or t
  misc_feature (749)..(762): n is a, c, g, or t
  misc_feature (797)..(810): n is a, c, g, or t
  misc_feature (896)..(906): n is a, c, g, or t
  misc_feature (989)..(1001): n is a, c, g, or t
  misc_feature (1050)..(1070): n is a, c, g, or t
ggtgatttctgtaagaaatgcctgtaggagaaggtctgtgaagtgtggagggcagtgtcgacgctgcacagcatctgcagattcgcagcctcttctctgccggtgcctctgttcggttctgttacccaaaaacaaagaccaaagaaggccaatctctcatttgaccctgtctttttaatctgcctgttttaaaagttgcgtctgtagtagccgcttgctgtgaagacacatcttgacagtccaagtgattttgtgaccagtgatttgggtcctgttttccgctcttctaagaaaaaacaaaaagaccgtgagttattgcccagcaataatcatgttgttactgtgagttagcaacatgcctgacttcctgatagcattactgttttctagttttgtttattgtatattatgtgtggttttatttggtatttatttgtgttttgaggtcttgcaatgtttttgtgtttctgatgctaataactaaagtttgtaagactgtagaatgcaaaactcggagatgctaaactgtcttattagaggaaaataaatctgattatggnnnnnnnnnnnnnnnnnnnnnnnnnnnnnnnnnnnnnnnnnnnnnnnnnnnnnnnnnnnnnnnnnnnnnnnnnnnnnnnnnnnnnnnnnnnnnnnnnnnnnnnnnnnnnnnnnnnnnnnnnnnnnnnnnnnnnnnnnnnnnnnnnnnnnnnnnnnnnnnnnnnnnnnnnnnnnncaacacacccgtgcgnnnnnnnnnnnnnnacaaaaaaattttctctaacactttttgttggggnnnnnnnnnnnnnnaaaaggggtagatcacgaggcaatcttgtttctccacaaaaaacaaaccgtggcactaaacaaagtagtgtctcttctcccccacnnnnnnnnnnngacccgggcgggaagaaacaccacaccttttttctcacaacacacccccatcgggggtttttccaaggccattcttcttctcnnnnnnnnnnnnnagaggggtgtcatatcccggggcggcctaataattataaagattcttcnnnnnnnnnnnnnnnnnnnnntactatcttagaaaggattgtgtgtggtttaaaatttactaacccccctttctccctgacaaggggggggaagccaccctaaaacaaaggagggggatgaaaaacacattcactttcccggcggcgcgaaccacataccccccgatcccccgcatgggg

SEQ ID NO: 9046 - DNA, 927 bp, Homo Sapiens
cccggtgggctcgctggcggatagatacctggcgcactagtgctggggcgccgcggtcctgctccaccaggagaacagcgagggccccacactgagtctgttgaagcctcacgttttcctggaggggtgctgcatcgtcgggtgtccctcaccccacctggggaacctctgtcttcaggtcaccccttttcaggggcctgggttgctcatgtcacaagccacttttaaggcccgtgtcacctgtgtccctgtgtcctcagggcctgtgttacttcgtgccccacttctgcccagaacactgacctgttagctggctccctcctgcacaccccagagcctcctcccagggcagaaagggtggcccatccagggaaccaacgagtacctcacttagtgaccccagcatccaggctggcgtcgcgggtgctgggcgggaggggctctggcctgggtcctcagccctggctggacgcgggcgtcccaaggccacgtggctggccacgaaggtccccgtgccagacagccccagccgcatcccggcctcctccggaggcaccttctcctggtactcggcccagagcctgcgcataaagccacttttccaactttgcagccctcatactcatgttctttgtagcggaccgagtgggtttgctataggcctcgtctgactttgtcgtgcgtcttttctctgtggactcttgaggacgcctgagccccagccctgcacctgaccagcctcccaccttgggtccaggggtctttcggctcatattgcagggcctgccaatgccttcacgcaccccttccccaaaggtgcccggcagggaggcagggcctcaccccactcagcgcagatcaggctaagcccagtcgactggtcactatgcaatactggcctggcgatgtatacctgagtccatcagt

SEQ ID NO: 9047 - DNA, 599 bp, Homo Sapiens
ctgaatgagaaacatgagggaaattgtggagttagcctcctgtggtaaaggaattgaagaaaatataacaccttacaccctttttcatcttgacattaaaagttctggctaactttggaatccattagagaaaaatccttgtcaccagattcattacaattcaaatcgaagagttgtgaactgttatcccattgaaaagaccgagccttgtatgtatgttatggatacataaaatgcacgcaagccattatctctccatgggaagctaagttataaaaataggtgcttggtgtacaaaactttttatatcaaaaggctttgcacatttctatatgagtgggtttactggtaaattatgttattttttacaactaattttgtactctcagaatgtttgtcatatgcttcttgcaatgcatattttttaatctcaaacgtttcaataaaaccatttttcagatataaagagaattacttcaaattgagtaattcagaaaaactcaagatttaagttaaaaagtggtttggacttgggaacaggactttatacctcttttactgtaacaagtactcattaaaggaaattgaatgaaaaaaaa

SEQ ID NO: 9048 - DNA, 338 bp, Homo Sapiens
taaagcttttatatattaaaaaacgtatcatgcaccaactgtgaatagctgccgcttgcgcagaggacccggggaggggtcccgagaggctccccatgcaacactggaaatgactgttccagagagcgggcagacctggcagagcgcccctggcgcctgagactaccacccactccgttcctgccagaaacgaccctctgtggccgatgggccatgcgggcccctcgcagccaactcagccagtgttgggactggctcagagcccatgggggctggaggggggcagctgggactctggaatcttctttataataaaagccttacggacaaacctaaaa

SEQ ID NO: 9049 - DNA, 845 bp, Homo Sapiens
aaagctgcaaagagagaacatgccgtgtgcctttattagcacagcgggcagcctcagtgaaactcttaggttaagcagttaagtcctggaacccagagctgctgtgtatttcgagcgggcagtttatcttttgctatacttattttcaattcaattacaccacgattcaaataattcccctcctaaaaccaaaaaggagggaaacgtcaactccattgcaattacttatcttcctcttctatctctgttatacgccggggcatagaatgctcgtatacatctctttaacaaccacaaaccttaagccatgtagatgaagttagtgcatcaacgggatacagttccatattgccttaaacctccttgttttagacacactaacatttataccaaattgcagattattctgcagagagggaattgcatgtttgtgttgtatatttagtatgaacttttttcagaatataatatttcttagttatcaaaagtagttggaaaacatttgcaagactatgaacatagaattgctgcttttatattttaactgcagattgtgaatttcactgccttatattatttatttctgaaacaaaagaggcatttttcaataaaactactggcagacaattttggaccaaccgcccagccaacagaacagcatagaaccaacaacaggacagaccgaggcgcaccgacacacaaccgagacgagagcgagggaagcgagtcgaggccaagccagaccacacaggcagagcagcgacgtgagacgagagaaaattcaacgagagaacggcagccacgcgtcacgcgcgatcacagcagagagacaggtaaaccacaga

SEQ ID NO: 9050 - DNA, 699 bp, Homo Sapiens
cctggacaagttgctggctcctgagaccagtatttcctggagctgtgcctcagtgaaggagcccagcctgaggaaccctggctcttttctttaaagcccaggccccacttacataaaacatttcagggtcactggaaacagtgaagtgccatttgttgaagcctactgcatgccagcccactgctcatccacgtggtctgccatgcctacgaggaaggccagcgcatgcaggactggtctctaatgctgtggtcattgcacagaagggaaaggtctcaaggaagagtcaactgggacaagcacaagcccaccggacatggccttggtaaaggttagcagactggtgtgtgtggatctgcagtgcttcactggaaataatttattcattgcagatactttttaggtggcattttattcatttcctgtgctttaaataaacaaatgtaccaaaaaacaagtatcaagctgtttaagtgcttcggctacttgtcccctggttcagtagaggccccggtttcccagttgttgactgtgacaggctcagcatgggctcagcagatgctgtcttaatttgtggatgatacagaaagccaggctttgggatacaagttctttcctcttcatttgatgccgtgcactgtgtgaagcagatgtttttgtccggaaataaaaataatagtcttggagtctcgccaaaaa

SEQ ID NO: 9051 - DNA, 486 bp, Homo Sapiens
cagccttcgtcctgggggaaaagggaccctcaggatggcatgagaggtcctcaatcccaagtgtggaactgtccccctcaacttggtaaaatgcaaaatttctgggtcttgccaatggggcctgggactccatgtgacaactggcccaggagcttctgatgtcacacagaattctgcagtcccaagctccagccccaacctgctctgctgttcctaggtgactgccctcacactgctgaccacagtggatttctccccctgctgctcgggctcagctggggtcagccctgcttataaggtcaactgtgcaaaaccttatactggccaagaacaaactagtgctgggggaggagggctgggtgccccggccactggtggagtccccaggaaatcctcagagctgttgcgaggatgagacacatttgtggacacgtccacctgtcctcctgaccgtctggagagaataaacctgtcaaagccaaaaaa

SEQ ID NO: 9052 - DNA, 310 bp, Homo Sapiens
gggtgaccagctgatacctcttcctgccctctagtgtgcaattgggtgttgcctcagtttcctcccagctcagttttattagatcaaagctgttgttgggcaccaggttggccacctcaatcaccagccaagatggttgctttgtccaccagaggtcaagttcacctctctggtgctgtagttcccagctccttcctgatttttctaatcgctccttctggggaacaggaagttgatattgccatggtggcgggatatgccgtcacctcagtagttttactgtaaaagggaaatttgaacaacaaaaacc

SEQ ID NO: 9053 - DNA, 977 bp, Homo Sapiens
aatcagtttggatgatgatggtcctttctttctgacaactggaaaagccaagccagaaaacaacgggtggactccagattccgaaaaaatgttagtggaacgaataaagacctcctgtgggttgaaggttggtgaaagaaagggaatgtcttccacatagttcttcctcagtctctctcccaaggcaaacatttgctgcatgcccaccttggtcagctgcccagcaaacatgccccccttcagggtggtctcatggtattgagagtcgtaaggagaatatggtttcggaccaccagctagattggtgactgtgtaatcaaactgagtttggggtgggacctctaatagctgggggttccactctacctgctcctccagcgggagcggcttgagaggactccgagccccgtgtcgaaacacgacctgcaccattttcaacttcagcaggctgcggtcgaccggacactggccatcggcctcctgcagctcggccagggccacccgccgctggtgcaggcagtacgccagcgaggtcaggacgcccactggggtccacaagcgcatgctgaacacaccagtgatcatggtggtaggccctcgctgccctccgggttgaggctgcaggaggcaaacacaagtcttctgcgggcgccggggctcagcgggcgcccccaagtccgcgggaacctgcggatgcgtacatccagcccttcagcaagcagggaccgctgtgcctcccggccctgagggagaccccgagtgggaacgggggagagaacaagaggtggcagcagcgaagagtccctgggagttttaacccgggtcggggttggtcgctcctgctgcacaccgggccgggggagatcggatccttatcttttgcccgacgaggaacattaaacttgtatttcaaccctggcctccagcactcttgaaggaacaggagccggcctgagttcctggcggcagcggctatc

SEQ ID NO: 9054 - DNA, 221 bp, Homo Sapiens
aaaaagcccagtctagtgatgatgggtcataacaactattaacaccaagtatattcctttctagaacagtagtttctaaactgagcttattaatagtcatataagcaaaaatttggggggaataacatattagttttaagcatctggttaagcacacattgctttagatttcttacaaggatcaattcataacaacaaaaactgtattgagtactaatgac

SEQ ID NO: 9055 - DNA, 894 bp, Homo Sapiens
accggctctgcgaggccctgcgagcgccaggggggcgccacgagggagccgggcagccgcgggccacttcaggggggcccgcctcgccgcccgggcggtcgagagatccttgggggcacatctcggggtgcggtgacccgcccggcgcatttcgggggtcggggcgcaattgccagggacatctggagcccggccctgcttctgtcgggctccaggctacccctggatggctgcgctgtgccctcgccggccgcccgggcgccgcagcggctgagttcgccgggatcgccgggccgccgcccttgccacccgctgcatgctcggcgcccgggtcgctggcccacctggacgcactgggccccctggtcccctacgtgccgccgccgctgctgccctctatgttctacgtgggcctgttcttcgtcaatgtgctgatcctgtactacgccttcctcatggagtacatcgtcctcaacgtgggcctcgtcttcctgcccgaggacatggaccaggcgctcgtggacctcggcgtgctctccgaccccggctcggacctttacgatgctgactcggagctcgacgtctttgatgcgtacttggagtagggtctcgactgctgttcccctcgtccctacacgatccgcaacccatgccctggaccagccgcccagatcatgccgccgcagctggttgggggcaccatctggacggggattggttccccaggaggagaccctcccctgcctccgaggcctacctgctcccttcagaagcttcgtgccaacagagaggttcctgtttgaacccaggagagtggacgagagattgggactgagtgctgaggttgggaaggcatctgctccacagagggggaacgcagaaggctccaagacc

SEQ ID NO: 9056 - DNA, 315 bp, Homo Sapiens
  misc_feature (127)..(127): n is a, c, g, or t
  misc_feature (196)..(196): n is a, c, g, or t
agatactgagggagcacaggagcagtcaccgctgccactgctactgccgctactgctgccggcgcgtctgcacctctcggcctgccagtgtacctgccggcgcctcggtcgaccgcccccgcccccntctcccgctgcgtccgcactcctgttcctggtcctgacgcccccctcccgcccggaaagctgcccagcnaccactaattccccagtgccaccatggaactgcaccatacaactactcttacatctttaaatatattattattggggacatgggagtaggaaaatcttgcttgcttcatcaatttacag

SEQ ID NO: 9057 - DNA, 404 bp, Homo Sapiens
  misc_feature (23)..(23): n is a, c, g, or t
  misc_feature (101)..(101): n is a, c, g, or t
  misc_feature (148)..(148): n is a, c, g, or t
  misc_feature (167)..(167): n is a, c, g, or t
cacggcgcctgccacccagcctnaggcgctgggagaagcgcaggttcttctggataaccgaagagacgtcaaaacaggctggggcaaagtggtcagagcangatgaccgagcggtcattgcctccgtaccagtcggcgcggcaacccngcacgaagcggtcccagangcagccgcacggcccggtccttgggaaagcggaacagcgacttcccagacttggtggtgttgccgcagtgggcggccacacaacgggccggcatggcggccgtcttcggtgcgcgggagccgggttccctggaccttcgcccttgggcacgctcctcgcatgcggcctcggcgaggcaagtcctcccctcctcacctgtccactccgggtcgggattgtttccttccctacctctgg

SEQ ID NO: 9058 - DNA, 526 bp, Homo Sapiens
gcacgagggagattgcatcccacgcaggcagcccccttccgtacaagagaggctggcggttacctttcttggggagacgcgtcgactgcttcattgtgggggcctcaggagcggaggatcgggtcccgcccgaggtgacgcgtaaacccagactctcagcaacgcgggtaggaaggacccttgaagttccgcggcgaccacgtcggctgaaaccagcagcccaggacaagtggaccagccagcaagacccagaccatccaaaccggctgatcctacgacaggacccagatgccagtgaaagtgaccacagccctgctctaagtcaccccggaagctgaccagtctacgcacggccgaagcgttcgtcaaggaagtaaatgtagttagaaatcttaagcccagtaattttccttgtcatcttaattgttttactattaacctgtcgctttgctcaaccccctcctctgggcaaacatctcttggtccatcctaggtacaaacatgctactcttcccctttgaaaaaa

SEQ ID NO: 9059 - DNA, 645 bp, Homo Sapiens
  misc_feature (63)..(184): n is a, c, g, or t
  misc_feature (537)..(570): n is a, c, g, or t
gctcaagtcatcctcccactctagcctcctgaatagttagaagtacaggcgcatgcactgtgnnnnnnnnnnnnnnnnnnnnnnnnnnnnnnnnnnnnnnnnnnnnnnnnnnnnnnnnnnnnnnnnnnnnnnnnnnnnnnnnnnnnnnnnnnnnnnnnnnnnnnnnnnnnnnnnnnnnnnnnnnataagccactgtgcccaacctcagtagggttctctaaatggtggagcccagagcaggggcccctcctgcccaggggaactgcccaagaacagttttgaaaggtactcatttaaatggcctttgagtaaacggatgaaaatgagcaaagcctgcattgcctcttgtttttagtatcaccttacacagtttttccacttctccaaaggcttagggccccttctgggtcatcttggtctccttggcttgagttggggggtggggggtaaggtggagcatgataagggtgagtatcagcaaaggtttgagctttcacctaagtaagaaaaactcgtctgggtgtgctggttcatgcnnnnnnnnnnnnnnnnnnnnnnnnnnnnnnnnnntagatcacttgaagtcaggagtttgagatcaggctggctaatatggtgaactactagtctctactaaaaatacaa

SEQ ID NO: 9060 - DNA, 256 bp, Homo Sapiens
ggaaagagagtttgcgtaagccctcacaaaaaggccttgtaacggggagggcccaggggcaggactgtggagacccgtcctgaacgggcgactgtgtcttgactacctttcaaaaccagcactgtgtgggaatgtccgccaggcagagctcggagcctcattgagacaggggagagagaaagacaaagaggggaccttcttccagatgccttcccagttgtaaccggtaaaactgttaccagatagtgtttgtaca

SEQ ID NO: 9061 - DNA, 475 bp, Homo Sapiens
  misc_feature (51)..(51): n is a, c, g, or t
ggcaccaaagagcttgggcccgtgctgaccagcccccaaggcctctggcgnaccatgctggtcctgaccagctagcctacgcggggatggccgtcagttctggccacaggacccgagtctgggcttgggtccccctgctgctctgcccgtgacccttggggatgggttgatgcgagggtcccactcaagccaaaaagccgggacctttgcgcagctctgtcgactctggtgggtccccactcctggggccccctaaccccaccccaggcagcggaaggggctgactgggtctggtccttaccaacatagacggtgcaaacactcttaacagtgttgtttttgtatcaatatgtttgtgcagtgatgaatgtatttatttctcagacttggggcgagtgagcgggtggcaggccgcgtccgccactgcaatgtcccgccggaccgagccccagcaagggctcctccaggattgcaa

SEQ ID NO: 9062 - DNA, 417 bp, Homo Sapiens
  misc_feature (24)..(24): n is a, c, g, or t
  misc_feature (186)..(186): n is a, c, g, or t
  misc_feature (344)..(353): n is a, c, g, or t
ccaacttgttcctcagctgtcatntttccctttaaaagtccctgaaggaaggtcctggaatgtgactcccttgctcctctgtggctctcttgggcattcatttcttgggaccctaccccaaggactgtaatttggtggggacagctagtggccctgctggggcttcacacacggtgtccctccctnaggccagtgcctctggagtcagaactctggtgggtatttccctcaatgaagtggagtaagctctctcattttgagatggtataatggaaaccaccaagtggcttaagaaggatgcccaggtccttccatgggagccactggggttccggtgcacattnnnnnnnnnntctaaccaggacattcaggaattgctagattctgggaaatcagttcaccatgttcaaaagagtc

SEQ ID NO: 9063 - DNA, 651 bp, Homo Sapiens
tggatgtatggcaccatcttcttcatgctgttctccaacttctggtatcactcttataccaagggcaagcggctgccccgtgcacttcaccaaaatggagctccaggtatggccaaggtcaaggccaactgacaagcatggcctagataggcgcccacctaagtgcctcaggactgcaccttagggcagtgtccgtcagtgccctctccacctacacctgtgaccaaggcttatgtggtcaggactgagcaggggactggccctcccctccccacagctgctctacagggaccacggctttggttcctcacccacttcccccgggcagctccagggatgtggcctcattgctgtctgccactccagagctgggggctaaaagggctgtacagttatttccccctccctgccttaaaacttgggagaggagcactcagggctggccccacaaagggtctcgtggcctttttcctcacacagaagaggtcagcaataatgtcactgtggacccagtctcactcctccaccccacacactgaagcagtagcttctgggccaaaggtcagggtgggcgggggcctgggaatacagcctgtggaggctgcttactcaacttgtgtcttaattaaaagtgacagaggaaaccacgga

SEQ ID NO: 9064 - DNA, 498 bp, Homo Sapiens
atatatttttgaatgaagttcaaggcatgtatttttatgtgttaaccaaaagatgcattcaaggatgttaatctcagcaggatttgtaatacacaaaaattggaaaaaaacctcaaaatgtctatcaatggtagaatggaattttatacagcaatggaaatgcatgaactatgactattagcagcaacatgaatgattttcataaaaatagttttgagcaaagaatccagatataaaagagggcatgccctatgattctacgtatattaagtccaaacacaagcagtactatctatgatagtaaaatggtaggctaaacattggggagttattacattgacaacaacatgaaggggtttatgggattctggtaatgttttgtttcctgatctgggcactgggtaccaggatgtatttactttgtgaacatttaaccatctacgatttttggatttttctgggtatatgttatactttcaataaaacattttcatgaga

SEQ ID NO: 9065 - DNA, 805 bp, Homo Sapiens
  misc_feature (65)..(65): n is a, c, g, or t
ctttggaattacgtgtaccaactggtccttgataccggatatgaggcttacatcaagtgggaagncaaggacgccaagatcttcgaagtggtggatccaaatgggctcgccagactctggggaaatcacaagaacggggtgaacatgacctacgagaagatgtctcgtgccctgcgccactattataagcttaatatcattaagaaggaaccggggcagaaactcctgttcagatttctaaagactccgggaaagatggtccaggacaagcacagccacctggagccgctggagagccaggagcaggacagaatagagttcaaggacaagaggccagaaatctctccgtgaggggcaggtggactccaggcacccggtaccgatggggcagggaccgagtctcccatgaaggcagactcctcctcccagcagagcagcaggatccccagccagactctgtacccacaggattacagccattgcttgggaaggctgggaggcctcccatccaggacactgggggcaggagtgtcatcttttgggcagggcaatcctggggctaaatgaggtacaggggaatggactctcccctactgcacccctgggagaggaagccaggcaccgatagagcacccagccccacccctgtaaatggaatttaccagatgaagggaatgaagtccctcactgagcctcagatttcctcacctgtgaaatgggctgaggcaggaaatgggaaaaagtgttagtgcttccaggcggcactgacagcctcagtaacaataaaaacaatggtagctaaaaa

SEQ ID NO: 9066 - DNA, 554 bp, Homo Sapiens
ttgctgaggagtgaggaatagttgagccccaagtcctgaagaggcgggccagccaggcgggctcaaggaaagggggtcccagtgggaggggcaggctgacatctgtgtttcaagtggggctcgccatgccgggggttcataggtcactggctctccaagtgccagaggtgggcaggtggtggcactgagcccccccaacactgtgccctggtggagaaagcactgacctgtcatgcccccctcaaacctcctcttctgacgtgccttttgcacccctcccattaggacaatcagtcccctcccatctgggagtccccttttcttttctaccctagccattcctggtacccagccatctgcccaggggtgccccctcctctcccatccccctgccctcgtggccagcccggctggttttgtaagatactgggttggtgcacagtgatttttttcttgtaatttaaacaggcccagcattgctggttctatttaatggacatgagataatgttagaggttttaaagtgattaaacgtgcagactatgcaaaaaaaa

SEQ ID NO: 9067 - DNA, 454 bp, Homo Sapiens
cacagcctggcctcgggaaggtggctcctgcagttcagcgtccctgggcccattaatcccactgtggagacttctgggaactatttattgagcaggcctgtgcctccacatcatcttgttgtctctggggtgtggtgtcacagcactcctctttgccctagagataagggacctgacttccccttctcccatcctgaacatttgtacccctggagaagttccttagcagggaggaggaagaggagaggaggaagcaaagaatcacaaggaacctctggctaggtgatcctgatgtttcctactgagtttttctggtatccagatttctggaaaccgagtaatcatgtactgtttgattgggtggttcatctgcttccatcccagtgaaatttacctgtagcccagtgaagggtgtgtttggaacattcattaaatgattctaagcatcttgaaa

SEQ ID NO: 9068 - DNA, 469 bp, Homo Sapiens
cagggctgcacctgccatccccggctctgccactttagggccttctagaggcagtgtccttaggaagtagctctgaggcatgggtttttctgctcctgtgcagggcagctgatgggataaggtggggaaggacggtcagtgcttgggccccagctggccagcctggcgatggggaaaccaaaccatgtcccccagcgaagggccagagtgggaacctgtcctcatgcccttcgtcctgaggagccctgaggtgggcagcaggggccaggggaagttttcaggccttcatcaaagagaacaacatcctcagctccgcacccctcatcctgtatcagcacttaccggtgtgtgacgtgcccttgtcagctagcatacggtgggcccacctggaccactggctgtttatgccactgatttatgatagggaatattatctttgaacccaatgaagtgttttctcccccatcac

SEQ ID NO: 9069 - DNA, 573 bp, Homo Sapiens
  misc_feature (191)..(191): n is a, c, g, or t
  misc_feature (467)..(475): n is a, c, g, or t
tcctgtccattgttctttcctctacttggcctgatttctaaaggcctctcttggttgcattaagcgggattcctgagggattcccttggcagttaccttgggggagctcttaggtttggggctgatccatgtcctctaaatgtaggacttcaaagctcccaaagataggcaggcccagtgggaaagctggnaaatgctctctgacccctctgggagggctggcagtcagagggccttttggaaagagtcagacctgatccataagtccctggaaaacaccctgcccagggagcaaatgccactgtggccttgactgaggcttcagaagagtttgggagctgcaattcatccacacacgcattcattttcaagtagtggtttgcagttcaggctttggagccacataagcctggcttcaaagccactttccagctttgtaggaagtctctacatttttaaacctccannnnnnnnncctgtaaaactggggtcttcatggtacttaacttcatcgtgatgttgagagaatgaaaagaaaaaggataaataaatggcttagcctcgtgccttggc

SEQ ID NO: 9070 - DNA, 701 bp, Homo Sapiens
tgccatgggccacatgctgctgccctttcgcctgggcctggggggccccatcggctcaggccaccaattcttcccctggatacacatcggggacctggcaggaatcctgacccatgcccttgaagcaaaccacgtgcacggggtcctgaatggagtggctccatcctccgccactaatgctgagtttgcccagaccttcggtgctgccctgggccgccgagccttcatccctctccccagcgctgtggtgcaagctgtctttgggcgacagcgtgccatcatgctgctggagggccagaaggtgatcccacggcgaacactggccactggctaccagtattccttcccagagctaggggctgccttaaaggaaattgtagcctaagtaggtcatggcaagggcctgaggcctgttcctcacaggcttccaggttaggcactgtgaataggctcagctcctctagagagctgaagccatctggttcttagattcctctcccagtcctctttcccattgttctgttgctccaccttattgtctcaaggccgtaatctcatcaggttgggacattaatcttttcaactccttgtaagatttcccggtttggtttctctacatgtcctgcagctgccccacttctcctttacgctgtgtagagaatgctctgcagtttaggcaataaaaataaattgtctcacta

SEQ ID NO: 9071 - DNA, 805 bp, Homo Sapiens
ctgtcacttctttttctgctaggactggtaatgaggaactatcacggattaatctgaattgtactcagaaggctttgatgcaggtggtagattttctttcccggaacaaacaactttatcagaagacggaaattctgtcactggagaagcctttgcttctacatactggaatgggacggttatgcacactggatgaatctgtctccctggcaaccatgattgatcgaataaaaagacacctaaaactatctcatattcgcttagcccttggggtggggagaaccttagagtctcaagtcaaagtcgtggccctgtgtgctggttctgggagcagcgttctgcagggtgttgaggctgacctttacctcacaggtgagatgtcccatcatgatactttggatgctgcttcccaaggaataaatgtcatcctctgtgaacacagcaacactgaacgaggctttctttctgaccttcgagatatgctggattctcacttggagaataagataaatattatcctatcagagactgacagggaccctcttcaggtggtataattgcagaaacatcaggataacacattctacaaatcagctggatgccaacttaaatttgtaacatgagtcagtgggactggtgtgcttccagagagtgtcttcgagggtatcatcatttccggtttgttaatcttattcaccaaatgttctatcgctcgtaaggtaaaactgtaatataactaccatattaaataacaaatgttcattataaactctaggaaagattgaataaaatctgtttacttaac

SEQ ID NO: 9072 - DNA, 307 bp, Homo Sapiens
acctcaggtttctcttaatatagttctccagtcactgaccttgaattgacttacataaactactgccaatgtttaaattgcccttatgtttatgtttattatgtcaagccaattcgtacatacaatttggaatcaagtgtcataagaatttattatataaatttatcaagaataaaaatgcctctccagccttaagtatttacatgctcccaggtcattgtcagtttatggtattatgttgttttatttaaagcattgaattgatagaaaaatttgctctgtaataaaaatctactttcacataaaa

SEQ ID NO: 9073 - DNA, 1053 bp, Homo Sapiens
  misc_feature (464)..(552): n is a, c, g, or t
tattgcagcctgagaacacagctgtacgattatttgtcaaacagaaaacactgatacttaacaatgctaatgcaattatttatttgcttttcagtctctacaaaacgttctaaaacactaatctaaatattaacagtaaaatatttgcataactaatggaaactaagaaatcatatgaccaatatttcacttattggtaatcttactctactgatttccccccagactgtgatttttgaacttccttgcctttctcctgtctttctgtgtttattcatggaattccagttatctgggcttgaaattgcaggctctcctaacttaagcaaaatctgacagatcagcaaaatgagataaatgtttcttttttctttctgactgcattaaatcagatacaactcagcattaaaaagctatctttgtaaatgttgttactaataaattagtcttataagatccctggnnnnnnnnnnnnnnnnnnnnnnnnnnnnnnnnnnnnnnnnnnnnnnnnnnnnnnnnnnnnnnnnnnnnnnnnnnnnnnnnnnnnnnnnnccattcctttgaacaccgaacccaactaagtaaatgaacatgggccatacctgtttcctaggaaaccccgggccattgactaagggcttggaatccctcaccaaataaaaaacccccccggggggcaaccgtggggggcctggaaccaaacccaaaaagagagttcttgaaggtcatctcctgggagtcgtccgccccggaattccaaggagagcctccgagctccaatttacccccccgacccatgccacctcatccgcaagcaactgtgtggtaccttcactacccccttaactacccgccccccgggagagccccctgccacgctcttcatgaaaccaaaccctcgaatgcgcccttgccgggatctcccctccctccttgttccaacccttcgcgggcacccacatattttgtgccccctgtgttagtaaaaaaacgcgggggcctgcacgaaaagatttggccaacatattagggaaaatgagtctataacacccc

SEQ ID NO: 9074 - DNA, 500 bp, Homo Sapiens
ctgcactgcgtggctgcccagccagctgcctcctgtcctgggaggaggcctcctgggtgtcctcatctggtgtgtctactggagggtcccacaggagaggcagcagaggggtcaggggaggtctcctgccgggggttggcctctcaagcctcaggggttctagcctgttgaatataccccacctggtggtggcccctccgatgtccccactgatggctctgacaccgtgttggtggcgatgtcccagacaatcccaccaggacggcccagacatccctactgcgttcgctggtggctcatctcgaacatccacgccagcctttctggggccggccacccaggccgcctgtccgtctgtcctccctccagcagcaccccctggcccctggagtggtggggccatggcaagagacaccgtggcgtctcatgtgaactttcctgggcactgtggttttatttcctaattgatttaagaaataaacctgaagaccgtcaaaaaa

SEQ ID NO: 9075 - DNA, 384 bp, Homo Sapiens
  misc_feature (317)..(325): n is a, c, g, or t
attcaagccccttttaataaaacacagttggtcagcccagtgcaaagcttgttatctgccaccagtacataccattggttctcttcattccttgggccagcttctcaggtggctttagacctcaacaagccgtatcttcaccagtgttctatcttgttcccctaaattaataaaatgtttttctccaggattttggtgagggttggctgtggctgtcgttttgcacctcccagatttcaaagaattactggttttaccatgactcaaatcttaagatctgtttctactattcagttcctcaaactgaagcttattgnnnnnnnnntgtataatgttatttgttttattatagcaattattcctaattaaagcagtatttaatgc

SEQ ID NO: 9076 - DNA, 334 bp, Homo Sapiens
aaagaaaaaacaaaaactaagtgggactatgtatgtagatgtgtgtcagcaccaaaaagttattttctcaaatccctaaatttctgatttccattcaagtcttttaaactctttcctgctgaatagcaaagaacttttattttccactttcctatattcctaaaaagtgtgaacaatgcgtttcagttgactgtattgcatacttttttgctgaagactttttctgtaaacacaattgccttgttcagttttgttgtaaactgacttaccataagatgcactgttgataatgctttctgatgtgtgtttgataagagtgataaaataaaagctt

SEQ ID NO: 9077 - DNA, 746 bp, Homo Sapiens
ccaagtgccctactacagggccaggctcaggagaaccaggttaatccatatcttataggttcttctattcttgggtgagaccccaccattaggtatagacatgattgacacgaccaagggatcaagtagtcccagtaaatgatgaggcagcaatggctgtcatcatgagcctcttggaagcagatgctggactgggtggccctgttgactttagtgacttgccatggccgctgtaaacactacatgttgctttggcaacagctatagtatcaaagtgcattactggtggagttttacagtctgtgaagcttactggataaggagagaatagcttttatgtactgacttcataaaagccatctcagagccattgatacaagtcaatcttactatatgtaacttcagacaaagtggaactaagcctgctccagtgtttcctcatcattgattattgggctagctgtggatagcttgcattaattgtatattttggattctgtttgtgttgaattttttaatcattgtgcacagaagcatcattggtagcttttatatgcaaatggtcatttcagatgtatggtgtttttacactacaaagaagtcccccatgtggatatttcttatactaattgtatcataaagccgtttattcttccttgtaagaatcctttactataaatatgggttaaagtataatgtactagacagttaaatatttttaataaatgtttcccttgttctataaa

SEQ ID NO: 9078 - DNA, 1002 bp, Homo Sapiens
aggcacgaggcagtcgcggcgatcttctcctcgcttatggagtgttatcgtcaccatgtccagaatggtctcggctggccggggcctgggggccgtgtggtccccaacccacgtgcaggtgacggtgctgcaggcgcggggcctgcggaccaagggccccgggggcacgagcgacgcgtacgcggtgatccaggtgggcaaggagaagtacgccacctccgtgtcggagcgcagcctgggcgcgcccgtgtggcgcgaggaggccaccttcgagctgccatcgctgctgtcctccggacccgcggccgccgccaccctgcagctcaccgtgctgcaccgcgcgctgctcggcctcgacaagttcctgggccgcgccgaggtggacctgcgggatctgcaccgcgaccagggccgcaggaagacgcagtggtataagttgaaatccaaaccaggaaagaaggacaaggagcgaggagaaattgaggttgacatccagtttatgagaaacaacatgactgccagcatgtttgacctttctatgaaagacaagtctcggaatccatttggaaagctgaaggacaagatcaaggggaagaataaggacagtgggtcagacaccgcctccgccatcatccctagcacgacaccttcggtcgacagtgatgatgagtctgtggttaaagacaagaaaaagaaatcaaagatcaaggaccctactttccaagtcaaatttgcagaagacgcctctttcccagtccatgtctgtcctgccgacttcaaagccagaaaaagtgctgcttcgtcccggagactttcagtcccagtgggattgaagatgacaatgaggatgagtcctcctcggcctcggatgtcatgtctcacaagagaacagcgagtacggatcttaagcaactgaaccaggtcaactttacccttcccaagaaggaaggactttcctttcttggtggccttcggtctaagaatgatgtcctttcccgctct

SEQ ID NO: 9079 - DNA, 1060 bp, Homo Sapiens
gggggacaatgacaagttttctctggatgactacttgggtttcctagaacttgacttgcgtcacacgatcattcctgcaaaatcaccagagaaatgcaggttggacatgattccggacctcaaagccatgaacccccttaaagccaagacagcctccctctttgagcagaagtccatgaaaggatggtggccatgctacgcagagaaagatggcgcccgcgtaatggctgggaaagtggagatgacattggaaatcctcaacgagaaggaggccgacgagaggccagccgggaaggggcgggacgaacccaacatgaaccccaagctggacttaccaaatcgaccagaaacctccttcctctggttcaccaacccatgcaagaccatgaagttcatcgtgtggcgccgctttaagtgggtcatcatcggcttgctgttcctgcttatcctgctgctcttcgtggccgtgctcctctactctttgccgaactatttgtcaatgaagattgtaaagccaaatgtgtaacaaaggcaaaggcttcatttcaagagtcatccagcaatgagagaatcctgcctctgtagaccaacatccagtgtgattttgtgtctgagaccacaccccagtagcaggttacgccatgtcaccgagccccattgattcccagagggtcttagtcctggaaagtcaggccaacaagcaacgtttgcatcatgttatctcttaagtattaaaagttttattttctaaagtttaaatcatgtttttcaaaatatttttcaaggtggctggttccatttaaaaatcatctttttatatgtgtcttcggttctagacttcagcttttggaaattgctaaatagaattcaaaaatctctgcatcctgaggtgatatacttcatatttgtaatcaactgaaagagctgtgcattataaaatcagttagaatagttagaacaattcttatttatgcccacaaccattgctatattttgtatggatgtcataaaagtctatttaacctctgtaatgaaactaaataaaaatgtttcaccttta

SEQ ID NO: 9080 - DNA, 483 bp, Homo Sapiens
caggtccgaaaacttaatctacacctacgataagatgaagttgaaaggaagctcaatccaactctcagacaaaaagctttgtcagatatgccaaaatcccttttgtgagcctgtgtttgttagatacccaaatggtggtcttgtgcacacccactgtgccgccagcagacacacaaaccccagctcatccagtcctggcactcggacttgaaaagcttggcccaagggtgcgaggggaactccgagttctttctgagcctgctggacatgaagagcagatgaccaccatgctctgtgtcagccaggacgaagggagacatctgggtgccagggagccttccgtccatacgcaacaaggactcctcgctgctgaccaggctctatgaatgtacatggaaaacccctaaaaatccccaaaacagaaacatacaagagttcacctgtccaggtacatagtaatccaagacagaggtctactttgaa

SEQ ID NO: 9081 - DNA, 796 bp, Homo Sapiens
tcacccggaatcgtgatagagaaacgccttcaatccattcactaataagctgtcacagagaacttctggccatccacagtataaaattctcttggggcaagagccttcccgccactgctatgattttcatagtttctcacggattcattgcaagaagtgcttccaccatcaatgacaccaactaaagcccaagcttgcctgtagcccagtccttggatcagttcacttcccaaccgttcctggatcatctggatggttccttgtaagagacttttagcggctgaatccccgacagctatggcaacaatccgacctggatcctggaatctcagaaactcctgaagccgcctgctctcattgcggtattcatgggtatcaaatctctcactttccaaaattttggccgtgtcttggtcaatgaccctcacattgaggccccgggaaaagtccttttcaaaggtataggacccaaagggcaagcctgaggaattcagggtccttgccaacaacgtccacgatgccttccgtgccccatgtaactccagtgtcccgccagcttccacaccaataaactttttgccaaatgttggcatactttcaccttcatctgacttgccatacaaggtaattgtcgctttggatttatagcggcatttttctgctccaatatgaaagcgacccaccatcctggatcaggatgtaatgagtcctcaaagtagtatttctggatccatctttattgtccccaaatacaagcagtcctccatcctgaatgactattgaaatgccggtggcg

SEQ ID NO: 9082 - DNA, 279 bp, Homo Sapiens
atacactgatagtacagtgtagctgtctggtccacattgctgtaggagattgctgatcctagtattcagaatattgtaattatagttactcaataaatggcagtcatcggtatttaaaagtggtaggctgaaaacacggccacccattttaaggcctaatgccacttgcagaaattgctaaatggcatacatgtaggtactattaatcactcctgtattagtctaaaggttttggtattttacagttcatgattactttgcttatagcggattgaagtt

SEQ ID NO: 9083 - DNA, 880 bp, Homo Sapiens
  misc_feature (653)..(653): n is a, c, g, or t
ccagtaaacagcattttattttatgacactctgtgttaatacaataaatatacaaaacttccaacccactgaaacatgcaacattagagggacacatggagggcatttctgtagaaccatgacagtcaccatgatggcagcgcagtattagttactgacaaaatatacaaacatctctagataaataatccaagtcccaaattacaaatcactgagtaatgactttccggtgttcaaactttagtttgaaataaaattgccataatttaatattacaaaatgataaatgacacggatgactgctgtgtgaagaccattttatgactatgatttcatgactgtgattttagtactaaatatagaacacttaacaaatgccaatcttttgctgagtgaaaatttaacaatttactgagagaaaagtaaatataagaatttaaagttcctttcatacttgatcatactataagcattgccatcatttcaatgcacatatatttttaaaaaacaattttctctctcaaactcatattaaataactggattttaaaacattttccccatccacacaaaaaaagatatgtgggttctaattattctttgctatttaataatgctacctttgaagatttctacataatataaacattccnattctgaagcaaagtatttcagcatttttcaaaagtctctaatatatcttttgtttgtagtgtacaggaaaaaatggacttgggatataagttaatggtgaatataggtgcacttgctgtattttgtggttaatgttttcgcatgtatgccaatccacactcaataaagcaccctgatgaaatagatttcccatgagactacggtctctgagtaacaactgcctccg

SEQ ID NO: 9084 - DNA, 798 bp, Homo Sapiens
  misc_feature (702)..(754): n is a, c, g, or t
ccaaacaagtagcagctgtagtataggaaacggtgcctctaaatcagaaagtccaggtacaggtagttttcaaacttacagtgaagatttcgctcacactcatcatacttttctaaaggtttaaatagcctcactaggagtcgagcttatgacattctctaccaatcctggtggttatcatgaaccagtacactcattaactattgcaaaggcaatttgtcagcacagtgaaaagacccaaggcgggtctgtaggcggaggtgagaggggaacaaaatatccaacgtgccaggataagaattagaactgtatgaaattgataaaccagaaaatccaagtttcataagataattaggagtactaaatatcctgagtatcttaaatctccaacattaaaatgtgctttagtacacataaagtgtctggaaggatacacgagaaattggtaaccatggctaatatatggggaagaatcttaagtgttccgggctggggcagtattactttcttaagtatttttggacttcttgaattacgtatcatgtcaaatatctgatatattcaaagaaatataattgtattgcatctcataaaacatatgggttgcgaagaactaccttaatttaaaaaattctgaattatttattagacatggggcctcactatgtttcccagactggccctgaatttctggcctcaatnnnnnnnnnnnnnnnnnnnnnnnnnnnnnnnnnnnnnnnnnnnnnnnnnnnnnctccctagtagatttttattttccccatctattgctagagatat

SEQ ID NO: 9085 - DNA, 307 bp, Homo Sapiens
  misc_feature (259)..(267): n is a, c, g, or t
aacttcaatccgctataataaatatgttagctccatgttttcttaagttttctaccagatttttgtctttgtatagtgaacaaactgttaagaacttttttatgagaaatattttagtatgactatattgcatagagttaggctgatggttcagtgttcagtagattagataccctcattgtttatttccatattgactggttctagctagagctgaaattaggcaaagaatatcttgaactcattttgctatacaggnnnnnnnnncgtgcttccttagctcatttggaaagagattgggattacc

SEQ ID NO: 9086 - DNA, 752 bp, Homo Sapiens
  misc_feature (658)..(672): n is a, c, g, or t
tcgctggtatatgctttctagtcagtgaacatgttgtgctccaacactagagttgagtagttggaacagagatggggtatcctgaaaacctaagctgttactgttgggccctgtacagaaaaagtgggccgactccggctctagccacttaaggtgtttttagcctagggtgggttgggtgaattgtttagtcctgtgatctgaaatcactctggctgtattgtggaagttagatttcatggttgggattggtttcagagcgaatatttagaaaggtttttatagcagtccaggtgaaagataaagagcatggagaagttaaaaaggagagaactgattaacaatatttaggagataaaattgaaaagattttaataggtgatgagatgtgagtgaaggggaaagagtatgagtgtaggatggcttccatatttttatctacaagtacattcttatcaacatataaatatatttattcaaaaatattcactgaatatctctggtaagctggagtttactagaatctggagtttcgtatggagtgtccaggctagagataataaacttggaaatcatcagaatataaattgtattttgcagccataggcaggatgaggtcaccaggaaaatcattgtagatgaagagttgcccatctcnnnnnnnnnnnnnnngaataatttgctgagagtgattatgaaggtatgggaaatttgtgaagagtaagagaaattatttaacttctttcaagagt

SEQ ID NO: 9087 - DNA, 494 bp, Homo Sapiens
acgggacgtgatcgtctatagtcagggagaatgtaatcttccaaacatcagtaaataaggatggtccagaaattatgatgatgcgtatttcttcatgcacattagtaacttcactaaccacaatttttagctgatttgctaggatttttctttaaacatatggaggcaaaaggttttaagaatagtgtcaggggcattatttaatcagtgttagttctgacaggtgaacaacctgagttggtctctgcagatagtacctatgaaacattaaggtcagattgattcagctacctggtgtgtaagataatgcccaatttatagtttcctttttattttttctggtacttctacaaatataaccctgagcatagaaataccctcattattttaatgggacatcctatttctaccatgcaatttgagcttgatctgagacatttctgtgaagtgtgaaagtacagttaatcattcttaaatgttctttttatgcacaa

SEQ ID NO: 9088 - DNA, 184 bp, Homo Sapiens
  misc_feature (103)..(103): n is a, c, g, or t
tgctgctctgaggatcccggtagagtcagatgtccaaagagaatcagaacctctgagagaaaaggttacccagcttttgcctcaaaatgttcacatgtcacanactcaataagcaatgccccatgaaagggggacccctctaacaaggtagtacactgaattggtgtgggtcacgaacataagt

SEQ ID NO: 9089 - DNA, 732 bp, Homo Sapiens
  misc_feature (106)..(139): n is a, c, g, or t
tgtgctgtctagaggtcccttatgtctgacccaccaattggcttactcctcgtcctctgagtcagctaaaatctcctcaatgctgtcacctttgccctgggcgggnnnnnnnnnnnnnnnnnnnnnnnnnnnnnnnnnnacggcagcctggctcagggctcggtgcctcttggcccgggcctcagctttccggatgttgaccaggactctgtggtactcctcgggcaacagccttttcaccagctcaaatccaaacttgcggatgaacttggtgaacaggttccgaagcttcatgcggaagtgccgccgcatgtcatctgaaagcttcccaatggcttccatcaccagctgcacatgtttggccaggtgcgccacgtccatgacagtcactgccaccttgatgaagcccagtgcagacttgaccacgtcacgggtgcgggaggccagaagcaggcacacattctccagcagctgctccactgtactggtccccatcagacctttaaactcgaaaaggaggtgggtcagggccaggatgctgcagctgaccatggtcaccgcgcccaccaggccagggtagatcaggacgaggtagcactgcagggcctcttcctggttcgagccaaaccttaggaaacgcatggcccatctccacgagcagtgcaaaagcgttcttccgtgcgcccaccgacacctcttggtgcacaggatcacctcgagcaggaaacagca

SEQ ID NO: 9090 - DNA, 285 bp, Homo Sapiens
cttatgttctgacccaccaatggaagcgtaattgagatctgagattcctttaatcagaagcacgtgcgtcccacagtgtgctcttcaagccccaaaggcacgcctctaggactgcgtcccttagagcgaggctcgggctcttggtaaaaaagcatttgcttgattttatttaaacaatggtgaatcttcaaggtgccagtctacatgcccaacagtcctccaggcttcaaggccacagtcaccgtcactcagagactgcctcatttggcaagagagaaaaacagt

SEQ ID NO: 9091 - DNA, 272 bp, Homo Sapiens
cgctcgctacccctttaacacttgaaaagggtgaaatcattgcttgaaatcgctaagcaggacatgcagtcccagatggaggggggaattcgggagctggttagtaaaatgagtatttggcactttgcagaccttgagaggtgcagaaagagacaccgaggggttcaccaccagagccaccattgtcagagaggcgtccagctgtgtccacctgggactctgccttcagggcttcttgcctggctgggagctgcacaggcagactcctggga

SEQ ID NO: 9092 - DNA, 422 bp, Homo Sapiens
  misc_feature (206)..(257): n is a, c, g, or t
gattagtaatatgattcatagttatataaaagaaatcgaagatctcagggcaaaattattagaaagtgaagcagtgaatgagaaccttctgaaaaaactttgacaagagccacaagcaagagcgctcatatttcagcggatcatcaactttttctcctaccatactatcctcagacaaagaaaccattgaaattatagacctagcnnnnnnnnnnnnnnnnnnnnnnnnnnnnnnnnnnnnnnnnnnnnnnnnnnnngtggctggtaaagaggataatacagacactgaccaagagaagaaagaagaaaagggtgtttcggaaagagaaaacaatgaattagaagtggaagaaagtcaagaagtgagtgatcatgaggatgaagaagaggaggagaggaggaggaagatacatgatacggta

SEQ ID NO: 9093 - DNA, 136 bp, Homo Sapiens
gtgtggatatcaatgaatgtcttctagaacccagaaaatgtgcaccaggtacctgtcaaaacttggatgggtcctacaagatgcatttgcccacctgatacagtcttcaaaatgagaagtgtttaaaggatgggtg

SEQ ID NO: 9094 - DNA, 188 bp, Homo Sapiens
cgcttataacgggttggtggtaggttagacacagtatctgtcctgtccccacatatgtgccctaacctaccaccaacccgtttattagcagagactgagctatgggctcagcccactccagctaaaaatgtgaagaaaacgtaagtggccaagacaagaatgatcaaataagtgtttaaagggatgca

SEQ ID NO: 9095 - DNA, 261 bp, Homo Sapiens
aaccaggtttggctggtggagcgggaacccaacaggcactgggagctaaggccagttttctttcaatccatgaactagcttaaaacagaattctgcatctcgagggtttttcatgagttgggtactcttctaggcatttcctttgtgcattacctccttgaatttttgtatcctcctgtcttggttgaattttctaattcccatgtcacatgtgagaaattgagataccaagtgtttaaagagatacagtggtgccgactc

SEQ ID NO: 9096 - DNA, 416 bp, Homo Sapiens
caataggcaccatgcccaggtttgcttctaacaattataagaaacccaagccagttaaaggagcagtgtgctgatctagggctgtagggcaaaaaccactctggcagccaccctgcccctccatctccccctctgccagacagtgggttgaacacacatgtacacctgaggaggagggtctgacgagggctgcctcagagtcagaggcagcaggactagctctgtatgttcgacctcatgtctggcccatcttgagtcccaggctcatacaaaatcacctgtgttcagatacagattcaactcagtatttaatgagccaagcactacttgaagcatcttgacagtccttctcttcacataagccccgacaatcacatctgcaaggtacgtatcaagtccctacgttccgagacagc

SEQ ID NO: 9097 - DNA, 425 bp, Homo Sapiens
tttcagcaaatgtggatcagaaaattaaagtatgtgacaagatcaggtcaccttgaatttccacacaatctcaagacactgaatagcaaaaaagtaacattacacagtaatgattaggatatttccttagactctgctggatctttggtcttaaggtaacatgtaaaagtagtgaagcctttcctttcatggccctgtgcaatgtaacggttttctgcctcctcttcagctggaagcgttagtggtagtatgggcacagaatatatgtacactggcgatgctgaccatgcctcccaggtaccctggctctgggttccttgacctagggaacaagattggatgaggcagatctttgagcccatgtgactatagaatttgctgatgatataattgaacaataacaatggatagggttccgcggggat

SEQ ID NO: 9098 - DNA, 204 bp, Homo Sapiens
gaattgtcaaaataaacaacagaattgaccaaactgaggaaagaatcccagagctcaaagaccagctctccaaaataactcagacaaaaataaagaaaataaagaatgaacacctctgagaaatatgggatatgtagagaccaaatatacaactcattggtatacgcgtgaaagactagggttcgacggggaacctctaagatg

SEQ ID NO: 9099 - DNA, 681 bp, Homo Sapiens
tggatcctatcaggcgtcgatattccctacccttctgtgcattgtgttgttgattaaatgcagggagcagaggtgttgagtcctggtgccccaagctggtgcggagtccacgggaagttgaggctgacctggtgcctcctgctgtgtggcggccttctccatccctcagaccacccctgtctcctcccagccccatccagggtacaaatttccagccctggaactagtctcagtagaccaatagacagtgatgttgagtatttgaggggagccccaagagaggagaaaaagctctgagtattgatgggggtaaataaccaaaatcacttatcagtggcctgcgtcaccagaaaatgtcaaagttacctgaagcagcaaagaggctcttgctccggcccctcccttccttctcagctccatttgttgccatatatgcgttgactggaactgcgactgacatcttgggaccttagggtcagtccacagcgtggtagagactccagcttggcccagcattgctgagctgctgaactcgcaccaacagtcttgttggagggaaataatctcccgtttgttcagtccagttatttgacagtgtggttacttgcaccccaagcatttctaactggcacttccatctaatagacctcagggtaacatggtggtgagatagggtaccca

SEQ ID NO: 9100 - DNA, 888 bp, Homo Sapiens
ggggcagtccctctgcaccccagagtgaggaggacgcaggggtcagaggtggctacagggcaggcagaggaggcacctgtagggggtggtgggctggtggcccaggagaagtcaggaagggagcccagctggtgacaagagagcccagaggtgcctggggctgagtgtgagagcccggaagatttcagccatgcctcacagctccgacagcagtgactccagcttcagccgctctcctccccctggcaaacaggactcatctgatgatgtgagaagagttcagaggagggagaaaaatcgtattgccgcccagaagagccgacagaggcagacacagaaggccgacaccctgcacctggagagcgaagacctggagaaacagaacgcggctctacgcaaggagatcaagcagctcacagaggaactgaagtacttcacgtcggtgctgaacagccacgagcccctgtgctcggtgctggccgccagcacgccctcgccccccgaggtggtgtacagcgcccacgcattccaccaacctcatgtcagctccccgcgcttccagccctgagcttccgatgcggggagagcagagcctccggaggggcacacagactgtggcagaactgcgccccatcccgcagaggccccctgtccacctggagacccggagacagaggcctggacaaggagtgaacacgggaactgtcaccactggaaaggcgtgaagcctcccaacagtgccgcagcgtttcgaggggcgtgtgctggaccccaccactgtgggttgcaggcccaatgcagaagagtattaagaaagatgctcaagtcccatggcacagagcaaggcgggcagggaacggttatttttctaaataaatgctttaaaag

SEQ ID NO: 9101 - DNA, 1649 bp, Homo Sapiens
  misc_feature (1588)..(1588): n is a, c, g, or t
  misc_feature (1618)..(1618): n is a, c, g, or t
atattcatagttattaattgaccctattcccaccacaaattttaaagtgctcctaagcccataacttgcctgtttgaactatggtaatgggtggaagaggagttcaccagtttcaaagatcagactctgtatcaaaagtacctttgcccttaggaagagtgagtattggagtcatcttatctattactccaaacctccctttttatttcttgagcctggcttggaccttggcattccgtttgaattccttctaactggaacatttgtgttgtatctgtaacactggcactgaaataaagaccacacggttaaagaaatctttccatattgtactttatggtgttggagtgaagccttgtagcttccatacccctatgtcagaggaggtcttacggacaccatagggtaggaatagcctttcctcagtctgagaaattggtctcttttaaaagacgaatctcatgaatattcacatcaaagacttgagctttttaaactagtgagagtgccaagtgctttttagaaaggacccatatgttatcaaactttgaaattgagttgctggaatgaagtagaggtgactctctctgtggtacacattgaatgtactatgtatgttcaagtattcaggcgccatgtcttatatactgaagaaagaaaaagtgaggcccaccttgctcttacaatgtttgcaattgttactgtattgaatacagtataatgactactatggcttcaatcttaaacctggaaacaaatatccctttttttccccttcatttcaccaagcctttacttaaaatcttcagtgtcttgtcaaatctagctctgtatcagatgctggaatattcctaacatttgacaaactggagttgaactaaaggctccacgggaaagtttctggtcttactagtgtgtatgagcaagatctgctaaaacttactccactgggtaaatggttgactgagtcaagaacaggataatatctcctgcatagttttcagtaatgtaagtgtggactagtgcatatttcagacaactgctctgcctgtgcaatgaaaaatagcctttaagggtttctttgcagactgatttcattggatggatacttaatgctgtgaaacatgataggattaacataatgttggtggatttcttgaatagaatttgtcttaacattcctctttgtgtagaggctttattttctctcttatatttgtagctaaccagctcaggtttttttatttgaactgggttgaatctctaaagaaatctgttcaagaccatgctataagacactgtcagctaatggagctgggaagggtctactctgctgacagagcatttccttgggtgatcatagtttcgaggtagagtttatgatcattcatagctttgtctagaaggagtaaaatatcatggccttaacacaaagggtgctgcgtagaatatgaattgattttggaatcagaacacaagcaccatactgaaggactagcagccaaataactgcctaggatactgatggttgtgaagactgtttcaaatgattggatctttgaaagcttcagcgtgccttagtttctangatcagaattagttttccctctcacttggnccttgcagctaaaatggagaaatgtttcaaa

SEQ ID NO: 9102 - DNA, 1192 bp, Homo Sapiens
tcgtcaggctcgacccagctgtgagcggcaagatggcggcgcccaggccgccgcctgccaggctgtcgggcgtcatggtgccggcgcccatccaagacctggaggccctgcgcgcgctcacggcgctcttcaaagagcagcggaaccgagaaacagcacccaggactatcttccaaagagttctggatatcctaaagaaatcttctcatgctgttgagcttgcctgcagagatccatcccaagtggaaaacctggcttccagtctgcagttaataacagaatgcttcaggtgtcttcgcaatgcttgcatagagtggtctgtgaaccagaattcaatcaggaacttggatacgattggtgttgctgttgatttgattcttctgtttcgtgaactgcgagtggaacaggaatctctgttgacagcttttcgctgtggcctgcagtttttaggcaacattgcctcacggaatgaagattcccagtctattgtttgggtgcatgctttcccagaactgtttttgtcttgcttaaatcatccggacaaaaaaattgttgcctactcttcaatgattttgtttacatcccttaatcatgaaagaatgaaagaactggaggagaacctcaatattgcaattgatgtcatagatgcttaccaaaaacatcctgaatcagaatggccgttcttgattattacagacctctttctgaaaagccccggaattggaacaagccatgtttcccaaactgaacaatccaaaaagagttaccctgttagaccttatgatacgccaagataaccagcgacgagcccctcaccaggcatgacatcccctgtgttttctgccggcatgcctgacctgcatttgccacccccccttcgcgggacccctggcaaagacttgtcgctcccaagctggccctccttaggcagcctcccctgattgacgacggaggaacttgggctacaaatcagggtttccccctactgtccccgcgctaaaaatgaccggtcgaaatccttgagctcgcctcccgctaatctggcagggttttccccctgcctctggctggcaaagaacccgacttgatccttctcgcggggctgcactcctttgtatccctgtccaacatataatccccccaaacattcgctcctccccactctgttgcaccgctctctaccaaattacct

SEQ ID NO: 9103 - DNA, 848 bp, Homo Sapiens
  misc_feature (161)..(161): n is a, c, g, or t
  misc_feature (803)..(803): n is a, c, g, or t
caccttctgggttggggctgtgaggtcacggggctgtgtttgaaccaccgtgcaggtcactgcaacctctgccccaccaagcttctcactgagtgttgccttacaaaagccatattgcttttctgccagcaggttacacttggctgcctctgtggcctctntagcaacacagtcagtgccagacactgtaaactccacataggtagaaggtgggaggggcacaagctgagcccgggaaatttcctccagctgaaaattggagccgttgttctgagcgttgaaggcggccagggcagctttcgcggcgtgcaccaccctggtgtcgttcagcggggccagcagggggcagtcttggcacaccttgcgcacgtcctcggctgagtctggactggaatcacattttgcgtataccacggaaaacttgccatctagtttcaacagctggaaatcacagtctccttcgacagcatgctccttcagctgcctcacgctgcatcttgccacaggggtggggtccagcacatggcaggtggtttccagggtgtctatttcaatctcaaacagctctccggagggctgctgaggccacacctttacttcatcaatctggttcaaggtgtgtttgtatccccaaggaaggttttgattgatgtagtctatagccaccagagctgcttcctcagtttctggatcatcgcagttcggttgtctataaatcagccctgggccatgtggggctgagtggcagccccagagctgagcaagacaaaggagcgggacgagggacttcatggctgccccanagaggccctggcaggcgtgcaggtggttggaggcttcgggaccaa

SEQ ID NO: 9104 - DNA, 881 bp, Homo Sapiens
  misc_feature (136)..(180): n is a, c, g, or t
agaatcctcgccttggctgcagcagcgcgctgccccactggacggcgtgccgtgatcgatcgcaggctgcgtcaggagcctcccggcgtataaataggggtggcagaacggcgccgagccgcacacagccatccannnnnnnnnnnnnnnnnnnnnnnnnnnnnnnnnnnnnnnnnnnnnaccgccgccgcgggccggggagccaccggccgccaccatgagttccttcagctacgagccgtactactcgacctcctacaagcggcgctacgtggagacgccccgggtgcacatctccagcgtgcgcagcggctacagcaccgcacgctcagcttactccagctactcggcgccggtgtcttcctcgctgtccgtgcgccgcagctactcctccagctctggatcgttgatgcccagtctggagaacctcgacctgagccaggtagccgccatcagcaacgacctcaagtccatccgcacgcaggagaaggcgcagctccaggacctcaatgaccgcttcgccagcttcatcgagcgcgtgcacgagctggagcagcagaacaaagtcctggaagccgagctgctggtgctgcgccagaagcactccgagccatcccgcttccgggcgctgtacgagcaggagatccgcgaactgcgcctggcggcggaagatgccaccaacgagaagcaggcgctccagggcgaccgcgaagggctggaggagaccctgcgcaacctgcaggcgcgctatgaaaaggaggtgctgaacccgcgaggacgccaaggggccggctgatgggaaaccgcccaaaaggcgccgaacgaggccggggcctcggcttcgggccgaaacttcgaagaaacgcaatcgaacaggcttt

SEQ ID NO: 9105 - DNA, 758 bp, Homo Sapiens
  misc_feature (427)..(427): n is a, c, g, or t
ggggaggagactccaaaaagaaagggagccaaagtgtttgggagccttgaaagggggttggataaggttatcactgtgctcaccaggagcaaaaggaagggttctgccagagacgggcccagaagactaaagcttcactataatgtgactacaactagattagtgaatccagatcaactgttgaatgaaataatgtctattcttccaaagaagcatgttgactttgtacaaaagggttatacactgaagtgtcaaacacagtcagattttgggaaagtgacaatgcaatttgaattagaagtgtgccagcttcaaaaacccgatgtggtgggtatcaggaggcagcggcttaagcgcgatgcctgggtttacaaaagattagtggaagacatcctatctagctgcaaggtataattgatggattctntccatcctgccggatgagtgtgggtgtgatacagcctacataaagactgttatgatcgctttgattttaaagttcattggaactaccaacttgtttctaaagagctatcttaagaccaatatctctttgtttttaaacaaaagatattattttgtgtatgaatctaaatcaagcccatctgtcattatgttactgtcttttttaatcatgggggtttggatattaataattggtgactttcttagattcacttccatatgtgaatgtaagctcttaactaatgtctcttcgaaatgtgtaatttctctctgaaataaaaccatttgtgcat

SEQ ID NO: 9106 - DNA, 763 bp, Homo Sapiens
  misc_feature (736)..(736): n is a, c, g, or t
gggagtcgcctccggaggaaggaagaagaggacgccgggcgcgcagctcggtgctgattatcacaactgtttggtgacctacttcactgacctgtgaggattccttcccttcaagtactggattcttgatctttctgcatcatcaagaatggaaacagactgtaatcccatggagctaagcagtatgtcaggatttgaagaaggttcagagctgaacggttttgaaggaactgacatgaaagacatgaggctcgaagctgaagcagttgtaaatgatgttctctttgctgttaacaacatgtttgtctcgaaaagcctgcggtgtgcggatgatgtggcctatatcaatgtggaaacaaaggaaagaaacagatattgcctagaactcactgaagcagggctcaaggtggtaggctatgcttttgaccaggtagatgatcatttacagactccctaccatgaaacagtctactccttgttggatacactcagccccgcctaccgagaagcatttggaaacgcactgcttcaaagactggaagctttgaaaagagatggacagtcatgactacactttttcctttcagaggggctggtgctggtacagaatgttgatacaaagcttaaaattcttgcatatggtcatagaaaatgcatcttttggttttgtgtttttatcacttgcttccaaccttagggctttgggctcagaaagattatggaataatgatttggncttaatttcctggttccagtaggggaa

SEQ ID NO: 9107 - DNA, 796 bp, Homo Sapiens
ggggaacggcttccgcagcaagctcaaggaggtgggccaggcccagttgaagactggccggcggcgactcttcgctcaggaaaaagaagtggtcaaggaagaggaggaggacaaaggcgtcctcaatgacttccacaagtgcatctataagggaaggtctgtttctctaacaactttttatcgaacagcgaggaatatcatgagcatgtgtttcagcaaggagcctgccccagccgaaatcgagcaagagtactggaggctagtggaagagaaggactgccacgtggcagtgcactgcggcaaggtggacaccaacactcacggcagtggattcccagtaggaaaatcagaacccttttcgaggcatggatggaacctcaccgtcctccccaataacacagggtccatcctgcgtcacctcggtgctgtgcctggagtgactattccctggctaaatattggcatggtcttttctacctcatgctggtctcgagaccaaaatcaccttccatacattgactacttacacactggtgctgactgcatttggtattgcattcctgctgaggaggagaacaagctggaagatgtggtccacaccctgctgcaagccaatggcaccccagggctgcagatgctggaaagcaacgtcatgatcctcccccggaggtggctgtgcaaagaggggatcaaggtgcacaggaccgtgcagcagagtggccagtttgtcgtctgcttcccgggatcctttgtgtccaaagtgtgctgtgggtacagcgtgtctgaaaccgtgcac

SEQ ID NO: 9108 - DNA, 1207 bp, Homo Sapiens
ggggttgctgtcgcgccgctgctggttgctgtccctggacccctaccatggaggagaccatcaaagatccccccacatcagctgtcttgctggatcactgtcatttctctcaggtcatctttaacagtgtggagaagttctacatccctggaggggacgtcacatgtcattataccttcacccagcatttcatccctcgtcgaaaggattggattggcatctttagagtggggtggaagacaacccgtgagtattacaccttcatgtgggttactttgcccattgacctaaacaacaaatcagctaaacagcaggaagtccaattcaaagcttactacctgcccaaggatgatgagtattaccagttctgctatgtggatgaggatggtgtggtccggggagcaagtattcctttccaattccgtccagaaaatgaggaagacatcctggttgttaccactcagggagaggtggaagagattgagcagcacaacaaggagctttgcaaagaaaaccaggagctgaaggacagctgtatcagcctccagaagcagaactcagacatgcaggctgagccccaaaagaagcaggaggagctagaaaccctacagagcatcaataagaagttggaactgaaagtgaaagaacagaaggactatttgggagacagagctgctttcaactgaaagaacaaaaccagaagatggtcctcagaaaaatgagaagatgggaatcagagtggatcagcttcaggcccagctgtcaactcaagagaaagaaatggagaagcttgttcagggagatcaagataagacagagcagttagagcagctgaaaaaggaaaatgaccacctctttctcagtttaactgaacagaggaaggaccagaagaagctcgagcagacagtggagcaaatgaagcagaatgaaactactgcaatgaagaaacaacaggaattaatggatgaaaactttgacctgtcaaaaagactgagtgagaacgaaattatatgtaatgctctgcagagacagaaagagagattggaaggagaaaatgaaaaggatgttctgtaatatttcgttcaacaacctattctgcaccatatgtggtactaaggtcttgcggggagaggcaggacacaggctctgcttgctctcaaggacctcagcctatcctgaagatacggcctatgatggataggtcaca

SEQ ID NO: 9109 - DNA, 789 bp, Homo Sapiens
  misc_feature (175)..(311): n is a, c, g, or t
tgtcggtaaccccttatccttaaaaaagaagttgaatgaatgcctgattgaatgaattgatatattatagaagagtacctggaaaagtcagaagacacattcgacccacacccagtacacacatacaccgtactcctcaaggagttgaccatctagacatttagccatgtacctnnnnnnnnnnnnnnnnnnnnnnnnnnnnnnnnnnnnnnnnnnnnnnnnnnnnnnnnnnnnnnnnnnnnnnnnnnnnnnnnnnnnnnnnnnnnnnnnnnnnnnnnnnnnnnnnnnnnnnnnnnnnnnnnnnnnnnnnnttctgtgcactcagtgtgtatcagctattattgggatgatggttgtcatgggggcagagtagaagcctctaggtagtgctgggagagacagcatgcagtgtgagtcgagaatggccctgggggatgctatgggcatacaaggagggcatcaccagttgatgggtggctggtgtggtctgtatcaggtctccaaggaggagggatgatgcgggtgtatccttggggccaggggcaacatgaggtgaacaagaaggagactggccttgacagatataggtccagtttgtagcctctcaggagatgtggccaccccggggacaggcggagaattgagatggctgcttctctcatgagttgtctggggtggtaacagcctggaaccatttgatacctcgctggggttcagggtggcatgcagggaagagtcggcagatgtagatcagtttgaatgtctctgtagctgaatgaggcacagatg

SEQ ID NO: 9110 - DNA, 402 bp, Homo Sapiens
  misc_feature (156)..(156): n is a, c, g, or t
  misc_feature (176)..(176): n is a, c, g, or t
  misc_feature (194)..(194): n is a, c, g, or t
aaccttggtaaaattaaattattttctgacagagtatataaggttgttaatttctgtgatattcaaaaggttttttcataagtttttaatctcaaggaaatgtgatatgtagtaaaaatcaacagctgtcaaatgtaaggtggctctaaaaaattntgtgtattgtacaggtggtngtggctaccaaactgcgntaatagctcagatgaggaattagaatcaatcattggagtttgctatgtgaatgtcactctgtgatttgctaagagcgcattaggtaggctgataagagataaggcctaattaaagggaaagcaagaacaagtgagaagagagaaactggagatagaagtttagatagtaactatagaggaattttgttgtaaaagatagggtcaacca

SEQ ID NO: 9111 - DNA, 419 bp, Homo Sapiens
agagtgatcccctgtgggtacccctatcaagtctggctaatttttgtatttttggtataggcaggatttcaccatgttgcccatgctgtagaagctcctattttaatagcagctattctcaggaactggttcaggttgcaaaggaagcagaacatcttttgtgatgatgctgtttgctattacaaatttactaaaaaatttgatggcctgaaggggaaacccagaaaagttccaccattttaaaaatggagaaccttcctaaagttaatgaccttagaatcagattcaagttctgaattatctacaatagaatgcagcacctccaaattgttacaagcttcccacaatgattctccaatgattcagtcttgaatagggttgatttggtttttgaggcattcagctttcttggcatcttt

SEQ ID NO: 9112 - DNA, 271 bp, Homo Sapiens
tgggtgtaccctatctccttagagttcttccttgatttatcttccccccagtctaaagtgacagtcacagttgattctgttttatttctccatacagacacacatcactgattaattaaaaatctataatgccatctttctctctcactggaatattatgtgctcatgaagaagctccttgtctatattgtacctgatcgtctgcgctgcataacagattacctgtctcatagaaggtgcacaataactattttgttgcgtgaataaacaa

SEQ ID NO: 9113 - DNA, 466 bp, Homo Sapiens
acttggtggaaattatgataaatatttataatggctgtgtgaccatattgagcaattaaggagaagtatttaaacaaaacaagtgatggttgatatatttatgtatgacaaactgttttactctttatttccccatcatgttccctttttaaattttaagaggaatataagagtttttttcttcatttcatctcctgttttggaataacactgtatttcactaagtttcttcagagggagaacctttagatcaaaggttaaatttggagagcactgttcgtgatatttgttaagtacttaataaatatgcactgaatgagtatgcatgacactggttgaatgccaacacctgggtataattttggaaaccagaactcagttcatgctttatgtagtctccttcctttttaatcttccataggttgagtacccttatccaaaatgatagggttcaccaggtccgagc

SEQ ID NO: 9114 - DNA, 426 bp, Homo Sapiens
ggtataccctatcctggatatatgagttgagatctttaaagaagatcaagtcaccattatgactaggtgaaaaacagacaaaaggctttccaagcaaaagcatggacattggaagtagtatgatgagtttggggaactacaaatagtgctctaagattaggttggaaatgtacggccaggaatagaactttatatggtatgccatgggatttggatttcattataagtgtattcagaaagggatgctatcagatgatcactggcagtaatgtggggtgtgtacaggaatgttttcaaatctgaacagggagatgagtaagaaggatactgtggtggccaagatgagaaatgatgtagggctgaaaggagtgggagtggcgaagaggggaataacctcttaagaagtcataaaaatttagacatgct

SEQ ID NO: 9115 - DNA, 427 bp, Homo Sapiens
  misc_feature (62)..(105): n is a, c, g, or t
caagaactcatgaaagtttattatggaaccagaaatacactgacagtagcctgagctgttannnnnnnnnnnnnnnnnnnnnnnnnnnnnnnnnnnnnnnnnnnnctttagcatttcttgtagaacacgtctggtgtggataaaatcactcagcttttgtttgtctgggaaagttgttatttctctctcctttgtgtttgaagaatattttcaccagatatagtattctagggtaaaaggatttttaccatcaacactttaaatatatcatgccactctcccctggcctgcaaggtttcaactgaaaagtgtcctgccagaagtattggagctccatcgtatattatttgtttattttctcttgctgcttttagaatcatttctttatccttgacctttgggaatttattaaatgtcttgatgtatt

SEQ ID NO: 9116 - DNA, 386 bp, Homo Sapiens
  misc_feature (117)..(252): n is a, c, g, or t
ttcccccgtcggtacccctatcagaccatctaatatggcttcattttcatcataccgtgctatcattaccctgctgcattttcttcagtgcattactcactctctgaaatccttatnnnnnnnnnnnnnnnnnnnnnnnnnnnnnnnnnnnnnnnnnnnnnnnnnnnnnnnnnnnnnnnnnnnnnnnnnnnnnnnnnnnnnnnnnnnnnnnnnnnnnnnnnnnnnnnnnnnnnnnnnnnnnnnnnnnnnnnncaatactctgacaggctttgtagcagatgctacatgtaggggaaggggagaatgtttaaaaagcaaaacacgggatacctactctcaagggcctgcacttgtattatgccataatattaataattatacagtgg

SEQ ID NO: 9117 - DNA, 1139 bp, Homo Sapiens
ggaaccaacgaacaactcgagagtgcgagaaaaatagtacatgattacaggcaaggaattgttcctcctggtcttacagaaaatgaattgtggagagcaaagtacatctatgattcagcttttcatcctgacactggtgagaagatgattttgataggaagaatgtcagcccaggttcccatgaacatgaccatcacaggttgtatgatgacgttttacaggactacgccggctgtgctgttctggcagtggattaaccagtccttcaatgccgtcgtcaattacaccaacagaagtggagatgcacccctcactgtcaatgagttgggaacagcttacgtttctgcaacaactggtgccgtagcaacagctctaggactcaatgcattgaccaagcatgtctcaccactgataggacgttttgttccctttgctgccgtagctgctgctaatagcattaatattccattaatgaggcaaagggaactcaaagttggcattcccgtcacggatgagaatgggaaccgcttgggggagtcggcgaacgctgcgaaacaagccatcacgcaagttgtcgtgtccaggattctcatggcagcccctggcatggccatccctccattcattatgaacactttggaaaagaaagccttttttgaagaggttcccatggatgagtgcacccattcaagttgggttagttggcttctgtttggtgtttgctacaccccctgtgttgtgccctgtttcctcagaaaagttccatgtctgtgacaagcttggaggccgagttgcaagctaagatccaagagagccatcctgaattgcgacgcgtgtacttcaataagggattgtaaagcagggaggaaacctctgcagctcattctgccactgcaaagctggtgtagccatgctggtgagaaaaatcctgttcaacctgggttctcccagttacggaaaccttttaaagatccacattagccttttagaataaagctgctactttaacagagcacctggcgtgggccaagtgcctgatactcccttacactgaatcatgttatgatttatagaaatacctttcctgtagcttttatagtcattgtttttcaaagacgatataccagccctcacccagg

SEQ ID NO: 9118 - DNA, 825 bp, Homo Sapiens
  misc_feature (542)..(542): n is a, c, g, or t
gcttccccgtgcctccctctctgctccactcccacattatagtcctttcctaacacggtcggccgggtgctttgtgtcagtgctgcagcactggggagccaggcgaggggggcttgggggcatggggccggaaagcaggcagaagcccgtcctgggtggtgctggcccagttggtgggacccctgtccacacccaccctatttatttccgttgtctctctgctgtgtcgcccaacacttcccagggtgctgctgccacccgccccagccagccacctgctcctgacagccagcagctgtgtatttgacaaagtcattggtatatttttacttactggattctccttgcactttacctgttcttttccagagctgacagcacgggctccggcgcagtgtgcctggcttggcttcccttccccatggctgggggctggggtaggactcacccattctaatttattttgtcttttggcttctcagtagctaaggggaaggctgatgtcaggagagggagagggggctgaggaggtagtgctgtangcccagggggtcagggaaagggaggggggcatgtgagggatggaaatgacctcctggcaccaggctcacccacccaaggccccctgccccagcactgaatcccagcgctgccctgaggcccccagccactccctccagcagcctggttcaccacacaaactctgcctggaccccattgtctgtctgcttcccacctgcccctccccaccccctgcccctcgggcaccagcctgcatatgtgttcacttttattttaataaactggtgtggaaaaagcaaaaaa

SEQ ID NO: 9119 - DNA, 1557 bp, Homo Sapiens
  misc_feature (12)..(12): n is a, c, g, or t
  misc_feature (63)..(63): n is a, c, g, or t
  misc_feature (66)..(67): n is a, c, g, or t
  misc_feature (98)..(98): n is a, c, g, or t
  misc_feature (144)..(144): n is a, c, g, or t
  misc_feature (182)..(182): n is a, c, g, or t
  misc_feature (244)..(245): n is a, c, g, or t
  misc_feature (327)..(328): n is a, c, g, or t
  misc_feature (399)..(399): n is a, c, g, or t
  misc_feature (402)..(402): n is a, c, g, or t
  misc_feature (434)..(434): n is a, c, g, or t
  misc_feature (504)..(504): n is a, c, g, or t
  misc_feature (531)..(531): n is a, c, g, or t
  misc_feature (543)..(543): n is a, c, g, or t
  misc_feature (556)..(556): n is a, c, g, or t
  misc_feature (666)..(666): n is a, c, g, or t
  misc_feature (669)..(669): n is a, c, g, or t
  misc_feature (804)..(804): n is a, c, g, or t
cgtctcgtcagntacgccccgcctaccgctgccgagcggcacgatactcgtagctcgatctantanntctcgagcggcgcgcaggcgaaaccctccgnccatcatcgtcccggaaccgccgacgtcacgtgcatcgacattgtnccagcggccatgatcagcaccgcgagggccgccgctgntcttcctctcaccaccgagtatctgcggctcatctctctactcctcacttacgggctgcggnnttgctcgtgcgtccgccgccgtccgtcttcctcacacatatatcaccactcggaagtgactcgagaacggcgcgctggacanngcaccatgactgctgcgtcccaccgtctacgagcgccgtgcgtgacatgtgacgacctatgtaaagacacntanctcgacgctacgcggccgcatctagcactgcntagctcccgtccgtcagcttgggctgccctcgaaagacatcgtcgcgggctggttctttcttcgctgcancgtcttcagtggcgtgtcgcgtgcatncgcgctcggctncaccacatccacnccataccgacgcgtgacactattcggacatcgccttctcacgtattgtgtgtcatgagagctgagtcagacagttgatggtggtgtgacgagattgagagagttacatcncgnccgtgcggttctccggtcttcggggcaaacatatttgcgtgatgccgcgtgccgtcacatcttgtttcttctcttaccatgcgcggtggcgtccgccctatcgctcagcggggccgcggggtacacttacgaganatacccgtgctgggacgcacgtctttacggcgggaggtgcccgcctcccatcagctatctactataattttattcaacgtcggtggagtaggggataccgcgcctcacctcgccgcgggccgcaccgcggcgccgtgcgcttccagccgtcttcccgcgtgctcactgcctctccactaccccctgcacccacgtcgatcgcacgttatccgcggaacgtgtcttccgccataccggggctctgagcgaacccgcggcgggtaattagggcacatcagtgattctcaaagccggccgggtggggccgtgagacgcagacagcggattgcgtcactcccgacatacaccatgttgaggccaaagaagccagtcagccaccccttgtctgctacgtgtgagacacatcagcagttgagcctgaccccttccgcagagctcactgtgcaaaatcaccagcacaccactgcaatccactgagctcaccgcctgtccagccataatggaagtcacttgaaggttatcattgtaatagatgattttccataagtaactaataaaaatgttttctttgatgtttagacctactaacaattcagtctctccctctccatcctctcttagggagcctgtacttttaagcaaatagggaagctaatatactaaggagcacatccatttataaatacaccgtctgccttatcttcctcactacttcctggtaagtgctgtttttgtatatcctgttttctaagt

SEQ ID NO: 9120 - DNA, 1244 bp, Homo Sapiens
  misc_feature (545)..(568): n is a, c, g, or t
  misc_feature (759)..(804): n is a, c, g, or t
  misc_feature (906)..(906): n is a, c, g, or t
  misc_feature (984)..(993): n is a, c, g, or t
  misc_feature (1137)..(1174): n is a, c, g, or t
tccaagtctgtggcttctgacgagatggaaatgcactttataatgtgtttgagcaaacctcgcctctcctacaacgatgatgtgctgactaaagacgcgggtgagtgtgtgatctgcctggaggagctgctgcagggggacacgatagccaggctgccctgcctgtgcatctatcacaaaagctgcatagactcgtggtttgaagtgaacagatcttgtccggaacaccctgcggactgacctgcgggcttgcttgctgactcctctcaaagggacagagcgcccctgctccagggaggaggctcaccggaccctggggcagagctgagcttgggacaccagcgggaacagggcaccccttctgcactgacttccagatcatggttctcccttcctccctgaggacaccaaattggatgagagcaagtttgagagaagaatgaatcaactgctatccttcccctcacccctcagcccaggagggaaagggcattttctttttcatctttgaaaggcattgtgggtctgtctttaaagtgtttacnnnnnnnnnnnnnnnnnnnnnnnngtctagtgtcgactggtgttttccctcgtgatgtttacagcttgctgtttgctgcccagccataacccactcagtgacagacgaacacagctaaggcctcgctgccagccttctgacggcgggcgagcacacggtctcttcccctgccccaactggccctctccaccaccaacttctctactttgggtttnnnnnnnnnnnnnnnnnnnnnnnnnnnnnnnnnnnnnnnnnnnnnnctccccttgagaccctaatatcttgacttcattgccaaaaaacaacccattgagaactttcttcctactgatcccatctcttttcccttctttcctcctggntccggtcagttcagaggatttaacaatcacaagtgtcctgcaaaaatggctgaacattattcttaggccctcgtggannnnnnnnnncagaaaacttaaacaaaaaaagacttactaagaaatatgtacagctacccctgttttcaggcactatgtttgagaacattttagccattgatgttcacacgtggcatcagcccatgcaagataggtttctgtatttatatattnnnnnnnnnnnnnnnnnnnnnnnnnnnnnnnnnnnnnngttcaaagcttgggagaaaagctttcttcattagtcaaggtgttttgatatggtattaaaatgtctaata

SEQ ID NO: 9121 - DNA, 789 bp, Homo Sapiens
gggggaagcggctcctgtcagttgttctcaggtgtttgggcttgttgttccgtatactcagtgggttcgcggccgccggcccagtgaggctgggttcgaggagctggagcgggaaactggagcttaaattctggcggcgagatggacattctgaaatcagagatccttcggaagcggcacctggtggaggacaggaacctgctggtggaaaataaaaaatatttcaagcgtagtgagctcgccaaaaaagaagaggaagcatattttgaaagatgtggctacaagatacagccaaaagaggaggaccagaaaccattaacttcatcgaatccagtgttagaacttgaactggcagaggaaaaattacctatgacgctttctaggcaagaggtcatcagaagattgagagaaagaggagaaccaatcagactatttggagagactgattatgatgcttttcaacgtttaaggaaaatagagatcctcacaccagaagttaacaagggattgaggaatgatttgaaagcagccttggataaaattgatcagcagtacctcaatgaaatccccggcggtcaggagcctggaaaggaagacacccaaaatgatctgaaaggtcctgaggaaaacccccccatttgaaaagttagaggggctttggagaatcccttagggaaaggggttgattcttaaaaaattgggacctcatcaccaaattcccggaaaaatcttcccggctggaattttaaagaatcccataacggggtatttattaaattcctgggttcc

SEQ ID NO: 9122 - DNA, 832 bp, Homo Sapiens
  misc_feature (806)..(806): n is a, c, g, or t
gggggaagttccgggagtgccaagtacccgcgtgcatacggctgccggcatggcacattacaacttcaagaaaattacggtggtgccgtccgccaaggacttcatagacctcacgttgtcgaagactcaacgaaagactccaaccgttattcataaacattaccaaatacatcgcattagacatttttacatgagaaaagtcaaatttactcaacagaattaccatgatagactttcacaaattctaacagatttccccaaattggatgatattcatccgttctatgctgatttgatgaatattctctacgacaaggatcattacaagttggctctggggcaaataaatattgccaaaaatttagtggacaatgttgctaaagattatgtgcgactgatgaagtatggcgactctctctaccgctgcaaacagctgaagcgtgcggccctgggacggatgtgcacagtgatcaagaggcagaagcagagtttggagtatttggagcaagtgcgtcagcatttatcccgtttgccaaccattgatccgaataccaggaccctgcttttgtgtgggtacccaaatgttgggaagtccagcttcatcaacaggtgaccagagcagacgtggatgtccagcccctatgcgtcaacaaccaagtctctggttggtgggcacatgaattataagtatctacgttggcagggttgtaaacactcctgggatcctggcaccaccctctggaggatagggacacccatcgagatggagggcatcactggccctgggcccacctccgtgcctgcanccctggattgggatggaattgtccgc

SEQ ID NO: 9123 - DNA, 412 bp, Homo Sapiens
  misc_feature (25)..(25): n is a, c, g, or t
  misc_feature (32)..(32): n is a, c, g, or t
  misc_feature (48)..(48): n is a, c, g, or t
  misc_feature (57)..(58): n is a, c, g, or t
  misc_feature (66)..(67): n is a, c, g, or t
  misc_feature (83)..(83): n is a, c, g, or t
  misc_feature (90)..(90): n is a, c, g, or t
  misc_feature (103)..(105): n is a, c, g, or t
  misc_feature (107)..(107): n is a, c, g, or t
  misc_feature (124)..(124): n is a, c, g, or t
  misc_feature (133)..(133): n is a, c, g, or t
  misc_feature (142)..(142): n is a, c, g, or t
  misc_feature (150)..(150): n is a, c, g, or t
  misc_feature (153)..(153): n is a, c, g, or t
  misc_feature (157)..(159): n is a, c, g, or t
  misc_feature (182)..(182): n is a, c, g, or t
  misc_feature (184)..(184): n is a, c, g, or t
  misc_feature (189)..(189): n is a, c, g, or t
  misc_feature (191)..(191): n is a, c, g, or t
  misc_feature (225)..(225): n is a, c, g, or t
  misc_feature (227)..(227): n is a, c, g, or t
  misc_feature (234)..(234): n is a, c, g, or t
  misc_feature (244)..(244): n is a, c, g, or t
  misc_feature (254)..(254): n is a, c, g, or t
  misc_feature (260)..(260): n is a, c, g, or t
  misc_feature (264)..(264): n is a, c, g, or t
  misc_feature (285)..(285): n is a, c, g, or t
  misc_feature (287)..(287): n is a, c, g, or t
ccccccttcattgtgccctcatgtngaaaagnggagctgggaccgcgncggagccannacggagcnnaaggaagaccaggggngagaagngcctcatctctcnnnanttatacgataaccccgnggaagacanagagactcntacctgcnctntttnnnccagccgcttcctctgggtcctncnagcanangcatggtctcttcacctgctgccctcagagttcnangtctctntcccctgccnctagttgctntctcgnctgntctcccatagttggttttttntntatttggggcagtgggcatgttatggggaggggagggggttcttccagcctcaggtcccagctgtctcacgttgtttattctgcgtccccttctccaataaaacaagccagttgggggtggttat

SEQ ID NO: 9124 - DNA, 403 bp, Homo Sapiens
cctggtaaaccaatgcctcccacactgaaaccaaaacataaaaaccaaacccagacaaccaaaacatattcaaagcagcagccaccgccatccggtcccctgcctggaactggctgtgaagacccaggagagacagagatgcgaaccacccaaaacacgcacacccctgcccctggtgccctgagacagacacacagcctcacgcccccaggaatgcaagtggtttcctggtgcttcccacggaggagttttggcagccagacttctggaggaattggttgtatagaagatcctagtgaccaaattcagcctactgcctcggatctctccagccgaagtctgtggactgcaagtctttgagatgcttctggctcccatcccgttgattgggttgacgtcagga

SEQ ID NO: 9125 - DNA, 385 bp, Homo Sapiens
tagaatcatgaattttatatattactgttagacaaaagccagggctgtcatcagttacttacacttactcaagatcccctattcacctagataaggaaaaaacaattcctttatgtgtcattaattgcaatcgtcactctcttgaagtgggtcccctgcttggaccctgtaaagctttgccactaacatgttacccaaggcaggagactgcatcattccctgtaggtggacctataattgctgcttccctgacccgaagttgtattctagtgcactctctctacaatggaccactatcttttccacacgttacttacctaagtccctactgacttaccccctaaggtgcttcaggaattctgtacttctaacctgcagtctctac

SEQ ID NO: 9126 - DNA, 441 bp, Homo Sapiens
agcctggccgggtaccctatcctgctctattcacaatgtctctggatatcaactccattagttgattactgatcttcaaaatatatcgacttaaaaaagaaagacaaaatgaactggcctttaatctgttaaataatacagcaaacttcagaacattgttagtgattctaacctgaaactatcttgtctaatccagagctgtccatccaaaaccctatacagttcatccatcacagctagatattctgggctgtatctagctgaacgtcagaaagctatgcacattatgcttcttaaactatgtatagaacagctttccgtgaactgtacttttagagtaagggcctcatcttatgttgacggatcttctatgaaacagcttttcaaaaaccaccactggcttcatgataggaatgttgctgtggccccttccatcccatc

SEQ ID NO: 9127 - DNA, 485 bp, Homo Sapiens
  misc_feature (167)..(215): n is a, c, g, or t
gtctaacagtaatataacagagtaatagctactactaactgagttctcctatgtgtcaagctctgtgcaagacactttacaatgtcatctgacttaattctcccctctcagagtcaggatgatcccagatttcataaaggaggaaaatgagttcacaagaattacannnnnnnnnnnnnnnnnnnnnnnnnnnnnnnnnnnnnnnnnnnnnnnnngtacgtgtgttctttctattatattaccttgactacagtaaaacactatagggtataccagatgtttttcccctaccatttctttaaaggaaaagagaatggaaaaagacaattccaaataactttcaaataaatgtataatgcgcttttaaaagattgctttcaagataaaataggatagctttcaaattattttccttttgcattctctatgtattatagaggatacatacgtatacagaaatgataggttacccagtaccgagctga

SEQ ID NO: 9128 - DNA, 370 bp, Homo Sapiens
  misc_feature (175)..(194): n is a, c, g, or t
  misc_feature (207)..(272): n is a, c, g, or t
tcactctagagtatcccctgcggaccctatcatgtgatatactctacaaaaagcctgctgagtattttgattgggattatgttgaatctagatcaatttagggtgaaaaacttttgttagagtaatcccttagtatttcacatttttaaatgctaaatggcatttttcaaagaannnnnnnnnnnnnnnnnnnngagacagagtctnnnnnnnnnnnnnnnnnnnnnnnnnnnnnnnnnnnnnnnnnnnnnnnnnnnnnnnnnnnnnnnnnnttgggtttcaaccgattctcaaactgtcctcagtcctcccaagtttctcggattacaggcatgtgccaccatgcccggctaattttttaaactattta

SEQ ID NO: 9129 - DNA, 165 bp, Homo Sapiens
ctcggccctggttgaccctatcatgagatactcattataggaaattcagcattatatagactagtaaaagatatgaagaacagagtgaaaaatgtttgttaattcattagccactgttagtattttagatttggtctctcagattttttatataggtattttttt

SEQ ID NO: 9130 - DNA, 393 bp, Homo Sapiens
  misc_feature (15)..(15): n is a, c, g, or t
ctgcggaaccctatncactcacagaagcccaagaagaggcatgcatgctttctgtcccatcaacctgtctgccacttggtcaaatccacggtctatgcaacataaattaatacaactataagcttctgcccaggaattctgaacgtagagtgagtaagtggaaggcaaagagatagtcggaattcacttttggtgctgtgtgtccccacatcctgcagtggtccccagtggcaggggtgatacatactacaattgccccatcctgagaagactgtcacagcatcaaaggcttcaaagataacttggtctctgcacatatcccagactgctcctcaagctttatgtgtattcattgagcccccataccctgccaggaaatctctttaatcttaa

SEQ ID NO: 9131 - DNA, 744 bp, Homo Sapiens
tggcgtgggtaccagcggagtccgcagtggaagagttgatgcctcggctattgccggtagagccttgcgacttgacggaaggtttcgatccctcggtacccccgaggacgcctcaggaatacctgaggcgggtccagatcgaagcagctcaatgtccacatgttgtggtagctcaaattgacccaaagaagttgaaaaggaagcaaagtgtgaatatttctctttcaggatgccaacccgcccctgaaggttattccccaacacttcaatggcaacagcaacaagtggcacagttttcaactgttcgacagaatgtgaacaaacatagaagtcactggaaatcacaacagttggatagtaatgtgacaatgccaaaatctgaagatgaagaaggctggaagaaattttgtctgggtgaaaagttatgtgctgacggggctgttggaccagccacaaatgaaagtcctggaatagattatgtacaaattggttttcctcccttgcttagtattgttagcagaatgaatcaggcaacagtaactagtgtcttggaatatctgagtaattggtttggagaaagagactttactccagaattgggaagatggctttatgctttattggcttgtcttgaaaagcctttgttacctgaggctcattcactgattcggcagcttgcaagaaggtgctctgaagtgaggctcattagtggatagccaaagatgatgatagggtaacagggca

SEQ ID NO: 9132 - DNA, 232 bp, Homo Sapiens
tcgactgttaacctatcttccctacttcacctctatttgttagaattcccgatagctccaccctggacactctttcttctcattcttctattagatctctcttatcggcattcaaaggcctagcaaccctagtaacctttaaaaacaaagcaaaagttccatgacctcgataactctcttcagttaccatcctttctcttgcctatctttcccagccaaatgcctggaaaag

SEQ ID NO: 9133 - DNA, 429 bp, Homo Sapiens
ggtgacccctatctgacagatttgtggtttgtgtcagtcagcttgcactcagtcgtgatcttttagcaagtcagaatgaagatttggtgagtatgaaaaaattctataacaaatagtctgcttaaatgctgagttactgtaaaaaatagaaaacaagaattgtctgctagttgtcattcagctgatgagcacccaacgcatgtattaagggaacaagaagccctacctgtattacgtggtaatatcaactaattcgtagtattgttcttcttttcctcaagaccattttaatcagcagtaccttttccatatcaactgtaaatgagaaagcaacacatcacaaaagctgtgatggtgcttatgatagtgtttaaatgaaataaagaaaagtctttaagtgaaatgaagcaaaatccacatgtttccact

SEQ ID NO: 9134 - DNA, 1084 bp, Homo Sapiens
  misc_feature (928)..(928): n is a, c, g, or t
  misc_feature (947)..(947): n is a, c, g, or t
ggaattcccgggatccccggccaaccatggcgtcctccgcggccggctgcgtggtgatcgttggcagtggagtcattgggcgaagctgggccatgctgtttgccagtggaggcttccaggtgaaactctatgacattgagcaacagcagataaggaacgccctggaaaacatcagaaaggagatgaagttgctggagcaggcaggttctctgaaaggctccctgagtgtggaagagcagctgtcactcatcagtggttgtcccaatatccaagaagcagtagagggtgccatgcacattcaggaatgtgttccagaagatctagaactgaagaagaagatttttgctcagttagattccatcattgatgatcgagtgatcttaagcagttccacttcttgtctcatgccttccaagttgtttgctggcttggtccatgtgaagcaatgcatcgtggctcatcctgtgaatccgccatactacatcccgctggttgagctggtcccccacccggagacggcccctacgacagtggacagaacccacgccctgatgaagaagattggacagtgccccatgcgagtccagaaggaggtggccggcttcgttctgaaccgcctgcaatatgcaatcatcagcgaggcctggcggctagtggaggaaggaatcgtgtctcctagtgacctggaccttgtcatgtcagaagggttgggcatgcggtatgcattcattggacccctggaaaccatgcatctcaatgcagaaggtatgttaagctactgcgacagatacagcgaaggcataaaacatgtcctacagacttttggacccattccagagttttctagggcccactggctgaaaaggttaacccaggacatgtggcatgaaaggtccctgatgaccccggagccacttaacttgcacgnaggccaatggaaggggacnaagtggcctcatgaagattcgcccaaggttgtaggagtccaagtggcagcccccagttggaattttcctggtaaatggcagccttcccacctccttcctccattgggagaggcccttatattgggggaaccactggc

SEQ ID NO: 9135 - DNA, 979 bp, Homo Sapiens
cctgagcggttgccgtggtgtcacccacgtccaccgccatcgtcgtggggggagggtgctccagccaaggggggtccttgtttgttctgctaaagacgcccgccggcctcagagtgaccgtccggacgggtcatattgtatccgccgcttcaggacggatggagctcgagggcacaaaaagctgtcctttcaccttcttgtgcccacaaggggggtttttcccccccagcacggttaaatcgcccgggccctccttttgttttttgggccagaaagataccaacggcctttctcgtaacactttcttagaaagccatcccccaggattgcggaccccccaagcgaacacaagttgcctcaaagttaaacgtcatggggtccctttattttttgatttcaaggggttctcaggggttcggggtctggggtcaagcccccagttaggagatttccccgcccgccaaaatttgatctgaatgccaaggaatttcattggtccaggggaaaacccccggatccatagttatggattccttttaaatacataaaagatgaatctggtacactacgtgacagtggtgttaacactggctgctgaggataccaaatctacataacaatgagtggacagtatacggagggcacgactgctggcttccaaagactctgtgaactagatcccacatacacggggcacaactgcaatctggacagccctgaagtaaagttcctggaaaaggcagtacggcagggagatctgttgagttgcaagtaataattaaagggtcgatttctgtttgttcgttttcttttctgaaactgcccacaaaaatcatatcatgttttaaacaaggagtttcaaaggcatggctttagcgcaccatgtaagtggataacctactctaagcaagactaatatttaagctcaatgccttttggaaaatgcaggagagttggtagatacatgatctaggttgcc

SEQ ID NO: 9136 - DNA, 915 bp, Homo Sapiens
  misc_feature (478)..(478): n is a, c, g, or t
  misc_feature (501)..(501): n is a, c, g, or t
  misc_feature (751)..(751): n is a, c, g, or t
gggggcctcattgcctacctcagccacttccacagtgccttcaagagcatggcccacagcccaggccctgtcagccaggcctccccagggacctccagtgctgtattattccttagtaaacttcagaggaccctgcagcgatcccgggccaaggaaaatgcagaggatgctggtggcaaaaagctgcgcttggagatggaggccgagaccccaagtactgaggtgccacctgacccagagcctggtgtacccctgacacccccatcccaacaccaggaggccggtgctggggacctgtgtgcactttgtggggaacacctctatgtcctggaacgcctctgtgtcaacggccatttcttccaccggagctgcttccgctgccatacctgtgaggccacactgtcaccaggtggctacgaagcaagcacccaaggagatgggacatttctactgcctccaagcacctggccccagacangaccacaaagaggaaaggcaacnaataaagggccctgaagagtccggagctcccccacaccaaagggagaaatagccatggccaccaaggccttctcaaattcccacaagccctcgggagggaagggggccggttccttgttcccaaatccccaaccaggcccacccccgatcgggcaaaatcccgccttcccccagccccggagccgccagccggggggccctccccttaaacctttaccccttgaagccgggaaaagggaggccttccacnccaaggccttcccgcgaaggattgtcacgcccctttgggcccgcgccaccaaccctggagagagccacacttcttggtggggctctgggggaccttgacccaaatgcccagaaaggaccctccaaagatctcttgggagggcgcataggcaagacaaagaggag

SEQ ID NO: 9137 - DNA, 603 bp, Homo Sapiens
ggagcttcaccttgttattcccattgctctcctggctcactcttacggtcggtctccagtgactgaagcattccccacccttggaatttctcatcttctgcctcccttcctactccttttggttttgtggggagaggggaaggatcagggggccaggccagcagctcgggggccacaaggagatggataatgtgcctgttttttaacacaacaaaaaagcctacctccaaaatcccctttttgttcttcctggacctgggcattcagcctcctgctcttaactgaattgggagcctctgccacctgccccgtgtatcctggctctcagctcatggggaagccacatagacatccctttcttcccttgcacgctcgctagcagctggtaaggtcttcacaccctgattcctcaagttttctgcttagtggcactgacattaagtagtggggggacagtccatgccaggacaccctggagtagccttcccccttggccgtgggcaggccctaactcactgtcgctttggagttgaggtgtcttttctttttctttctttagttcctgtattctaaacattagtaaaaataaatgtttttacacag

SEQ ID NO: 9138 - DNA, 1076 bp, Homo Sapiens
  misc_feature (86)..(86): n is a, c, g, or t
gtgggggaggttaactggagtgacatttggttgagggggctgaaagcaagttattagggttaatccagggagatagcaaaccaccncttgtatggccacctttttgctgcttctatcaacatagttgagccatctttcaaaacggtgagtaggatttgccccctgagccaaaagtagttccaccactgccagatgaccccctgcacaagccagggacagtacagtatggtcattattagctgtggttctattcacattcgctcctttactaattaagaactgaacagtacaaacatgaccagctcttgcagctttcattaaaggagttcttccaccttcagattcatgttccagatctgcgcctgcctgaagtaagacatctgctacatcagtatgaccattttcacaggcatatgttagtgctgtatcccctgttgctgttgttgcatgaacgttagctcctgcagctaataagtatttaactaactccaaatgaccctcttgagcagcttccagttaaaggggtagaacaccctagttctatatcggctcctgccttaattagaaagtctgccacttccagaaagcctccacagcaagccagagtcaaggcagtttcttgagttgcttctggctgtgcattgatatttgctccttggaaccaagaagtaatgccacgcatttcttcatgtccttctcgagctgcttccatcaagggtgtataaccttcatcattgacctcttccaggctagctccgtctttcaatagaggtaagagccgcaagtaccacatgcccaccacatgcagccaaagttaatggtgactcaaatgagtcagcaggcatgttcacttgggcaccgctgtcaagaagtaacctagctacttcaacatggccatccatgcaagcctccatcagagcagtgtgcatttcatctgttttatgctcttgatccgtgcctgcttccagaaagaaatcgcaccatctctaagtgtgctttgtaacaaggtaaggtaagggcactctcttgaaattcattagaatgcgtattgatggcaggcccaaggtggggaccat

SEQ ID NO: 9139 - DNA, 1012 bp, Homo Sapiens
ggggacgcggacccgccatggcgcggaagaaggtgcgtccgcggctgatcgcggagctggcccgccgcgtgcgcgccctgcgggagcaactgaacaggccgcgcgactcccagctctacgcggtggactacgagaccttgacgcggccgttctctggacgccggctgccggtccgggcctgggccgacgtgcgccgcgagagccgcctcttgcagctgctcggccgcctcccgctcttcggcctgggccgcctggtcacgcgcaagtcctggctgtggcagcacgacgagccgtgctactggcgcctcacgcgggtgcggcccgactacacggcgcaggtagaacttggaccacgggaaggcctggggcatcctgaccttcaaagggaagactgagagcgaggcgcggggagatcgaacacgtcatgtaccatgactggcggctggtgcccaagcacgaggaggaggacttcaccgcgttcacgccggcgccggaagacagcctggcctccgtgccgtacccgccctctcctccgggccatgattatcgcagaacgacagaaaaatggagacacaagcaccgaggagcccatgctgaatgtgcagaggatacgcatggaaccctgggattaccctgcaaaacaggaagacaaaggaagggccaagggcacccccgtctagaatgccagaaccagcgggtggccttaggggctgtgaggcagtggggaccttattgatgaaagaaaccgtctttgcgttacacccgagtctgcctctcggagcagggagctcaccttccgcgacgtgttctgagggtctgcatcttaggggggagggctggggcaaatcgccacctgtgcctttcctctggccctgctgcccccacacccaactccgagggcccacgctggggaaagcgggaagcgctcgctccctttcccccattagtgctctctctgcctggatcccggcagaagctatgaaagggaataaagagaaaagaagtacccaga

SEQ ID NO: 9140 - DNA, 986 bp, Homo Sapiens
  misc_feature (41)..(100): n is a, c, g, or t
  misc_feature (882)..(882): n is a, c, g, or t
  misc_feature (955)..(955): n is a, c, g, or t
ggggccacgttttcaccgatcgaggacggtggctcagcagnnnnnnnnnnnnnnnnnnnnnnnnnnnnnnnnnnnnnnnnnnnnnnnnnnnnnnnnnnnnacaatttctgactggaatctaagaaaatgttctgctgctgccctggatgttcttgcaaatgtgtatcgtgatgaactgctgccacatattttgccccttttgaaagaattactttttcatcatgaatgggttgttaaagaatcaggcattttggttttaggagcaattgctgaaggttgcatgcagggcatgacttccatacttgcctgagcttattcctcaccttattcagtgcctctctgataaaaaggctcttgtgcgttccataacatgctggactcttagccgctatgcacactgggtggtcagccagccgccagacacgtacctgaagccattaatgacagaattgctaaagcgcatcctggacagcaacaagagagtacaagaagctgcctgcagtgcctttgctaccctagaagaggaggcttgtacagaacttgttccttaccttgcttatatacttgataccctggtctttgcatttagtaaataccagcataagaacctgctcattctttacgatgccataggaacattagcagattcagtaggacatcatttaaacaaaccagaatatattcagatgctaatgcctccactgatccagaaatggaacatgttaaaggatgaagataaagatctcttccctttacttgagtgcctatcttcagttggcacagcactgcagtctggattccttccgtactgtgaacctgtgtatcagcgttgtgtaaacctagtacagaagactcttgcacaagccatgctaaacaatgctncacccagatcatatgaagctccagataaagattttatgatagtggctcttgatttactgagtgggctggctgnaaagacttggagggcacattgaacagcctgg

SEQ ID NO: 9141 - DNA, 503 bp, Homo Sapiens
  misc_feature (134)..(147): n is a, c, g, or t
aggagtattttcttcttgggtgggccctgaacaaagccaaaaattgtagaaaccagtctagaaaaagtcctgctcatctgtggccactgccttctagccgtcctccaccttgcagaaagaatctagcctttggnnnnnnnnnnnnnnatcggggtcatttgctattcccctctgatattcaaccctatagaaggagcctggactctgatccctctgtacaggctggatggaaggggccctccacacttcctgggaggtcagagacaaactgtttcagagagtcagatggacttcccaagacttgttgagagatgtgacatggttcttggatttcctctgtagcagcctcctggacttcctgaggactcgacattgtccacagatgtactggccattacatgaaacaagaaaccaagcatctttgctgttgttaattattatatgtgccattgttacaggagattataggctagtctgtaataaattatcttatagcagccaaa

SEQ ID NO: 9142 - DNA, 1045 bp, Homo Sapiens
acttgcccaattccttaaaagagctcagggtttagagagggtgctggccacaattcggtgcttccttgggcggggggattggacccaagtaatccgcacgatctttctccatctgggaaaggacttgcaggatgctctcaggttcttttccaaccacagtcagattcccgactctctcattgtagagcccgaagttcttggagaaggactgggcacagaagaactcgaagccttcagacacaaaatagcgaatggcccaggcatctctctccaggtttccagatgcgaagccctgataggctgagtcaaagaaggggaacagaaaccggtgcttcatgacagaagcaatctgcttccactgctccggagttgggtcaatcccagttgggttgtgtgcacaggcgtggaggacaacaatggagaactcaggagcattctccagatcattcaggaagccctggaggtccaatcctctcttctctgcatcccagtagcgataggaccgaatgtctttaaaaccagcagcggaaaacacagcattgtgattctcccaggttggtgaggacacatagacaggtgtgttcttgttgtttgttccattgtaccaacgcgctaagaaatcagctccaattcgaagtgcacctgttccccccaaagattgcacacctcctacccgcttctccttgagtgctgggctgtcatccccaagggcaagacgagaagcacagctccggaactcagccaggcccaggattggcagatactcgtgatttaggctattgtcattagcaatcttctgctccactttcttcactactggcaaaacccagggatggcagtcatccgtgcgatatgctcccactcccaggttgaccttgcgggggtccggatcctccctgaagtcggcagtgagcttgaagaccaggacaggctgggcctgcggaacctcggcaaagactgacggaggtgccatatcgagagactaggaatcaagagatttcaccccacgcccggagctggatcccgggaattccggaccggtcca

SEQ ID NO: 9143 - DNA, 1345 bp, Homo Sapiens
  misc_feature (1008)..(1017): n is a, c, g, or t
aactggaggaacaagtggattggtgaaattaggagcactttgcctgttacccctttgctggtggtgccaccccagactgaccagcggggagatgggcccccacaaggcctcctgcgtcaatgcactggaaggggaagaaactgcccaagaatgtcagagccaagggctacctgaagtgctcagcccttagcaatcggggagtacagcaggtgtttgagtgcgccgtccgaactgccgtcaaccaggccaggagacgaaacagaaggaggctcttctccatcaatgagtgcaagatcttctaaaccccaagagacttcacacaacacttatgtatgcaccccaaagactaatggggagagggagggccgggaagccaggaaagcttggtgttttctctgggtacaccccaagcagcgtctccttttggatacagttattgatgaggcttggccactggatgttttcactaactacactctacaagtgaactccttgcccaggccagttagaaaatcccttggggaactgtgatgaatattccatctttgattaaaaaagtgaaatagtctccataattttggacgatgaagtgagtttttcaaagaattccatatttaaagacacattttatttaactaataacaaaatgtattgcttttgtatatatttagttctccacacttggaaaatcttttcctacatcctcgaaaaacataaactcctctgggagtgacaaggctttgtacgaagctctgccaacacgtttcggagggttacttcattttcccccccagcaacaaaggcctggttgaaaccaatttgccctgctggaattctaaatgggggaaatcaaacttttaagattggacccacccggaagctttttgcaatttcgtgtttcccaccttaccctgcgtacttccccagtttggataattaaaccccccgtgttccaaaacaacacccccaccccccgtcctcgttcccgcccctaaaccgccccttttnnnnnnnnnnttaccctcgttggggggcaccgattacgtctgctctacgcgttatcgcccccccctaccgtgtttcgctagagggcccccggtgcttcgttcgggtcgcgccccctggacccccgcgaaaaaagatattttttaaagaacaccctttttgtcctcggctactcgagtgtgccacccgccgccactttgttttgaacaccccccccgcggacgaacctcgcactatccctagagaaacgactatgcggcggcgtgtaacccaaaccgcgccgccgcgcggcttctcccacccgcgccactataccaggcgccgtcgcccttgtcgcgcc

SEQ ID NO: 9144 - DNA, 481 bp, Homo Sapiens
gccctggtgaaccctatcactcactacccctaactggcatatatgacatctgtgccttttcaatacacccagtttggacccctaacttgctgggcagccttaggcaagtcagttcacttgagtcttagctctcatctgcacacacaaaagcagaataatctatccctcccctacttcaagtctgttctgacagctcagtataaaaacatgcaggaggttcccacctctgtgcctgacacttgggtataaacacaagtgtataagtgaaattttcaaagttggcaatatttggtcaagataacttccctactcagaaactgaaatatattccaagccctaactctggaatctccagtccctggtctgctaccataacaactttacccaggcctgagaaatgaaagataagatgttttaaggcagcacttcccaagtcaaatgaggtaagggtgagtggtccggattttgtttaaaatgcaga

SEQ ID NO: 9145 - DNA, 537 bp, Homo Sapiens
  misc_feature (183)..(191): n is a, c, g, or t
  misc_feature (411)..(453): n is a, c, g, or t
  misc_feature (482)..(494): n is a, c, g, or t
  misc_feature (516)..(516): n is a, c, g, or t
tcaaaaaacaaaaacagaaagattgctctggtgatgagcgaaacggatgagggactagctattgcagaagtctagttgagaaatgacaaagcctgaccttggagagaggttgtggggatgatcaaaggattggatttagctttttactagtgcaatattgttgccatatttctagatgaggannnnnnnnnagagctaatctgggtaaagggctccttttctgtcaaaagaacccattagcaagtctgaataatattgccaggttatatatgttatgtatagtatgagagtgaattgttcattagcatctttgagaaattagaaagaactatgtcaggtgtaatttggaagagaacttgaagtttgttattgttactatttttgagatggagtcttgctcggccacgcacnnnnnnnnnnnnnnnnnnnnnnnnnnnnnnnnnnnnnnnnnnncaacaagaatgagactctgtctcaaaagnnnnnnnnnnnnnttcgtgttagtactgatagggnttcaccaggtgccgagctcga

SEQ ID NO: 9146 - DNA, 324 bp, Homo Sapiens
cggtacctggtgaaccctatcgggaaacatggctcgtacgttccatcaggacaagaactgtgtatgcagtgctgtggggatccaggagtgaatggctgtcttttggcagtgtgcctggtatgcgtgtgtctagggcaaggattcacagaagtgagaacctttgcatttgtctccatttgcttctaattcattaggaactttaactttccctagggatttggactaaggcatcttcaaggtttcttttaggggaattaaaaatgtgacatgaagaacggttgaagaaacttgtctaggctggagagtaaagaagacatagaggct

SEQ ID NO: 9147 - DNA, 450 bp, Homo Sapiens
  misc_feature (105)..(127): n is a, c, g, or t
atcagctcggtacctggtgaaccctatctgcagagagaatatgttcttcaaaaggaacctagaaatcattgatttagaactatcaggagtcaaggtgatatatannnnnnnnnnnnnnnnnnnnnnnaactcttaagttcaggggtacaagtgcaggtttgttacataggtaaacttgtgtcatgggggttcgttgtacagattatttcatcacccaggtattaagcccagtacccattagttgtttttcctgatcctctcccttctcccaccctccaccctctgataggccccagtgtgtgtcattcccctctatgtgttcaggtgttcttaggatacataattttgcctatttacactctttccgagtctttcacattctctgttagactgaaggacttttaggacagcatatctcttaatgcctcctacattgagtcaagagcagta

SEQ ID NO: 9148 - DNA, 501 bp, Homo Sapiens
  misc_feature (318)..(434): n is a, c, g, or t
tacacttcctcacaacaaacccattaggtagcaactatgactgtcccaattatactaggaaacaggttctcagagagatacctcactggcccagggcatcaatctggagggcatcaggaagcgtatggcagagcccagtccacgtattccatctgaacccggtaccaccacatctcaccagcaacgggcatcacttgacagcaagtgagattcaagctcaacaaggatggactccctctcaccacccaggtctgcaaagggcaccaatgtcttatgcaaagaagatggctgagatggccaagcatggtggctcacacnnnnnnnnnnnnnnnnnnnnnnnnnnnnnnnnnnnnnnnnnnnnnnnnnnnnnnnnnnnnnnnnnnnnnnnnnnnnnnnnnnnnnnnnnnnnnnnnnnnnnnnnnnnnnnnnnnnnnaggcatagtggtgcatgccttgtggtcatagctacttgggaggctgaagtgggaggatcactctagc

SEQ ID NO: 9149 - DNA, 462 bp, Homo Sapiens
  misc_feature (224)..(245): n is a, c, g, or t
gagccggtcctgggtgaccctatcttgtgcctagtagaagtggtcatcatggtcatctctttgctttggtcatgaggtcccttcagtttacattgtctttcccattttctcccaaacatctatcaagcttgtccaacctccagcccagggaccacatgcagccaaggacggcttggaatacagcccaacacaaattcataaactttcttaaaacattatgagannnnnnnnnnnnnnnnnnnnnnagcttatcagccatcgttagtgttcgtatattttatgcatggcccaagacaattcttctcccagtgtggctcagggaagccaaaagattggagacccctgatctaaatactccatgtacgtgaaggtcactttcactgctgtttcttcccagaaatgtctaggtccttcaggtagaagtaatctttttcttcttgtaattatttttatgttctttta

SEQ ID NO: 9150 - DNA, 460 bp, Homo Sapiens
aatcagctcggtacctgggtgaacctatcgaagtcactgtatttaaaatatatttgagctgaaagtcccaggagtacacacagagtgccagctgcccctccgctggttcagcaggacctgccattgccacccacatccccagccgtggccctcaccctgtccttgaccctggtttattggtcagagacccaggtctgagtcagcctgaacatcttcctggttgtgtgagtgggatgctgccatgaggctgggcactgggggtttcctgacagtgacagaaatagccaaacggaaatgtatttggtgtttcacactttgcaaatagcattccctcagattgggcagagacccatcttctccctgccaaccccaacccccagctccatggacacaggtaggaggcctctgtatcctgctgagaacacaccccaccaggcctgtttcttctccccaccgttcc

SEQ ID NO: 9151 - DNA, 475 bp, Homo Sapiens
ttatttatgagtttctaataatttaaggcttaaattaaagccattataaataatatgaagaattgagtgctctatataagacaatctttgcaaaagactactggttctctcgcaaaccatttgtttactaacatgacaacagtcacatgagaaaggcaaataaaatcaaaaccacaaacttccccacctccccttatcaaagacacacacctgaatagcgtgatcagtgacacgttaacttgcattgggacattttaaattacctactacagaagtagtttatttctcaactgtaaatatactgaatattcgtgagaattcattgttctgagtttgctttaaaacgtttttataatttacaaaacaccacacagtaaaaatgttgatagaaaatatacaaatataaaattacagagcacaaggaccgaattttggtacaaagagccaagactaatttagcacatggtaagacttt

SEQ ID NO: 9152 - DNA, 1224 bp, Homo Sapiens
ggggaagtagggccttcgcgcacctcatggaatcccttctgcagcacctggatcgcttttccgagcttctggcggtctcaagcactacctacgtcagcacctgggaccccgccaccctgcgccgggccttgcagtgggcgcgctacctgcgccacatccatcggcgctttggtcggcatggccccattcgcacggctctggagcggcggctgcacaaccagtggaggcaagagggcggctttgggcggggtccagttccgggattagcgaacttccaggccctcggtcactgtgacgtcctgctctctctgcgcctgctggagaaccgggccctcggggatgcagctcgttaccacctggtgcagcaactctttcccggcccgggcgtccgggacgccgatgaggagacactccaagagagcctggcccgccttgcccgccggcggtctgcggtgcacatgctgcgcttcaatggctatagagagaacccaaatctccaggaggactctctgatgaagacccaggcggagctgctgctggagcgtctgcaggaggtggggaaggccgaagcggagcgtcccgccaggtttctcagcagcctgtgggagcgcttgcctcagaacaacttcctgaaggtgatagcggtggcgctgttgcagccgcctttgtctcgtcggccccaagaagagttggaacccggcatccacaaatcacctggagaggggagccaagtgctagtccactggcttctggggaattcggaagtctttgctgccttttgtcgcggcctcccagccgggcttttgactttagtgactagccgccacccagcgctgtctcctgtctatctgggtctgctaacagactggggtcaacggttgcactatgaccttcagaaaggcatttgggttggaactgagtcccaagatgtgccctgggaggagttgcacaataggtttcaaagcctctgtcaggcccctccacctctaaaagataaagttctaactgccctggagacctgtaaagcgcaggatggagattttgaagtacctggtcttagcatctggacagacctcttattagctcttcgtagtggtgcatttaggaaaagacaagttttgggtctcagcgcaggcctcagttctgtataggcaatgctgtgttattacttgaatatagaatatatagtttacaaaatgaaaattccaatgttctcaccaaata

SEQ ID NO: 9153 - DNA, 896 bp, Homo Sapiens
gagtcaatagcttattacatggatgtccagaatgtcttcgtttaatccattgactcctcctttgatcctcatcagtattaacctcttcaaccgtgtgtgccctgggtgtattcattaacatatcatttcctagggtctgactattactcagcagctttgcctgccttctttccaaggccagttgtttatttctctcaattctttgttgttgctcttctgttaggcttctacttaactcagaagcaaacatctcactttcagataagtttgtcagaaagggatctaattcagtagaagtgacatcatgttcattattctccgcaacttcatcattattgctaacaaaatcttcatgtaaaatagggagatcaagtcgaattcgttttaaacaggtctgaacttcctttttacttcccaggtattcaactctgtcaataaaatcctcaaactgcagtttagggaatagcctatgtgcccagtgctccatgtgtctgattagcatcttcaagtcttcagcctcatgacctttacctttgaattttgccttatcaaatacatgccttaaggctggaagtcctctctctgaaattaatctctgagcatcccagcttgggtatatttcttttaactgttctctttggaggtacaggaacaggtgctccatttcctgactcttcatcaggctcagttccttcaccatcttgtctctctggagaggctggaggtggggaaaggaggaaaagttttcatcttctacatgctcataatctggtaggtcaatcacgccattctcctgtggttctagcatcttttcctctcacgcagaaaacacgggacacagcgcggacctcggcgtgcagactaagcgcgcttctcgcgatactcgggaactcccc

SEQ ID NO: 9154 - DNA, 797 bp, Homo Sapiens
ccgggcgaggagaggaggtgaccccgcgaaagataataaatcatcattgatcaagatgtcttcagcacctgagcctccaacattcaaaaaggaaccacccaaagagaaagagtttcaaagcccagggctcagaggggtgcgcacaacaaccttatttcgtgctgtgaatccagagctcttcattaaacctaacaaacctgtaatggctttcggattggtaactctttcactttgcgtggcatatattggttatctacatgcaatacaagagaataaaaaggacctctatgaagctattgatagtgaggggcacagttatatgaggcggaaaacatccaaatgggattagtagtgctggttagtgcagatggacctttattaaaggttctgaaatcttcaagatgaaagaccttgtgagtgtacagtatcatgtttcttgttctagaacatgctaatgaagagagaagatagcagttgcaaccagacaactgtcgtaaattttgtcctttcacagctgcagccattatctcattctttttccacagagtgagcgtcataatatttttctttccttacctcttataaaagtgccatgagaatggaaagtgtgtttgttaattattaaattctgtataataaaagtacccatgctgttacattcgcatgatgtttcaaactattttaagatgaattatgccggtgcagctgtcgtgaaagtttacttgtgtttgctacttgcaaaggaaatgttcatgttctccctggcatagaacctatatttttaaagaacgatactc

SEQ ID NO: 9155 - DNA, 699 bp, Homo Sapiens
gggagtagcatggagtgtgacctcatggagactgacatcttggagtcgttggaagatctaggttacaagggcccattgttggaagatggagcgctctctcaggcagtctctgctggagccagttcccccgagtttaccaaactctgtgcttggctggtgtctgaattaagagtgctctgtaaactagaggaaaacgtgcaagcaactaacagtccgagtgaagctgaagaattccagcttgaggtgagtgggctactaggggagatgaactgcccgtatctttcactgacatctggggatgtgaccaagcgccttctcattcagaagaactgcctcctcttgctcacatacctcatctcagaactagaagctgccagaatgctctgtgtgaatgctcctccaaaaaaagctcaagaaggaggcggtagtgaggtctttcaagagttgaaaggcatatgtattgctctaggaatgtccaaacctccagccaatataactatgttccaattcttcagcgggattgaaaaaaaattaaaggaaacattagcaaaagttccacctaatcatgtgggaaagcctttactgaagaagccaatgggaccagcccactgggaaaagatagaagcgattaaccaagccatagccaatgaatatgaagtccggagaaagctggtaataaaaagtttggatgtcactgtg

SEQ ID NO: 9156 - DNA, 968 bp, Homo Sapiens
  misc_feature (706)..(745): n is a, c, g, or t
gggtttccctctccctttaggttagagaagtataagcacttttctacccagtacgtgcctgctgatctctgacgttcagtggacagaatataatgtcaatgtcctcctgacagtaagaaattttatagccacctaaaagaaagcagtagttggtatttgtcaactcaccataattaagaactgaagaacatggtcagtgctcacaattcatgaagagatgaacactccaagtccaccgagaaacccaacacaactgggattgcatatttgaggttcacatggtggcaatatcacttgcagtgttggaaggaaaacccccaacacgatgctattctgccgttacacctccttccaatagaatgacacaaaataaaggcacaggaaaataccttacatccattaatcctaagtgggacccaaaacaaaagagacaactggctcaagaacaggaggggaaaaaaggtactgccataattgatcctagcatcccttcatggctgcaatgcgtaactctcacttttcagtgagaaaaatctatactcttgtgtttctaaagaaagcacaaaatattcttgcaagatttaaatactgctaatcagtggcaaagagtgtaaacagatgaaatggcaaagttttaaaagtttttttgtagtgttggggaaaataaagaatctgtggtaggaagcaagcaggtttaagtacaagnnnnnnnnnnnnnnnnnnnnnnnnnnnnnnnnnnnnnnnnccgaaagcccagcctcaagcctcaacctactttaagatgcacaaatacaactcaaacttcataaagcagaggagtaaaaggtgcaagagccatgtagcatccctgaagccatggcgaaacaaacacagcggtatttaaaaactgggttcactcaaaggcacaattcaatcaacctctttttctctatttaagtgtatatatttatatccctttgtatatcacc

SEQ ID NO: 9157 - DNA, 1261 bp, Homo Sapiens
  misc_feature (89)..(89): n is a, c, g, or t
  misc_feature (229)..(229): n is a, c, g, or t
gtgggggggaatcccaaccccccttatcccttgcccccgggtctcccctggggagaccccctaatggccccggttccccttttccctantggggccccccgcgcccaaaaagcctgggtttaagaacactttttctagctcccagcctctcctcgcccacctcttcctcttttggaacgagacgggaaccggggccccgcgctttgggtctcgacgcgaaggcggcccnctaaagacctgggggcctggctgggccccccttttaactcagatttacattccttcaagagaatccattcctcccatacattctgcacatgttacgatccagatgttagcgctccccagtaaaataaatatatttccacagaaaaaaggaataaataacttatggggggacccaaactcacttcaaattcaaagctcttacgattctgcctctcatcttgtcacttcattgcacatcagtgtcaataactggtcctcttcccagccccagctcggttttctcgtaaaggcacctcaaagctgcctgcctggccctggatgccatgtgatgtctttcataaagggaaggcactgctggaagcacatcccacactcaaactgggacttggagatcccactccagctcctactgttccctgttgggacatcactttgtaagaataggatgcaaaagcaattagaaccctagatcattttgatctttctgaaaatgggctgctaattttccatgtctttcttgttagactttgagtatcagggatttatggcaacggtgtcagagttaaaaagcatttgcctgctgtttttggggtttttgttttgattttgaagcccagccttacaaatacataagagtcagagaaccaagtttgggcaacacttctccgtgcttatttgaactgttgcccaacatatgggatttgtttaaacacatgatttgctaatccacagaagtacagttgttgtaagttactgtaaatcagtttttaacatggcaaaccaactgttttaccctgttattgttcagaatcatcaatactattgtatatgtgtacgtaggtagatgtgtgcagcatgcggcaggtttgccaggtcctccagttatagaaagcatggaatctgggcagacttgttctctgcaagaaagggaagctcttgaattaacaggccggacgcgtgggtcgacgatatcccggatatccggaggcgtaccagcctgcttttttaccactggtctatattacctatcgca

SEQ ID NO: 9158 - DNA, 743 bp, Homo Sapiens
gggatctcgcgagagccgcgcggcccccgaaggctcgcaggcggaagtgagacgccggaagcggtcgttgccatggatcctggggacgacatggctggtggaatccttgcgcttgtaaatcgtaccaggatttctatgcattcgacctgtcaggagccactcgagtccttgaatggattgatgacaaaggagtctttgttgctggctatgaaagcctgaaaaagaatgaaattcttcatctgaaattacctctcagactttctgtaaaggaaaacaagggcttattcccagaaagagatttcaaagtgcgccatggaggattttcagacaggtctatctttgatctaaagcatgtgccacataccagattgctggttaccagtggccttccaggttgttatctgcaggtgtggcaggttgcagaggacagtgatgtcattaaagctgtcagcaccattgctgtgcatgagaaagaggagagtctctggcctagggtggccgtcttctccacattggcacccggagtcctccatggggcgaggctccgaagtctgcaggtcgttgatctggagtcccggaaagaccacgtacacctccgaatgtcactgaacagggagggacctggagtagccctgcagggtccctagaatgcaaaacaccttttggcccttctggctgtggccttcaaggcccgggcttggggggcttttggttggccaccccgcgggccagaaaaatggggc

SEQ ID NO: 9159 - DNA, 434 bp, Homo Sapiens
  misc_feature (293)..(311): n is a, c, g, or t
catcagctcggacctcttattctcttcaggggataggggtccctggtggaaccctatctgactggaccagtgatgggcacctggagcaaaggcagccagcccaacagggacttatgttgggaatctgaatgagaaatatggaagttccaaagaactggcaataggagtagaagcctaaagcttgcaagatagtaagaggcgtaaagaaccatgatgggccaaagttccaagggcgcaatagctataagaccaggaagccaactgcactgttggtgcaacaccctcaggacttnnnnnnnnnnnnnnnnnnncctttttctctccagcttcatcactgatagaagatttcaccagcactcccccaggattgcctattttccagccatcttgtaaaaaagttgttccttgtgttaaactaaatttgtctttgaata

SEQ ID NO: 9160 - DNA, 508 bp, Homo Sapiens
cgtcctggttacggggttagaaagggacagatttgaaagccatcagcagttttgtctggcctgcggttggtttctgtgtggaagagcctgccgcttcaggaaagtcttaggatgtgaactatccgccttcacctgcccctgacctgctcgttgtgggtgattcacgccatgggaatggttctttacgtaagggcttgaaagctgaacatttcctttggcttcaaagctctctcaccatattttgggaagttatggatcatcacattaccatgcatgcgttgcctgaagaaatcccaaaagatgttgcctgaagaaaaagtttgtaagtactgtggagtcagctatactaattcttcatgaatttaaggctatgggagaaaaagtgaaagcaatggaaaaagagatgaaattttatcaaggaagtgtagatcgtgaaaagagacttcaagaaaagctgcattctcttaagccaagaacttgaacagtacaaaattgacgacaaatccaa

SEQ ID NO: 9161 - DNA, 386 bp, Homo Sapiens
tatcacatgagacatctctccacccccatcctgctcaccgaagcgctcaatgactactttccaccaaacactgcactatacccccctgtgtgcccccttccatattctgatttgcaggctactggtccaccctgctggggtggtctttgttttttggggttttgtctcccttcacagttgacacaatccagaggacaggaagcatttctcttttctctcaatagcaccatccaactggctgaccagccataggtctcccaagttcaggaaactggggtttggaaagaaatgctgagcatctcgcagggggtggctatctagatgcagagcatactaggagtctccttccatcacaaggcattcagctgctctcttgggagtcccca

SEQ ID NO: 9162 - DNA, 453 bp, Homo Sapiens
ggctcggacctgggtaactctatcaaaatcaactggccataggtgtgtgggttatttctgaactatcaattttattctattggtcaacatatttatccttatgccagtatgacactgttttgataatgtggttttgtattaagttttgaagttaggaattgtgagtccttccgctttgttcttcattttcaaggttattttgactattcagggccccttgcaatttaatatgaagttgaggattgagttttccacttctgccaaaaaaaggctgttggaattttgatagggattgcattgaatctgtagataactttgggtagtattgacaccttaaatatattgtcttcctactcatgacttaataagggatgtttttccatttatttaggtcttctttgattttttcagcaatgttttgtagttttcagtgtacaaaactttcacatgttt

SEQ ID NO: 9163 - DNA, 223 bp, Homo Sapiens
gtatcccctggggaaccctatccgcataaacacctgccctgggaaagtgtgctgtgcagaaactccaagtcctgtcccactctctggagaccaacgtctgtccatcatctgttccctgtagaactgtgacacctgcggagcactgcaagggctgaaaggctggcctcctcccctttgctggccactcactgggtaggaactttttaaaaatcttccttgggca

SEQ ID NO: 9164 - DNA, 183 bp, Homo Sapiens
cctaggggatccttattaaaaatactaaacaaaggggcctcgggaggaaggtggagagaagagagcctttaagttccttttgctttgaagatggaataatcatgacttccttctccaaatatcttttggcccttcctagaaccagatggcggatgtttggaatttttaataaggatcccctag

SEQ ID NO: 9165 - DNA, 420 bp, Homo Sapiens
tgtgggaaccctatccaagtaatagtaattttaaaagtatcctgccgtggtcacgtgtaagtatacttctgtgagcagatttacagttcgggatggaagtggtttgggcagatttctgacattcctgcatcctcatctctcacttcatcctaacaccagtaagggcagttggaatgcagcagctcagaatcaaagctctggcaccaaagtgcttgggttttaaatatggctctgtcaccttctagctgcatgacattgggcaattacttaaccttcctgtgctccattgtctaaatgtatataacaacgccttgataggggtacataaagattaaatgagttaacacatgtaaagcactcagaatagtgcctgatgtatattaaagtgctccatcaatgttggctattataatattatca

SEQ ID NO: 9166 - DNA, 425 bp, Homo Sapiens
ccggttaaccctatctctgctttcctgtatctccacagcattcagtagttcagctcttcaatagctatttactgatatccttccctaatctatcccctatactactgttagagatactcctctacaatgtcaagtataactgtattaacttccctgtataaaactctcaatagattcccatgacccacagaccaaactatttagaatggcatccaaaacccttcattgtttatctggacccacttacctcttagtatctagtcactcccactatttacccattacactctagcaatattcaattctcttccatactcttattcttttaacaatagagtgtattaatacataaagtatgcatatctttacatacatacttctggcctagaacgccttttcttgtacatcttccatgaagcacatga

SEQ ID NO: 9167 - DNA, 717 bp, Homo Sapiens
cctggttaaccctatctttctacttcgtatggctacaaagagtttcttcctttgagagaatattcaagcttaattttgatagtggtttattctcatttgttgtgcaggactgaagtataaacatctttatcttggtagttcttcctagcataccagtttaaaccaagaaaccttttaatattcgatttccacgcttttgatttgttttgtcatttttactctccgaaaaaatttctgaaaagctagtaaacttattaaactctgtgtgataatgtcttttccatcaaagacttaaaaaaatctttaaagccaaaagtttaaagactattcatttattatgtcaggagttagatatttaatttttaaaatcaaaatagtggataaccacttattttcctgggaaaaattattttttgaacctgaaaatgactttattttactcatcacaggaatacaagattggtaagggtttggctgggttcaaaataatcttctcctcacaaaatttgaagatattgctataaaggcttctaagtatccaatgttgtccaacctaccaccctcccttctacaaacctccaaaaatgcctcatgacccagtgagaatatcaatgagctgagatcttcaattcttcaactgaagtttttcctgctacttcttgactacctcccggttccattttctagtaagtttccacaaaaactggagtaggggtt

SEQ ID NO: 9168 - DNA, 855 bp, Homo Sapiens
gcagaaggcagaaagcgtgggcagaattatgcctcacacggaggcccggatcatgaacatggaggcagggacgctggcaaagctgaacacgcccggggagctgtgcatccgagggtactgcgtcatgctgggctactggggtgagcctcagaagacagaggaagcagtggatcaggacaagtggtattggacaggagatgtcgccacaatgaatgagcagggctcctgcaagatcgtgggccgctctaaggatatgatcatccggggtggtgagaacatctaccccgcagagctcgaggacttctttcacacacacccgaaggtgcaggaagtgcaggtggtgggagtgaaggacgatcggatgggggaagagatttgtgcctgcattcggctgaaggacggggaggagaccacggtggaggagataaaagctttctgcaaagggaagatctctcacttcaagattccgaagtacatcgtggttgtcacaaactaccccctcaccatttcaggaaagatccagaaattcaaacttcgagagcagatggaacgacatctaaatctgtgaataaagcagcaggcctgtcctggccggttggcttgactctctcctgtcagaatgcaacctggctttatgcacctagatgtccccagcacccagttctgagccaggcacatcaaatgtcaaggaattgactgaacgaactaagagctcctggatgggtccgggaactcgcctgggcacaaggtgccaaaaggcaggcagcctgcccaggccctccctcctgtccatcccccacattcccctgtctgtccttgtgatttggcataaagagcttctgttttctttggcta

SEQ ID NO: 9169 - DNA, 836 bp, Homo Sapiens
ggggcttgtgcggagccggaggtgggggccgaaccagccaaggttgcgggggccgcagagccggacgaagacggagggcggagccggcttcgggactgcggagactacacaccgagcgagcgcctgggcccgaagggagcgatgctgtggttccagggcgccattccggccgccatcgcgacggccaaaaggagcggcgcggtcttcgtggtgttcgtggcaggtgatgatgaacagtctacacagatggctgcaagttgggaagatgataaagttacagaagcatcttcaaacagttttgttgctattaaaatcgataccaaaagtgaagcctgcctacagttttcacaaatctatcctgtagtgtgtgttccatccagtttctttattggagacagtggaattcccttggaagtaatagcaggaagtgtttctgcagatgaacttgttacaagaattcacaaggtccgacagatgcatttgctaaaaagtgaaacatcagtagcaaatggcagtcagtcagaaagttcagtgtctactccatctgcgtcatttgaacctaacaacacttgtgaaaactctcagtccagaaatgcagagctttgtgagataccacccacttctgatacaaagtcagatactgcaacaggaggagaaagtgcaggccatgccacttcctctcaggagcctagtggatgctcagatcagagacctgcagaggacctcaacatccgagtggaaagactaacaaaaaaacttgaagaaaggagagaagacaagagcaaagaggaataacatcccaggggtaagaagggcagaaagacgagctaaacgtg

SEQ ID NO: 9170 - DNA, 915 bp, Homo Sapiens
  misc_feature (372)..(372): n is a, c, g, or t
  misc_feature (524)..(535): n is a, c, g, or t
  misc_feature (593)..(595): n is a, c, g, or t
  misc_feature (606)..(625): n is a, c, g, or t
  misc_feature (656)..(665): n is a, c, g, or t
  misc_feature (725)..(760): n is a, c, g, or t
gggatggcagaccgaagtggagatcttgtagcctagataggatagtctgaccttctagcatagtctttttggcaaatgatttgtgttttcagtgtgtggggaagctgtcctgggggctggggcgacagatagcacataggctgtttctggggctgcaggggcttccctgagctggatgttgtgggtgttgccgtgcttcaggaagtgtggcgaccagaaagcgtagacccggggcccagggtctgcccgcccctgcagcctggcctccccgcacaggctgtggcttgcactccagccgctctagtctctcaggaatttgcttgttacttgtactgtgtaaataaagcttcctggttcaatacccaaaacganaaaggcggagacgaagggcgcgtagggggggccagggcaggacagcggcggaccggagggaggagggagagcgcgccgaacgcggcgggggtgcgggccacccagggtcggcaataactcagcgccgcgtcggcgggtgggcccggccggcnnnnnnnnnnnntgcgaacttaagcacgaccgcgcgcgccgggtgagacaggtcactttgggatgagacnnncctcctggggnnnnnnnnnnnnnnnnnnnncggagagggcgttgttcggggtcccctgttnnnnnnnnnncggcgggcgcccctggggatgggcaggacgccggttcgccccgtggggcgccggcgagannnnnnnnnnnnnnnnnnnnnnnnnnnnnnnnnnnnacgcgcccccggcaaaacgaaagaaggcggcggttgggcagccgcagccgggcgccgatgagcgcgccccctgcgggcgctgcgccgcgggcgggcctctctgcgtggcttatctcctccgacaagagtctccggaagccccgttcttatatagt

SEQ ID NO: 9171 - DNA, 799 bp, Homo Sapiens
ggggatttgattttctctggggttttcactagttccggcctttggcgctctatgacgtcaccgaagtgacggagcggaaaagcgcgagaagcggcttggttccttgtacgcagaggcggtagtgacacaggcacaactgacagtggcagaagctcagctgacaaggactggggacgacggtgtccttgtcttgcctttgtcgcccccgcccctctcttccctggctggacttgcggagtccccgccgaagaacccgaggagccatatattgaagaccatgtctggaagcttctactttgtaattgttggtcacccatgataatccagtttttgaaatggagtttttgccagctgggaaggcagaatccaaagacgaccatcgtcatctgaaccagttcatagctcatgctgctctcgacctcgtagatgagaacatgtggctgtcgaacaacatgtacttgaaaactgtggacaagttcaacgagtggtttgtgtcagcatttgtcaccgcggggcatatgaggtttattatgcttcatgacataagacaagaagatggaataaagaacttctttactgatgtttatgatttatatataaaattttcaatgaatccattttatgaacccaattctcctattcgatcaagtgcatttgacagaaaagttcagtttcttgggaagaaacaccttttaagctgaatggagaaaattccaaaataaattatatcaccacaatggtgtatactcaggaatgtgtacattgtaaattacttgattaaatagcctggaaatctaaa

SEQ ID NO: 9172 - DNA, 436 bp, Homo Sapiens
tattggaatatcattaggactggcagttattgagatactgggtttggtgtttctatggtcctgtattagctcagcgccgctgagcaatactggacgatgtgttacattcacggtagttggagctgtaggtagtaagtgtatggtggtctgagatggtccacttgttggcaccccagatggttgaagaggcggtgctggttgtatgggttgcaatggtcgtgacacaggctgagaagaactcatggttgatacaggagtgtgatttagttttttggggtcttgtgaagctccactctcttcatcatccattgtgagatcaatgacaccacttgaatcactgccagtggcttttccacactgtgatgtgctatcagctgctttcttactgacagaagcatctattgtgtagtttgtctggttttcaattcttggggtg

SEQ ID NO: 9173 - DNA, 954 bp, Homo Sapiens
  misc_feature (822)..(822): n is a, c, g, or t
  misc_feature (896)..(896): n is a, c, g, or t
tacggcagtactataggttctaaggtagcgaggcctgggtggcgaattcggcacgagggggaattctgaaagccgctggcggaccgcgcgcagcggccagagaccgagccctaaggagagtgcggcgcttcccgaggcgtgcagctgggaactgcaactcatctgggttgtgcgcagaaggctggggcaaccgagtagagaagtggagcgtaagccacgggcgttgggggccgtgcgggtcgggcgcgtgccacgcccgcggggtgaagtcggagcgcggggcctgctggagagaggagcgctgcggaccgagtaatggcaatgcagatgcagcttgaagcaaatgcagatacttcagtggaagaagaaagatttggcccacaacccatttcacggttagagcagggtggcataaatgccaacgatgggaagaaattggaagaagctggattccatacggggggaagctgttgcctatgccccaaagcaaggagctacataaactattaagggaatcagcgaagccaaagctgataaaattctgggctgaggcagcctaacttagttccaatgggggttccccactggcacttgaattcccaccaaaggggggcaggaaatccttaacgatgtacctactggcccccaaaaaagctcggacaaacctactttccaggggggaaattgaagacgggggacctattcacagaagaatgcggtcggaggaattccccgcaacgggggaaagaaccccgcgtattgggcaataggggtgcgatgtggcacccctgggcgagggtttccgacatttgacccccaggnccggtggcggcacgacgaaaaaggccgcgtggaccaactggacgcccttgaggggggaaccgtttttaaaggcnacgcagacgaggtgcctagagaaagtgggagttcgaaaaagtggaggggggctcctcc

SEQ ID NO: 9174 - DNA, 828 bp, Homo Sapiens
  misc_feature (750)..(750): n is a, c, g, or t
gggaagagggtggcgcctggactctcgccctcagagggaggcccgtcccacggtctgtggctacggatcccaggaccctcttcgcgggcgattcgcgtagcctcagattgcctcggatgatggcctgcgactgacagtctctcagactcttctcagctctcctgaggctgcagctgtcagctccctgatcctcagcacttgcctggaccagtgcgggtctgccacgccctgttcagccatccctgtcctgttgtgtcgtgcaagccacatctgtccacacccccaccacccaccagtgctggctctcctctcttctcccctgtgctcccagcatgcctcgtggccggtgccgtcagcagggccctcgcattcccatctgggcagccgccaattatgccaacgcacatccatggcagcagatggacaaggcgtctcctggggtggcatacaccccccttgtggatccctggattgagcggccctgctgtggggacaccgtgtgtgtgcgaacgaccatggagcagaagagcacagctagtggcacttgtggcggtaaacctgcagaaaggggtcccctagctgggcacatgccccagcgcccgacgccacagggtggactttctgctgggtaccacgctcagacccaggcaccttttgatggctccccgtgggctactggacccgcttcgtgggccaactgggcgaatgacatgtgccttccctttggagcactatccgggacaacctgangccggggtctgcggagaatcctcaggcggcctaacaggcccgagccccagggcctggggcagcccccctaacttcggg

SEQ ID NO: 9175 - DNA, 468 bp, Homo Sapiens
agcgctgagcatactcctgtgggacacttacacacctgcgtgcggcgctcagaggcacagcacatgaaacagatgtgtacactgtgtgggggctgtgtgatcttaacacacgggcccccgagtacgctggcaatactgaccgcccgtgatatgtgtgcacagtgtgtggggtgtgcgtgtgcactcacccacctgtgccgcaccgcaggcaggaagcttctagatggtgtggctctcaaccttttggcttttcccccagtttctctcttggccatctttgttttttctggatcccctggcttttgatgccttggtatctggggcaaccttaaaggacaaaagcaggtttctgatgggatcactggtgctgctcactgttgagtgctctgtgtgtttgtggattctggcaccgaggcttccttctagaactttttacctagaatcccagttcctggtatgctcagcgcg

SEQ ID NO: 9176 - DNA, 585 bp, Homo Sapiens
ggtgggtaatttctcgttgcaaatattaatccgttgtttttctggcgcccagcccggcccgccgcagtactgtactcgaggtacgttcctatgcaaccgagagccccggcaaatacttcatgagcttagcagcctgggctcgagcagctatgcaaacgcgcttttcatttggagcacggggctgatgtgaagataagaattgtttctcctggagaaagatccatcatttctccagcttccaagcccccggcacctctgctcagctcccagatgtgacgagcacctcccgccagggggagtcaggggttgatcaaaccagctcttgtgacccaaaccagtgccgctgcattaaagggaggcccagctactccttcccagctgagatgtgggtacaggtcagatttgtcagggagatggcactaacacgacacaagctcactcccagaaccgcagctgatgtttataataatcgtatgtactgtgcaatttaggaggggaaaaaaaggctgtacaagctttaactctaaaataaatttctatttttttcctcttgcaaaattaataaaagatgttattaagaatata

SEQ ID NO: 9177 - DNA, 456 bp, Homo Sapiens
ggaattacatggacaggtgaaactggaactgaaatgctgtggaaaaggcagctctcaccatactggaaacttgcaccccaagggctcctccagcatctcaagggtgcaggctgatgggacggtgcttgtttcccagctgaacaagcgccctgatgaaggcgtgcggggtgatgggatggccttcgccgttctcacccgatgtctcgttgttcagtcttccctgggttctgcctccgcctcgcccttccagccgcacgtgccttacagccctttccgagggatggcgccctacggcccgctggcggccagctccctgctcagccagcagtatgccgcctccctgggtctaggtgagtgacctgtttctgtctggtaaactacccttgcgtgtaactgtcactgagtggagcgatggagcctgagggtggggatatgcattcctgtatgctcagcgct

SEQ ID NO: 9178 - DNA, 231 bp, Homo Sapiens
agcgctgagcatacaacttagagactattcacacaattactcatgtaatcaaacccagaagaagggcaacaccaaccaagtcttgtactggtctgttgctgctctacagctaccaggatggtacctaaaattatcttttgaggttcagtgagccctcataattcccttaaacagtcagtcatagatactttgaatcccagagtcagtaatagtatgctcagcgctgtccga

SEQ ID NO: 9179 - DNA, 572 bp, Homo Sapiens
  misc_feature (288)..(308): n is a, c, g, or t
ggggagctcaggttcatccactgcacgtccagtattgccaggctaaaaagttaaactaaaaagttaagagtccagaaattaggatttctatacaaaatctccccatataggcaatgaatttacattaaaacagaacaaaacaaaaaatagacagcagtatggtttagaccaaactcatctgcaggctaggtaaggctgggaagtggccagtgttcggtctgtgacccagatcagaggcagggcgcaccatcccactcagtgcgctcccagaacccgttatttctggcnnnnnnnnnnnnnnnnnnnnnacacgccacctgagggcatccctgctgcccgtccttgaggactccacttgatctttcttccttcctctgttgggagaaaagggagaggggagagtccttgggctccccctagagtgagagagcaggatgtgggctcagcagcaattaagctgaatattaaactcatccccctttaggatattgagtggataaatggcaattaatcagcctcccccgaaagataagcattatcattattgtttccttcagacagaatcgccactg

SEQ ID NO: 9180 - DNA, 253 bp, Homo Sapiens
gagtttgaaaggctctttaatagcaagcgaatggtaattacatggtcggatgaggtcctcactctcaggggacggaggagggagcagaggtggacagggtgcagtataggatttacactgtttgaagcatctaacgaagggcaacagtttttggcaacccaattcacagttttgtaatttacaagagatttctttgaaaggaaataggaaggcaaagaaagcacacataccctaccggcaacacttcttgcct

SEQ ID NO: 9181 - DNA, 498 bp, Homo Sapiens
tgacattacaacaattagatgaaaataaacgacaaagcctgtaaacacattttaaaatgtattaatcgatactatctacatgacaaacagtaaccaccctcattctatagcatgtgactttcttgtgtttagaaaggtagaatcaggctccaattccaactttgctgaacagggccttaaagaatgttagacactttcttcctccacccacattaaatatacaccccctaaaactgttaattcaccggattctcagctgccaaagaaagtagactagcttagtgtttgacatttccttttggcagtcattagtccttaatgtgtcactgtctagaggctaaaccgaatagttttattcatttctactttagcagctcattttcgtgggcctaagaaaatgtatcaaaggctaaatccaccctagaagaaagttgccaatctaagattttatgacacaaaaataacaatatgatcaaaacatctctttccacaagcccc

SEQ ID NO: 9182 - DNA, 650 bp, Homo Sapiens
  misc_feature (616)..(616): n is a, c, g, or t
atgtccatagcaaaagggctttcacgccctcaggataaaggtggaccaaagcgaattaatttttggggtggtgcaaattaacggggaatggataagacctggtaacatgttaagggtcgttgccagtacagttggatccgttgtgatacgtaaagggcactcaacagggcactcttgcttctctgctttgtcattcaaccattctgtaactagatactaaggtaaaaaagagatcattagtttataaatcaagaggtagcagtgtagttcataaagacaaacgtcatctagaaactaggacaggaggagatgcagcagctgcagtaagaatgaattgagcaactagaacacaaggatatcttccttcaccctctccacgcccactaagagaggaataatttcagctatcagtgatttaagctgactaaaaataaggaaacaggtagcaggatgactccagccttttgtgtcaaagcattttagaactttcaatctagtaatattgagattagtttcttctggggattataggtcctctcatttcactaagacagcccctgccagactggacttataaaggatgcatttgtgactacctttttggttttgggggaanctcgaacccagtgtggggatcctcagagtgacac

SEQ ID NO: 9183 - DNA, 366 bp, Homo Sapiens
agtgaacacacaggatcctgctgtgcagatgcaggatccgcagtggggacaggatggataggactgtagagcttgtttgatgcagagattctaggcaggaatgtgaaagcctcaggtgttaagtttcactgtttttactaacactggatattaacaatttaaaacacctttgacatattttcatttgtatttcatgtcttgatggttatgagttgagctgttgagcctagttctattgttgactggctttctgctgaaaagctaacaggttaaatggtttgttaaatccagaaccttcgaggtaggcccacattatcacattaaactcacaagtgtggatcacaagtgaaggatatgtcaggcgga

SEQ ID NO: 9184 - DNA, 936 bp, Homo Sapiens
tggaagcttagcgcttcatcttcaacattagcttagatgcctgtgttttgccccctaaggattccttgcagcatatctatgggcagagggaagaccattgttgagtttttctcagcagcaaatggtgtccagtgtctgcaggtatcggagctgaaggctgcaggagattcagtgatgaccatggaggcttctttcagagccctggatgcattcatttctccttcggctgcaataaccttggcgcgggcctcgcgggacgcttctgcttctgcagccatagctctctggagctgcacaggtagtttcacatccttaatttccacacgctccacctttattccccaggcatcagtggcatcatccagagtagactgcatgttgtgtgcaatttcttctctgtcagagaggatctgagaaagattcttggtgcccagaacattcctcagagtagtttgtgccaaaagacgggttgctgagtcagcgttggtgatatttgccacagccagggttgcattctgacgcggtaatagaccacaccatccacgctaattgtcactgaactcctttgtgaggatctcctgaggaggaatatcaaatgaaatagttctcatgtccactttgatgaagctgtcagtgcatggcagaataaaaaacaaaccaggtcctttggctcctcacttgtaaaatgcgacccaatctaaagatgatggctctttcatactcttttataatctttatgcacatccatattgagattgggaaagttataacggtgaataagaatgagaacgccaccaaaatccatccgcaaggtccaaggcccttactggggctgtccttgaaggagtcggggagccgctgggcttcggagtcccgtgtgtgccgcttctcggccatgcaacccgagacgcagtcgcactcccccgtcctcgttgc

SEQ ID NO: 9185 - DNA, 304 bp, Homo Sapiens
tgtttgtctctgtacaagcaatttttcctgggctttctggctataatgcagaacttctctattgtagatccaactgtttctgaagtcccaagttatcttgctgagttaagacagactgtgaaaaactcaaaagtctatcttgaaaccctgggatcacaggattacttgggggggctgcatgttcattctgggatgaatacaattcacaagtgcttttaggtttagcttctgcaaaaggtagtggaataaacgaatgctctgtttccttgggtagaaacaaagaggggatagtatgctcagcgct

SEQ ID NO: 9186 - DNA, 479 bp, Homo Sapiens
ggaccgcgggcacctcgtacttatactcctcccagtgacgggtctggagtgcgtgggggaccggctgttggcgggtgagggtcccgatgtcctggtgtacagcttggactttggtgggcatctgcggatgataaagcgagtgcagaacctgcttggacactatcttatccatggcttccgggtacggccagagcctaatggagaccttgacttggaggccatggtggctgtgtttggaagcaagggactccgagttgtgaaaattagctggggacagggccacttctgggagctttggcgctctggccttgtggaacatgtctgactggatgtgggatgcacgctggcttgagggaaatatagccttggtccctgggccacaactcagtggtgcttatatgtaccctgtagtagggtgcatcctgcatagaggtgcctctgctacagtacaggtgcaccctctcttctagctgtctgta

SEQ ID NO: 9187 - DNA, 452 bp, Homo Sapiens
tacacaacgaagactcacctttcacataactgtcaaatgtcccaaaagaaaaacctgtttataattacttgagtgtagaagctaaatcaattttgatataggtactaagtacttttgcatgattttaacatacacactgaaatcactagtaatacaattgcttggaacttgaaactatgagctgttcaaaaagaaacagcattgacagcaatactgcttgtggtatctgaacttcaatacaacatgtctgttatggacttgcatttgaagccatcacatttatagagtatctgacttcttcattacttctttaaataacttcctaagcatctgtatcttgaaaggcatattatcacatattgttttcatttgtcctttacatttgagcattttacttaaagtatgtgaataagagttcttttaaaaatggattttttaatacacaggtttca

SEQ ID NO: 9188 - DNA, 456 bp, Homo Sapiens
cccccgaatgtgtaacaacgacgacaacaacaacaacaaccaaaaacaagtgatatagagaacttgtgcttgctgttaagggaatgcaatactttgggccagtgaaaaatacctagaaattgatcaatatgaaatgtagcccaaaggagtcatatatcttcaaaatctaatgagatcaccctgtttttggcttattcccaaagctgtctctgtgtttacagttggagagaaaaggttagtggagtggcttttataaataagattaattattacagctataactgaagtctccaggcaggaggctttacaactcagtcagtgctatattgtgcctccattttacttccaggacctgactggcataccgttcttgatgctttctacaaatataaaaatctctgcaactgtttagataaaattggaagaaaaaaaaggcaaagctgaccataacatcag

SEQ ID NO: 9189 - DNA, 945 bp, Homo Sapiens
acgtcggtaccagaatgtgtacaacgacctggggctgaggacaatgtcctcaatgagatcgtgagtatcttgcagcccacccaggtccctgagcaggaaatggaagtccaggagccagcagagccaacaggtgtcaacatgttgtcccccggggagtcagagcatctgctggaaccggcagaagctgaaaggtctcagaggaggaggctgctggttccagcaaatgaaggtgatcccactgagactctgagacagtgcttcgatgactttgcagacttggtgccctttgactcctgggagccgctcatgaggaagttgggcctcatggacaatgagataaaggtggctaaagctgaggcagcgggccacagggacaccttgtacacgatgctgataaagtgggtcaacaaaaccgggcgagatgcctctgtccacaccctgctggatgccttggagacgctgggagagagacttgccaagcagaagattgaggaccacttgttgagctctggaaagttcatgtatctagaaggtaatgcagactctgccatgtcctaagtgtgattctcttcaggaagtgagaccttccctggtttaccttttttctggaaaaagcccaactggactccagtcagtaggaaagtgccacaattgtcacatgaccggtactggaagaaactctcccatccaacatcacccagtggatggaacatcctgtaacttttcactgcacttggcattatttttataagctgaatgtgataataaggacactatggaaatgtctggatcattccgtttgtgcgtactttgagatttggtttgggatgtcattgttttcacagcacttttttatcctaatgtaaatgctttatttatttatttgggctacattgtaagatccatctacacagtcgttgttacacattctggtccgcctactcc

SEQ ID NO: 9190 - DNA, 393 bp, Homo Sapiens
accagaaggtgtaaaaagacgaattgttctcattagggaacgaaaagcaaagagattgttctgaagaccgtgctctaagggcatttgaaagactgccaggtagtgcgagcctgagatggtctggaggattctctctagccgtgactccgctgctctgaaggtcaactgagaagtcttgtgggacagagacttgagttaggaagccctcagtcacttgccttccacggtggccagccctgctgccatcattggctgaagcaccaccaggattcacggcacccaactgcttcagggtacttcgtagactctgcctcactacatgtcgaaagagttatttgagttctcttctgttttttagtaatttgttgtctttacacattctggtacgactga

SEQ ID NO: 9191 - DNA, 441 bp, Homo Sapiens
aagcgagacgagaactgtgtacaacgacagtggagaacagctgaggctcttctctggcttggtccctggcctcaatctttaaggagtgctcatgctgcagctctcgatccagagggcgtgcgatgttaacaacacccgtcacgctgtcaattgaaaatgtgtctgtgtctgtaagaattgagtacgtcacgtgtccgttgggccccaggtctttatctgtggcttcaacctgcatgatttcactatgtacctccttgtcttcactcacttccacaaaatagctctcctgtaaaaactcgggtggattatcattggcatcgacaaccacgacatgtagaagacgccacgcagccttctggggtatcccaaggtcatagacggtaatattcagggtgtatttgtctggtcgttgttacacattctgtcgttgttacacattct

SEQ ID NO: 9192 - DNA, 597 bp, Homo Sapiens
tgaagcttatcaggatctgtgctaccgatgcagagatcatctaccagtcatgtggccaagttctgtgggtgtgcgaaaagctctctggaacttccaaccacccatgctctaacctggagacagccatcccctgcctcagaataagtaccaattcgtagtacatgtatggtactcttgtccccaagaaatgttaggaagcttgtcagctgaatgagaggaggtgccttctgggtatctctgtgttggtgtatctgtgccattggctacagaacaagaaaaatactatttgccatgctattaccttggcagatgtgtaggtgatagtcatctggctttgagctgagatggtcagtgggttgtaaattccccactagcagatattcagggtggcctgagttatgtaaacaagtgagcaacacagctttaatttcatggaggaatcaaagctgcacactggtattaaaacaacttgattttgcgcacacagttgcatgcatggcaagctgttaacctctgggtggcattttcattatgaatttgttcaccacctgtcttgcttaagctacaaaataaatgcatttgactgcacagaaaaaa

SEQ ID NO: 9193 - DNA, 1064 bp, Homo Sapiens
  misc_feature (42)..(42): n is a, c, g, or t
cctaaaaagtctttcggaacacgctctgtgccgcgtgcacgngggatagagccgttcgggggaaggggtgacccccccgcattcacatcgggggaggcgtttttcagagcccggcggccaattctcggggtcaagacggtcgggaccctctttgcgaacgttttcccccattttccgccccctctctttacgcttgcagggaacattcgtgcccaattccccgtaaaacagcacgccatccgggaacaccccttcgtcggattttcctttatcccgggtccctggaaaccccaggcgaatttcgtagaggacccgggaaataaggggccgggccttttcacactaactgcgtaactaggattcccccgccatagtaaaatgcccttttttctttgtggcagaacccccttttttggaaaggaaaccccagacaagtcgaataattccatagccccccattctgttgtgaaggggatgggccccgctaaaggagtttagaaggccgcctattaagaggggaggtcccctttgtactggaaatgggaccgaggctggcaagtttcttccacctcaataccaggggtgcaatcaactccaggaattagctggtttccaagttgtgtcttgagtgtatccagtataccccgatccttaaacgtctggtatagctttttgcccagttcatcttgactcaaccacatcagccacggtaaacatgttggactggcgccatcatcaggcgtcagctccctccggagcccgcctcgctcgccccgccgcggcccgagtttagtgcccagcccgggcggtggggccaagacgagggggaatccctgccctcagaaccctgcctctgtcccgagggttcgggaggaacaaaggtgctgaacgttctctgcctcgcactcccaactaggttttctagcaaacacgcgagcttcctttcttcgcggttctgaggcaagggcgaggacccaggcacgactcaaaggcggctggagggcggggacccagacactagggactgaaggcagcgaggcaggaccgcctcacagccagtcccc

SEQ ID NO: 9194 - DNA, 850 bp, Homo Sapiens
ggggaccagcgagcggccttgagaggctctggctcttgcttcttaggcggcccgaggacgccatggccgagtgcccgacactcggggaggcagtcaccgaccacccggaccgcctgtgggcctgggagaagttcgtgtatttggacgagaagcagcacgcctggctgcccttaaccatcgagataaaggataggttacagttacgggtgctcttgcgtcgggaagacgtcgtcctggggaggcctatgacccccacccagataggcccaagcctgctgcctatcatgtggcagctctaccctgatggacgataccgatcctcagactccagtttctggcgcttagtgtaccacatcaagattgacggcgtggaggacatgcttctcgagctgctgccagatgactgatgtatggtcttggcagcacctgtctcctttcaccccagggcctgagcctggccagcctacaatggggatgttgtgtttctgttcaccttcgtttactatgcctgtgtcttctccaccacgctggggtctgggaggaatggacagacagaggatgagctctacccagggcctgcaggacctgcctgtagcccactctgctcgccttagcactaccactcctgccaaggaggattccatttggcagagcttcttccaggtggccagctatacctggtgcctcggcttttctcacctggatgatggtccttcagccctctttctgtccccttctggccctcacagcactagtatttcatgttgcacacccactcagctccgtgaacttgtggagaacacagcgaatccccctgaagcaggacctcctgaacccctggacagtggtc

SEQ ID NO: 9195 - DNA, 1002 bp, Homo Sapiens
  misc_feature (413)..(413): n is a, c, g, or t
actttcagagaccaggggggcatcactttcatatcccttcttgaagttttctccgctctcgatatggtccagatttgcaaagttctcatcaccccattcccagaccttccttgtctgcaaagtcatctgtcaggattttgcctgcataaatccaaacaaaagagcctttggcaatgtcatccaagcagcggataccccagcccttgttctgtgtcttgaatagctgtagccgaacttgtagtccatgttgcaccaacccggtttgtgcacatgtttgggtcacatttgcagcgtttgttacactcatatacccctgtgggtagacactcttctagtctcttgtactggtagccagagttagggttgatttggcctcctggggtacaggctgtagcctggatagttagttgagngcaggcacacttggacttgtcccgacacccatccttgcagtcacagccaaccagaaattcagggcctgtgttaatgaaaacacccttgcccgggatacgttccttgctgtaggccacctggggtggaggggttgtgtcaatctcattgacacaggataggggaacatcttccttcccataagtgatgtccaaaatatagtaaaaaggcttatagggctgaaactttcggtccacaagaacatatggatccaaacagaacatctccaggaagaggaagtcacagccagtctcgaaaaggtagcgttctatctcctgcattgtccgaaggcagagaccacaaggtgtcttatagataacatgaaagcccatcttgcggttaactcgacgccgggctgtcatccgccggaagtcatatagtaacgggaccagcagagggttcttgccccggtactgctcattcctcataggtctgactcgagacagacaggtatagctgcagacatgaggtaagtagaaaagcttctccatgggagcacggtaggagggctctgctggggcccgctccacccacgcgtccgcggacgcgtgg

SEQ ID NO: 9196 - DNA, 881 bp, Homo Sapiens
  misc_feature (139)..(139): n is a, c, g, or t
gcttcttagggaagtcaaaaggtacattctgacacctaagtgggaaaacattctgttttaggaaaagtgccaactgcatccggggtacaaaatttcaccaaaaagaaaagtaaaactgaatgatctccccttcattccntaattcatagaaaaatagtaggtgtgacttttgtttcaaagcaagctgaaaaatggttaaatggacaatttacaaatggtcttcagaaaaccttatcattaccttttctagttgaaagtccatgaatgacatacataaacgtacacatcatagccaaaaaactcaagaactagtggctaacacgatactggaaaaggtgaaggataaaaactggtgaatgaaggtagctgggtggtctacaggctagaacacggtcacgaacggcagaatgcagtagccacctgcgatcctaatcattcaagcttactggtgatacgtcccacttctaaagtggccgtccttcctgggcagccatgtctggagggcgccacatcaggaatgagggcctgtgcattgctttgtcccaaattccagataagagcaacatgtgggtggatctgtgtcgtaagactcatcctcaaagtggatttggcatttcttccccaaagctaattgaacaaatacttgagaaccatgatttctatgaattattctgtatttctggtttcttttcctgcaaaaaatttcatgtatactgagtaacaacctttgatcgatttattaattagaagctatttataccagtagaaaaatacccacaaacaattaaaattataagactatttttaaattcataaaaatggtactgtactgggtgtgactacatttccagtttttggtgtctcatgtgatacagaatcag

SEQ ID NO: 9197 - DNA, 867 bp, Homo Sapiens
agctttgcattgcctcgcaggtcggacttctagagggatcccctgcgaactaggacaacgcaagcgcaagatacgcttcgggcacgtgttgaacgggacccaggattccgaaggctcctttcaaactggaggatcctaccgaggtgaccccaggattgagcttctttaatcccgtctgtgccacccccaatagcaagatcctgaaagagatgtgcgatgtggagcaggtgctgtcaaagaagactcccccagctccctccccttttgacctcccagagttgaaacatgtagcaacagaataccaagaaaacaaggctccagggaagaaaaagaaacgggctctggccagcaacaccagcttcttctctggctgctcccctatcgaagaagaggcccactgaagttggagtcatcatctctacccccagtctggcttgggagatgctttcaggttgcagccagaaggggttttttaaatgacttctctggatttcaggtttcttgctgttgaaaaaaggaacaaagcgttactgaaaagaaggtaacctttgttggatgtgggccttagcctccaggtccagactactactctatgttctccagaagggtgctaagtcacctactgaagagagaaccaactgactttcctattgactcatcaggaaccagtcctcagtctggtcaagttgtttcttatttgtgagcagttcaggctatctcctgatggggatgaggccaaggctttcttatcttttggttgtctctgcttaatggaggagcctggcctacgcatggaggcctggcttagatctttcattccacctcaggaatgaggttgtgatctttcctgtcctgaccctctcgtgt

SEQ ID NO: 9198 - DNA, 408 bp, Homo Sapiens
agtactgtcataagtcactcatgacacgggagcctagatccctcttttggtggtctctcgtctgtaggtactgcaaagggtggataacaagataatgagccatttttcctgtgttcaggatacatttgggtcccaaaacagtcggctctggaacagcctaaattccaggcagcacctggaaggggagggaaaccccactagggtgtgcttttctgtttgctttttagggtgtacacagaacagaaaaggtcttatgacattgactttcccttctcctcatttcacagatgaggagtcaaggagtcggagtctaggtgctgggcagggatgaagaccttttagggacccctggtggatccgtgttagaggccagatcagagctcagttccctcctgattgctcagcgct

SEQ ID NO: 9199 - DNA, 198 bp, Homo Sapiens
acgggaaaaaaatcattaatcaacactgcagaaaaagaaaaatggtaagctgtgatgcttttacttttcaattagaaaaatatattgatcacgaccacaagtggacataccatctgaataaagcctcctgtagttaacttgtcatttaaaaaatgaattagatgaaaaggataattttctgcagtatgctcgcgctgg

SEQ ID NO: 9200 - DNA, 267 bp, Homo Sapiens
ccgggccggccctcagctatcagaagcagcagcagtacaaacaccagatgctccaccaccaacgagacgggcctcctggtttggttccaatggacctggaatccccccctgaatctccccctgtgccgcctgggtcctatatgcccccatctcagtcttacatgcccccacctcagccgccaccctcttactaccccccgacctcatctcagccctacctgcctcctgctcagccgtccccttcgcagtccccaccttcccaatcct

SEQ ID NO: 9201 - DNA, 726 bp, Homo Sapiens
tgatactgggaaagtgctggtcaacgatttgagttagttcttagatatacattgaaatcgttaatcagacattctcaagtttcacacagtagtttttgatgttatgtacacacacaccaaatgtgtaacagttcaccacttccagagtgtggtcatgcccaaaacatgtttaagaaaggaaagcagtagctcctgtgctaacgatgtttccaggaggttgggggcacttggttttaatgagcttctgtcatttagggcttctctgtggccatggtccccttccttctggaactgtgatgtagtcacatcctacagcctttagtgctggttcactagtgtcagataatcagttcttggaatcgagactgccgtggcgaaggggtggcctcggaggcaggctctggagctgcttggatgtctttaggtggggtggtggctggctctcttcagcatgtaattggggaaaccctcgcgtctactaggggtgatacagatggtgattttaaagagcaaaactagacttctatgtgagaagtgctggaaaatgatttaggacatgtgtaaagttagatggaaagactgtaaatgtttaatatgaatatagtgttcttttgaagtaaggccagctgttgaacggttaaactgtgcatttctcattttgatgtgtcatgtatgttaatgtatgaaatgattaaataaaatcaaaactggtacctgtttatacat

SEQ ID NO: 9202 - DNA, 231 bp, Homo Sapiens
agcagtgagcaccatgggctaaggatagctatcctactcctccggcattgttcttcttacagagttgagagctcctctgcactttgtgtatgccatcggccagctgatagtactttgcaactctgatcaatcaacatgcttgcagattgttacaatcttgccgttttcccatccacgataatcgcatggctgtatcttaatgccagtttactgagttgtattgccagcgct

SEQ ID NO: 9203 - DNA, 434 bp, Homo Sapiens
aaatcgtttcactgcagaagtcaaactaagtggaaatccttatagtcttcatgtagaatgtttgactctttaccaaataggtaattttgtctaaaattcagtaaattcccagatggattattatcttgtggtaaatgattatggggtgaggggacattgaatcaggtctctgaaagaatctggggtttttagtataatatgtatgattccatctcattttctttaactgagctcaaagttagaaagaaaatactgcctaatttgtcacttggaggaattactttactgtcattctcaatctgaactatatcccgcacacacaagaaaatcaatgaccttctgcaatctgctttgatctcttgtaaagaccctctctagcttgattgtggtgatctcacgccatctgctggagagcagaaaaatgactggcttct

SEQ ID NO: 9204 - DNA, 392 bp, Homo Sapiens
ggaaaggtgtagtcaggagatgcgatagaattaaaagcataatttcatgtaattctatattattaatagtgtaataaccagtggtagttccaaggctgtcagtacgatttggagatgactggatttgaacatggtcatgtaacaaaacagtactacatttaaagtgtcttatgggaaagtgaaacctccaattttggtactgtctttctgggatagtattcaagaacttacttcccttaaggcttaaatggaatagatcatttgggaaatcatttgtgatgtctgtaccatatgtttttaacaatgttgtcgttgttacacattctagaatgtgtcaccacgccgcttattagggccttcaaagttgcccccttgacttcctctaccaaagc

SEQ ID NO: 9205 - DNA, 196 bp, Homo Sapiens
cggacccgtggccccacagagtagagggaaatatgatgaaaaggcactgagatgcagcacatcacagaaagaacaggcccctttcagtcatccattccctcaacacatactaagggcccagcatgaggcttgctacttgaagctgctgcacctatattaaaagtcatattcatcaccatagtggatgctcagcgct

SEQ ID NO: 9206 - DNA, 613 bp, Homo Sapiens
gtaacagagcgggccgcatctggaataggcggcgagatacttagtatcgagggctcgggactggcgcatcgaggtcatggggacccaggatccaggaacatgggaaccggcgtcccagcctcggagcagataagctgggccaaagaggatccacaagtttattgccctgaagagactggcggcaccaaggatgtgcaggttacagactgtaagagtcccgaagacagccgacccccaaaagagacggactgctgcaatccggaggactctgggcagctgatggtttcctatgagggtaaagctatgggctaccaggtgcctccctttggctggcgcatctgtctggctcatgagtttacagagaagaggaaaccctttcaagctaacaacgtctccctaagcaacatgataaagcatataggcatgggcttgaggtacctgcagtggtggtaccggaagacccatgtggaaaagaagacacctttcatcgacatgatcaattctgtacccctaagacagatttatggttgtcccttgggtggcatcgggggaggcactattacccgtggctggagaggccagttctgtcgttgttacacattctgcgtccgac

SEQ ID NO: 9207 - DNA, 861 bp, Homo Sapiens
gatgagctgtcacatttagatcccggtagcatttcgcaaccctgccaagaagcaggactgtcctaacgtgctgagtgcttatgcccttagcgagggagagaggtttcatccatgctgtgagagctcattcttcattagcattacgtgagaatcgaagcctgagtacgtgagtatttagactaccttccatcctctcagaattctggagccacacttagtttagcctgccatttgggagaagatcggggttgctgtgaagcttaaagtgctacacatttagctgaagaaagagatagcagtctcagatgtccatactgccggcagacctacatgcttatagatgtgagtgacattgaagcaggggaaacaagtcctgttccactacactgaggaggccttggactgaaggcaagagagaggagagaaggcagagcatacagtcccaaagccgagtccagcctccttagctccttgcaactcacactcaaaccccagtttaagtaattccagactgaaaaataaaaaccttaaaaatattgcagagagaagtttggtattagagtcatgataaacccttgtatagaacgtgttgcaatgattattttttagggtcaaaatgaggaaacctgacatgcacactgggttttggatgttcagacatgaagcttgtgactgccaagtgaggaaggctttatgcccttaagagattaaaggaaagttggactcatcagttgattctgaatatcaacccccagacactgcgtgatctgagttgtcaaagctaacctttggtttctcttttatattttgcgtgagttgtgatatacttatctttatagagttttgtgtcgtctgtgtaca

SEQ ID NO: 9208 - DNA, 538 bp, Homo Sapiens
atcaatcatcatacaacagaaatctatagaacaatcgtactctatatacttaaatatattaagaccataacatagatactttgcacattaaatatatacatggaaaacagaaataaggtaaaaatagatcaaatctgtgtatacacaaggctaaaaattagaaaatttagtattacacaaaatgtcaaatagcttaaaatatgtccttattacctgccttctaccactagtccaagttaacagcatgtacactgacatctttttacacttcacatatacagatgcatccagtcacataacagtgtaaggcactaaacctttttccatttatctgtacaattccacgtggggagcaacaaaagatccacaggtagtatataatgataataactgtacttattgagtgcttgctatgagtaagtactataccagcatgatagcaggtattatcatttaattcttacaacaatctaatgagatatcattatcccatttagtgagcctaaaaaccgaggcacacaggggttaagtaacttac

SEQ ID NO: 9209 - DNA, 509 bp, Homo Sapiens
cagtatctcaagcatacataatcatgtaaaaatccatactggagagaagccctatgaatgtaaggagtgtgaggaaagcctatgctacatctatcacaaactcattgaacatatcagaactcacactgaagagaaaccgtatatatgtaaggaatgtgggacaaccttccgtgctactacacatctacagaaacatgttagaattcacactggagagaaaccctatatatgtaacgaatgtgggaaagcctacaatagattttatttacttactaaacatttaaaaacacactgaagaaaaactctgaatgtaaggaatgtggaaatcttttaggaatttctcataccataattaccacatttgaattcacactgaagagaaattttattggtacaaagaatgtgaggaggccttcagttatccccattcacttcgaagacatgaaagaactcatactctatgtgtcccctataaattttaggaatgctagggtgccgatgaatagcga

SEQ ID NO: 9210 - DNA, 388 bp, Homo Sapiens
agaatgtgtaacaacgacccagaacatggggcccagtcgttctcagttacgtctttcctatagttgggattttgatcacacagttttttagtaaagccaggccatcatctcccacattgggctggcgacatcctttctggccctgcagggtgcagtgtgaacctatagagcagcatgggagcggggctcggggaagttctggagctgcagtgagccagtgagctcgagccagctctgacaggctgatgtgagggaagccgctgggccgcaggtgcttgtttctaggatgtgtgggacctgagttgggctttgaacaaggcagccccagtccttggtgatcaaggaaatctgacctgcctttttcgtcggtgtacacagtctggtccgg

SEQ ID NO: 9211 - DNA, 207 bp, Homo Sapiens
gcgctgagcaatactaaaagaaccatagattcttccattgcaattctttccgttggctgtctcctgttttcacatacttccttgagccagaggtcatcccattcccctcccttttcccaaaagggctttctctctagggggtcccccccaacccaacgtctttggaaaaggacagtctatggcttactatcaacgatgtaaccattg

SEQ ID NO: 9212 - DNA, 515 bp, Homo Sapiens
gcagcaatcagtaagtctcacggagggcagatcgtgcagcgctcgaaaatccgattactcggaaaaactccaaaaagggggagggttaccagtatcccctcccttaaaagaggggagctcattcttgctagccctgtcttccgagatcgaccaggttggtcccccaagctgagaagtccatgctggggagactagccctgggaagggactgaatttgggggggttgtgctgagcttctgtcttctccatggctcagaatccttggcctgcaattcccagggacaaaggaaccaggcaaggaaaggagctgcctcttagatcttcccattctgctcaccagccctcagagaataacttctcacagccagggaagggttaagtgtccctgccacagttatggagaggaagctgatgaaatatgggcacttggaactccaggcccagctggctttcctgtttacacttctttatacttcctcccacccatgggcctcagagaaacaaaacaaaacaaa

SEQ ID NO: 9213 - DNA, 580 bp, Homo Sapiens
gacatcaggactacgaggactgcagtcagccatcagcttcctcatagaaaccggcaccctgctccatttcccggacaccagccacggcctgaggaacctctacttcctcgaccctattgggctctccgaagtgtctgcagaggatctgtaatattaagggctctcggtcagtggccaagaatggggtgatcagagcagaagacctcaggatgctgctggtggggactggcttcacgcagcagacggaagagcagtacttccagttcctggccaagtttgagatcgccctgcccgtcgccaatgacagctacctcctgccccatctccttccatctaaacctggcctggacacccacggtatgcggcaccccacagccaacaccattcagagggtatttaagatgagcttcgttcccgttggcttctggcaaaggtttatagcacggatgctgatcagcctggcggagatggacctgcagctttttgaaaacaagaagaatactaaaagcaggaacaggaaagtcaccatttacagttttacagataccagagaagtcgttgtacacattctgtaccgcta

SEQ ID NO: 9214 - DNA, 566 bp, Homo Sapiens
tagctgtcgagaaggtgtaaacgacccttgaaaatataggaaagaatgcattacctaattcaatgaattaaagtattttttttccatgtagatttcaagaatactacttaggagctaaaatagctgtttcttctatgtcttggggaaattattatggggaggcattgagcatttgggttcacagttaaaattgatgtttatctttattagcagaataagcttatagtcaagttggtgaatttatgcaaagtgcatatgaccggttaggactttgatgacagtcagataaaagatacttgactttcaatgtcagttgttgtaatatttatatttacattatattcacaggggaaaataaaattctgggagacttttatatgagctaagtttggttgattttttttcaaaactgtccaggtggttcaagaattactttgatgctaatgccagaaaatacatattatattaaagtctgtttcaggttttcctttttcaaatgagtagtcctttatgaagtaaaaaggagtgatatgaattttcttatactcagacttttctaactagaa

SEQ ID NO: 9215 - DNA, 344 bp, Homo Sapiens
agaatgtgtaacaacgacccaacagcagaagaccaaggcatcagatctgtaatgaccctaaagttagtgtggtgctccaagcagagtcgacatcatggaatgaaccaaatctggcaggatctgctcggggaagtgttttcctggaccacacacaccttatggagataatgcctctgctgcgtgaggagacagagaactttagttggactacagtttgtaaaaaaaactaattttattaagacagaactttttttccttccaaattgtaaatctgtctataaatgtaacgcatgtcgttgtgtaagacattgtttaataggagaagtggtacgcatcgtcagagg

SEQ ID NO: 9216 - DNA, 530 bp, Homo Sapiens
agaatgtgtaacaacgactacaggctggtttctcaatatctggtcccagaggaaacatcattcttggctctcagtctctgtaagcacagtatagctctcaatgaagctcccacagtgcatgctcctccatttgagggctgagtcagtcacaatatccccacctttgacttttcctgctgtgggtcagacatcctctgtggagccccagaaatgtcatgtgttacagatgaggatctccagatggtctctctaaagccccacccctcaggttttgtgggagacagaagctttcttcttccctcctctatgaagattcagagcacaatgacagccataatcaaataaattatttaatttccaaaaacctggcttttcctacttcaactcttttatattcaggtagaagcagcattgtcaaaccaatttttaaagttgtctttgaaagccctgtggagactctagcccctcacattggaacgtgcaagttttatcacccatcttttcctttttgggtcgttgttacacattct

SEQ ID NO: 9217 - DNA, 1145 bp, Homo Sapiens
  misc_feature (410)..(439): n is a, c, g, or t
  misc_feature (481)..(481): n is a, c, g, or t
  misc_feature (961)..(961): n is a, c, g, or t
  misc_feature (1008)..(1008): n is a, c, g, or t
caggactctgcagcctcagagacatcagcccttgggggtcctcctccagggacagcaactatcagactaagccagcaccggaccagcctggcccaccccacccacttctgcacttgcggttccggcatggacaatggaccggagagtgggggtggggggtcccaaagagtttgatgaggccctccacacctgcggcccaatccaaggtggggtggaagcttggggaagacccattccttcccagaggggcctgccacctggacccctgcattggaactggaggcagggaacatggggaggaggagggtcggtgccttcaagaaaacaggcactgccctggtggccctctcccctgccccctgcaggaaggagctgcctggacccgttcatgggggagggggcagaagtgnnnnnnnnnnnnnnnnnnnnnnnnnnnnnnaagctctgagctgtcaacgagacgtttcctaccgaagaaganaaaaaacaaacagcaccacaaacggacgacggggcaccgccgcgcccacccccgcgcaacacacccacccaaccacccgaacaacacccaggaaaccacgcaacaggacacgacacgcagcccccgaaagaacaggagacgcggggcgggacgaaaagacagaccgaaaaacgcaaaaacgacacacgcgtgccgtgggcgcgacccccgctcttgcaccgcacccaaaaagaaaaaatttgtttttttgaaaagcacaacccttcctttttattatggaccgcccgccggggcgcaccacccccgcggagaagagggacaacagacgggcaacaacaggcagggcccggaagacaaccgcctggcggtcacccccagcacgacaaaaagaaagccacgcggcgcgcgtcgccacacgaccacaaacgcgcgcggccgtggaggaggcacccctccccacacagaaaaaaagacaaaaanacggcccgccgccggcggggcaaaacacaacgcaagctggtgcctgntgtattacacccaaaaccacgcgcgcccgcaaggtggcgtggcgtcctcgctcgcggcggcgctccaatatgtcgcggaggaaggtctacccagccgacgacgcagggcggcgcactcgcgcaacacctcggcgccc

SEQ ID NO: 9218 - DNA, 1172 bp, Homo Sapiens
acgttattctgggagatatacccatgtccattcctgatgtgggaagattgatacgtgcgcttgtcatcaccataatcagtaagcacattaagtggatgccaaaccatcagacacataaatgttcccgctgtgtccctggatatggaataagcaggtataaaaaatatcttaattatagctttgtaataaatataacttatgagaaaaaaattggataggaataatactgtatattactaatttttaactatccctaaggcaaaccttatgacccacagaattttctcatatacagtattcagtgcacagaaatcttatgattggctcaagtacagtaagttacttctcagtaaaactctcaagtctgagtccatatttgtagctctgcttttggctgtacgttcctaggatcggggctgcttatgcctttcgtttatccttggggtttgagagcgctgtatttgggagagagtttaaaaatacattaggagagagaaaccattaaaagtttcactgtcagagatattgtaggtgctaatactggatttcgtctcagatttaatttcttttatgggtctgttagtcattcaacaaatcccataagtatgtgttaatattttaattgtgtaaaactcatttgttactttacagcctgtaatagtgtgtctgcattttcaacctgttgcaataactttgctgaaatattaacacattaataaaacttttcttaaacggagtaagacgtaaccctcataagaggccatccttgtctggccgccctcggaacctcaaagaagctttccaaaaccctttctatttggcagccgcggacccccgccagggcaagggggaaacttggcgccttagagtgatttccctaaggaagatcccctggcaccatggaacttaggggctttgggaatttcctccaccaattaacagaaagcgcccgggcggggcgaaaaccgtaaggggttcctgggaacacaatcccctaaatgtggatcttctttaagggctcttttactgtggaatcgcattctgaaacgggaagatccccaaacctgggcgtcctaattttcggaatttagacagccccccgagagccggaaacaattcaattggacaaaaaatggagttggcaaattctcatttaatacgcatttctgggc

SEQ ID NO: 9219 - DNA, 1183 bp, Homo Sapiens
  misc_feature (13)..(13): n is a, c, g, or t
  misc_feature (463)..(594): n is a, c, g, or t
  misc_feature (749)..(758): n is a, c, g, or t
  misc_feature (824)..(868): n is a, c, g, or t
  misc_feature (1015)..(1015): n is a, c, g, or t
cagttgagaaganaatgacagacaattatttttcctttaggtcaaaataatgtcactgctatctggataaattataagttcatatatttgaaataagatcctggaaacgaatttaaatggtgtcaaactgcagagcaacagggcttcagtatattcacatctaataggttaatatgtacatttggatgatgatttttcttgataacattaacattaattttattttttcagacatactgtaatttaaaaattaatgtgagcgtttgttttaagttcacagaaaacttaataattcaaattctcaggaattaaggactcaccataacattgtcagttccaatgaaattttgtaaaagatggcaagtttgttacctcacttgagtggggttttccttttcccccaattctaagagaatataatgtgtatactaaaacattaataaacataattttgaaaatttcnnnnnnnnnnnnnnnnnnnnnnnnnnnnnnnnnnnnnnnnnnnnnnnnnnnnnnnnnnnnnnnnnnnnnnnnnnnnnnnnnnnnnnnnnnnnnnnnnnnnnnnnnnnnnnnnnnnnnnnnnnnnnnnnnnnncttgtccgcccccctccgccccctcaaaagtttttccaaaaccttttgtttttgcgcgcgcggccccctaaagagaaaaggaaactggggcacatagtttttttcccaaaaaaaaccctggcgccagagaaagagggtttggatacctccccccnnnnnnnnnncccccccgggggggaaaccccagaagggtttttgtaaacaaaaatcccaaaaaagtgagcttcttnnnnnnnnnnnnnnnnnnnnnnnnnnnnnnnnnnnnnnnnnnnnnaagctcccaaagcgggaacgctctccggaataattccgaataatttcccaccgcccccaccccccgcacgcatgagcaaaatctaatatattcagagaacagaaaaaccatgggtgatgggagagaatatctgtcctattataaacncgcgttctttttcgcgcgccacaaaatatgggtgtaagaacccctctctccacgacacaaaagcgggcggaggtgtggagggagaacaccctggtaaaatactcccccccaaggcggggataatattagggaccacaccttcttttggcgcgccgcctttggggcgcg

SEQ ID NO: 9220 - DNA, 520 bp, Homo Sapiens
gccgacaaggtccttcttcttttgtgcctcttctttttcgcagcagtacactacaatttttaatttgtatacataatgcttcatgggtttccgagaacacacagattcatggctttctgagaacagcaaagtaaaaattccacttgttgaatacgaataactaactttatttgataacatttacctggccacgtctaaccttttcccattaaataacaacaaaaataataaaggcaatagaaattatttctaaaaggtagcagtgcatattcctgaagacaaaagtaaaaaaaactatacttcctaaatagatgaacactcccaagtgaattgaattctctgtggtgcaaaacctccaatatcccgaaaaaccacgttttacatagtggggcagtatgagtccttataaaggaagatgtaccaggatattcaagagtttccccagaagacatagtggaactgtgtgcagttcacctgaaagctttagaagaaactgtggatgttgtaaacatgcatttct

SEQ ID NO: 9221 - DNA, 373 bp, Homo Sapiens
ggaagcttgccaaatgatgaaatgaacaagattttgtatctattttttatcaagtgttgtaaaatttgtgcatggctttttggtgttggtgcttagtaactggtagaggagaaaagatgaggaaagaaactcagctttcctcacagtcttttcaaaggtacacagttggggagtaaaatctgactggcctaatcgatggaaaagaccctgtccttttcaccccatcctgcaatcctccgtgcagaggaactacactgttgtattctagtaattcactgtgatttataacaaaccggtgatgtcattctattgtgcacttttgtcaaaccatttatgtgactttaataaacatagtaaacttgctgactgcaaa

SEQ ID NO: 9222 - DNA, 887 bp, Homo Sapiens
ttgtggcagcaacccaataactaaacccccattccccactggcaaaacaaccaaatccaatgccaaaaaggatcgggaaaaaaagcagcaacagacacagtatgtggcaatcattcacataaggcccctctccccccataccttatgatatacatcccttatagcatgacaatgtaccccaaggcacctgaggcctcataataccactcgagacactgacagctccatggacgcttttgtacacagtggtttgtgtgtaaataactattcattcatttgtagatgctccacacatctggtcaaggcaggaatttcttctccttgataacaccacttgggtgagagatcatccatcaagatgaacgaagagcatgaattggagcatgctactggagactctgcggtagcgctgcctttagccagcgggtctgaggataagccactgctgctactactgccatccaaaatatctgaacatgaactgagatcagacagttgcgcggcatctggagataacatattggtagtgccttggaagagtctcttgggctgactttctgtctccatttcaccttttcttttaagaggaccaagaacactgggtctaatgcacttgactggactctgacttctcctgcttgaaaatcgtcttggactgggaactggacttggtggcaatccactgctgctcacgaacatctttccgaatcccctggtgggtgaaggtgctggagaaactggagtgaagtcaattctcttaggagaatataatttctccggcttgtcaaaatcactgtcactcaggctcaagctctcatcccacgattggcttatctgcattgccgtttgcatttccctttcatgtgcagtttctctgttcatcatat

SEQ ID NO: 9223 - DNA, 587 bp, Homo Sapiens
aagaaagttggaaaggtctctcctcccaaggacagtggctggaagagttggggcacagccagttctgaatgttggtggagggtgtagtggctttttggctcagcatccagaaacaccaaaccaggctggctaaacaagtggccgcgtgtaaaaacagacagctctgagtcaaatctgggcccttccacaagggtcctctgaaccaagccccactcccttgctaggggtgaaagcattacagagagatggagccatctatccaagaagccttcactcaccttcactgctgctgttgcaactcggctgttctggactctgatgtgtgtggagggatggggaatagaacattgactgtgttgattaccttcactattcggccagcctgaccttttaataactttgtaaaaagcatgtatgtatttatagtgttttagatttttctaacttttatatcttaaaagcagagcacctgtttaagcattgtacccctattgttaaagatttgtgtcctctcattccctctcttcctcttgtaagtgcccttctaataaacttttcatggaaaagctcctgtgccaggaaaaaaa

SEQ ID NO: 9224 - DNA, 838 bp, Homo Sapiens
ggtggatcaatatattacatagatatgcagaagttccccttgcgaatgaaagataatgatcttcttgtaactgaactgtatcatgatccttcaaatgatgctattactgctctgagtgtttacctcacacccaaaacaagtggcagtggtaactggatcgagatcgcctatggtacgagctctggagcagtacgagtgattgtacaacacccagagacagttgggtcaggtcctcagctttttcagactttcacagttcaccgaagtcccgtaacaaaaatcatgctatcagagaagcatcttgtatcagtctgtgcagataataatcatgtccggacgtggacagtaacacgattcagaggaatggatctctactcagccagggttctactcctttaacgtcattcaagatactatcccctgggaggagacagaaagccatgggtagctattcctctggaaatgacataggaccttttggagagcgagacgatcaacaggtgtttatccagaaagttgttcccatcaccaacaaactatttgtaagactctcatcgactggaaaaagaatatgtgagatccaggctgttgactgtactacaatatcctcatttacagtgagggaatgtgagggatccagtaggatgggctcaagaccaaggcgctacttgttcacaggccatacaaatggcagtattcaaatgtgggatctgaccactgctatggatatggttaacaaaagtgaacataagggtggtccaaccgaagaagagctactcaaattactcgatcaatgtgatttgagcacatctactgcgctagtcctaacatcagtcca

SEQ ID NO: 9225 - DNA, 945 bp, Homo Sapiens
  misc_feature (647)..(688): n is a, c, g, or t
aaaacggaccgcgcagtaactatacggtcctaaggtagcgaggcctgggctggcgaattcggcacgagggcagcgcagggagccaggcgggctgccggcgggtgtgaagaaaaaaatgacactccaatgggctgcagtggcaacctttctttatgccgaaataggactcattttaatcttctgcctaccttttattcctcctcagagatggcagaagattttttcatttaatgtctggggtaaaattgcaactttttggaacaaggctttccttaccattatcatcctattgattgttctatttctagatgctgtgagagaagtaaggaaatattcctcagttcataccattgagaagagctccaccagcagacctgatgcctatgaacacacacagatgaaactttttaggtctcaaagaaatctttacatttctggattttccctatttacttggctagttttgagacgtctggttacgcttattactcaactggcaaaagaactgtcaaacaaaggtgtacttaaaactcaagcagaaaatactaacaaggctgccaaaaaattctatggaagaaaacgaaaaactacaaaaggatctcgaaaagcccctggcaaagatgaaagaaaggggtttgggaagcccnnnnnnnnnnnnnnnnnnnnnnnnnnnnnnnnnnnnnnnnnnctggaattaagggagaactttcagatggcccctttcttaagggcccaagagatgagggggatgggaaaatggaagatgcgcgtccaaagaggacgtttcccaagcgaatatggagccaacgtccctggagagaaaacctccgtgaaccttcaccgaccatcgtaggggtttataataacaagccacaggggggggatatttatccgcccgcgggaaaagaggggagaaaggccaccgttggacccgcccgaaggggg

SEQ ID NO: 9226 - DNA, 1080 bp, Homo Sapiens
  misc_feature (464)..(472): n is a, c, g, or t
gggggggtctcctggcgacgaccatggcgggggatgtgggcggtcgcagctgcacggactcggaactgctgctgcacccggagctgctgtcccaggagttccttctcctcactctggagcagaagaacatagctgttgaaactgatgtaagagtaaacaaagacagtcttactgacctttatgtccaacatgcaataccattgcctcagagggatttgccgaagaatagatgggggaaaatgatggaaaagaaaagagaacaacatgaggagcgggcaagcgaggagaagagaagagaagggcgtggcggcccgcctcgggccctcggagaagctttgctaaacccattggtttgggcgcgcggggcccacgtaaggtaaggggacagatggggccgtagcatgcttcccttaaggagatccctggatcactgactgagggcctgggcgatccctcccccaagnnnnnnnnncggccccgggacgggcaagccgaggccggtgtgcggacaaacgtcccgcgagggggagctctccgtgagggtcacttactttgggattgcaatccgcccgggaggcgcgacgcgagacgctccgcggcttcgaaatgaacggcctcggggccgcggcgccccctcggaggcgaagcgcctggtgtgtagagtttgcatttgaccgctttctcggtgcccggaagaggggagaggcccattcggccagacctgcccacgaaattgagaaccgatgacagttctgccagaaggtgcagactgatcccgcctttggcgcgcgcctttacgggacatatgcgcacttcttgtcgaccgcgggtgcgcaatcgcgcaggcgggcggccgcacgacaaatttgatcgccgcctatctggcgcgagtggggtatgcgcagtgacgacgcgcgtggggggagaggatgtatgcccgcccggcggggacctggggtgatactgcagtcgcgctgccagcgagcgtttctcttgaggcgtgagacgccatatttttataagcgcgaacattagggcgcccacgacggtttttcgctctccgtgtgcggcacacgtgcg

SEQ ID NO: 9227 - DNA, 685 bp, Homo Sapiens
  misc_feature (581)..(589): n is a, c, g, or t
gggtttcccggcggggtcctgcggagttggcggaggctcctccagggactggggcacagatctgcgtagaaacgggtggcggggaagacaggggaggagagctctgagtgggaagcggagccgggggcctgggacccatcgcgtcagagccaggcaagtgaaccggagcaaacgacttccgatccagtctgcgctgttgcagctcccgtttgggatttgatttgcagcatctttgagcctctacgacaaaaaaaccgcgaagcacgcccagccctcccccggcaccccgaaaagcacccactccctcccggggacacagctgggcgcgtccacacccccgcagccccacaccatgttgtgcggaaggacttccactccccgcctgtgtcgttgatgtcagaccccaggccagcctccgggcgctgcagttctcccggctaatgctgaggctgcggctccggctctagcacaggcaccagccgccgccgcacccggcctcagcggccaccgtctgcgtgtgcccgccgtagccgtctgcccagcccgcagcccgcgctccacggagcgctggaagaacaccnnnnnnnnnccccttctgccctcgagagaagcggtcttggaggtattgatttaagggggtgggatttttttccggggatctatccattcccaatttccaattggg

SEQ ID NO: 9228 - DNA, 738 bp, Homo Sapiens
gggagagccggagtaacgggactcccagctgcgcgtcgcagtcccgacgcgagaagggctggagtcggcgtccagcctagagcccccggtgggagccaggccgggacgcgtgcaccatgccctacctgctcatcagcacccagatccgcatggaggtgggccccactatggtgggcgatgaacagtcggatccagagctgatgcagcatctgggggcttcaaagagaagagccttgggaaacaacttttatgaatactacgtcgatgaccctccccgcatagtcctggacaagctggaacgcaggggcttccgtgtgctgagcatgacgggggtgggccagacgctggtgtggtgtctgcacaaggagtgaccttctcatgctgatttgcagacggggcacccctgtggaggggctgctgtgggccctgacctccaagctcctgcctcaccgtctgccttgctcctctcttcccaaatcatcaccgccatgggcccagccccaaagggcagtgaatggccttctctgaaaccctgcgtcaagcagtgggagagggcagtgcccggtgccctggtgctcccagctgccctcctgcttcgggcctgggccgagggccttgtgtaggccatgttcctcgggcagctgccccgggccggagctgggcactccagcggccctggcgcgtggctcctgcatagctagcccaagccaataaagggctgtgatgagtgaaaaaaaa

SEQ ID NO: 9229 - DNA, 1097 bp, Homo Sapiens
  misc_feature (75)..(75): n is a, c, g, or t
  misc_feature (81)..(81): n is a, c, g, or t
  misc_feature (87)..(87): n is a, c, g, or t
  misc_feature (91)..(91): n is a, c, g, or t
cagcccatactttttccacaagtacatcaaaggaggctccaggggttcaagcttggtgatgtgtcgcagtttctncttttntggtgnaaanactccgtgggagtagttcccaaacatagcgtattttcgagggactttccccagcagttcaatgatcaatgctatgtgatcttcgtctctggaatagtcttcccagaaatgtgttcaaaacaaataatctcccgttgccagctcaaatgccatacacgccgtgctccagatgtccgcaaggatgctgtaccccgctcctattaaaacctctatggagcggtactgacgcgtctggatgtcttccgtgaagtgtttatgcacccaacaagcatttcccaggtcagcaatttttactctaattttatctgcattccgcggatccaggggattcaccaacaagtcagctgcccgggtttttgcttttggcaaatccccagtactggaggctgaaaccgttctgcttctgtcatgggatggactgctctcctcttgctcagtaagtggtgatccctcagaaagcacagagccgcaggccacaggttctaaggatccagagaacaacgaggtggaaaactctgggaactgtgactcgggaattttatgtcgtccatttggcaattcaccattgaattgttcataggagctgctatatgtgtaatcactttctgcatttggctcatcaagattatattcctcaggatttgggcagtcttcttcatcatcatcttcatcggtccagttgctgctccagtgagaatgggccattctcaatatggccattggttttaggtgattctatccacggtagggtctatgttcggcaagttcctgatctacatcatcttcatctttttcaatgttttctttctcagcatcttctttctcttcctggtcctcagcttcaccattgtcctttgcagtctctgcctcagccgcctcctctaatcctgttgtttttagtttcacctctgggcagtattcgccatcctggtcattggaaggtgcagctgaggtgatgttttcttctattattttcctttcagttctcgctccaattcttctatctc

SEQ ID NO: 9230 - DNA, 813 bp, Homo Sapiens
gggagagcggccaagatgtcgcagcccaagaaaagaaagcttgagtcggggggcggcggcgaaggaggggagggaactgaagaggaagatggcgcggagcgggaggcggccctggagcgaccccggaggactaagcgggaacgggaccagctgtactacgagtgctactcggacgtttcggtccacgaggagatgatcgcggaccgcgtccgcaccgatgcctaccgcctgggtatccttcggaactgggcagcactgcgaggcaagaccaaagactttgccatggaggactgagcgttgccttttctcccagctacctcccaaagcagcctgacctgcgtgggagaggcgtagcgaggtcggaggggaaagggagatcccacgtgcaagtagggggaatatctcccccttttccctcatagcctctagggagggagagtgacttcattctccatttgaagagattctgctggcgatgtttacttaaaaagtgatcccactcaacaacggatacagcgcgcttattattgggcatttagcctcaaaagcatgtaggaccaagcacttgtatttccgtatattttgtttcccgggggagtgagggggaagaacacggatgaaaatgtcagtttttgaagggtccatgcacatacctgacacctcacaccttatctaagcctgaagctgaggagaaaggcgttcatttagacttcctaccatttcccggacgactttagtatctcttcagagccatattttctcagcccgaattagttcccccctccctaggtgcctggtaagctatgggtactt

SEQ ID NO: 9231 - DNA, 188 bp, Homo Sapiens
atcatgtccaacgggatacctattgttctcatgacacccaaaattgatgagagcaaaggggtcgcaccatatggaaatgttgaaaactattgtaaagtagtattatgaagtagcttttgtgtcattcatgtcgatgacatgaaagtgaagtatatttattctatgtagattcacactaaaccagtacc

SEQ ID NO: 9232 - DNA, 329 bp, Homo Sapiens
cgctgagcaatactcccagcctcttgcggtggcacccacgtggagtaactgagcaaccggtttattgttaaagctccgattgctgactggttggtgaaaacgaaattgcagttaaaaagaaaattattcatttctgctctccacaccagctcgtcaggaatcagtgacacgggctgactcataagaaaacagtagtaataacatcgtgtgcgggtagtgactggtgctgatttaggctaagggatcccccctgagggttcccagtagtgagagagcggagctgctgcagattcagtctgtgttgcagtgaatgacgtgcatactccccg

SEQ ID NO: 9233 - DNA, 762 bp, Homo Sapiens
caattcaagtctcctgatcatgaccgcaatctaacgtaatggagcaggttatcgtgacatgattctgaagcaagtagtcaatcaggtgtgggaagctgctgatgtattgatcaaagctgctcttcccctgacaacaagtaacacaaaaaccgtgtcagagtggataagtcagatggccacactgccccaggcctccaatttggctactagaatcttgcttttaacgctactttttgaggagttgaagctaccttgtgcttgggtggttgaatcaagtggcatccttaatgtcctaatcaaactcttggaagtggttcagccctgcctccaggcagccaaggagcagaaggaagtccagaccccaaagtggatcacaccagtgttgctcctgattgatttctatgaaaagacagccatctcctcaaaaaggagagcccagatgactaagtacctgcaatccaacagcaacaactggcgctggtttgatgatcgctctgggcgttggtgtagttacagcgcaagcaacaatagcactattgattctgcctggaaatctggagagacaagcgtgcgattcactgacaggccgaagaagatacacggtccaattcactacaatggtgcaggttaatgaggaaacagggaaccgacgccctgtgatgctgactctcctcagggtacctcggctgaataaaaattcaaaaaacagcaatggacaggaactagagaagacgctggaagaaagcaaagaaatggataccc

SEQ ID NO: 9234 - DNA, 856 bp, Homo Sapiens
ccagggcttttgcctgcacacagcagacacaacagtccgtccgggcacctgacccacagccgcagcagcagcaaaggcagtgtggaggagatcatgtcacagccaaagcagaaggagctggcaggcagcgtgcggcagaagatgcttctcgactacagcgtgtacatgggcaggtgtgtcccccaggaaagccgaagcccccagaggagccccctgcagagtgcggagagcagccccacagctgggaagaagttgccagaggttccaccctctgaggaggaagaacaggaagcctgggtgaatgccttgcttggaagaatattttgggacttcttaggagagaaatactgtctgatctggtgtctaagaagatccaaatgaaactcagcaaaataaagctcccctactttatgaatgagctcactctgacggaacttgacatgggcgtggctgtgccaaaaatcctccaggccttcaagcccttacgttgatcaccaaggacactggattgatttggaaatgtcctacaatgggtcctttctgatgactctcgagaccaaaatgaatttgcctaaactaggtaaagagcctcttgttgaagccctgaaggttggagaaattggcaaagaaggttgcaggccccgggcattctgtctggcggacagcgatgaggaatcctccagcgctggctcctccgaggaagacgatgccccagagcccagcgggggagacaaacagctcctcccaggggctgaagggtacgttggaggtcatcgaacaagtaagattatgaggtttgttgataaaattaccaagtcaaaatatttccaaaaagcaacagagacagagtttatta

SEQ ID NO: 9235 - DNA, 620 bp, Homo Sapiens
  misc_feature (531)..(561): n is a, c, g, or t
gggaattcaaacctctcacagagtacactagacatacactagagacaccttgtagtattttgggagcaaaaaaattattttctcttaacaagactttttgtactgaaaacaatttttttgaatctttcgtagcctaaaagacaattttccttggaacacataagaactgtgcagtagccgtttgtggtttaaagcaaacatgcaagatgaacctgagggatgatagaatacaaagaatatatttttgttatggctggttaccaccagcctttcttcccctttgtgtgtgtggttcaagtgtgcactgggaggaggctgaggcctgtgaagccaaacaatatgctcctgccttgcacctccaataggttttattattttttttaaattaatgaacatatgtaatattaatagttattatttactggtgcagatggttgacatttttccctattttcctcactttatggaagagttaaaacatttctaaaccagaggacaaaaggggttaatgttactttaaaattacattcnnnnnnnnnnnnnnnnnnnnnnnnnnnnnnntaaaataccagttttttttctctgggtgcaaagatgttcattcttttaaaaaatgtaaa

SEQ ID NO: 9236 - DNA, 310 bp, Homo Sapiens
gaattctgtcaagcaagataccgataagggctaagagttgttgaaagtggctgtggacacacaaggcatgggacattaaaggtcagtgacaagatcaggtaccaatgaacactgcccagcatgccaccttcggtatgtctactgaagggagctgatacctgatggagcagctggaagaacctgaaggtgctgtttctagcatatttttgagcccttaatgtgggcctgacccatgagagctctcaaggagattgtagttgagtaggagagagcaccaagtgcatagatgctcccaaaacattcgcccgca

SEQ ID NO: 9237 - DNA, 411 bp, Homo Sapiens
ctagcgaccaaatgagcgatagcacactgggaaaggcaagaagtcacaccaaaacccatccctattctagctgctggtttttgctcagacaaaatgtcattgttgcttgtatacggcagttggtttcagcctactattgagcgagtggctttaaactccagagaacctcatatgtgtttagtaagagatatttcaaactgctgggcccccaaagtagaaacagctataacaaaggtgaggacaccagtgatgaattctgaagcaaaagttctggtgcctgggattcctggtcatcatgcagctatcaagcccgctcctccacaaaccgagcaagtagagagcaagaggaagtcagggggaaatgaggttagcattgaagaacgtctgggagcaatggatatagacacacac

SEQ ID NO: 9238 - DNA, 710 bp, Homo Sapiens
ccggtaccagaacgtgtaattagacaaaatcctccagtgtatatcataagccatttggcctccaatgtcagtaagacaacctagaagtctctgagaggagagaaatctttccagatccatcaggagacacagaagtcacatgaaagcgttcctacagacacatgaaaatgctaagggtatctttggacactgaggactctcccaccaacagccacactgacaacagcctttggtgtctcactcagaggagtccctggtgggaagccaggctgtaatctgtcacaagagcatgtgagcagaggccaccttactagataaaatgcagctggttaccgcattccctggagggacagtgacctccgacagacaaggtgaggcaggcagacaaaacagtgggcaccgcaaatgaacaggcaggcgcggagtggtgcctggaggaaagcctctgacctggagccgagggagagctgctagataaacaagccattataagagggtaatattccatcctagtgtgagcggaagctgggaagaaaaccaactgtaggcctgatgtggactgcagctggcaggaaggctgcagagctcggttcaaggcaggagatcctgcccctgtcctggcacagaacactaacagcaccactggatgtggtgggaggaggaggaaggaaaatctatacatttacggacctgaaagcagtcgtttacac

SEQ ID NO: 9239 - DNA, 227 bp, Homo Sapiens
gaacgcctagattatgtggtgctgggctcattcgcctcattaacggatcagcatcagaaacgtgctgctggcagacactgtcatgttcaccattggagctctgtctgtatggctggctgaccaccccgtcatgatcaacagtgttctgcccttggtactgcatgccctaggcaatcctgagctgtctgtctcttctgtgtccaccctcaagaagatctgccgagagt

SEQ ID NO: 9240 - DNA, 425 bp, Homo Sapiens
  misc_feature (251)..(259): n is a, c, g, or t
cgaatgtgtaacaacgacctttcaaacttccagatacaggtgacaaagaacatttttaatataatttctattttcaagatttaaaaattctatctacttttaatgtctacctagctgtcacctcaaaaaattcaagacagattctaaattttaaaaattttccaattcatgttccaggaaatttaagtgaaagggaggaaagctataactaaaatttactaatggctagtagtactaatatacatactttnnnnnnnnnttaccaaggaataaatatttaggatgctccacgagaaaaattatatctgtaagcagctttcaatctcctcattttatgaatgttttggttacttcagctattaagtttaatcagctataatagcctttttccttccatcttaagaatgtcatggatgaggaggata

SEQ ID NO: 9241 - DNA, 159 bp, Homo Sapiens
aggaacgtcactaatgaaggcaggacccaaagttatttccagttcctagtcctgctttctgtagctgtaggtatgagtatagttggctaagataacaagaacagagagattgcccactctgggaaccaaatttacatggcaagtagacgttacggtacc

SEQ ID NO: 9242 - DNA, 345 bp, Homo Sapiens
gctggtccagaaggtgtacaacgacattgtatcacaggccacatagtgtggtaaagccaataggtcctacaggatatgtcaaggagatggatcttaagctcacccttaaagacaacagaatttggacaggaaaaaaatagccacaggatctagtccactgggatctgtcaaatggatttttcaaacttctgagcttacttgagaagaaaccaggagccaggtgagagaaaaagtaaggttcttgagcagtttctctcaagtcttcagggtacaggaagacttgtctgactgaaaaaatagatctgcaaagatagcttgggtcgttgtacaccttctggtccagct

SEQ ID NO: 9243 - DNA, 346 bp, Homo Sapiens
cagacgagcatgatccaagcacagcctgctgggatgttcccttttgtggttagcagggtctggaggctcagtgccccctgccacagctccacccagtgagcacagagtccactcaatgcccaccttggtcccttcagctgaatttgtggctgggccctgttaactgctggggcccccattgaggaagtaggtggtcatctcccccttgcccttcaccttgaccacccctcgacactccagctggtagcccttggcagctagaacctggtacaggtccgtggtcacctgggggagtgggaggggagcccgcttagcctggatccttcctgctgcatttgcggggcca

SEQ ID NO: 9244 - DNA, 514 bp, Homo Sapiens
  misc_feature (57)..(68): n is a, c, g, or t
cgaatgtgtaacaacgtcaaccaccaaactcccttaggtctgatcctaggttaaatnnnnnnnnnnnntacctactcagacagaatcacttacttcgtggagacagccatgagctgtggggataaagtcagcgggggagggaaagcgtagtttatatctgcttatatctgctagtactctgaccctgggctgggaaaataatatgcacatataacttgaagtgactaccaaaccaccataattttaatccatcattgagaaccatataaaaccataaaatataactataccaaactgagtgcagtaagtggccaattaagaagtaatcagagttccatagggatagtcaggataggcttcctggaagaggccggatttttactaattcccaagatgagtcaggcctaatagagaagtgaggagaagggtgacaataagggaggggtaaagaggcagaagggaagccgggatcatagcagctagtttagaaataaaccaaagggaccccattcta

SEQ ID NO: 9245 - DNA, 473 bp, Homo Sapiens
accggacgttactgctgacagcaaacagtcctccagccatggtaggtgatctgatggggtcaattcttgatatccgcctgtccctttcctgtttggggacagaatgccactgaaatgctaaacgccagtcaaacccaccaatcatgggctcccctatctgcatatagaattcaaaagtattccaatcaattgtgtctataacaggacacacaactgctgtttcatctctcccaatcctttccaaaagcggttccagccaaccggaattacactcacagtgacaatccaggaaagtgaggacgtccccagtggcgaaagtggccccaatcagacgggccctaaccagcccctctcgcttattggtcctaatcaagcgtactctatcaagattgctgatgtaagtttcaagttgtgtcttcaaataaactctgtcactcaagtcatccaccaagatgatctctttcaaaagaact

SEQ ID NO: 9246 - DNA, 529 bp, Homo Sapiens
ctaggctggaccagaatgtgtacacgacgaagcgtcttgtggctcagctcaggctcagctgaactgaagaagcaattatagcttttaattcaaaaataagattcccaaggattggtgccatttgcccattaacttcacagattatacctattagtggtcaagacaaacacgtggctctcagatctaaaccttctttagggacactaaagaaactgaggcttgggacagacagacaccaggcagagctgagcaggtaacttaacagctgacactgagggagcagaaaatggcatttctctcattctgcagcagacacggggcagtgtgggccagatgccaagtatgaggccaggacaccaagccagtccctgggccctcactgctcagccaggacccttttctcctgaactaaaccatctgggtttagttgaactaaacctggggctgcccgtgcaaaggcatctgccacattcagttctcagcaagtcggcaacactgacaagcatccctgcaagagaggtgaagactc

SEQ ID NO: 9247 - DNA, 378 bp, Homo Sapiens
tcccggaggaagtccaccatcactgctctgctcttcggggaggatgacctggaggcactcaaggccaagaacatcaagcagacggaactggtggctgacctccgggaagccatcctgcgcgtggcacgccacttccagtgcacagaccccaaaaactgcagcgtggtgagtcgccagctccctgggctgctaccaaacacggccctaactcctccaacccccttggtgggcctgtgttcactgtggcaggagctgactccagactatagcatggagagccaccagcgggaccacgagaactacgtggcgtgctcacgcggccaccggcgccgacccaaggccctgctggacttgagcgcacacacgacgactgttccc

SEQ ID NO: 9248 - DNA, 418 bp, Homo Sapiens
ggcggacgagaacgtgtacacgacatacaggtagtggtcttctcattatgctatttctataaccactgtaactctgaatcttattttaatctagaaaagatactgtattcttccctaaaccccaggttaaatcagacagggttggacttctcctcattgcatggcatcatcggaatgaatcaccctaacaaagcgacatgcttgtgtccctctgtggaaaattgcatttcatgcattgtgagaaaaaaactacatccagatttcatgtgagtgtttatcttgcagaaattcttggatacagttctgcttcatgattcattttccactctttattcatgttgagtcctctctagtgctggaatcatagcgaccagaggccatctctcttcaaatgtaaaaagtcgttgttacacattct

SEQ ID NO: 9249 - DNA, 685 bp, Homo Sapiens
cccagaatgtgtaacaacgaccatgaatgatgtgatttgttccatgtatctgtggaacatccctcaccttcctccggtatgcgccttctgcactccacacgtggtcgcctccatcctccctagtgtctgtcagcttgcctggtcaccaagtcaggaggaagaagatgaggaggctcaccagttgtagccaagactcttcctctcgggagtatcttggtaataatggcccagttttcagggcacagttgtacacattctacttaatatggaggagttcagtgatgccgtggccaaaagatgttatgcccatttctaaaagcctggcatatttggtataacttaagcaccaggtaaaatctggtgcttaagttgtaccaagtattagccaagttttaactgtcgttgtgtattaataagatttaatttttatgcttgtgcttttcaaaaataaagggcttgctttcaatagtagaatgacaaagcttctcctccaatgacaatctgttagcacccatagttgacttagctcagtgacatgagactgacttagctcaggacatgagacatttcctggaagtgatttccatgagatacataaggcttattcctttaacttaaacgccaaaatttgttattttaagttattgtcaggtcaatcatctcttatatactttcacttacataa

SEQ ID NO: 9250 - DNA, 299 bp, Homo Sapiens
cgctggaccagaaggtgtaaacgacccagagggtgctacgttcgcattttctttttgaatcattgtcgttcgaccgattaaaaatagagaaaaagtaaaatgttttatttattttagagatgttggaagttgttgtttttcctgtctaatgtcttgtatataattaggaagttgtccagaaacttgcgtctctgattttggtaaaaatcttcctgtcattcagctgtgtaggaacgaatctccaaaataaaattgtccatctttagcctgcaaaacaaatggtcgttgttacacattct

SEQ ID NO: 9251 - DNA, 290 bp, Homo Sapiens
cggcgagaaggtgtacaacgacaactcctatcctgcttcatcattgtttgttctatagcgcataaagtcatctaccatcctgtatctttttacaatctgtcttctctaactggaaaataaactctacccagacaggttcttgtctgttttgctgctgcacccagacagtgtctggcacatggaaggctacaaatacttatttaataaatgactgaattaatgttttcttttagattcccgtgcttgaaagattagaccagtaactctatagccccaaaaaaagaagaaaa

SEQ ID NO: 9252 - DNA, 463 bp, Homo Sapiens
agaatgtgtaacaacgacccccaactaaacaccattttcattttcctttccataaaagattatgttactaagtccctagataaaggtacctgcagaagaaactctgaacttcattattttcttctagctttgtataatttcaagatgatgaatttaaaatattttatatttctacaattaacatttgctttttgtaaaacattaataatgaaacattaccaaggaggaaaaagtcatgtataatctcaatccatatatgttcactaatatcagtgaaattattttcttcttcacactaacattttacatagttggaattattctgtaatattatcattgcttctacccattctacctcctatgctatcagttaagctaagcaactacagtaaaaccgtgcttgctaagaagaaatagcaacaaaacccccatgtcactcatctgacagtcttttacacattct

SEQ ID NO: 9253 - DNA, 819 bp, Homo Sapiens
  misc_feature (400)..(418): n is a, c, g, or t
  misc_feature (554)..(562): n is a, c, g, or t
  misc_feature (673)..(683): n is a, c, g, or t
caatgatagtctttatctcattgaacactcactgcaatttcgatggtctcattcgttcattgagcatatatattaggtgtgtcttccaagggtcatcccattcgggacttaatacagctggaaacagtggtggcccgcccccaccccagtggagctcaccttccagtaggtctaaactggtttgattgagttccatggaaaacaacaaagtggggtaaggggaaaagtagtggggagctgagggggtcagcatgacatggaagcagaaatcaagagacaaggctttgtggggtgcgggtgtgggtccaagtgccaagggccagggagctttgtagagtgtgtggctatgtttctcagtgtttcctcataggtggttaactaatacatttgttcatgcgtnnnnnnnnnnnnnnnnnnngtgaagaataaatcagtggaatctcacgacgaaagcagaagggtgtagaagaagggccaaagcatgtaaagctgaaaaaaaaggatatttgttagaagacccccctaaccctccgaagaaaattctttaaacccannnnnnnnnggcccccccggatcccccaccaggaaaaatgaaaccggggccttaattgtgttctcccaacgaaaaacccccgggcacagaacaaaagagggtgtggtttttttccccacnnnnnnnnnnnccgcccccgggggagaaattaaagagcgattttttgaacaaaaactcctcaaaggggggcctgctggaggggcccctcttcttgggggggttttttttcaacaccagggggggtttcgcacgcggcggagccccct

SEQ ID NO: 9254 - DNA, 680 bp, Homo Sapiens
cctgttgctttgctttggctaggcataaatagatcaccccattagaaaatcagcttagaaacccaacccggtaaaaccagtgacgttttcacaggcatcaaaatgggtcaacatatttcactggcacctattcacaagcttgaagaagctctgtatgaatacaggccactgcagatagagacatatggaccacatgttcctgagcttgagatgctaggaagacttgggtatttaaaccatgtcagagctgcctcaccacaggaccttgctggaggctatacttcttctcttgcttgtcacagagcactacaggatgcattcagtgggcttttctggcagcccagttaaccatttataagatttggaccttggagctgaaccagggagctagcaaaagtaaagcagacttataaaattatagctatgtgcagctgcacaacacagtccttccactagcagctgtgttaaagtatttataaggagaaaatttcagaactaagttgagtaatataggggatatatatttgtgaaaaataatttttacttatatttttcagaggatttgacacgataagcctcatctgatggaagagaggaataaataattcacctatatgtgtttgaggttgtgacagacttataaaatctttttaaaaaataaagctataatttatacgaag

SEQ ID NO: 9255 - DNA, 816 bp, Homo Sapiens
ctaaggatccccgacgatggtgcaaggaaaaggagggctcaggaagaggccaaagaagcagaaatgagcagaaaggagttggggcttgatgaaggcgtggatagcctgaaggcagccattcagagcagacaaaaggatcggcaaaaggaaatggacaattttctggctcagatggaagcaaagtactgcaaatcttccaaaggaggagggaaaaaatctgctctcaagaaagaaaagaaataatggaatttttctcttcaaaggtccttaggtgtaaattgatgccatcgtaggcaaggtgcaggcaggatttgaaggcaaaagtcaattcagctcttgagaaaaggtgtctttccagcctgaatttttcagattgactagaccaagcagaatctctcaacctgatcttagtatttcctagaaagcacttgacattgtgtgaggtctcacctgaaggaacttggtggtgacatttgggagggtggagggaggcagtgtccttcctgacagcacttgcctccatggatcttctgtacacagaactcttatctaggatgtggttctgttcatgctgctttctgcgatgtgcgtgtctgttagaataggctctctacccagctagaacaccttccagacacttgctggacagctatcttccacatacttcccagtttacatttggtcttaatgatcttgaatagatcctctcttcattttactcagccaggttttgtactgatgtacaggtgttaaattacttcaagcatttttgtaagaggtgtatataattcaataaaaaaggtaaaacatgaaaaa

SEQ ID NO: 9256 - DNA, 366 bp, Homo Sapiens
ggggcctgccgcatctccgacgactttggcgagtgctgctgcgcgccctacctgcccggaggcctgcactccatccgcaccggcatggcgggagcgctaccacatccagggctccgtcgggcacgactgggcggccctcaccttttgtctgccctgcgccctctgccagatggcgcgggaactgaagatccgagagtaaggaagttccctgtcttccccgtccttttccaccagtctcgcctctggccttctctggccactcctgggagggactgcctcaccacccctgtccccctgccagaaatacacccacaataaaaacctgaaagccgcccaaccagagaaaaataaataaaataaacatgt

SEQ ID NO: 9257 - DNA, 943 bp, Homo Sapiens
ggcagctccgcatgcgcgcttcgacgacggcctggtgcacctgtgctgggtgcgtagcggcatctcgcgggctgcgctgctgcgccttttcttggccatggagcgtggtagccacttcagcctgggctgtccgcagctgggctacgccgcggcccgtgccttccgcctagagccgctcacaccacgcggcgtgctcacagtggacggggagcaggtggagtatgggccgctacaggcacagatgcaccctggcatcggtacactgctcactgggcctcctggctgcccggggcgggagccctgaaactaaacaagcttggtacccgccgggggcggggcctacattccaatggggcggagcctgagctagggggtgtggcctggctgctagagttgtggtggcaggggccctggccccgtctcaggattgcgctcgctttcatgggaccagacgtgatgctggaaggtgggcgtcgtcacggttaaagagaaatgggctcgtcccgagggtagtgcctgatcaatgagggcggggcctggcgtctgatctggggccgcccttacggggcagggctcagtcctgacgcttgccacctgctcctacccggccaggatggctgagggcggagtctattttacgcgtcgcccaatgacaggacctggaatgtactggctggggtaggcctcagtgagtcggccggtcagggcccgcagcctcgccccatccactccggtgcctccatttagctggccaatcagcccaggaggggcaggttccccggggccggcgctaggatttgcactaatgttcctctccccgcgggtgggggcggggaaattcatatcccctgttcgtctcatgcgcgtcctccgtccccaatctaaaaagcaattgaaaaggtctatgcaataaaggcagtcgcttcattcctctcaaaaaaaa

SEQ ID NO: 9258 - DNA, 942 bp, Homo Sapiens
  misc_feature (88)..(88): n is a, c, g, or t
  misc_feature (319)..(362): n is a, c, g, or t
  misc_feature (483)..(491): n is a, c, g, or t
  misc_feature (585)..(598): n is a, c, g, or t
  misc_feature (626)..(626): n is a, c, g, or t
  misc_feature (668)..(676): n is a, c, g, or t
  misc_feature (709)..(709): n is a, c, g, or t
  misc_feature (715)..(716): n is a, c, g, or t
  misc_feature (722)..(723): n is a, c, g, or t
  misc_feature (727)..(727): n is a, c, g, or t
aaacgccgactgtgtatagcgacagcgacaaaacgcggggcccacacgggcacgacggaagcgcgaggaaggcagcagaccggccggncgcgaaacaggcggcggagtgcgctcgagagaaccgaaaacgccccccgtcacccgcgcgggtactgtgctcgctccaccagcgcgcgaagcgtgctagggtgaagtggcggggcggcattcacgtgggccgacgcgtaattgccggcagggcgcggccgctacggccatactagcggaatcttctaactctgcggaggtggggtaaagcggaccccacgagaacgtttgnnnnnnnnnnnnnnnnnnnnnnnnnnnnnnnnnnnnnnnnnnnncaaagtcgccggactggcacggacccgatctaaggccaacgggtatggcgcgtaccggggggccaggttgggggcggcaaagcgggcccgacggtggggagagaggcaaaaaaaataactnnnnnnnnngcgggccggccggggcggccccgcacatttgggggtcggctgggggtaataaacaattcatcccgccgaccaagaatcaccaatgggcgggatnnnnnnnnnnnnnncgccccccccacaccaaaaagggcgggntgccgtccctgacccaacgcaacccgtccttcccgccccccnnnnnnnnnaaacccaggttgcaaacaagccatttccatttntaagannaggatnncttncccagaacacacacaacgaagcagttgtctaattgaaaatggagacaaggtctttcttggaagagagtgcccaagtagatactctctgccccaagactaaccaggtcccttttaaggtccctgagaacagcagcctgggagcaaccaagcctttcaaaggctgacaaggcacagagtggatgaatggaacgaacgatacgtcgtcttcctcctcc

SEQ ID NO: 9259 - DNA, 641 bp, Homo Sapiens
gggaatacattgttgagtttctgaagaagaaggctgagatgcttgcagactatttctctttggaaattgatgaggaagggaacctgattggattaccccttctgattgacaactatgtgccccctttggagggactgcctatcttcattcttcgactagccactgaggtgaattgggacgaagaaaaggaatgttttgaaagcctcagtaaagaatgcgctatgttctattccatccggaagcagtacatatctgaggagtcgaccctctcaggccagcagagtgaagtgcctggctccattccaaactcctggaagtggactgtggaacacattgtctataaagccttgcgctcacacattctgcctcctaaacatttcacagaagatggaaatatcctgcagcttgctaacctgcctgatctatacaaagtctttgagaggtgttaaatatggttatttatgcactgtgggatgtgttcttctttctctgtattccgatacaaagtgttgtatcaaagtgtgatatacaaagtgtaccaacataagtgttggtagcacttaagacttatacttgccttctgatagtattcctttatacacagtggattgattataaataaatagatgtgtcttaacatt

SEQ ID NO: 9260 - DNA, 486 bp, Homo Sapiens
ggtctgaaatgtggaaatggtttctcacaatttaaaggaaaaacccactttgcacccatgatcccatcattttggttgagattttagaataaaaaatatagtgttgagatccgtacttttgtaatcagaccaccaagcatgcctgtggcaaggcagagaggaaaggtctggagccagtgtattgcagtttcatgctacctttacctgctaatcataaaaattatgttttcaaaagtagatgatactagccttacacccaaaaacatgttctgaattagatgccccctcacccaatttttattaagctttctaaattccagccacattgctgtacatcaacattggtttcattcaacagacatttttttggcctgaagatacaaggttcagaaagaggccatccctgccctcaaataactttcatactggtgtatgatgaactgaccattaatagtttaagtgcttacaagctatgtttctgttcaa

SEQ ID NO: 9261 - DNA, 1140 bp, Homo Sapiens
  misc_feature (170)..(170): n is a, c, g, or t
ggggatctacccgctgttgcggatagagacgtaccgcggggtacgattatttctcttccataaatatgcgcgctttccatagcggcgtttaggcacaccggttcttcgttatatacggtagcgcaccacccaggcacgggatcttgatagacatcacgccgggcatttantctaattgtcttctggagtgtcgagagacggcagggtgatccgcttgtgtggtgagccacgcccagattgatcccaccaagtcgggctaaacattttatagtggcggcccagggggcgacccaacaggggaatgatgattctcacgcgcggggtgtttttttgagggggtgcgaggaggtgcggccctgcaccaaaatgggaataaaccagggtctgggcctagaaaggggttcacagcgaataccccacaccactcccttgtttcttttttgtggcttccggccggcgcaataaggcatatacattgggaagaatcctattggcgcggtcgcccatggatcccagttataccccacgcacacagcagcgttcgggtgggttccatttgattgttgcgaaagcccagtgagtgctgtcttttcgaaggttcccgcaaatccccatgccttctaagatctttgtgaaacaccacaactttctcctcaccagttctgtgggtcagtattgaaactttattacaaaattataaagcagagctctgtaacaaaataatacacatttgggtttgctttaacctccaagtaagtctgagaaaatcttaataaaagccacttgaagtaacaattcacatccaagagatttccacaaatttatacaatgtatattgagcactagttcctgtacagcttattcttattagtttggatccaactattccaatgtattatgaaccagtcagctatctgtcttttgaaacaagtcttaactgaaatctcagagtaatcagcaaaagctacggaataattctaagaattagatgtttccatatcattaaaaccaaggatccatgaggggcagaagggaggattcaaagatttaaaaaaaatcaaattttagaccttggttaaatattaactggaatgggatcttggaactcccaactttaatttggtgtaataaaaatgatgc

SEQ ID NO: 9262 - DNA, 351 bp, Homo Sapiens
ctactgcactccagcctggatgacagggcaagaccctgtctcaatattttaagtcaagggtttgtagtaatgtattcagtgccacttcttgccatcactttgcaattattgaaatgggaatactgagctcagaaagcaaatatgatgctttcatgggagatggagccacatttgtgttctgggtgggatcactagtgcaggagaacattacattttcttctgaaggcaaaatgcttgtaggttttgcctctactttgtatttacttttaaaattgcacttgttcacctaccagtgtttacgaaatcctgtatttgggatgctttttctataataaaatattataatttgaa

SEQ ID NO: 9263 - DNA, 950 bp, Homo Sapiens
gcgacctctacccacacaagctacgagaacactggcctcctttgcatccatgccagcgccgacccaagacaggttcgagaaatggtagaaatcatcacaaaggagtttattttaatgggcggaaccgtggacacggtggagctggaacgagccaagacgcagctgacatcaatgctcatgatgaacctggaatccaggcctgtgatcttcgaggatgtggggaggcaggtgctggccactcgctccagaaagctgccgcacgagctgtgcacgctcatccgcaacgtgaagccggaagatgtgaagagagtcgcttctaagatgctccgagggaagccggcagtggccgccctgggtgacctgactgacctgcccacgtatgagcacatccagaccgccctgtcgagtaaggacgggcgcctgcccaggacgtaccggctcttccggtagaaccgctccccggcctgacagacccagggagctgcagctggagcccgttcccgtgcgtgttagtttggacacgaatttagtctaaaaagctgtctggttgtataaacggtgcaaacaatgtcgccacagcacccacgcggtttgcattcttttggaactcaatgtgccgatcagtggagtcagtatcgagcctgaccaccgcaagccaggaagcaggtgaagtgcccagcgctggagtgcagcgtgccacgaggagggcggtcggtgcttccctcctcgggctgtgggcacatggggccccgcaggttccttggaggagccctgagctgggaggcagcaaaggctgacctatcagagcctcccggaggccaccgtgctgggtaccaggactcacctctgacaagcaggagaaggtaagggcccggtcagctccaaggagcgcgctccacgcgcgtgcacacagcttccctggtaataaagagctggcatctttcttaaaa

SEQ ID NO: 9264 - DNA, 161 bp, Homo Sapiens
atgtctacttgcttagttgacccataactggtactgacccagtatgacaagttctattctattccttttgcaggaatgaataaaacctattagctctcgttcagtcaagatgatgatcttaaagacattcaaaagttattgtacatttaattctcacatct

SEQ ID NO: 9265 - DNA, 1582 bp, Homo Sapiens
tggagttcattgccgttagccagctccgcggcatccacccagggcaagatcctctgcttctatggcccccctggcgtgggtaagaccagcattgctcgctccatcgcccgcgccctgaaccgagagtacttccgcttcagcgtcgggggcatgactgacgtggctgagatcaagggccacaggcggacctacgtgggcgccatgcccgggaagatcatccagtgtttgaagaagaccaagacggagaaccccctgatcctcatcgacgaggtggacaagatcggccgaggctaccagggggacccgtcgtcggcactgctggagctgctggacccagagcagaatgccaacttcctggaccactacctggacgtgcccgtggacttgtccaaggtgctgttcatctgcacggccaacgtcacggacaccatccccgagccgctgcgagaccgtatggagatgatcaacgtgtcgggctacgtggcccaggagaagctggccattgcggagcgctacctggtgccccaggctcgcgccctgtgtggcttggatgagagcaaggccaagctgtcatcggacgtgctgacgctgctcatcaagcagtactgccgcgagagcggtgtccgcaacctgcagaagcaagtggagaaggtgttacggaaatcggcctacaagattgtcagcggcgaggccgagtccgtggaggtgacgcccgagaacctgcaggacttcgtggggaagcccgtgttcaccgtggagcgcatgtatgacgtgacaccgcccggcgtggtcatggggctggcctggaccgcaatgggaggctccacgctgtttgtggagacatccctgagacggccacaggacaaggatgccaagggtgacaaggatggcagcctggaggtgacaggccagctgggggaggtgatgaaggagagcgcccgcatagcctacaccttcgccagagccttcctcatgcagcacgcccccgccaatgactacctggtgacctcacacatccacctgcatgtgcccgagggcgccacccccaaggacggcccaagcgcaggctgcaccatcgtcacggccctgctgtccctggccatgggcaggcctgtccggcagaatctggccatgactggcgaagtctccctcacgggcaagatcctgcctgttggtggcatcaaggagaagaccattgcggccaagcgcgcaggggtgacgtgcatcgtcctgccagccgagaacaagaaggacttctacgacctggcagccttcatcaccgagggcctggaggtgcacttcgtggaacactaccgggagatcttcgacatcgccttcccggacgagcaggcagaggcgctggccgtggaacggtgacggccaccccgggactgcaggcggcggatgtcaagccctgtctgggccagaactgagcgctgtggggagcgcgcccggacctggcagtggagccaccgagcgagcagctcggtccagtgacccagatcccagggacctcagtcggcttaatcagagtgtggcatagaagctatttaatgattaaagtcatttgcagtacaaaaaa

SEQ ID NO: 9266 - DNA, 365 bp, Homo Sapiens
cctaattaaatgatgaaaccatcggaaggataataggagctttacaagggtcaggctgttgttgctctccaaacctccgaattgtggtcttatgggaatatcaagatgcccagaaatacaaattaaggcaatacttcggatatatttttgctaaaagaccacggcaccctctctgctctccgatttagcacccagttcataagaaggagggggcaggcaggatgaatcggcagcttgggagacatcagagcccatggggagggctgcaggacagctgggctgctccttcaccaggctgggaggggccagaggggagaaaagaccctcgtttggatcctgattcaaagaaccatctattaggaaaa

SEQ ID NO: 9267 - DNA, 918 bp, Homo Sapiens
  misc_feature (486)..(504): n is a, c, g, or t
agagctacactttatgggtaacagtttcacctgtgatacagttccctagaacattttcccaaaagtagtgaactgcaaagtgcttaggtttgacatttattgtagcagaacagtaatatcacagtatgggacaaaggtttacactttgcagggtattctttgggggaatgttaaatactgtaataaaaacatgttcaatcatggtaaaatgttcaacttgttaaaattacaaatgaacaaaaaaaatttttttctcatatattgcctaaataccaaatgaagagcttaaacttaagattcaatgtgaaaacgagtaaatatgttcctaaatttgcagaaaataaaagataaactgtagaaaaaggtattttgatttacagttcacaaaactgtatctgaacatttccccaaaaaaatctaagtttcatttcaagatcgtaaactacgttcactgtgtccatagttaacaaataactaccccaaatnnnnnnnnnnnnnnnnnnncttgcagccacattgcaaagttcacagatcctgcggcaaccgctagtgttctgcagaggcccctcctgcactcagaagctcgatttcctccaatccaatgcagctggtcgggtgggcggttacggactggacaaaacaatttaacaaccccacttcctttccgaggacactcttcacttcgtagctcccatcttcaccggcggcagaacctcagcagggaggaaatgctgcgccgcaacagcttcgctatgttggagtgagctaggagtgcgtgcgtgctctggcctggccccgtaccttgaccttcactcttgcactgcggtcttgagcggcagtccaggaagacctgtcaggtgcctcttgagaacaggagatgtgaccacccgggagcagtccccacaggaaaaggcgcct

SEQ ID NO: 9268 - DNA, 515 bp, Homo Sapiens
cagtataagatgctacctcagtgctttattaggggaatattgacttagttcatattccagagtggagacagtttgcaaacacatgtatatactctctggctgccccattattggagcatatgttggccacttgtgggtgtaaggagttaggtgacctgtggtcttgaaactggtctgcccataaccaagccttcactaactcaggtctctacccaactgagccattattaaacctcaggagcactataaatttactgacttttataaaccattcaactaaatagccttctctaaagcatttggtaagagtaatttgatgctctgatcatctgccaattcattttatgagtccataacctaacagaacccatctcactttcctttcagagtcattttcatcattgagctttgtatcctgtttagattcttcttttctaatcttttcaggactgtatgagttggatttctcctggttgcaagtaacagaaacaaatcttcaggtacataagaagggg

SEQ ID NO: 9269 - DNA, 1165 bp, Homo Sapiens
  misc_feature (441)..(547): n is a, c, g, or t
  misc_feature (1062)..(1063): n is a, c, g, or t
  misc_feature (1075)..(1075): n is a, c, g, or t
caagtgatacactggtgcttggtactttgttagtgctaactccagctttgaccatagtatctgtaccagttggagggttaaatttaatagtagtcccagtaggagcagctgtaaaactacttggcccaaagagggagccagatgtgctgccaaaaggattagaggtggtatttgtggttccaaggagtcctccactgctagtactggttccaaaattgccaaagccagttggtttattttgtccaaatgttgaagttgtgccaaagccacctgtgccacccccaaagggtgttccaaatgatttgttaaacatcttcaaaatgagtctttgtttcagaaagcgcggttcggtgggggccgcgcgctgctctgtgagcggcgggtggcagcaggggactcctgacacttccccttccccaccgaaccgcgagtttcgctctnnnnnnnnnnnnnnnnnnnnnnnnnnnnnnnnnnnnnnnnnnnnnnnnnnnnnnnnnnnnnnnnnnnnnnnnnnnnnnnnnnnnnnnnnnnnnnnnnnnnnnnnnnnctttctgaaacaaagactcattttgaagatgtttaacaaatcatttggaacaccctttgggggtggcacaggtggctttggcacaacttcaacatttggacagaatactggctttggcactactagtggaggggcatttggaacatctgcatttggttctagcaacaatactggaggcctctttggaaattcacagactaaaccaggaggattgtttggaaccagttcatttagccagccagctacctccacaagcactggctttgggtttggtacgtcaacaggaacagcaaataccttgtttggaactgcaagcacagggaccagtctcttctcatcccaaaacaatgcctttgcacaaaataaaccaactggctttggcaattttggaaccagtactagcagtggaggactctttggaaccacaaataccacctctaatccttttggcagcacatctggctccctctttgggccaagtagttttacagctgctcctactgggactactattnnaattaccctccnactggtacagatactatgggtcaagctggagttagcactaacataagtaccaagcaccagtggtattactgctatgaaagaatatgaaag

SEQ ID NO: 9270 - DNA, 281 bp, Homo Sapiens
tgatgagaaagagatgggctaaatactggctcaatgtcccaaagataggagatggccatgccaggatcgtagagccttcagtcggcctctactcctcatgtaagaagaatggctgtgcagggttttgccacctggagtaagaactgcctaaatatgtatcccagggaggattctaagacctgcagaactccttgctcccagtccctcctctttttcatgccttctcattcatactaagccagaagctgtgaagtgcaagtagagcaatagacttccggacc

SEQ ID NO: 9271 - DNA, 301 bp, Homo Sapiens
  misc_feature (214)..(255): n is a, c, g, or t
ctggtccggaacgttactgccagactccacccctacccatggccaccatttgagaggctcacagagagaaagaaagcagtgttagacacgaagctgtgctgtcgtaaattatgaatgtgcattcttccagattttctccctctttagtcatttgtgtatatttttatatatttgtgcccctgtcaaatatgtgtaatagaaaaagccctcagannnnnnnnnnnnnnnnnnnnnnnnnnnnnnnnnnnnnnnnnntaaatgctacctgctcacagaatttaaggattaaaatataacgtga

SEQ ID NO: 9272 - DNA, 454 bp, Homo Sapiens
agaatgtgtaacaacgacgctcaatcattgatctaaatgggctaaatattttaagtctattcagagacagtttaacagtgaagtaggagttaactgtaatcagaaacctagtactccttaagaaggatcaagagaaaatggtaacttttggaaaatcccaaatattttaaacacaggaacatatctagttttgacaagccgtatggccgcagtataaatgcttccatcttcagtagctgttaaaacaagcagtcctttacaattttgacagagaacagaattcatttcctccatacagctgcattctttcaaagtccgttaaacattggtgtgacaggacttgatttttttggagcacagatatttactgtattgccccaaaggacctaattttaaaataaataaggaaaatatgtgtttatgtgagccaacggggtcgttgtacccttctcgc

SEQ ID NO: 9273 - DNA, 397 bp, Homo Sapiens
agaatgtgtaacaacgacatcagtacagaccctacagacacaaggataaaaggatacaagggaatgttacaaaaaactttgccaataaacttaactcagatgaaatggaaaaattctttgaaagacacagattactaaccctgacacaagaaacagaaaatgttaatagcactacatgcactaaataactgaattcattatttaaaatttcccacaaagaaaactacatctacatgagcttcactgataaaattcactgaaccagataaaataatcctatacaaactcttggaaaatacaggagacaagaacacttcccaactcattctaccagcccagcattaacctgatacccaaaccagacaaagacattacccaaataaaaccacacactatt

SEQ ID NO: 9274 - DNA, 828 bp, Homo Sapiens
aagtccgaactggaaggataaggcccctctgctgatataatgtataaactgccttaataagagtctctgtgtcctctctgtttggctgtatttgcattaacctccaggatactcccagcaatctgttcagttgcttactatttagcctagagacatcttcaagggtctctgttacaaatttcctaatcatttctatccaactgcaatccttctgcaaagttgacgcatttgccagggagaccatgatatcagacagtgttaaattcagtaagagatgatctatgttattggagagaactgtgcaatgcttgatgcttttatttggctctttccttttgtgcttggttatttcttttaagacatatggaaaacgactcataaaatggtgtttaaaatcaataaggtagttctttcgaagccatgactccaatttatgggtttcatcctgttgtttagagagtttccacagaagggaaataatattaagaacttgctgcataacctgtagaggttctcgttctataccatttccaacaggagtagctagttgtggaggtacagcttcaacccagcattcaattagcaatggaattattatctcaataaatcctttcaggttttcagtagatgacaggccttcatccacaccactcagtcctccaaccagataccgtagcctgaactgtgaactgacatttggctgtgaacccccattttcataaacctggatgtgttgctggtcgttggcatgttccttccagttgataaaaatggagttgctagtggcatggggattttctttctgttcctgaagtccttcactttctc

SEQ ID NO: 9275 - DNA, 358 bp, Homo Sapiens
aatgagcgataataatagatcagttatgtaataaggcagtgtgttgaatatgcatacgtcctggtggaatgaaccaccacagagagatacatgataccatacacattctttgagttttcttgtgttgtgtttgatttgtttgttttcaaggctatccaggctaactcttcccggggatttccttggagagaagagtggtccgctgaggctggtttgctttaacctctcctttatcaagagatgatgactggctttaaagaaaaataaagctgaaggttgtttgatttttattttttcccttttggttgcatcattttgagtgttttcatataaacaacaagaacaaaaaatcacaacc

SEQ ID NO: 9276 - DNA, 355 bp, Homo Sapiens
ggacccaaagacgcgataccaattggtggaaaggcacctccaaaggcaggactggactaattccaagcaactatgtggctgagcaggcagaatccattgacaatccattgcatgaagcagcaaaaagaggcaacttgagctggttgagagagtgtttggacaacagagtgggtgttaatggcttagacaaagctggaagcactgccttatactgggcttgccacgggggccacaaagatatagtggaaatgctatttactcaaccaaatattgaactgaaccagcagaacaagttgggagatacagctttgcatgctgctgcctggaaggttatcaatatcgctcattttgtccg

SEQ ID NO: 9277 - DNA, 371 bp, Homo Sapiens
gactgtgtaaacgacatcaccaatattgacacttcttactgagtgctgaaaatatagccagttagtatactaaggctctgaaaagatgagggatattatttccacataggatttatgatgtgtcttaatgtgataccgtttagctctgtttagaccatatttatgtgcctctctgtagggttaacaagtccagctttgacatacttcctgtagtcatcgtttcttaagggttgagtaattttatgccttatctgggacctcatgatatcatttatttgtaaacggtatttggaaaaaaattaatttgagatgccaaatggtattatttttcctctgatgagatagaatcagttgtcgttgttacacattct

SEQ ID NO: 9278 - DNA, 585 bp, Homo Sapiens
tgcttctaggggatccttatgcccattaaagtttgcaaacctttatccgcccctctcaaaagtataccatcagtctaggggaagacagtcacatatgcggccaggaagaaagcaacagccctgttttggagaatgcttgcttctcccagacatatatgcatggggatgaggacccagagagtctctattgacttcaaggaaattaaccagtaactcaagcttggcttgtggctctgtaatggagagacggaggacaggtgaagaggctgtctctgagatgagcatccccatctttccagggggcactggtatgcaggaaaaaaataacacataaaatggccagattttctacctatccttttttaagtggtgcaatcaccttttgtaagagtaaggggaacttttcttccttaatgggctaaagcatcatcaccctctcctatcctccatattcttccccttctcttaacttcctaattcctttggtggaggaggtggacaaacaagtagtcctcacaggaccaaaaccaagtttcgttttcagagtagatcctatttgaacatatcaagcacatcttccaatct

SEQ ID NO: 9279 - DNA, 497 bp, Homo Sapiens
taatgtgttacaacgacctctttgtaccactggccctggtatgactcaatgtgcccattcaatgaccaggacacagaggtcttagagagatgctccttgaggccccaggtgcgagccatgtacccatgccggagcatgaggcaagggacagggcatcgtctgtggggatagtgggggtagtggggtgtagtggtcagccagatttggtgactctacttgctcaccagacgatcctacaactgccacctccgatggatccaatgcctctgtgcctacctgtactgctgatgctccagtggataactcagcatcccagcctaggcccaatgccactgaagatggacctgccccctggggacccaggagtcctaccactcagctgtccccaggagtgcccagaccctcattcttatccaggacctaggagtcctacccctggccttccctcatcagccgtaaatgatgatttactgctgttaccatcatcactgccttca

SEQ ID NO: 9280 - DNA, 421 bp, Homo Sapiens
aagcggaccagaaggtgtaaaatgacgcaaaagatatgacagatggatataaactcactcttatcagtaacaaaatgcagctatttaccatgcaagagatttaaaacaaacacacagaaaggtcaaacagtaccaggaaggagcagggccaccagacaagtgcacctctgagcagaaggtgcctgcgggtcccccctgccaggaggaagtgggcattgcagcttggatgcacctaaggggagggcgtcagagcacatgaaaacagcaaagctgacagggtaaagggccaggtgcaaggaaacctgtgttccccgtggcagactcatgcccccgcctgccaggggaagggtcactctgccttgcccaagcatggagtctcccggaggtcacaggaagccagggtccgtagttacacattcct

SEQ ID NO: 9281 - DNA, 264 bp, Homo Sapiens
tcagatcggcctaacggcagaaaagaaagtcgtgaaagggttatttcccaagagtttgtctcctccgacccgcgctccttggacttttggaaagacaggatttccccacaccagttgagaggctcagcctggctgaggcagctttcccacccccggctgcgtgttcggtcctggtctgtaaacctgtgcccagctgccccagacctggagccccgggttccgcaggccgggctacatacccttcatgccgttagccgatctgcc

SEQ ID NO: 9282 - DNA, 341 bp, Homo Sapiens
tcagatcggcctaacggcacgaggtctccaaggccccagcaaagccatggcttctacccccagttcccctgacatgaagttcttggcgggtttggagccaggggatggcatggagtgatgtggctttgaagggtcctctggctgctgagctgggatgaggcaggtaagggtggaacaggaggggtggggaggaagccggggcagtcaccgagtgaccaagagtgaagacccgccccacggtggggacagatgcggggtacgttaaagggagagccagagaactcatggggtgaggatggagtccgaggagactgctgggagccgccgttaggccgatctga

SEQ ID NO: 9283 - DNA, 650 bp, Homo Sapiens
tcagatcggcctaacggcaaatacaagactagcatgtgccgagatttgcgacagcaagggggttgtccacgaggaacaaattgtacatctgcccattctcaggaagagcttgaaaagaagtactgaaacaacagggaaaatgttccaagtacaaacggaatttcaaatgcagaaacacagtgtttcccacgctaatctcacgtagtactgacagtaccttaagagctctggagaccctgaagaaagtgggaaaggtgggcgctaatggtcagaatgctgctgggccctctgcagattctgtaactgaaaataatattggttctccacccaagactcctgtaagtaatgtagcagctacctcagctgggccctctaatgttggaacagagctgaattctcgtgcctcaaaaatccagcccatttctaactagagtaccggtatatcctccgccttctgaaaacattcagtattttcaagatccaaggactcagataccctttgaagtcccacagtacccacagacacggatactatccaccacctccaacggtaccatgctggtctggctcactctgttcctcgctttgtgaggtcccataacgttccagagtcctccctcccacctcttccatcccgttagcacgatctg

SEQ ID NO: 9284 - DNA, 1362 bp, Homo Sapiens
tggtaccccgtcggttcccgggatatcgtcgacccacgcgtcgtgacagccgtgggccggaggggatgctcgaaagagctgagcggagatcctacagggaataccgaccctatgagacagagaggcaggcagacttcacagctgagaagtttccagatgaaaaaccaggtgataggtttgatcgagacagaccgttgagaaggacgtggaggcccgagagggggtatgcgcggcagaggcagaggtggcccggggaacagagttttcgacgctttgaccagagaggaaagcgagaatttgaaagatatggtgggaatgacaaaatagcagtcagaactgaagacaacatgggtggatgtggagttcgaacctggggatcgggtaaagataccagtgatgtggagccaactgcaccgatggaggaacccacagtggtggaggagtcccagggcaccccggaagaggagtctccagccaaagttcctgagttggaggtagaagaagaaacccaagttcaagagatgactttagatgagtggaaaaatcttcaagaacagaccagaccaaagcctgagtttaacatccggaaaccagaatccactgttccttccaaagccgtggtgattcacaagtcaaaatacagagatgatatggtaaaagatgactatgaggacgattcccatgttttccggaaacccgccaatgacatcacatcccagctggagattaattttggtaacctccctcgtcctgggcgtggagccagaggaggcacccggggaggccggggaaggatcaggagggcagagaactatggacccagagcagaagtggtgatgcaagatgttgcccccaacccagatgacccggaagatttccctgcgctgtcttgaaagagccctgtttcccagcaccgcggagctgcactgcacacctgtggggagacttttccagctgggccaagggagtcagactctaagaacaatagatgttgcttttcccgtgtcatgtaaatttgttgcacttttttgggctgagctgttagaggggcttctccagaggctcgagagcaggccatttcccaagaagatgaagaatggtgactgtgtttttattgaaggaatttcaaatgaagaataatgtttaaaatgtgtatatagagatagtatagactcctccgcggaagcatggagggaaaggaggttgtaaaatagactccatggagactcttaggaagcagtagattcccgggggctgtgcctttagcgttagaggaaacacatagagctggaactgttaatggaaagcagtcacagctgagttttccgagaccaagaaattaaaatacaattgcacttactg

SEQ ID NO: 9285 - DNA, 1465 bp, Homo Sapiens
  misc_feature (396)..(409): n is a, c, g, or t
  misc_feature (722)..(767): n is a, c, g, or t
  misc_feature (785)..(846): n is a, c, g, or t
  misc_feature (1122)..(1130): n is a, c, g, or t
  misc_feature (1168)..(1177): n is a, c, g, or t
ggaaggaaaggaagaggcgacacagtacatcccccagcccatctcgcagtagcagtggtagacgagtgaaatccccatcaccaaaatcggagcgatcagagcgttcagaaagatctcataaagagagctcacggtccaggtcatctcacaaagattctcctagagatgttagcaaaaaagccaaaagatcaccatctggttcaaggacacctaaaaggtctaggcgatcacggtctagatctcctaaaaaatcaggaaagaagtccagatcccagtccagatctccacacaggtctcataaaaagtcaaagaaaaacaaacactgacgtaaatttttaagatgctgtcacttattggaaatgcgatttgttttgtgcctgaacggtctgttttttnnnnnnnnnnnnnntcaaatgaaagagcattcctggggttttttgtttgtttgtgtatgcatgtgtaaactcatgagcaactgcatctgtagatctgtcattgttttatattgtgtaaattactttcattgtggctatttctcaagatgaaatttttattgttctaatggatttcatcagaaatgtgtataatggatctgctgacagtagtagtattttgttttaggatgttgtgacttagcaaaaataatacagatgtcttccccccttttgtagctttgacaatttgaattagatttcaaataaaatctgaacagaaaactagcnnnnnnnnnnnnnnnnnnnnnnnnnnnnnnnnnnnnnnnnnnnnnngactacaatccgagcacnnnnnnnnnnnnnnnnnnnnnnnnnnnnnnnnnnnnnnnnnnnnnnnnnnnnnnnnnnnnnntaaattcttttggttcaccccctcttgccccctaaaaaaagttttccaaacccatttcctttggtgccccgcgggccccctgtgggaagcgggcacctgggctaccaaatgtgttttcccaaagcaaaactctggggcgaaggacataggcgggggggttttccaacccacaaaaaaagaagacggcggggggacacaccccgcggggtttttgaaaaaaacctacaagtgggggtgttcgccaagcggtcttccggcggggtacttctaccaatnnnnnnnnncccccgaccgccagggtcccaattataaatatttatgnnnnnnnnnnacctctccgcttttatttaatggagattgagggtggggaatctgctttcttaaagaacatttcttctccgcacaccagttggggtaacccccctcccacaacgatcaggctggtcttacgaacccccccgtataccccccgcccagcgcggtgactattgcacgccacctctccgtcggcccccctgtgcggaaaaataatatattatttgtaccccccctatgggggacataaaccaatgtgcgtgtgagcagaagactagaagatggtacccgagcagattcgcgg

SEQ ID NO: 9286 - DNA, 1430 bp, Homo Sapiens
  misc_feature (720)..(730): n is a, c, g, or t
  misc_feature (989)..(997): n is a, c, g, or t
  misc_feature (1135)..(1152): n is a, c, g, or t
  misc_feature (1210)..(1241): n is a, c, g, or t
gtaggtggaatcagttaatgttttgagaaacctgcctgggctctgcccttagtcatgacatctcgctgagccagacccactctgttccttggaacctagagctggagtgaggagtagaggtctccggctattccagaaagaaaagtgagccacatgcaggctgatgaatgccgacacttccagaatgtatagaaatagtccctgttcctggcctgccactgaccctgtctgtattttctcggaggttgtttttctccttctccttcccaggaaggtctttgtatgtcgaatccagtgcactcaagtttggccaagggactccacagcacccagaagactgcatgcctcaaggtttatgtcactcctctgctgggctgttcattgtcattgctgtgttcagggacctttggaaataaaacctgttctgtcccaaataaaaccagcctgtgatgttcaagggactggaataaagtggcttacgacctgaaggattctacagagtgctcaactgttcatacatcattcagagtgggagggagctgggggtgctgtcccatcccatctgtatgcccacggtggatttaataatatataatttataaatcatagcctatggagtggcccgtaaatcagttgactgtgtagctcttgcctggcattaaagcatgtttttggtctttcatgaatcacaactatgtcctacgtccgcccaacaaacgnnnnnnnnnnntcttgtcgggccgcctcggccctcaaataagcttttctcaaaaattaattttagagcgcgggcgcccctaaggaaaataaacatggataatgattgattttttaggccaaccctgggccctcaacgaaagttttcaaacccctccccttggcgccacccgcgccccgtgcaacgcaagcgcacctggggaccaatccccttctcgcctaaaaaaaccccgcgtctattggaaataaggccggcggtgtactcccccagnnnnnnnnnccccccgccgggtgtaaacccccaaggcttttcctaaaaaaattccaaagaaaggggttgcgtaggggccccttaggcggggttcttgtccaacatgggaagaccccaccgcccaagcccggaaattgaaatgaaatnnnnnnnnnnnnnnnnnnggggagccttcttcccacaccagtgtgggggcgttaattcttatataaacactttctnnnnnnnnnnnnnnnnnnnnnnnnnnnnnnnnacaaaaaagcggtgtgcgagtaaatcccgggaaaacccctctagcagggcaatatcaccgagccggagatagcccccccttgcgggggatatttatttggggcgccccgtgggtgagatataatacgggggcggaaaaaactcactgttcgcgccaaatattggggcccaccctggttatataactgcc

SEQ ID NO: 9287 - DNA, 570 bp, Homo Sapiens
acccctacgatggtcctcagctaccaggtggccaagcagatgcacatctggatgtccagcacctgagcgtggatgcaccgtgccttatcaaagccagcaccactttgccttacttgagtcgtcttctcttcgagtggccacctggtagcctagaacagctaagaccacagggttcagcaggttccccaaaaggctgcccagccttacagcagatgctgaaggcagagcagctgagggaggggcgctggccacatgtcactgatggtcagattccaaagtcctttctttatactgttgtggacaatctcagctgggtcaataagggcaggtggttcagcgagacacggcagccccctgtatctggattgtaatgtgaatctttagggtaattcctccagtgacctgtcaaggcttatgctaacaggagacttgcaggagaccgtgtgatttgtgtagtgagcctttgaaaatggttagtaccgggttcagtttagttcttggtatcttttcaatcaagctgtgtgcttaatttactctgttgtaaagggataaagtggaaatcatttttcc

SEQ ID NO: 9288 - DNA, 694 bp, Homo Sapiens
cagttttatcacccacctggattgggcccaggacagcagctgctttgtcaccaactccggggactatgagattctgtactgggacccggctacctgtaagcagatcaccagtgcggatgctgtgaggaacatggaatgggccacagctacttgtgtcctagggtttggggtgtttgggatctggtctgagggggcggacggcactgatatcaacgctgtggcccgctctcatgatgggaagttgctggcttcagctgatgactttggcaaagttcacctgtttagctacccctgctgtcagcctcgagccctcagccacaagtacggtggacacagcagccatgtgacaaatgtggccttcttgtgggatgacagcatggccctgaccacagggggcaaggacaccagtgtgctacagtggcgggtggtctgatgcggccagggaagagtcaggtgtcagggcaggaattctattttcgggagatgtctattgccgagtagagtaatatatacccagagtatgtctatagcagagggggttatgggggcgggagggtagactgacatacagaagtctctatttatccgggtgggaagagggagtcacatcgctttggggatccattggtgtttggtttggggtgttttttaagttttttctttcacatcatccagaaataaagacacgaacact

SEQ ID NO: 9289 - DNA, 801 bp, Homo Sapiens
  misc_feature (74)..(106): n is a, c, g, or t
ggggcccgcccggcgcgcgcactcgaacccgcccagagagcggtgcgtggcgctgggtgcgagcagggtctagnnnnnnnnnnnnnnnnnnnnnnnnnnnnnnnnntgcttttttcaggttcatcaaggtttgcgcagtggatccgcgaatgaagccagcctggaagatccccagtctcgagacagagcctgacaggggcagatgcactggaaggaccctgtctgggtttagcaaccaagcagccatcctggccccacaggtgtgggacttctgggtcttctcctggctggcttcttgctagaggatttcaagagacccagcaagactgtattgtcccactgaatgctcaagatattggttagaagtagaaaaggggagggggtagtatttagcctctgtccccactaaaaattattcccaattgtcatttgtgtcatctgtttagcttacagttttaatccttgtcaaaatgatcatttgccagggtgcataaaacaccctatttgatgagaactggttttaaaggaaaatggggccatcagaaggaagccggttggtgtgaagagacgtctgggaagagcccctggcgagggccctcattccactgggtgacccagaaggagaaaaccgcgatggcgcttctcatttgaaatgttttctttatggacagtgtttagcaattgttataatgtgtacttttgttgattgatctgtatacatatgtaaaataatttgttctctgagttaattttgttggaacaaagactttagtgcttcctacattaaaacattttactgta

SEQ ID NO: 9290 - DNA, 762 bp, Homo Sapiens
  misc_feature (477)..(570): n is a, c, g, or t
ataactggctagccatattcaaaagattgaaactggacaccttcattatcatccaagcataggaaagggtctgccccaagccgatctacccgggaggcccgatcaccacaaccaaacaaacggaattcgccctcaccacggactccagctcctcagacctgctgaagtcctccacccgttcgaagaggagcgtcgtcatcaccccaaagaaggcagaccccgactgcaagtactacgcccattacgagagtcttcaggactgcggaacctaaaaagataaaaaaggctgcttccccaagcccacagtctgtaagaagggtctcatcctcccgatctgtctccgggtctcctgagccagcagctaaaaagcccccagcacctccatcccccgtccagtctcagtcaccgtctacaaactggtcaccagctgtaccggtcaaaaaggccaaaagcccaacaccgagcccatcaccgccnnnnnnnnnnnnnnnnnnnnnnnnnnnnnnnnnnnnnnnnnnnnnnnnnnnnnnnnnnnnnnnnnnnnnnnnnnnnnnnnnnnnnnnnnnnnnncacaagaaggaaaaggctgtggctgcagctgctgcagctgctgtgacccctgcagccattgcagctgccacaaccacattagcacaggaagagccagtggcagcgccagagccgaagaaggagactgaaagtgaagctgaagataaccttgatgatttagaaaagcacctgcgtgaaaaggccctgagatca

SEQ ID NO: 9291 - DNA, 1137 bp, Homo Sapiens
  misc_feature (895)..(903): n is a, c, g, or t
  misc_feature (1079)..(1079): n is a, c, g, or t
caatccagtggctctcctccgcggtcgcgtcataggccgaacaaccaaacagaaaagtttaataaacagcggacggaggggccggcggtggcggagccggagcaagcaggggttcggcggcattacctgtacccattcaccggcggctaccggcggcggcgcgcagcgtgtcaggcggagagacccgccgccaggtgtgcaactgaggaacatggctcaagaaactaatcacagccaagtgcctatgctttgttccactggctgtggattttatggaaaccctcgtacaaatggcatgtgttcagtatgctataaagaacatcttcaaagacagaatagtagtaatggtagaataagcccacctgcaacctctgtcagtagtctgtctgaatctttaccagttcaatgcacagatggcagtgtgccagaagcccagtcagcattagactctacatcttcatctatgcagcccagccctgtatcaaatcagtcacttttatcagaatctgtagcatcttctcaattggacagtacatctgtggacaaagcagtacctgaaacagaagatgtgcaggcttcagtatcagacacagcacagcagccatctgaagagcaaagcaagtctcttgaaaaaccgaaacaaaaaaagaatcgctgtttcatgtgcaggaagaaagtgggacttactgggtttgaatgccggtgtggaaatgtttactgtggtgtacaccgttactcagatgtacacaattgctcttacaattacaaagccgatgctgctgagaaaatcagaaaagaaaatccagtagttgttggtgaaaagatccaaaagatttgaactcctgctggaaatacaaattcttgagcatctgcaactaaaaattgacttgagggnnnnnnnnncctagtcatttggaatgtacagcagtgtatcctgcatgtcatcggaagaatagatttttgttttgggtttggtttgaaaatgacctctgacacttatttccattggcaatttctgtgggctgaggagacctaaactttaccagtattaatccttttaggacccttttaattttaanttgagggccccagggcttttataaccaaacgcgccacaaaattttgggcagggcgtgt

SEQ ID NO: 9292 - DNA, 768 bp, Homo Sapiens
  misc_feature (701)..(716): n is a, c, g, or t
ggggaccacgtgtgcacgcatgaccgtgtgggtggcggcgtttgctgtgaaccacgctcaggccacacagagacacatacttggtttctgggactgagacccaggcctggcaggaccgtgcctacagatactgcaaacgttcctacagcctagaggtgcgtatacacacccaagtacacgcagccaggcattcaggggtgtgtttgccacatggagcatcccttcctggtcttgccaggcacctgcacagagcgtctccagccccatctcctaacgggggctgggggtaagagaaatctaactgcgctcccccaacccctcgccctgccatcttcccctcaagcctgctaagttatcccaggcctgtgcgtggtggaaaaagccagccttggccctgcagcctccacctcgccgctgggggaccaacaggttgcttacagctttgcaccccggcatcagcacaggggtccctgccccaccctccggcagctcagggagtgttttcctgtgaggcctcccccatcagtggaccagagggagaagcccgatgccccatccccgggctttccccgtaacgcacaggacacgtgtgcaattcatagggacggccccaatcgccctcatgagtgccccctggtaccggtaaggtggcgctcacgttcctggcccaatgcagcccatcggggaagtcacagtcagtnnnnnnnnnnnnnnnntcccattccctggtggcctttcggtaacctctcgcatggcagttctattaac

SEQ ID NO: 9293 - DNA, 550 bp, Homo Sapiens
tccccgttctgcgggtccttggactctcccgctccccgctcctgtactcgtgtgctggcacgcccccatcgacgccgcttcgtctcttctcacccttctccctcctgttcctccacagttgcggccagtctcgttgagctcggtgcttcttcagcaccgtttttctttgatcacactcctcccccgctgtcccacagtcaggagagagcaatggtcaagacagatttggccatgtctagggccagctccagattcagagagaacagcgatggaaaggacaggcaagagcggaaaagggatcactccctcaacgaccgtgaagtgccaccggacttaaccaagagacgtaaagaggagaatggaacaatgggggtttcaaaacataaaagtgaaagtccttgtgaatctccttatccaaatgagaaagacaaggaaaaaaataagtcaaaatcttcaggcaaagaaaaaggcagtgattcatttaaatctgagaagatggataaaatctcctccggtggcaaaaaggagtccaggcatgataaaaaaaaga

SEQ ID NO: 9294 - DNA, 862 bp, Homo Sapiens
gggaccacaaactgttgggcccggagtcggaagagacccgggtttgggaaggaccccagggtcaggcgtcctggtggaagggcgggcctctttctctcttgctcagcagggagtccagagccctggaggaaagccagctcagctccgcatcggcgtcggcggttgggacgcacacactctgcgtcatggagggctgaggccgatgatgaattccggagtgcctgtcaggcttgctgtgtcactcggcccgctcggcgcgccccttcccagccgcccttccgtaccggctctcgggctcttccggtctccggccgccccttacctgcaggctcttctcccgccgcggcccggcgctctccgagtcgcccctgcggactggtctcgcacagtgcctgggcaccgggcgccagacagacactggccatgactgagcggcgcaaccaggtaccggctgagctgctcgctccggggccacgagctggacgtacggggcctggtgtgctgcgcctatccgccgggagcctttgtgtccgtgtcccgagaccgcaccacccgcctctgggccccagacagtccaaacaggagctttacagaaatgcactgtatgagtggccattccaattttgtatcttgtgtatgcatcataccctcaagtgacatctaccctcatggcctaatagccaccggtggaaatgaccacaatatatgcattttctcactggacagtccaatgccactttatattctaaaaggccacaaaaatactgtttgtagtctatcatctggaaaatttgggacattacttagtggttcatgggacaccactgctaaagtctggctgaatgacaagtgcatgatgacc

SEQ ID NO: 9295 - DNA, 890 bp, Homo Sapiens
tttcctgccacaagactgagggtctccccggcctctactgccctggctgcagtcagtgcccagggcgaggaatgtggccaggggatccaggacctgggatccagggccctgggctggacctcaggacaggcatggaggccacaggggcccagcagcccaccctttcctctccccactgcctcctctcccttcctacactcccagctcgagccgtccagctgcggtgggatctgagtatatctagggcgggtgggcgggtagcagtgctgggcctgtgtcttgagcctggagggagtctgctcctgccgccctctgccctgccagagacagacccatgcgctgcctgcccaccgtgcccctttgtccccatgtcaggcggaggcggaaggcccaccgtgccagaggctgggcaccagccttaaccctcactctgctagcacctcctccctttccccaaggtagcacatctggctcactccccactccgtctctggagcccaccagggaaggccctcatcccctgccgctacttctctggggaatgtgggttccatccaggattgggggcctctctgctcacccactctgcacccaggatcctagtcccctgccctctggcacagctgcttcctgcaagaaagcaagtctttggtctccctgagaagccatgtccctcgtgctgtctcttgcctgtcccacctgtgccctgccctccagcttgtatttaagtccctgggctgcccccttggggtgccccccgctcccaggttcccctctggtgtcatgtcaggcattttgcaaggaaaagccccttggggaaagatggaaaaggacaaaaaaaattaataaatttcccttggccctcgggtgagctgagggtttttgcaagg

SEQ ID NO: 9296 - DNA, 761 bp, Homo Sapiens
  misc_feature (721)..(721): n is a, c, g, or t
ggtaccgcactgagtctcggagtttggaacggctgaagttcaccttccagcccctagcgccgttcgcgccgctaggcctggcttctgaggcggttgcggtgctcggtcgccgcctaggcggggcagggtgcgagcaggggcttcgggccacgcttctcttggcgacaggattttgctgtgaagtccgtccgggaaacggaggaaaaaaagagttgcgggaggctgtcggctaataacggttcttgatacatatttgccagacttcaagatttcagaaaaggggtgaaagagaagattgcaactttgagtcagacctgtaggcctgatagactgattaaaccacagaaggtgacctgctgagaaaagtggtacaaatactgggaaaaacctgctcttctgcgttaagtgggagacaatgtcacaagttaaaagctcttattcctatgatgccccctcggatttcatcaatttttcatccttggatgatgaaggagatactcaaaacatagattcatggtttgaggagaaggccaatttggagaataagttactggggaagaatggaactggagggctttttcagggcaaaactcctttgagaaaagctaatcttcagcaagctattgtcacaccctttgaaaccagttgacaacacttactacaaagaggcagaaaaagaaaatcttgtggaacaatccattccgtcaaatgcttgttcttncctggaagtgaggcagccatatcaacgaaaaactccgaga

SEQ ID NO: 9297 - DNA, 907 bp, Homo Sapiens
gggcgcccgggaggcgccggagcccagcggctggcgccagatccaggctcctggaagaaccatgtccggcagctactggtcatgccaggcacacactgctgcccaagaggagctgctgtttgaattatctgtgaatgttgggaagaggaatgccagagctgccggctgaaaattacccaaccaagagaaatctgcaggatggactttctggtcctcttcttgttctacctggcttcggtgctgatgggtcttgttcttatctgcgtctgctcgaaaacccatagcttgaaaggcctggccaggggaggagcacagatattttcctgtataattccagaatgtcttcagagagccatgcatggattgcttcattaccttttccatacgagaaaccacaccttcattgtcctgcacctggtcttgcaagggatggtttatactgagtacacctgggaagtatttggctactgtcaggagctggagttgtccttgcattaccttcttctgccctatctgctgctaggtgtaaacctgttttttttcaccctgacttgtggaaccaatcctggcattataacaaaagcaaatgaattattatttcttcatgtttatgaatttgatgaagtgatgtttccaaagaacgtgaggtgctctacttgtgatttaaggaaaccagctcgatccaagcactgcagtgtgtgtaactggtgtgtgcaccgtttcgaccatcactgtgtttgggtgaacaaatgcatcggggcctggaacatcaggtacttcctcatctacgtcttgaccttggacggcctcggctggcaacgtcgcccattgtgagcaccacttttcttggtccacttggtgggtgatgtccagatttataccagggagactttacatcgatggacct

SEQ ID NO: 9298 - DNA, 577 bp, Homo Sapiens
gggcgatagatgcgtataggatccagttaatttctgaaagaaattgctaaatttaaccctacgtggcacagtgaatcgtacgaaggacactacaccatctgttccctgtaagtttagataaataaatgttttttatagtgtcacgaaagctaattttacaactgaatgagccttataaaacttgtaaacattgtataaacttatttcgaggaggtagaccagctacaaatgactgacaatacatgaacagattctggaggcttaaacaggtagataaagtagttctcaccaattattccccacacacttctggttgaattaggtaggcaccttgtttatgctagtgcactgcgagatccattctttgcctatatagaaacttacaggtatcttgggaattctgcttactcagttttcaaattcctgtgtttcttttggtcttgttgaaatcatactgttaggaatatattttataatagattaaattggcatgaataggttggcttaatttctgtgggacaaatgggtttcggatttcaaatcatatatttaaaataatagccttttggatcataac

SEQ ID NO: 9299 - DNA, 1071 bp, Homo Sapiens
  misc_feature (160)..(161): n is a, c, g, or t
  misc_feature (165)..(165): n is a, c, g, or t
  misc_feature (170)..(170): n is a, c, g, or t
  misc_feature (272)..(291): n is a, c, g, or t
  misc_feature (315)..(357): n is a, c, g, or t
  misc_feature (773)..(832): n is a, c, g, or t
  misc_feature (897)..(960): n is a, c, g, or t
  misc_feature (989)..(989): n is a, c, g, or t
ggggagacaggtggtggctacgacggcgaagggagctgagactgtccaggcagccaggttaggccaggaggaccatgtgaatggggccagagggctcccgggctgggcagggaccatgggctgtggctgcagctcacacccggaagatgactgggatggnnaaanaccantccggaatggtggttggtggaagaaaaaactgcccatttatccccataaatccccactggaatgggcaaggggggccccgccgccggcggcggccttctctnnnnnnnnnnnnnnnnnnnngggcgggtcgacgccgcgggagannnnnnnnnnnnnnnnnnnnnnnnnnnnnnnnnnnnnnnnnnncactaggtgtgcccgcgcgacgccgggcgcggagggcgcacgcgtgcctcgcgggagggcgcggtccctgtgcggtggggcgggcggcggctaagttcgccgccggacgacgcgcggcgcggccgccgggctgcagccacggccgcggcggcgggggagcgccggcgcgagtgagccacttgatggcggcgggaggtggaggcgggacgacggtcggggcagaggagcgtaacacgatggcacgtggcggccacacgcgcctgagcgctggcggagtgcatggcccgcacgctgttgtccggctcagagcgtcggaccgcgccagcggcgtgaggacgaggcgatgacgggacgagtgcgcacgtgtggcgtgggaacggcggtctaggcggcggcgccgtcgcgggactggacannnnnnnnnnnnnnnnnnnnnnnnnnnnnnnnnnnnnnnnnnnnnnnnnnnnnnnnnnnnaggcgagagaactccgtcgcacgccggcgccccggagcgctgccgtgccgtcggggtggtgggcnnnnnnnnnnnnnnnnnnnnnnnnnnnnnnnnnnnnnnnnnnnnnnnnnnnnnnnnnnnnnnnngagacgcgtcgcacgcgtgcggggtgggntctgggcacgacggggccgcgggcgagggaaggagaggggaaagagcggccagggcgcgttgacgcgccgcgtattggcgga

SEQ ID NO: 9300 - DNA, 494 bp, Homo Sapiens
gccaacgagagggctatgggagagaaattccgccaggggttaagagttacttgattaggaggcataggggaaaagatccctggctgaacaaacactttacacagtgcgtttcatctgacaatgccgaagtgccctctggccaccatgtcatgagtcctgagcggggcctcaggaaagactcctagagccactctaccaatcttcctgggggaggggagaggcagagaagcttgatgcgttatccaggaacacacatggatacttcccaaccacactctcagaccgtgcttcaattatcgattaggatttccaaaaacagccagctttcgattatctgtggagactttatacataagaaatttttaactcactcattatactgctgagtcacctggcccaagtgtcagtccagcttggaacttagagtacacacaaacatctttagtagcagtgatagtagcagcaacagcagcactggcagaagtaactattca

SEQ ID NO: 9301 - DNA, 957 bp, Homo Sapiens
ccacgcgtccgggagtgtaggaagaggcactgctgagggggcgcgaggggaacggaggccagagctgcgctgacagcagccatggcgagcggcagtggagacagcgtcacccgtcggagcgtggcatcacagtttttcactcaagaggaggggccgggcatcgatggcatgaccacctcagagagggtggtggatcttctgaaccaggcggcgctgatcaccaatgactcaaagatcacagtgctcaaacaggtccaggagctgatcatcaacaaagaccccacactactggacaacttcctggatgagatcatcgcattccaagcagacaagtcaatcgaagtgcgaaaatttgtcatcggcttcatcgaggaggcatgcaagcgagacattgagttgctgctgaaactcattgcaaacctcaacatgctcttgagggacgagaatgtgaacgtggtgaagaaggctatcctcaccatgacccagctctacaaggtggccctgcagtggatggtaaagtcacgggtcattagcgagctacaggaggcctgctgggacatggtatctgccatggcgggggacatcatcctgctattggactctgacaatgacggcatccgcacccacgccatcaagtttgtggagggcctcattgtcaccctgtcaccccgcatggctgactcagagataccccgacgccaggagcatgatatcagcctggaccgcatccctcgtgaccacccctacatccagtacaacgtgctatgggaagagggcaaggcagccttggagcagctgcttaagttcatggtgcaccctgccatctcctccatcaacctgaccacagcgctgggctcccttgccaatatcgcccgccagagacccatgttcatgttctgaggtgatccaggcctatgaaactctgcatgccaacctgccctcgtcctggcctgagat

SEQ ID NO: 9302 - DNA, 608 bp, Homo Sapiens
gtcggtacctaaatgacgcgatatgactaaatcatgtaaatagggcactgaaacggtctagcatatcaggtagcagtctttcttaaagacaagagtctccgctcagcagacaggctgctgtatctttcatggtccggctaaagacagcctgaccctgaatgcaattagtaatgctttgtctgcattcaggagcctctcagtcttctcaatgcactagttacctacaacttagccaggtctctaacatttttcggagtcctcatatgactataaaactctcaggctgtcgctcagagaaatgagggaaggcaaaaataaagagttagtgttcagtgttcttctgagatgctcataatctttaatttcccttttactaatcaagaaaagaaatgcactatttccattttagaaatggcataaagagattttcctccaaagccattctttgccaactacaccattcttccctaagggtgtgggagagagagcaggcaatcactgtattaaacaaagttcaaatgaatttatccccataaaagtaaaaacagtccatcaaagtgtctgtttcaaaaatatatggcctggccaggtgcagtggctcatgcctg

SEQ ID NO: 9303 - DNA, 863 bp, Homo Sapiens
ggggggaggaaagaggtggagcctccccagccgtttccctgcagaatcagctctgtctcatgtggaagtggagaatcagccttgcctggcctttaggaacttttgtggggaagagagctttgaagagaggagggggactttagagagggatgaaaatgagccctgggagggaggaagggacgaggaggggtggctgcatgttaccgtcccctacctctccccacgtggagggtggagcagttatgagggaggaagtcaactgctgttcagcctcagaataaaggtgccgttcactggctcagttacctcctgtgtaccggcatcttgtgttgggaatgttcccccctccctagggaccaaggaccacccctacaaaaagagtaatggttgggtgatactccctcaagccaaagaggagctccccaacctgttctagggacccaggtaacctagaagggtgggagagaatacaatgggccagatgtggtggaagcccagctctggggctcagggtccctggaaaactttctactaccctccctcctcaaggcctggatacagactaaatttgtataagtcaggcaggggacctaatcagggctcctggggagctacccttgccgttggggaccagagcaaaatagtggaggggcaggctagggaaatgtgggcacatcccccctcccaggaggggccggggagagtggcagtttgcatggcgaaccccccacttcctctttgctgccccttcactttcttgctgcccctttcccagtctctcttcacacccactcctggtctgtcctgatcccctcttctgtatcaggtttattggttgtacatataaattatactttcctttc

SEQ ID NO: 9304 - DNA, 527 bp, Homo Sapiens
ggataacacgcaaatcatacaagcaaaactacacatcagaacctaccacaatagctaaaaatcacaatgccctcaagaaagctacattaatgttggtttactaatagaacagcaaactagatagctactggagtaataatctctgaagggcaatattaccaatgccactatcacaaactataaataatcaattactagtgaatttccattatcattgcttagtgcaacaggaagtcacaaaatttagaggtgcatgataaacagaatgggaaggcactacaggtatcagtaaatagccctcctaatacctcaaacagtggaaatacactattggccctcaaaatcctaccagagtattcttttaatttaaatatatgaataaaggacacttaacaattatacaatacactagtgattatgagaggaagtgttggatagtaatactagaaaaaaattagggaaccatttcaggtacgtgcagttctgccaagggcacaaccatgtggacaaaattcatactacacatc

SEQ ID NO: 9305 - DNA, 754 bp, Homo Sapiens
ccttcacctgtgcctgcctggaaacagtctctttgccagtgccacaggtaatcaccaacaggaggccgaacatgaaggccaacagcccctggcgtggagaaaaagtacccaccaacagaggtgccctcactcaacagcttctttgggaattaggaggcagacacgtgtctccttgtatccaatgatgtgtccagactccacgcccaccgaggactctgctgcaatgcacaggtttcctcttcaggttctgtcaccaccccctgccatggggacttcagcagccccttgacccactggccccagagcccctcatctccaggactttctcctcccctgcacagctgtggtcatgccctggaggctgccagtactggggatggccctccctccagaatcacgggctctcacatccccttgcagaccccacccccttgttcttgctcagtcactccaggccccgggcactgagcctgctcgccagctcctcaggatgcctgtccatcaaccttgtccttcccaccctccatgttcagcttccacactctaccacctaccacactctcaccaatatcgcaaggtccctcgcctcctgatctttccatgctccttcccggccgctgccaagccctagatgaatccagctctccccctccttctctacatgcggcactgaggcaggctggcgtcctatgcacacgtccctagaggcctcatcctccggactctccatgcgcctgttttgccccccctgctc

SEQ ID NO: 9306 - DNA, 574 bp, Homo Sapiens
  misc_feature (79)..(154): n is a, c, g, or t
  misc_feature (165)..(177): n is a, c, g, or t
tctttgttttattgcaaccctgatatttgtttcttaatattgttaggcttacttctgaggcaggagaatggcatgaacnnnnnnnnnnnnnnnnnnnnnnnnnnnnnnnnnnnnnnnnnnnnnnnnnnnnnnnnnnnnnnnnnnnnnnnnnnnncacctaaaagnnnnnnnnnnnnntattattacagtagaccattgacactcttgattaatgtgatccagaaccattgtgaatatccacatctgaaaatgccactattacatgtattttcacctatgaaatgtaaacatgagaatgggtcacaaaccttgctgagatacatatgctaaagagcctgctagatgtattcattaggtacatcattcacatgcgtgcacaagcctcaaagcatgtgattcaaatttgtgccttagcaaaatgatgcctgttatacatcatgggtatttggagctcccacaaagagtagaaattgtaaacgttagatacctgaatgtcagtgatctactataaatgtaactattgttggtatgacacttcacacatcagttagaataatatcgcgtcattttagga

SEQ ID NO: 9307 - DNA, 538 bp, Homo Sapiens
  misc_feature (287)..(287): n is a, c, g, or t
ttgggatgggttggggagtgagcgtaggctaagaaaaaaagagatgaagtgactatgtgcttttctttaaacttagtagttacagacatagtacaggactctactaataattagtagagatcatgaaagtctgattgatattgaccatgagaccaacagagtgacaactattacttaatgcaacattttggaaagtcaacaactgatggaaactaactcctcacagggtagaacgaactaaaattaagacaactgaatggttagtttctcctgtggacacatgaccnaaaccactgaaaccaccgtatgtttatttctccctattacctgttcttctcttaggttggtataatgtgggacactgagggaaattaaccttttctacaactgaagaaagtagagggatacgttttcaactggatcattcacacgcgtttgtaattcagcatcatacacaagttactgatcagaattctgagaccactcaactatgacacatccccccacggaacgcaactattcgtttacctgagaccgc

SEQ ID NO: 9308 - DNA, 410 bp, Homo Sapiens
ttcccagtgaagttggggagcagtcttctagtccataattactggaaatggaaagccttgtttacctaacatttatcttgcatttttccatgggcaggattacgctttatttttctctgtagtgccagggcctcttccttgctttaagttctcaatagacaccatttaaacaaatggataacagcttgtaaattgttttcacttttataatccaatgctctaggcagggaaggaattacttctgtagtcctagatattggacccagagaagacttgcctaaaagtcccttgactaaggtccactggaaagtcagcagtctagctgagtcagagctttagattcctcctccagtaaagaacagatgataataacagcagctactcagatagggctgctgtagatattcatg

SEQ ID NO: 9309 - DNA, 199 bp, Homo Sapiens
cgatatgcgttcacacatttctgctctcggattcatgaggctccctgtatcttagcccaagtccccttccctagcgaggccacttgatactggagtcttaactggcagagatgagaaacaagactgagcacagacccgctgcctcgtgggagcccacgccagagggcccacacccaagacagacccagacagcatatca

SEQ ID NO: 9310 - DNA, 376 bp, Homo Sapiens
tctcaccatgtctattgcctcatgccaggggccattgttctctcctggactacactgtaagctcctactccaacctaatctctcatgcagagtgcctttgaaaaccaggacacttcctactgatttcaaaataaagaccaacgcacttcactgggcctacatcatcctgtgtgctcctgaccttaattcttctacagcctcctcacaaatcatacttcccttattctctatactctggccatagctaatttccccctcctgccatgaaacttttgcttatgctgttctttcttcctaaaatattctcctctcagtctcccacaacagtaactattatccttcagatcccagctcagctgagacagcattatcagga

SEQ ID NO: 9311 - DNA, 524 bp, Homo Sapiens
agaagggattacagaagttaagtcgcagaatggagaattcatgacccacaaacttaaacatactgagaatactttcagccgccctggagggagggccagcgtggacaccaaggaggctgagggcgccccccaggtggaagccggcaaaaggctggaggagcttcgccgtcgtcgcggggagaccgagagcgaagagttcgagaagctcaaacagaagcagcaggaggcggctttggagctggagtgaactcaagaaaaagagggaggagagaaggaaggtcctggaggaggaagagcagaggaggaagcaggaggaagccgatcgaaaactcagagaggaggaagagaagaggaggctaaaggaagagattgaaaggcgaagagcagaagctgctgagaaacgccagaagatgccagaagatggcttgtcagatgacaagaaaccattcaagtgtttcactcctaaagttcatctctcaagatagaagagcgagcagatttttgattaagtctgtgcagaaagc

SEQ ID NO: 9312 - DNA, 596 bp, Homo Sapiens
ggttggcattatgaaaatatcttttaatacatttatttagcaagagaaaaattatcagaaaatgagaagcaccatttatagttcacaagaaatgcaacatggactccaatagaagtagatatcaataactgatacttcctctgtttatgaccccaaacatgctaaaatgctaaagtaatgcttgcaaagaatatgaatgacaaatgttatccagcagctttttggtttaaaatgattgccaatgactagcagcttcaatggttaacagtagggaggaagaacccttcagtacctaacaacgctgctgtctgctcctaagtggctttagttagagtcccatgttttaatggtaatactgcattgattttaaaggcatatgcagcaaaatgcggggggagggagagaaactggaagaaacataaaagttatatggttagtgtctttaaagtctaaaaatttaaactattgtttaaaaaaccttacatagttcacagctatcggcccacacagtaagcaaatatctgtgtgtaggatgggagccttcactttggagtggtttttgtaactctgtttacattaaaaaggacagaagagtg

SEQ ID NO: 9313 - DNA, 1226 bp, Homo Sapiens
cagcttgcgtcgtgtcactgaacgggaaccacgccgtgcgcctgccgctgatggagtgcgtgcagatgactcaggatgtgcagaaggcgatggacgagaggagatttcaagatgcagttcgactccgagggaggagctttgcgggcaacctgaacacctacaagcgacttgccatcaagctgccggatgatcagatcccaaagaccaattgcaacgtagctgtcatcaacgtgggggcacccgcggctgggatgaacgcagccgtacgctcagctgtgcgcgtgggcattgccgacggccacagggtgctcgccatctatgatggctttgaccgcttcgccaacggccagatcaaagaaatcggctggacagatgtccgggggctgggacccggccaagggaggctccatttctgtgggacaaaacgccgttctcccgggcgaagtactttgggaagacatcgccaacacagatgcgccaccccccagcatcaaccgcgctgcctgattcatcccgtggattccgagggcttaccctgggaactccctggaagctggtccaccccccccgcgggacgaagaatcgaagcgagtttctgatggacccccatgggcccttggccttcacagcctactggggctgcacaccatgggtgcccggcgttcccccgatttgaacactgcgggggacagaacaccgaccccttaagccgcctattcaccagaagcgcgcgccgtacccgacatttgtagcgagtctcgggcccgccggagaacccacaccggtgctcagtgctcgactccttctaataaaacctggggacgcgccgtactgggaggactagccgtggcgccacacgtgggggggctctttccgccatccggtgaacctggatcggcccgccgcttggttttcttccgcataaaaacactttcgagcactaacgtggacaatttgcgcaggatcgcaaccgcgggcgagagccccccggaagcgcctaagacgcttgggtggcatccttccagtccccagaagaagccccctgtcgggcccccccacaagctgaggacagctcgtgcgttggcaccaaaatttacgagcgcctgacaacagcttactatagatgcgcgaccgtgtgaaatccacgagtatagggcgggcaacgaggcggcatggtgctaatatactgccccgggcagtgcaacacgcccggctctatgccgccc

SEQ ID NO: 9314 - DNA, 1011 bp, Homo Sapiens
  misc_feature (519)..(642): n is a, c, g, or t
  misc_feature (665)..(689): n is a, c, g, or t
  misc_feature (702)..(783): n is a, c, g, or t
  misc_feature (790)..(849): n is a, c, g, or t
  misc_feature (884)..(893): n is a, c, g, or t
ggggtgtgcatagctctctgtagacatttttacccaaacctgttggtaaagtgcccatctggtgctcaagagagcctgggggtctaacagggagcccggctgcctcacctggccacagcctccacaccagatctccacattgtcttgatccagaccagctctgtgatcagaaggaaattgggtccagtgtaggagagagctggtcctgggcctggcaggcaagagtgtgggcatcctttcctggcctttctccactctccctcaagcctgtgctcaggttgccttgaatgtggactctggaagagccaggggcccagaatgccgggggaggcttctgggtggcactcatggaacaccgtccctctgccagccataggccctgcctccagtgtcagggaatggaggctgggctgcgagagtgttgctgccccctgtgtcattcttctaatccaatgtagaaattgtacgtaatgtatttaaatcaacgcaaatgtatgaataacaaatacagttctgacnnnnnnnnnnnnnnnnnnnnnnnnnnnnnnnnnnnnnnnnnnnnnnnnnnnnnnnnnnnnnnnnnnnnnnnnnnnnnnnnnnnnnnnnnnnnnnnnnnnnnnnnnnnnnnnnnnnnnnnnnnnnttttgcggccccccccgcccccnnnnnnnnnnnnnnnnnnnnnnnnnggggccggggccnnnnnnnnnnnnnnnnnnnnnnnnnnnnnnnnnnnnnnnnnnnnnnnnnnnnnnnnnnnnnnnnnnnnnnnnnnnnnnnnnncccccgnnnnnnnnnnnnnnnnnnnnnnnnnnnnnnnnnnnnnnnnnnnnnnnnnnnnnnnnnnnncaaaggggatccaaggggattccaaattaaattannnnnnnnnntggccttttttgggaaagggggggaatttattaagacttcgggcgaagtggaaacccctccaaacgggtgtgaaaaacctgaatacccccggggattacaacccctgggccgccttgg

SEQ ID NO: 9315 - DNA, 1039 bp, Homo Sapiens
ccatggcggactggcccagcccaagccccggcggttacttcacctcaggggccctgcagtgggcaccagtgaccctcacagagaagctgggaaagctgctggggacacacagctgggatcagccctgggctggtgggacccctcacagagaagcccggaaagcttctggtgacacacagctgggatcagcccagggctggtgcgacaccctggactcccggccaggaaggcacggaggagggcatgggtgtggccgggccggggtgggggctcagcctttggtcaccaggggcgtgatcatctgtgggaaggcgtagtagcggcagtcggccggtgggaccagcgccatcacctccgtacggatgttctccctccggaagccggcctccagcagcgcgggcacctgcgtctcctcaaacatgatggtgatgtctgagtacttggacttcatcagctccccccaggaggtgaggttgcagtaggtgaggacgccccccggcttcagcaggcgaaaggcgtggttcttgatgaagttgaactggtgtgtgtgccaggtctcctccgagagtgggtacgtgtcgtacaggatcccatcaaagtgaccgtcaggcagggtgggtgccacatcctcccacaggcctttcaaggggatgaccttgtgtgtctgccgtggggcccagtcccggagccgctggaagacagccgtcacttgcacatcgagtgatacccaagcgtctactccatgggcggccttctgcgacccttgaaggttcgaatgccaaggccaaagcccacttccaggacccggccccctttggaggaggcggcggcggccagcgcgtgcatatagggggtctcccagcgctccatcaccggcttgcccaggatgcgcaggtgcgtgtccgctgcgtcgtaggccgcgggcgccgccccccacgcggggctgcagttcatcgccgggcgcgaagatgggggtcgcgctgggggcgctcatgctgcaggctggacggcgacccgacctcgatcgcgcgccgcccgg

SEQ ID NO: 9316 - DNA, 451 bp, Homo Sapiens
gctccgtctctgcttatgtcccccatggtgttcgcacaacccacctccgtcccgccaaaggaaagggagagcggcctcttgcctgtgggaggccaggagccacctgctgctgccaccagcctcctcctgcccatacagagcccggagccctccgtgatcaccagcagcccactcaccaagctccagctccaggaggcactgctgtacctcattcagaatgatgacaacttcttaaatataatctatgaagcctatctcttcagcatgactcaagcagccatgaaaaagactatgtgacagcaaggccttttaaaactgattttcaaggtccttctagaactccggcacaaggttctttcatgttgagtgttgtttccttcaatgtttctgccttttttaagagaaaagtatgtgtaatatgaagtaaaatgtttcagactttttttatagg

SEQ ID NO: 9317 - DNA, 745 bp, Homo Sapiens
  misc_feature (518)..(568): n is a, c, g, or t
ggggcagaatggtcggcggtggcgggaagcgcaggcccggcggggaggggccgcagtgtgaaaaaacaactgatgtgaagaaaagtaaattctgtgaagctgatgtctccagtgaccttcgaaaagaagtagaaaatcattataagctttctttacctgaagatttctatcacttctggaagttctgtgaagaacttgatcctgaaaagccatctgattcactttctgcaagccttggacttcaattagttggtccttatgatatccttgctggaaaacataaaacgaagaaaaaatcaacaggcctgaattttaaccttcactggaggttttactatgatcctcctgagttccagaccattattattggagataataaaactcagtaccacatggggtatttcagggattctcctgatgaatttcctgtatatgttggtataaatgaagcaaagaaaaattgtataattgttccaaatggagataatgtatttgctgcagtcaaattatttttgacnnnnnnnnnnnnnnnnnnnnnnnnnnnnnnnnnnnnnnnnnnnnnnnnnnncatagatgaaaaactcacagaagcagccagagaattgggggtactcgcttgaacagagaaccgggaagatggaacggagagataagaaagttgtgacaaagacctttcatggtgcaggcttgggttgttcccgtaaaataaaatgatggtgggtaccgagagctccctgaaacagaa

SEQ ID NO: 9318 - DNA, 643 bp, Homo Sapiens
ccaaggcaaagcagcacagtgtgaatagaacagagcgggatcaagaatttcacagaagacaggtcagctgaggggcctgcacacacagggtgttgaggaaccacagatgggcgccgagaggcctgccttttgcctggcccaggctcacccccaccttgggcctcacctcctccaggaagccttcccagctacccgaagctcaggtggccttcttgcaggtccccgtagcaccctgagcctgtaccttgggtggcacttgttatgctatcctgtgctagccgtttgtgcctcgtctcgctgttagattgtgagttcccatgggcagagacccactgtcgttccccgtgtgtccccagcccggtccctgtcacatttgttaaatgaaagaacaatgaagcccagtgtaacgtcagtccacagaaatagccacagcttccagtggtggccgtagacttggctcggaacttagtggcaccagagtaactctagtcagttacagtaaaatccactgtgtgtggaaggcagaagctagcggttgtatcccaagcatcttttgtatttgtctttatactttgctgaattctctgaaatacctattactgtatgttgcttttctaaataaatgtattgtgaaaccaaaaaa

SEQ ID NO: 9319 - DNA, 799 bp, Homo Sapiens
tcacttttgtgaacaagcacctgaacaagctgaatttggaggtgacggaactggagacccagtttgcagatggcgtgtacctggttctgctcatgggccttctggaagactactttgttcctctccaccacttctacctgactccggaaagcttcgatcagaaggtccacaatgtgtccttcgcctttgagctgatgctggacggaggcctcaagaaacccaaggctcgtcctgaagacgtggttaacttggacctcaaatccaccctgagggttctttacaacctgttcaccaagtacaagaacgtggagtgacgggggagctgtggatggtggcaggagtgtcccagcaagaaaggcggcatccgtctgtgccctgtgcctttccagggagccaggcgccatgggcttctggtccaagctgtgttgactgtcatccccaccccacccctacctcacgcctgccccaccccctgcctcttttggttgttgttcttaatctcctctccatgtagttcccagtgggcaagagcctttgaaaatgcaggattctaaacactcgtgctcgccgtttgaagcctcgcgtcactcagtcgcgtgggatgatgagtccgttgtggtctgcccttggccgaaagatgtacagaagcctgaacccctacccccagctggttgagagcaccctgcattatgcctcaatggcgcagttagcgatcacaggccttcagaagtacaacatcagctcagcaggaacgccggctcccgaggaccaggctgacgattatacggactggcggtgg

SEQ ID NO: 9320 - DNA, 490 bp, Homo Sapiens
gggagccctcggcagacggccaatggcggcggtgctcggggcgctcggggcgacgcggcgcttgttggcggcgctgcgaggccagagcctagggctagcggccatgtcatcaggtactcacaggttgactgcagaggagaggaaccaagctatacttgaccttaaagcagcaggatggtcggaattaagtgagagagatgccatctacaaagaattctccttccacaattttaatcaggcatttggctttatgtcccgagttgccctacaagcagagaagatgaatcatcacccagaatggttcaatgtataaaacaaggtccagataactctcacctcacataactgtggtgaactgaccaaaaaagatgtgaagctggccaagtttattgaaaaagcagctgcttctgtgtgatttcttccaaaatacatgtaaaatcttgtacacatcttagctgcaatgtatgttgaaggaaatttatgtaaaaaa

SEQ ID NO: 9321 - DNA, 824 bp, Homo Sapiens
  misc_feature (311)..(350): n is a, c, g, or t
ggatgttccattcctttggtcaaggagttaaaccctgttacttctggaccaattaggccatatttattctctaaagtaaggttctgtgattttacccatatagcaaaggccaaggagggaaagtggcaaaagccaaaacaattttcataagtgaggagtcatttaatgtctttctgggctggtcttaaaattttaaagttgatataattttcaattctgtttagcattcttatttatggggatttctagctattaaagaagttttatcccacattttagatatatcaatggcatcagatccaccccaaagnnnnnnnnnnnnnnnnnnnnnnnnnnnnnnnnnnnnnnnnctatttaatttaccaccaggagtcaacacacgtttccaaattccacaaatggggctttcttaaggttcacacatttgactctataaatgatcgctttggtttggctgcagtgaggtggctcctgtgggcttcattactaatatgaggctgctgtttggagatactttcctggtacagatgagaaacagtcttagttatcctgttctcttgagagtggactggaatttggcacttgctttcttctagctccttcacttgtgccccattgtggacacttgcactcagggtagaaacagaacaggttttggcttggttattatatcctcccacttgcatgagagagggcttctcagtgttagcagactgcaggccagctgcagaagacgtgtttgtcagcagcccctctggtgccggacagtgccagctgcggcttggaggattgctatgctgttggaacctcgcagtcttatcccc

SEQ ID NO: 9322 - DNA, 1335 bp, Homo Sapiens
  misc_feature (1049)..(1049): n is a, c, g, or t
  misc_feature (1070)..(1070): n is a, c, g, or t
  misc_feature (1082)..(1116): n is a, c, g, or t
tgactgctgactatatgtaggcagcgtaataagctgtatctgttgaatttggtgtatgtttccttgcctcatttcttaaagcaaatgtaattcctttatcttgacacgcagagaattcagatgacccgaaggcagtctgtaggacgtggccttcagttgactccaggaataggtggcatgcaacagcatttttttgatgatgaagacagaacagttccaagtactccaactcttgtggtgccacatcgtactgatggatttgctgaagcaattcattcgccgcaggttgctggtgtccctagattccggtatgggccacctgaagatatgccacaaacaagttctagtcactctgatcttggccagcttgcttctcaaggaggtttaggaatgtatgaaacacccctgttcctagctcatgaagaagagtcaggtggccgaagtgttcccactactccactacaagtagcagccccagtgactgtatttactgagagcaccacctctgatgcttcggaacatgcctctcaatctgtaccaatggtgactaacatccactggcactttatctacaaaaaatgaaacagcaacaggtgatgatggagatgaagtatttgtggaggcagaatctgaaggtattagttcagaagcaggcctagaaattgatagccagcaggaagaagagccggttcaagcatctgatgagtcagatctcccctccaccagccaggatcctccttctagctcatctgtagatactagtagtagtcaaccaaagcctttcagacgagtaagacttcagacaacattgagacaaggtgtccgtggtcgtcagtttaacagacagagaggtgtgagccatgcaatgggagggagaggaggaataaacagaggaaatattaattaaatggtctgtaaacaataacaactgtgaataagattatcaaatctgttttagtgtaatgattgtcaagtttaaaaacatttttatatataaactggtatactcatgtcaatattctttattaataaaatgtttttcagtgtcnttctcccaaaaaagcacctgntactaaggcctnnnnnnnnnnnnnnnnnnnnnnnnnnnnnnnnnnnaaagttcccgcaaaaaagatcccgccgcgagtaaaaaagctccacccccgaacgttcctgccccgaaagcctttggccagaaaacagggcctggttcctaaggttgggggggcctcccccctcaagaaattaagaacctgttctagggggggccgggccccaaagattaaggggcaatggttccaagttttttccgcgaaaatccgcgctgtgggaaaa

SEQ ID NO: 9323 - DNA, 897 bp, Homo Sapiens
agcggccgctcgcgatctagaacctaatgtcacctgatataaagtacttttgttgaagtgaattattttgatgtaggcttttgtatactgtgtttacacaggtataagtcagtaatagcagtgttaatatttacaggattttggctcgatacctcaagatttatctaacagtgcagtttcatttagataataaactatgtacataggacacattttttatctctaggcttagtcatgtaaaaactgcctattgctaaaattctggtaactttttgagagtattggataattttcagtacctgcgcaatccttgatttaatgaaattaaattttttatttcaaaagataggcctctgtttatcaaaagcgttgaacaatttgatttttaaattagttttagcaaaaatggaagtataatgggaatatatttttgaggtggtcttagtagtaattaccatttgttgaacacattaatgctatactagacagatacagtggagatagctttcaaacccgtatctattcctaactactgcctctaatactaattactaacttgttactaatgctaacttttaaaaatgtttttgaaaattgcaatttctacaaataaatgtcatagtgcaaataaatgtcaggatttagagaaggcacctaaactgaatttgtgttatttcagtaaaagttatggagttatgggtctagacgtgttaataagttagacagaactttggcactttagaacaaatgcatgagtggtatttcagttcctaagttacataaaaagtgtgaaagaacactgtgaggtccccgcaacgccagactatattaaggtaagtaaaaagggtttttatagggcttcaatacccaggtgggtgaccgagcagaagaaccggg

SEQ ID NO: 9324 - DNA, 743 bp, Homo Sapiens
ggtgaaacggttcaacgccctctagatcgcctgttctcctctattgtcaccgttgctgaacaaaagtatcagtctaccttgtgggacaagtccaagaaactggcggagcaggctgcagccatcgtctgtctgcggagccagggcctccctgagggtcggctgggtgaggagagcccttccttgcacaagcgaaagagggaggctcctgaccaagaccctgggggccccagagctcaggagctagcacaacctggggatctgtgcaagaagccctttgtggccttgggaagtggtgaagaaagccccctggaaggctggtgactactcttcctgccttagtcacccctccatgggcctggtgctaaggtggctgtggatgccacagcatgaaccagatgccgttgaacagtttgctggtcttgcctggcagaagttagatgtcctggcaggggccatcagcctagagcatggaccaggggccgcccagggggggatcctggcccctttggtggatctgagggacagggtcaagttctctttgaaaacaggagcttttcaggtggtaactccccaaactgacattggtactgtgccaataaagacaccccctaacctcacccacggctggctgctttcacccttgggcatcttcataacaaaaaacaaggagggggaagccccggggggggaagtgcgccagggacaagcttccttgtgggccgcccttggccccccaaaaaacc

SEQ ID NO: 9325 - DNA, 466 bp, Homo Sapiens
  misc_feature (390)..(419): n is a, c, g, or t
cagcaatagatgccatagtaagcatatgagctaagtgctcactgcatcaggaactgttcaaagcaccttatgcatatcatctccttttatccccattgcaatctcacaagatggatactattattatactcatttttcaatgaagaaattgagacagagagggttaagcaatttgcccaaggtctcaatgctagtgagtgatggagccccattccaatccaggcagtctgactacacatcgggctatactgccttatagtgatattatatattatgctacaatgatcacatcattgtaatagtcccttatgtttgtataataattataattccttttatggaattagcgttctgtattctacactttcaaatatatggactgtacctaannnnnnnnnnnnnnnnnnnnnnnnnnnnnnggacaaagcttttcgggggttctttaaaagtcaacttggaggtttga

SEQ ID NO: 9326 - DNA, 873 bp, Homo Sapiens
  misc_feature (16)..(16): n is a, c, g, or t
  misc_feature (70)..(70): n is a, c, g, or t
tggaaccaacctaggngcctcaggtgctggatattaatcatcttgaaagggctcgtttgtcagattctgnatgcattcaatattccactcatcactttgttgatgtccctggctttctacctggcacagcacaggattacggggcatcatccggcatggtgccaagcttctctacgcatttgctgaggcaactgtaccccaaagtcacagtcatcaccaggaaggcctatggaggtgcctatgatgtcatgagctctaagcacctttgtggtgataccaactatgcctggcccaccgcagagattgcagtcatgggagcaaagggcgctgtggagatcatcttcaaagggcatgagaatgtggaagctgctcaggcagagtacatcgagaagtttgccaaccctttccctgcagcagtgcgagggtttgtggatgacatcatccaaccttcttccacacgtgcccgaatctgctgtgacctggatgtcttggccagcaagaaggtacaacgtccttggagaaaacatgcaaatattccattgtaaacaaatcaaaggaaaagaaaccaagaactgaattactgtctgcccattcacatcccattcctgccttttgcaatcatgaaacctgggaatccaaatagttggataacttagaataactaagtttattaaattctagaaagaatctccaaagagaatagccggcccgaaaaggagggaactttggcgggccccctcggcccctgaaaaagctttccaaacccatttgtttggggccggggggccccactagggaaagggaacatgggccatagccggtttcccaaggaaaatcccgggccatggactaggggcttggaatctcccccac

SEQ ID NO: 9327 - DNA, 974 bp, Homo Sapiens
caggctggtacggtccgagtcttagatggagtccaaacgaggtgcgggacggaagagggggtgaaggccagaggcttcggggcttcaagaccgctgtctggagtccccctttccaggccatgtcggggcccacctggctgcccccgaagcagccggagcccgccagagcccctcaggggagggcgatcccccgcggcaccccggggccaccaccggcccacggagcagcactccagccccaccccagggtcaatttttgcccccttccatctgagcagtgttaccaggccccagggggaccggaggatcgggggccggcgtgggtggggtcccatggagtactccagcacacgcaggggctccctgcagacagggggggccttcgccctggaagcctggacgccgagatagacttgctgagcagcacgctggccgagctgaatgggggtcggggtcatgcgtcacggcgaccagaccgacaggcatatgagcccccgccacctcctgcctaccgcacgggctccctgaagccaaatccagcctcgccgctcccagcgtctccctatgggggccccactccagcctcttacactaccgccagcaccccggctggcccagccttccccgtgcaagtgaaggtggcacagccagtgaggggctgcggcccaccaggcggggagcctctcaggcctctgggcccctcccgggcccccactttcctctcccaggccgaggtgaaggtctgggggcctggctataggagccagagagagccagggcaggggccaaagaggaagctgctgggggctctggccttgccgaagaggaagaagggagggagccggggcccaagttggccctggagcacagctccagtagggtggagctggataaggctgccgatgaagctgggtcacgactctgaccacccgccccgggggaatcttgggcaaagtgggggtgcggaacacagg

SEQ ID NO: 9328 - DNA, 359 bp, Homo Sapiens
gatctagaggccccccgctattacaactatctgtattttctcttttttgggacagttaccgcagatgattatctgtattttctaattttctacaatgtacaaataatgcttttgaagtaaggcttatgtttttgaaaagttatggatttaagtcattacttaccagcaaaactttatatgccaagtagctaaaaatcatagttcaactgactttgtggatatttcttagaactatggtcctcaaattgtgagttgctgtagaatggaacttttctgaactattatctcccatccaaatgccatcttttgcactatgagataagaatcactgtcacaaggctgggtgtggtagctcacac

SEQ ID NO: 9329 - DNA, 1169 bp, Homo Sapiens
atttcggcctctcggtgcccaccagggttaatgtagattgtttctctatatcggcactgtacactctatgccgcgccactacgctctaatagcgtagggcgaccgttttaattctccctgaagggtgtagttcaccacacggcaagggtgtaaaaagggggcacacctctgtaaaacaggtaaaatcacaattggcacggcagtttgcttggccgccggcgccaaatggaaagaatcctttttccggcttgccaaaaataaaaattatgttggctctagtcctgggaaaaatattctcacatggagggtagaacctgaccccgagaaaggggactggaattctagagcccaaatcatgtgctattattcccaaaaggctgagtggggaatctgaagtctggttttaaatgaggccaggtattgagcaaatctccctggtaagagagcccactgatatttggagatgtagccatttgtgatgataaatgatgactggttactcttatgagctatgagagcttaattaaagctaatgcttagcactctttggaaggtggagagattaaaaactaacttccttgccgaatagcctgggtttggaaaagcatgtttttgaaatatgtgggatctccactctggagccctctgcagtcctgtctgggtcttcacacctaagtcaaagcaagagctatttttgcgttagaatttccttagccaagactacaagaggccaaatgccagggttcatctcagcttcctgtgcattcacatggaaggtcgtctttgaatctgcacgtccagctcgccatacacatgtctcagggagtcactgctcatgctggctatcagcttccgatgcccagagacccagggccggcacacttcttcccactgcacggtggagttgggccggatttcacggaacatcttcttcattggtcttgttactccaggaccatccaggtgtacccagacatttcgcagggtttcttttaaaggattggtaaactcaactgtcacagtcatgtcagaaccaactacctgagtgccacggaccttgatgatgatctcagggatggttagcacggtggacttttgcttggccagaacatcctggtctcattgatgcgagctgtgacaaagaagtgcagggacgcttgttccagcag

SEQ ID NO: 9330 - DNA, 222 bp, Homo Sapiens
tatactggcatagagaatagtaactttaaaatttgacttccgtattttctaaagaacagttttccaaagttaatacttggcattgctttgttaaattggcagaattagtttagaaacctatcctgacgatcactggggagcggcaagcaggttctcattgggagtcctttgtttacaaaagctcagcgtaagggtttatagcacacaattttaccctcttct

SEQ ID NO: 9331 - DNA, 140 bp, Homo Sapiens
tgtaggtgcctgatgaatgttcgagtaaagaaaacatgctttggcaacaaagttctcgtctcttctgactttccccaagtacaatggcagctgagtcatattttggacccattctgaagcccaagtttcagaaacaacaa

SEQ ID NO: 9332 - DNA, 508 bp, Homo Sapiens
tttctagtcattagtcatcacagctcttcctcgttcaaaattgtatccgtgaatgataccacgaacaaccacaactgcaaggcagcaaataaacaactgccgaatgcacaaaaacaatggcaaattgctcctaaaataaaatgaacaaacttgttttaattggacagaagtggaacagaagtagaattgtttttctgggggtaactctaggccatttaaagctgcaaagagtgcctttgcctagctgctttcttcatgtcctgaggacaggacaaaatgcccgggaaggggcctcacatgtctactactcaggcagctgcccacagagaacatgaatcccttgccacgtcacacatgccaagcacacacaatgcatcatcaacaggctgggctccgcctggtccaggccactgggggacagcacttcccttctctctgctctatacaaaaagtgcctaaaatgcaggccgacagttaagttcctctgccacaaataatagaaggacca

SEQ ID NO: 9333 - DNA, 533 bp, Homo Sapiens
cgtagcctggcatgtctctaccagcatctgaaaatgtttgagaaggctgcgcactatggccatagtacactaaaacgccagcttgagcacaatgcctaccatcctatagagtgggctatcaatgctgctaccttgtcacagttttacatcaataagctatgctttatggaggccaggcactgtttatcagctgctaatgtcatttttggtcaaactggaaagatctcagccacagaagacactcctgaagctgaaggagaagtgccagagctttatcatcaaagaaagggggaaatagcaaggtgctggatcaaatactgtttgactctcatgcagaatgcccaactctccatgcaggacaacataggagagcttgatcttgataaacagtctgaacttagagctgtaaggaaaaaagaactagatgaggaggaaagcattcggaaaaaagctgtgcagtttggaaccggtgaactgtgtgatcccatctctgcagtagaagagaaagtgagctacttgagacctttagattt

SEQ ID NO: 9334 - DNA, 663 bp, Homo Sapiens
ttttgtttttagacaagatatttattttgaagttccaaatgacattagcagaattgtgatttttatgtttactgaatggtgcatgggataaaaaggggttctaaaacactttactagatcatccaaaccctacaatagacacttatgcatcaaaattcttgtaaaaggaccacttccctactccctccaccctcccctcaaaatacccatgttcacaaagaacaaaaccttacagcttaaccaacaaaaaacgtgtcatacaataattctaaggcaatggttctatgaagacaggagaggtagcaggctgaaccgcattcactgaccctatctctcagctgctcctcctcactagtcaggtttttcctgtgtaccccacttcattatttccatcatgcttacctctctgtttactggacattccccttgatctaataccaaacttagccagtctaactgtaactcagatgataatctgaccacttcctggtaagaacaaatggttaatgttgtcacagtgattaataaatacaaatatgaattaatttaacaatgaattacattttatcccatccaggcatgaagaagttaaaacctggactcactgacctgtgttaaaatttagtgctaaattgtaaacatcacgcgcgggtcctctaggtc

SEQ ID NO: 9335 - DNA, 235 bp, Homo Sapiens
ggggggcttaggccatgctcagtgctggggacaggagttttgcccaacgcagtgtcataaactgggttcatgggcttacccattgggtgtgcgctcactgcttgggaagtgcagggggtcctgggcacattgccagctgggtgctgagcattgagtcactgatctcttgtgatggggccaatgagtcaattgaattcatgggccaaacaggtcccatcctcgtcaaaatagtaaa

SEQ ID NO: 9336 - DNA, 1610 bp, Homo Sapiens
  misc_feature (41)..(41): n is a, c, g, or t
  misc_feature (159)..(159): n is a, c, g, or t
  misc_feature (164)..(165): n is a, c, g, or t
  misc_feature (204)..(204): n is a, c, g, or t
  misc_feature (401)..(401): n is a, c, g, or t
  misc_feature (537)..(537): n is a, c, g, or t
  misc_feature (545)..(545): n is a, c, g, or t
  misc_feature (577)..(577): n is a, c, g, or t
  misc_feature (685)..(685): n is a, c, g, or t
  misc_feature (745)..(745): n is a, c, g, or t
  misc_feature (906)..(966): n is a, c, g, or t
  misc_feature (1030)..(1038): n is a, c, g, or t
tcggatagatgaaaaggccgacgttgggggcgaggaagctnagttagggtgctacggtgattgtctctctagttgtccgcgcgggtttgctcgtcgtcgtatgtggcaccgtctcactgcggcggggcggcgcgggtagctggtacatgttgtgttgancaggnnctccacgcacgacggcgggcggccggacagtaagggcgngtgagcgcgggcgcatagtccggcagggtgtagttggcggcgggggcgtcatggtgtgggggtgagttgttgcatcgcacaagtcatagtcggcgtcggtgcgggctgttcgtagcgcgggcgacgtgggtaaaagccgcgacttggtgtggagcggggggacgcgagcagggagagaggagtaggggcagcgcgtngcgtgggggtgggttcattatggcgacccgccacctcgccatcgtcaggtttctcgtaccggaatgggaggaggggagatataggaggctcgtccgcatgccgtagcacgcgggcgagacaaaccacgaacttcancccaccancaatatatagttaatagatgaaataaacgcantcgcgaagtcgcgatttcggattgtattgtgtttcctcgctggtggcggctgttgtgagacgtgatgggagatcctccccacatctcacgtgagaatggtaggtgganaaatcatccttgacggcgatcagagaagtctacttgcacttgagtggatcggggttacanttgttttgtgttccacagctacgcgcagctctccgcagcgtagatctgagtacgctctcatggtacagagggtgttctttttcttcttgtgggtggcgctggggggacagcccgcgcgcacctccgaccgtcctacgcccgcgcgagccgcttcctctgcnnnnnnnnnnnnnnnnnnnnnnnnnnnnnnnnnnnnnnnnnnnnnnnnnnnnnnnnnnnnncgggccgcgggcgctccgcgacggagggggggttactaaacaaatgttctgttcgagggtggcnnnnnnnnncggccggcacaaagctcaacagtgagtggttgattttctaacgtgttccctacggcgccccctgccaccctcaccccccagacttagttcgccggttggttgtgcgcgggcgcgcgtcgggggcgctcctacgtcagtgtctcgcgtgggcgtgttcttttgtcgttcttgtacctaacatttcagaattttattaatcctttaaaaatcaccctatttcttttgagttaatatcctcatctcgattaccctcatacatggcttagtttgattctgttactaaattctgtgaatcattatttaatcaaatctactaaagattagaaaaaattctagcaagacttataatcatgaaatacagaattaaaagtttaaacctaccaaaagtcctatggcctattatttagctgtgaatgagacacgtcaggagtataaatctgcacttttgactgtaagtaaaatttgctaatgcaggaagcgaaatagtgaaggaacactggggattgctaaaagattactttttattttatcgttttggcgacaggcagtgtacctaaaaggtgtctccccta

SEQ ID NO: 9337 - DNA, 144 bp, Homo Sapiens
ggagttccagttccagtgtctggagagtccacctcagctcagcaatctcatgccggttggcaattgtcagcagaagccgatgcctgcccatcagttctttactctgaggtgttagagtggaataaaaatataaataccggaaag

SEQ ID NO: 9338 - DNA, 354 bp, Homo Sapiens
  misc_feature (160)..(169): n is a, c, g, or t
gttatcagttgtaatacaggtctcatacctcagtttcagatgttatagatggttacctctttgagctgccctgtcaccccagcaaccctaaaagagaattttgtacattctgtatcccacagatttggtcagccatttcaaaattccctccagtttggtnnnnnnnnnntctgtcttcggtttcagctggatgatgaatccttgtttttcaggtggctccaaaaagaatgttgcatgtgttcagaccatcctgagcagagccaccaaatttagtgacagtgtctagccatgttagcaataatgttaacagaagcttttgtttaaattacaaaatacatttatactatttactaa

SEQ ID NO: 9339 - DNA, 1119 bp, Homo Sapiens
  misc_feature (900)..(952): n is a, c, g, or t
aattcccgggatggagatttccatcatggcggcgccatttcgggctacaccttcagtgctgtgtgtttccacagcgccaacagcaacgcggaccacgaaggatttttactgggagaggtaagacaagaggaaacgtttagcatcagtgactcacaaatcagcaacacagaatttctgcaagtaattgaaatccataaccatcagccttgttcaaaactttttagtttttatgactacgcaagcaaagtgaatgaggagagtttggacaggattcttaaagatcggagaaagaaagtcattgggtggtacagattccggcgcaatacgcagcagcagatgtcctacagagagcaggttcttcacaagcagctcacccgcatcctcggcgtgcccgacctcgtctttcttctcttcagcttcatctccactgccaacaattccactcacgctttagaatatgtgctcttcagaccaaatagaaggtataatcagaggatatcactcgctattcccaatctaggaaatactagccagcaagagtacaaagtgtcttcagtgccaaatacttctcagagttatgccaaagtgattaaagaacatggtactgacttttttgacaaggatggagtgatgaaagacatcagggcgatttatcaggtttataatgcacttcaggagaaagttcaggcagtgtgtgcagatgttgaaaagagtgagcgagttgttgaatcttgtcaggcagaagtgaacaaattaagaagacaaatcactcagaggaaaaatgaaaaggaaccaagaagaaaattgcagcaagcagtgtttaagcagacagatgccgtctgaaagcttggacccagcgcttactccctccggaagccgccctttgggtttgcacctgannnnnnnnnnnnnnnnnnnnnnnnnnnnnnnnnnnnnnnnnnnnnnnnnnnnntacttttgatgtctacccccacttttttaccacaatactatgggcgccccattcccgtgtggaaagggcccgctactgtatgcttaaaccgccttggtgtgggccacccccaccccatagcatactcccctggcaccaaccttcgacacttcttctcccctctgtca

SEQ ID NO: 9340 - DNA, 1047 bp, Homo Sapiens
agatccctacggtagatccgcttccggagtcgaggttttcgggcttgtaccgcttggcggtgcggcctggtgtcggcttgcaggttctttctgtgtttgttctctgccctgccaaggccgtagagctggtgcgtgcgggtagcggggctctccgaggagccgcacgccggcggcaccatggtccacctcactactctcctctgcaaggcctaccgtgggggccacttaaccatccgccttgccctgggtggctgcaccaatcggccgttctaccgcattgtggctgctcacaacaagtgtcccagggatggccgtttcgtagagcagctgggctcctatgatccattgcccaacagtcatggagaaaaactcgttgccctcaacctagacaggatccgtcattggattggctgcggggcccacctctctaagcctatggaaaagcttctgggtcttgctggctttttccctctgcatcctatgatgatcacaaatgctgagagactgcgaaggaaacgggcacgtgaagtcctgttagcttctcagaaaacagatgcagaagctacagatacagaggctacagaaacataaatgagctgactttagtgagcatagcagtgggaacaaggtcaaggtccttttgaaacactgcagcgatcttaattttgttagatttggagttcaataaatggagtatcctgagttgcccttgctcttctggcctggcctgcacagggcccagggagagatttgttcttgtgtgacttagagctgggtgtgggtactaattagcttttttcgactttgtcttgggatagacagtggctatgggaggattggacttttgagttgggctctgggtctcttggacaactttacaatttactggcttccaagacttcctgcttcaaaacccccagccagactattcatggcccattcagatcctcatggtcatcccacaagtgcaagaacaggtaacctttcttaaattgatttttgaaatgggaaggttaatatggcttgcctaagcataatccccttttt

SEQ ID NO: 9341 - DNA, 1358 bp, Homo Sapiens
atagggaatcctgctggaccagcgcagccatggtgtggagaggttaaaagacttgcacaggatcaccaagtcatgctgtagatgccaggattcctagacccagggctctgcactctcaaggctggccccatgtgctcaagggggtctaatgtttgggctccaaactaaccatctcggagctgggctcctcatttactgccaaaccctcagcttatgtagctagaaagggccctggagtgagaaagcctggattttcaaattgatgctcccctactgactagctgtgccactctgggcaaatgctcttccttgagcctgtttccacacctgtaaagtggggatgatgatcctatctcactgcttgtgtgaggattacaggaaagcacctgtcctggctctgtacctggcacgtagtaggtgctcagattcatgctggtttccttcctgcctttatagggacctgctctgtgctcacactctcggctgcatgcacccgtgcgtgtgacgtgaggctagatgtggaatgaggtccgtgtccgtcgagggaattaacgtgtcttattgggagacaagctaactagtccgtccgttggtaacaccctaagaaaccagtgcaatagagcagattggtagcaaactagagaatcacgggcccttccttcgcatcgacgtgcacgtgccatgcgtccgacattctgaattctgtcattggggcaattggagcgggagccaccggtggcgctagcgtatagatatgctggtactagggacaagccgcgctgtacctccgtcgtcgtggggccccatatgatacgttctcgtgggacttgggcagtgtaactgtttgactggacatgttggagcagaccaccgtgacattttataacatctgtctgccgaagactccagtgggacgagcttgtagggtgggcatagacagaggacgggatggggccaattctccgtagacacggcaaggagccaattaccagctgcttgcgcgacttggtggacacggaacatggtgcgacccaggaagcaacccttgcggggtaaggaaacatccctcgcggtctctactacacactctacctacaattgaacagttaacttacacacggggattccaagaaacttttacagttgtgctacgcacattagtatgactcttccgttggaagcgggttcttaagccaggacacgcctttgttcacgggcttccctgcgtcgcctcgttcttaactggtaggagaccgcaccttggagggggccactacgacttggcccaaccttaagtggaaatatatgggaccgcggtacattcgagttgtgcggttccatagcgcatgcacgaactt

SEQ ID NO: 9342 - DNA, 267 bp, Homo Sapiens
tgtaatcggtacggaggggaatcagagcttcaagagatgtacaggttcgcagaggaggacatgaaaacggtgtttacacatgtatctcatataatcaaaacatgaaatagagacatgggagataaacaagaaaagccaaaatcaaactgtcaaagacaaaaacatcggagatgaaaattacatgggatgaactaaagcagattagaaacggcagaagaaaagattagcaaacttgaagatacaagaacagacactagctaaaggtac

SEQ ID NO: 9343 - DNA, 447 bp, Homo Sapiens
gttggcggcctgggtgtggcggttccgtgcctgctcaaactctccgtgaggcccctctcccagagcctgacacactctgtggccgaactctaggcaggtgcccctgagtcctttcctcgacgaggcctgaccccatccccatcctcgctgggcccgccgaccccggtgttagcaagaatcctctaaatcaggtttatggagaattacccaccctcgatatctgatcccattcctcatctcccacccttgatctcatcaccctgccggcctcctgcaagatcctcattgagccactccagtgagaatccccctaccctcgaaggccgccctaacaacttcccatccgctgacccctccaacgccatcaatctccagctgtggttgttgaactcggaggtgagctcctctcaccactctcttgaataaagcttttctcaccattttaat

SEQ ID NO: 9344 - DNA, 175 bp, Homo Sapiens
  misc_feature (12)..(12): n is a, c, g, or t
  misc_feature (68)..(68): n is a, c, g, or t
tgttactcctgncagctggttaaagaaaaacttcacctcactctccagggcaggagtggtgggggaancctgaggcagccacagggaaaggagaggccctccagaaacccactggggcttggcaaaagccacagcccttagggagtcaagcttggtggctagggcctgggaggtg

SEQ ID NO: 9345 - DNA, 479 bp, Homo Sapiens
ctttctggaaagcaatggggattcctgaagtaaattaatccctccttactggtcaaatttgataactgctccaaaaatctcttatccccaactcaaacagtactttgcaccttaagttttgtgtttcaatgacagcaaagaatatcaactgcataaaaagtatactgcaccttgtaactcaacagtaggtcacataccaattctgttgttgttattagggaattacatcacacacttcattgcatatgccaagtgccagccttccaatcattttaattagtctacacaacaccaactaaacattcttaaggaatattgtttctgctaggcacaaagacacaaagaggtcatgtgaatttgcctcatgtcatacataaatgtaagacaagagggtgatttctggtgtgaatgagggttatatgttgtaagtgtcggtgggtgaatgagccccattgtggtagtggtaaatatgtagaggg

SEQ ID NO: 9346 - DNA, 599 bp, Homo Sapiens
tgccgtagatgaacgaggaggaagtacaggacggagtcatctttgatgcagaatttgccagttgatggttcgctgggcggcaatctctgcacaggctttcaggtgcaccatcaggctgatgagtgtgtcatattgcaaggcggagcctgagctggctgtaaccacacttgcccggaggaatatcccctgctcttctagcagcttcttgatcccacgcacgtgagagtccagggtgtgcaaatcccggagctggcggtacttctctttggatccacagatgaagagcagaagtttgcggacttgacggcgcacaaatggagtctgctggatcatgaggtactcggagagaaagtaaaaccacgagtggtcaaagacaggaggtgggattcgagaattggtgtcagtaatctttttgatttggtaaggaagcctcagtaccatttctgttagaagctgagtataggcctcaaacacatcagcagcatgacccttcacatactggcggagaaagaatgggctacatgtcaggtggggaggaggtagaatgtggtttcagcaactggctggtcagccacaggctctcgctcgatcttaacgga

SEQ ID NO: 9347 - DNA, 410 bp, Homo Sapiens
  misc_feature (36)..(36): n is a, c, g, or t
  misc_feature (39)..(39): n is a, c, g, or t
ggctttgcagtggttgaatatagcactgcggaggcntgnaagaggtccagcaggcagcagacggtatgaccatcaagggcagcaaagtccaggtttccttctgtgctcctggagcgccagggcgaaagtacattagcagcattgatagcggctcaacgtgtgatgcacagtaatcaaaagggcttacttccagagccaaatccagtacaaattatgaaaagtttaaacaaccctgccatgttgcaagttcttctacaagccccaagttatgtggacgagctgttaaaccagccggtcttggaacacctcacagcgtgccacatctgatgaatccatccatctctcctgcatttttacatttgaataaagcacatcagaatctttctcatataccactgggcacaacaaca

SEQ ID NO: 9348 - DNA, 254 bp, Homo Sapiens
accaaatgctgtgagttactatttcaaatacatgatcatccctgccaagatagcggcatctcctccttttcatgtacagggttctatatagatcacacctttccaataacatacttacctcaaaaatcactcgaatctgtgcagtttccttgtcttatactgtggttttgagaaaacatgcttgtctggttggattcaagaagcacgcgtgtccgcagacttagaaagcagttcctcatgtcaaacttgggccg

SEQ ID NO: 9349 - DNA, 557 bp, Homo Sapiens
ccaatattaaaaattaccacaaatacaaaatggtattaagtatgaatatgacttatcttttcaaaaacattaataaactgtttctcttgccaaattagcccctaactagaacatctttgtgcatgtatcgctgagggcttatataacttacactaccctttcacagaagaatgacaaaattcttaatagaggcaagtctttgagtagggagatggggaaaagtaatgaaggatgacatgagacagagttggctgactgctattctgatactccacagatgaacactaataaagtaactacccatcttttctaactgaactttatatgtaatcatcatgggtctccagctgtactgtaaatgctacaaaggcaaagactaagcacctgtgaggcagaatatgctaggagaagagtatgtgttttaaagtcagacagacccagataaaaatcctggctccatcctgtactgttgaacctcataaaagtgacttcacttctctcagcttcattttcctatacgtagaacaagacaagcatacatacctcatacataggcc

SEQ ID NO: 9350 - DNA, 294 bp, Homo Sapiens
aagccttcagtggcaagtcaaatctcacagagcatgagaaaatccatattggagagaaaccctacaaatgtaatgaatgtggaacaatcttcaggcagaagcaatacctcattaaacatcacaatattcatacaggagagataaccctatgaatgtaataaatgtggaaaagccttctctcgaatcactatcacttattgtacatgtgggaattcatacaggtgataagccttatgagtgtaaggtctgtgggaaacacttctgtcaagctcatcactactcgacatacgggcc

SEQ ID NO: 9351 - DNA, 290 bp, Homo Sapiens
ttatgacatgaggagtacagagacaacatttgaatcctgtcagcctggagaccagcaccagaggaatctacaaggcaaactcccatatatttgcttcccccaaatgctgcccctacagactcaaagctctttttcttagttgtgtagtttctctaaaaatttactgttcttagtcgatgctatataagccagggagttctaagacgccagctctgttgagatttgctcattcccctgtatttcccacatatatattacatatacccgctaataaatttatgtttgttttt

SEQ ID NO: 9352 - DNA, 1704 bp, Homo Sapiens
  misc_feature (1356)..(1424): n is a, c, g, or t
  misc_feature (1428)..(1428): n is a, c, g, or t
  misc_feature (1440)..(1518): n is a, c, g, or t
  misc_feature (1520)..(1521): n is a, c, g, or t
  misc_feature (1526)..(1526): n is a, c, g, or t
  misc_feature (1528)..(1528): n is a, c, g, or t
  misc_feature (1534)..(1571): n is a, c, g, or t
  misc_feature (1597)..(1639): n is a, c, g, or t
ggtccccagcgagaacatgctgagtcgctttgcacaggtcttgccagatggcacctacgtcaaactcggtacagcacagagcaactaccttcccatggtggtggtgcgggtggagctgctgtcaggggagatcctccctatactgcagaaggcctgtgtcatcgccatgcgctactcggtaatccgccgccaatcccggctccggcccagtgacccagaggcaaaggtcctggactaccagacacaacagcagaaactctttcctcagctggccatcagttatgccttccatttcctggcagtcagcctcttggagttcttccagcactcctacactgccattctgaaccaagacttcagcttcctgcctgagctccacgcactgagcacgggcatgaaggccatgatgtcagaattctgcacccagggagctgagatgtgccgcagggcctgtggcggacatggctactcaaagctgagtggcctgccatcactggtcaccaaattgtcggcctcctgtacctacgagggtgagaacacagtgctctacctgcaggtggccaggttcctggtgaagagctacctgcagactcagatgtcccctggctccacgccacagagatctctctctccatctgtcgcatatctcaccgcacctgacctggccaggtgtccagcccagagggcagccgaacttcctctgcccggagctctacaccacggcctgggcacatgtggcagtaaggctcataaaggactccagtgcagcatttacaagaccctgacgcaatccggagctgaccagcacgaggcttggaaccagaccactgtcatacacatccagggctgataaggtgcactgctactatgtcactgtgaagggttttacagaagctctggagaaactagaaaatgaaccagcgattcagcaggtgctcaagcgcctctgtgacctccatgccatacatggaatcttgactaactcgggtgactttctccatgacgccttcctgtctggtgcccaagtggacatggcaagaacagcctacctggacctgctccgcctgatccggaaggatgccatcctgttaactgatgcttttgacttcaccgatcagtgtttaaattcagcacttggctgttatgatggaaacgtctacgaacgcctgttccagtgggctcagaagtcaccaaccaatactcaggagaaccctgcctatgaggaatatataagaccacttttacaaagttggagatccaagctatgaaataaccaacagtattcaagaagcaaccagcaccatcatgtgataatggtactatggcatatatgcaacattaaaattttaaattagnnnnnnnnnnnnnnnnnnnnnnnnnnnnnnnnnnnnnnnnnnnnnnnnnnnnnnnnnnnnnnnnnnnnnaaanaacaacaccaannnnnnnnnnnnnnnnnnnnnnnnnnnnnnnnnnnnnnnnnnnnnnnnnnnnnnnnnnnnnnnnnnnnnnnnnnnnnnnanncccananacaaannnnnnnnnnnnnnnnnnnnnnnnnnnnnnnnnnnnnnaaaaaactttttttaacccctctctnnnnnnnnnnnnnnnnnnnnnnnnnnnnnnnnnnnnnnnnnnncatctttgtcgtttctccaaaaaacaacgcggccacaaaaagaaggggtggtttttttcccccac

SEQ ID NO: 9353 - DNA, 1581 bp, Homo Sapiens
  misc_feature (140)..(199): n is a, c, g, or t
  misc_feature (223)..(242): n is a, c, g, or t
  misc_feature (962)..(962): n is a, c, g, or t
  misc_feature (1360)..(1360): n is a, c, g, or t
  misc_feature (1494)..(1494): n is a, c, g, or t
  misc_feature (1515)..(1515): n is a, c, g, or t
  misc_feature (1546)..(1546): n is a, c, g, or t
  misc_feature (1548)..(1548): n is a, c, g, or t
caagtttgaggccagcatgcacagcatggcaagactgcatctctacagagagtaaaaaaaattgcccgagtgtggtgatgtgcatctgtggtctcagctacttgggaggctgaggtgagaggatcgcttgagcttgggtnnnnnnnnnnnnnnnnnnnnnnnnnnnnnnnnnnnnnnnnnnnnnnnnnnnnnnnnnnnnggaccctgtctcaaagaaaaaaannnnnnnnnnnnnnnnnnnntatttttatgaggtgaagtgcatcaaacttgggaaagatttgaggaggctgggaacctcctggaaaaccactccttgaagaaagatatgagagacatttagaagtgattcctgctttcagaaggaggtggattcaaatacatcaaaagtcccttcctctgctaagtgtttatagttcaatgaataatttcaatatttgtatgtgttcttgtcattttatttttttctgaaaaacttccaaaaatttgaaaataaaattacagccttttcttcttaacgggcggggacaaaacgagcgagaagatcaataaataacccgcgtttcccctcgccccccctcttcacgatgatttaccccaccccgccgttgcgcgcgcgtggagtgagcggagacgccgactttccaccatcggcggatacccgccagcccgtaccgcgtgcccgcggccctggcgttacgcccgcggataaacgcgttttccgcgcataacctatgctcgccccgcctcgcgggcatctggttccgcgtcggtgaagaaacaccccgcggcgacacggccgggccgtggcctaaaagagataactggcgcatccccacacaccacaccacggtgttttgcccggctcccacccccgcctcataaataaaccacgccgccccccattggtcgcgcggccgcctcgcgccgcccggacttctattcatcccaccacacgacgngtgtagcggtcgtcgtgtcgcctccccccccgctctctcacaacaggcgttgtctgcggcttccacgagattatgagcggagggggaggccgcgtacagccccgcgacacctagatcaccacaccccacgtgcgcgggcactgtgccagcactcctccatctcatatctggggataaagagcggccctccacgcccgcccgccgttgctttcatattttttttctccccgccgctcggtgcttgctttcccgccacacaccgccgcgcctgagttataacaatcacatccgtagtgagtcagcacccccgcgcggcagtagaccggcaatttatgaggagtagtaggcgcacggtacgcatcgctcgtacccatgtgacgcaaggtcgacgcggcctnacttactaggtgactgacagcgggatgggtgtgtcgtcacccggtccgcgccccaccacgcccatggtgatatgacgtttcactatagtcctagacagacgtactcgtatttgcccacgggtctctgatgctanacacccacgctgttgctccancgttattacccataccacaagaatgacgagncncccctctattttattacacagcgacgccacggg

SEQ ID NO: 9354 - DNA, 953 bp, Homo Sapiens
atgtttgtttgtttttgtgtgtggttattatgagttcacagtgtcaaaaacggctgtaaacgacggccgtaactaaacgtcctaagtagcgaggcctggtgcgaatcgcacgaggccgcggtgtcgcgcggagcggagccggcgagctaacccgagccagccggcgggcgtcacggaggcggcggcacaaggaggggccccacgcgcgcacgtggccccggcggccgccatggcggacagcggcaccgcggggggcgcggcgttggcggccccggcccccgggccgggcagtggcggcccaggaccacgcgtctactttcagagcccccccggggccgcaggagagggcccgggcggggcggacgatgagggcccagtgaggcgccaagggaaggtcaccgtcaagtatgaccgcaaggagctacggaagcgcctcaacctagaggagtggatcctggagcagctcacgcgcctctacgactgccaggaagaggagatcccagaactggagattgacgtggatgagctcctggacatggagagtgacgatgcccgggctgccagggtcaaggagctgctggttgactgttacaaacccacagaggccttcatttctggcctgctggacaagatccggggcatgcagaagctgagcacaccccagaagaagtgagggtccccgacccaggagaacggtggctcccacaggacaatcgctgccccccaacctcgtagcaacagcaataccgggggaccctgcggccaggcctggtgccatgagcagggctcctcgtgcccctggcccaggggtctcttcccctgccccctcagttttccacttttggggttttttattgttattaaactgatgggactttttgtgtttttatattgactctgcggcgcgggccctttaataaagctaggatacgcctttggtgcagctaaaaaaa

SEQ ID NO: 9355 - DNA, 1634 bp, Homo Sapiens
  misc_feature (142)..(142): n is a, c, g, or t
  misc_feature (256)..(256): n is a, c, g, or t
  misc_feature (494)..(506): n is a, c, g, or t
  misc_feature (625)..(648): n is a, c, g, or t
  misc_feature (1034)..(1066): n is a, c, g, or t
ccgtgtgcattgtcgtacaaagaaccgtcgctgatgagaacaataatataggggttgtggcgcgagaatgaagacgcgccgtgttgcacgatcgggccggtcttattgcggggtaatcaatctttgtgccacccccgcgctntgccacccgccggcgagtgttccccaccgccccgacatcacggcgatacacaaaagtctcgtttttcggcgggggttcttgcatggtagttcggggcgggctccccgtgttaantcaacatactttcacgctaacgcaagatattttgcatgacccacctattgtggtttttttcaccccccacgacagatagtgggcgaccgttggttatgagcggtgtgggaagagataatcgtatagcgcgccttcgtatttgatccatccgcaaaggagcgcgggttgtttatttgtggaaggagactgtggagttgtcgtagctgggttgggtggaaaacacactaaatgcctcatnnnnnnnnnnnnntttttctcaacccaagttggtgacaatttttaaaccgggggggagacgagtatgtggaaaagaggggtggtgtgggccccgggtttttttctacccagggggaaaggagggagatagcnnnnnnnnnnnnnnnnnnnnnnnnagaatactcctatgggggattccggggttggttcatccccattttttgaggggtctgcggggtcggacataaattcctttattatatgtcggacagttcctggggaaaagtggcaggggcggggggctaacgtaatatcgagattcgtgtggactccctgtttatagatcccagggagggcctcaggactcgcatttggagttgttcgaggaccctgggttgtggcgcgaggcgttttttggttgtgcgggattcaaaccgctggtcatggccaggatttcctagggagcgaggtgtgggccattttccctttccttcgggggcgcgggggccaaatagaatggttttgaaagcttttttgaggtctcgagagcggccgagcaagnnnnnnnnnnnnnnnnnnnnnnnnnnnnnnnnngcgaattgcaaaatctggtttaattaagatctggggaggggagcacatagtgaaaatacatatgcacaggaaccaaatcaatgctagacaatgtattagtttacaatataataggataactacaagtttgaaggctcaaattgagtccatcagctgtaaatacaattttatatttggctcaagtggctgttgaatatcaagtggtgccgagtccctccagagcacctactgaccccctcagccttggaaggagtttcaccacagtctcagaagaaatcccagtcgtgcctttaactcttttggcccttgggagtcattgcaaccccaatacaaatgccggcccagggatttccagtggccacaagttattgcacagagaggtctgttctaagccagactcttacagctaaggaggtgtgagattagcccttaaatactggtctagcattagcatggtctataaaagcatgttaagaaatagctcctcagtgattatgtaccagctactagttatcctactaagagaaaaggcaacatggcagcttcacatttcacatgaaagactagc

SEQ ID NO: 9356 - DNA, 401 bp, Homo Sapiens
ccacccagagccaagagggtgctgctcagttgtagggcctccgcagctgtacagagagtgtgggagggagggacagacagaaggccaaggccctatgtggtgtgcagaggtggggaggtggcgaggatggggacagaaagcgcacagaatcttggaccaggtctcttttccttgtcccccctgcttttttcctcccccatgcccaacccctgtggccgccgcccctcccctgccccgttggtgtgattatttcatctgttagatgtggctgttttgcgtagcatcgtgtgccacccctgcccctccccgatccctgtgtgcgcgccccctttgcaatgtatgccccttgccccttccccacactaataatttatatatataaatatctatatgacgctctt

SEQ ID NO: 9357 - DNA, 541 bp, Homo Sapiens
ccatggggaactctactttgctgaatggatgcattggcctggtgttccccctgagctgcagtttctctttgggtgatttcaacaacttggaacttgatgaggatgcgctaagaacacctccactggaagaacggttgcttccacttgcactgcctcctttgcttttggacagagaagggaagaaggaaaatacttgaagtgggaggaacggccaaaggcggcttgctggatgagctatgtcttctttcataatgtgattgaaatgcctgcggtttgacaacctgattacagtcgttacacaccaccaagtagaaatcatcatgggctggacagaaaccaaatattggcatgtcttcccgacagagccccatgacttcgcggtttttcccaaactccttgaaactttcgtccaattctgtcccgtccttcccaggaagtttggaagcccaaactccttgaaactttcgtccaattctgtcccgtccttcccaggaagtttggaagcctcaacccacagattccacgactgtcatggggctct

SEQ ID NO: 9358 - DNA, 1286 bp, Homo Sapiens
  misc_feature (505)..(515): n is a, c, g, or t
  misc_feature (588)..(597): n is a, c, g, or t
  misc_feature (682)..(745): n is a, c, g, or t
  misc_feature (1003)..(1060): n is a, c, g, or t
  misc_feature (1071)..(1128): n is a, c, g, or t
gtacatatgtaattctttccatcaccccaacctctcctttctgtgcattcatgcaagagtttcttgtaagccatcagaagttacttttaggatgggggagaggggcgagaaggggaaaaatgggaaatagtctgattttaatgaaatcaaatgtatgtatcatcagttggctacgttttggttctatgctaaactgtgaaaaatcagatgaattgataaaagagttccctgcaaccaattgaaaagtgttctgtgcgtctgttttgtgtctggtgcagaatatgacaatctaccaactgtccctttgtttgaagttggtttagctttggaaagttactgtaaatgccttgcttgtatgatcgtccctggtcacccgactttggaatttgcaccatcatgtttcagtgaagatgctgtaaataggttcagattttactgtctatggatttggggtgttacagtagccttattcacctttttaataaaaatacacatgaaaaccagnnnnnnnnnnnccagcaagaaaaaacgagccccacccgccacccccaacgtatttaccccccttgtcggctacacaaatacagnnnnnnnnnnacaacccgttcctctccgcccccctcacaccctccacataaatccgcgccaccgcccctagcataaacgttataaatcacccaannnnnnnnnnnnnnnnnnnnnnnnnnnnnnnnnnnnnnnnnnnnnnnnnnnnnnnnnnnnnnnnccttcttttgtggcgcctctttgcgcgtctcccacgcgtgtggagagtgtgggtgtggcctacttacaccggcccccctccaataaaaataactctccccgccgcccaacaataattaccccccgcttataccccctcccccacacaccgaacgagaacagcccgttttctttttgtaccccaccacattaccccgcccccccacaaaaatcacacacctaccccccgggatgtttcttaccggccccctcttattannnnnnnnnnnnnnnnnnnnnnnnnnnnnnnnnnnnnnnnnnnnnnnnnnnnnnnnnnaattaaaaatnnnnnnnnnnnnnnnnnnnnnnnnnnnnnnnnnnnnnnnnnnnnnnnnnnnnnnnnnnactaacgttacggtttctccgcccgagcgggggtcatcgcccacccccataacacttcttctgtgtaaccccccgcgcctctcacgcgcgatttcaacgcttttgctcgacccgcgcccccctaccatatttttttcctcgggcccaaaatctcgccc

SEQ ID NO: 9359 - DNA, 580 bp, Homo Sapiens
agttgggcaagttctttaaagggggcggctcttctaagagccgagccgctcccagtccccaggaggccctggtccgaccttcgggagacctgaggagatgctgggcaagaaacaagagtacctggaaaatccgaatccagagagaaatcgccctggccaagaagcacggcacgcagaataagcgagctgcattacaggcactaaagagaaagaagaggttcgagaaacaagctcactcagattgatggcacactttctaccattgagttccagagagaagccctggagaactcacacaccaacactgaggtgttgaggaacatgggctttgcagcaaaagcgattgaaatcttgttcattgaagaacatggatcttgaacaaaattagatgatttgatgccaagagatcacagagcaacaggattatcgcccaagaaatctcagaagcattttctcaacgggttggctttggtgatgactttgatgaggatgagttgatggcagaacttgaagaattggaacaggaggaattaaataagaagatgacaaatatccgccttccaaatgtgccttcctcttc

SEQ ID NO: 9360 - DNA, 1556 bp, Homo Sapiens
  misc_feature (141)..(158): n is a, c, g, or t
  misc_feature (451)..(569): n is a, c, g, or t
  misc_feature (642)..(655): n is a, c, g, or t
  misc_feature (1023)..(1083): n is a, c, g, or t
  misc_feature (1213)..(1213): n is a, c, g, or t
  misc_feature (1374)..(1374): n is a, c, g, or t
  misc_feature (1391)..(1391): n is a, c, g, or t
tgaagagcctgccctcctatatggattcttcagggccctccacatctgaggtggctcattcccatcacacacagattgtcctggtgttcatttcaaggccagtgttcagcagcagcgtttggaaagcaggttctgtgggannnnnnnnnnnnnnnnnngcactccttcatagcagcagtagtggcttctccatcctgttttctgcaacattctatacaaaactgtgctgtgaccttgcggtaggcctggatctggcaaagagaatacaaatgaaaccccttctttctctttccgtccaacaactctgtagagctctctgcacccttacccctttccaccttttgtatttaattttaaagtcagtgtactgcaaggaagctggatgcaagatagatactatattaaactgtactgttatttaagatgtaataaagcagtttgacatgagggnnnnnnnnnnnnnnnnnnnnnnnnnnnnnnnnnnnnnnnnnnnnnnnnnnnnnnnnnnnnnnnnnnnnnnnnnnnnnnnnnnnnnnnnnnnnnnnnnnnnnnnnnnnnnnnnnnnnnnncttgtgccccacactaaccccaccaaaaaactttccaaaaaccaaaatttgggccccttttttccgcggccgnnnnnnnnnnnnnnaaaaaatccttttaacaaccattaaattggcgggccggggcgccccccgtgtgggagccgcccccgcggtaaaattcccctccccccgcgaaacacccccggggtatgaacaaacaggccggggggtgtccccccaaaagaaaaaatacccgccgcgggggagaacaacaacggcggttctcagagccaaaacccccgcaatataacgcatttccttccgcgccgtgtccttttgtcgccccctatttaccccgacaaaggtgggcccgacaaagggggttttccctaattaatccgtagacggcacccgcggcgcacacctctctatcatctactatcccgcgggagagaagggggcgggtggttannnnnnnnnnnnnnnnnnnnnnnnnnnnnnnnnnnnnnnnnnnnnnnnnnnnnnnnnnnnntccctccccacaaacacaacatatattgtgcgcactccgcgccgttgtttggtaataacacccgccgcgcgcgcgcgcacacaacacaacagacacccatccttctgctcggctcgccggcgccagacgntaattattacatactctccgcgcccaccgcgcgggggaagaaacagacacgggggcgccggcaagaacaaagatgttgtgttctactccccccaaggtgcacctctcctcttccacataataaaaacccgcgtgtgtgcgcgcacaccacccacacccacngttgtgtgtttcttccnctcacgagaacacaacacaactaattatttcttttaacaaaacacacccctcttatacgggcacaacaaagtgggggagaattttctctccccgcgaataactcacccctcacaacgcgccgagacaaatatcattacatataaacgcccccgtggcgaacaccg

SEQ ID NO: 9361 - DNA, 214 bp, Homo Sapiens
  misc_feature (100)..(100): n is a, c, g, or t
tgagtggttacagtaaccgagagaggggacttaactttttggtatatgtttataaattagttcccatttgtatgttcattctttttttcttagtgtcttnatctttgggcttattttataacttaagtctgtaaagcagtcactctgaacctgtagtgagttgaagaagcccttaaaacatcttcctctgggccgggtgccggttgttacgcct

SEQ ID NO: 9362 - DNA, 1181 bp, Homo Sapiens
aggttatcagtataatcattctggatttggacagggaaaacattacactagttgaggctaccgaaccttacattttgctagagctcaagtaatagaaacttagtttcagaatcctgaattcagcacctattttgaattaatgtgagaccacaggtggcaggcagattcctgcttggcataagcatttgtaggtcttcattcaattctgttagatttttttattggacttacataatgccgtttatttgagaaacacataacatctctcctttctatgaaaaattttttaaaaggtggttaaaattgcctttaattgcccagtagactaattccacagtcagaacatgcaaacttttttgaagaaattacttgaataagtagttttcatgttttcaatatgcagtttagaaaatgaggattcacctagacttttttagatttactactaggaaacctacctcatatgaataaccatttatatgtgtttggcttaaagtattccaatgcctatttaccaagcacagttctgccccccggttgactttaatgccacgtgtgcttcatgatggaactttaaggtcagtccctattaaatgagctctttggcagatagcacattcagtagccttatttggttgatggaatactgtatcatatgctcaactctgaaaaccttgaacacggccaaaatccataaagattataaaagcaaactaagttgtgaagctatagtacatgtaggcatttagttaagtatagcaattcaaactgacctgcatccatccaaaacaaattcctccttcaaccttatttttacttgaaatttgctagaagaaatagcaaaccgaaatttgttttatgcatgagttaataccactggctcagcaaatacaagttagtttgctttaagcaggtaactttttttgtaatggaagaaatgcactacaaagttaagacagattttggctaagtgcaggaggccctttattattgctgcagaaaacaaaagcctggctgagttgatgttttacattctcccttactgaaatctacatgacatgatgcttcttgctgggtttttgtacatgtaaacattgtcaagctgtgaaagaaaatggctggaggtgtgctttgtgtgaaaggtgagcaataaagtatctgttaagttcaaaagaaaaaaa

SEQ ID NO: 9363 - DNA, 314 bp, Homo Sapiens
tgctggcctacaactccagtgctcgcattccaaaatgcccctggatggagggtggtgagatgtcaccacaggtggaaaccagcatcgagggcaccattcccttcagcaagcctgtaaaagtttatataatgcccaaacctgcacggcgctaaggcaaaaacagtcttcccaaccgtagcctagagggcccttcttaggtgtcagaatgagccaagcctgaagcacttcacctggaattgatgtgtaggcttaaggagtatgtgacccttacagtctcatctggtatcaaacacaggataaattgtttcttcatt

SEQ ID NO: 9364 - DNA, 313 bp, Homo Sapiens
ctcggcccatgtttacatgagggccatgataagagttgctgtcccaaaacaaaggcatggtctgccggcagagctccggggaggaagctggaatggctcctacatccttgcttgcctgagattattctagtcaagggcacagtgtgggcagctatgatccatcccttcacttctggttggagtgtgctcgcccatcgtgcatcccaccttccaaatgaacatacactaagcaatgtaaaaagctgggccagagatggcaagtaaagtgccacacacttcccttcacttccctctctgctcatgtcataattct

SEQ ID NO: 9365 - DNA, 419 bp, Homo Sapiens
  misc_feature (358)..(358): n is a, c, g, or t
tctctttcaaaaccctcacggggccatgctttattataatggtctgccacaggtcctaacccacactgtatttgattatatacagtctcataattaagtcattcctctttatcacacccagcacttagtccactgctgcccatgtaggaggcactcaaattggtaaaagagaaatctatgcaagggaatgatcttctggaccccctccaaaaacaaacttgtgactagaagaggcaccagccattagccacattcctactaacagggctgatttaaatgccctttttattggcttggtcatagtctccaacaggtgccaaggcttttgctaagttaaaccagttttcattgggatcantttgttttctatgtgtgttttgaccaaaaacaaagataggttctctaacaacagggagaga

SEQ ID NO: 9366 - DNA, 214 bp, Homo Sapiens
tgacatgagacaccatgcccggcctctcgcattataaatgaggagctagaggtggagagggctttctcctttgtgcccttcctcagtcttcaaacctgcaacctcggctcatttttgactcctggttccatcattttccatagctattcagccaggaaattcttcatggtgctttagatcaatgctaactgttcaactgctcactcatgtcaaa

SEQ ID NO: 9367 - DNA, 422 bp, Homo Sapiens
  misc_feature (253)..(253): n is a, c, g, or t
  misc_feature (310)..(310): n is a, c, g, or t
  misc_feature (331)..(331): n is a, c, g, or t
  misc_feature (355)..(355): n is a, c, g, or t
  misc_feature (364)..(364): n is a, c, g, or t
  misc_feature (374)..(374): n is a, c, g, or t
  misc_feature (397)..(397): n is a, c, g, or t
  misc_feature (403)..(403): n is a, c, g, or t
agacttcatcaatggtactatgttattagagaaatgctttaattttcatattccaatcagatggcatcttctatcccagctggttgggaagggattgaagatggtagcaagtgctgcactaagggcactcgcatttggtcattctcttgagagctaggaggggtcagcctgaggccggagaggaagggcttttgcctggggtgagagggtgagagacttgacctgaaagcagctcctgcccctgaggtgcaanccagagtcctgtgtgcggacagagagaatggctaatgatcctccgcgtggaaattgncctattggtttttattgccancttgatgtgtcctgcaatgaaganggttttccntttttttggntcccttttttaaagccttgctgnttaaancccaaaaacccatgtttgt

SEQ ID NO: 9368 - DNA, 245 bp, Homo Sapiens
  misc_feature (11)..(11): n is a, c, g, or t
tcatcagctcngcccaatgttgacatgagaagacagtatagaaaagagaatcaggaagcaagagttgggatttgtctccaggtttggaaattcttttgtctcaatcaccagtatgctaaaaggtcctttgggtatctttgaggatgaaatggaaagataacttcagagtcaggaagtttagaactctgttctaaagagttaagaggtcagcaggcgcggtgctcatgtcatacttgggccggctc

SEQ ID NO: 9369 - DNA, 893 bp, Homo Sapiens
ttcgtggttgccttggtcctcctgaacgtcgcagcggcgggagtgccagctcttggccaccgaaagcgtcaagaagaagaagctggagtacggccttctgcaggaaacgtctccacccaccccagcttgagccaacggcctggaggctctaccaagtcgcatccggagccgcagactccaaaagacagccctagcaagtcgagtgcggaggcgcagaccccagaagacacccccaacaagtcgggtgcggaggaaaagacccaaaaagacagctccaacaagtcgggtgcggaggcaaagacccaaaaaggcagcactagcaagtcgggttcggaggcgcagaccacaaaagacagcactagtaagtcgcatccggagctgcagactccaaaagacagcactggcaaatcgggtgcggaggcgcagaccccagaagacagccccaacaggtcgggtgcggaggcaaagacccaaaaagacagccctagcaagtcaggttcggaggcgcagaccacaaaagatgtccctaataagtcgggtgcggacggccagagcccaaaagacggctccagcaagtcgggtgcggaggatcagaccccaaaagacgtccctaacaagtcgggtgcggagaagcagactccaaaagacggctctaacaagtccggtgcagaggagcagggcccaatagacgggcccagcaagtcgggtgcggaggagcagacctcagaagacagccctaacaagggtggttccagaagcagccttccctggaaagaccattccaaggccatctccaaaccattctgataacaagggagctccccaaggctgacacaaaccagcttgctgaccaaggggaagcttctcctcatgctttcaaaaccggaatctgg

SEQ ID NO: 9370 - DNA, 211 bp, Homo Sapiens
caatgtatgaatgagtaccatgagatcttatgtgctgagagctaaggagagctttaaggatgatgtagttcatacccccactttgcagatgggaaagtttagacaggctgagcaacctgaccaatgcgactgagttagtcaagtattaaagctaggaatacaattcaggtctcttgatgccgacaatttaaaaaacagccaatgatctcat

SEQ ID NO: 9371 - DNA, 702 bp, Homo Sapiens
cgacttaatcaggtatctagagatcaggttctggacaatgctgcagttcaattctgtgcccgcaaagtctctgctgtttcaggagatgttcgcaaagcactggatgtttgcaggagagctattgaaattgtagagtcagatgtcaaaagccagactattctcaaaccactgtctgaatgtaaatcaccttctgagcctctgattcccaagagggttggtcttattcacatatcccaagtcatctcagaaattgatggtaacaggatgaccttgagccaagaaggagcacaagattccttccctcttcagcagaagatcttggtttgctctttgatgctcttgatcaggcagttgaaaatcaaagaggtcactctggggaagttatatgaagcctacagtaaagtctgtcgcaaacagcaggtggcggctgtggaccagtcagagtgtttgtcactttcagggctcttggaagccaggggaattttaggattaaagagaaacaaggaaacccgtttgacaaaggtgtttttcaagattgaagagaaagaaatagaacatgctctgaaagataaagctttaattggaaatatcttaagctactggattgccttaaattcttctcttacaccccaccccgaaagtattccagctggcatttagagagctacagtcttcattttagtgctttacacattcgggcct

SEQ ID NO: 9372 - DNA, 447 bp, Homo Sapiens
cgagtttggatttaagcagggagataacttgattggatttgcatttgagaagcatattcttccatgaagccagcagggttgtaggtagcacaccttcctctgagagccacatcatcaccttgtctgcacctctggtttaggagcttcttttaatcagcttccttgaaagagtccggaagaaagtgagttttaggcttttcttcttggaggcagaaacagagtgggaacgagggttctcagcagacttttcttagagagagagaaagctgcgtccgtttgccaatttgtttagtcatcctgtattctgggcagattacggatcgtagccaccgctgtccataaatccctccctggttcggatggaattgcagtcaccactgttctctcagttatggatatctctactgatatttcatactgtcttcatgtcaacagtggcccgaggtc

SEQ ID NO: 9373 - DNA, 605 bp, Homo Sapiens
  misc_feature (196)..(196): n is a, c, g, or t
  misc_feature (208)..(208): n is a, c, g, or t
aggaagccaccacgtcggacatcttctcacttgccgtccagccctgcagccggggactgtcccatcctagccacccctgaaagccccccgccactggcccctgagaccccggacgaggcagcctcagtagctgctgactcagatgtccaagtgccctggccctgcagcaagccctaagcctttgggccggctccgnaccccgcgaganaaaggtaacccggagattgcccgggtgcccaggcctgatgctgggatgggaccaccttcagctgtggctgagaggcccaaggtcaagcctgcattttgacactgagaatgatggctaattctctgatggggagatgagcgactcagatgtagaggccgaggacggtggggtgcagcggggtccccgggaggcaggggcagaggaggtggtccgcatgggcgtactggcctcctaactcacccccttccctgtcccagccctgccctggtccccccacaaggcctcagcccagtcacaactgccatttccagtctctgctgagtgtcccagaccctcgaggctgccactccgtcgtggttttatttttaatatagagagagttttgaattctaaaaaa

SEQ ID NO: 9374 - DNA, 671 bp, Homo Sapiens
tacatcagctcggcccgacttagatatggggtcagctgagcacatgttatgagaggcaaacattgcacagctaggcactaaggagagagaaagggacacagcggggcatggccagaagactggaattgagctgagtggaggcaccaagacctgcgagggcacaggctgggcaccaggtgtgagaacagcccactcctgggggcattcaccaggggtagatctcttcagggtccctctgccacaactagttttgagttcatatggtccacctgctggtgggaacgtagaagccttcagacctatgaaggatgatgagtttttgagagtccaggccaggagaggccaaaacaccatgaccccagcaagcgagaataatccttactccaagacaaacacagacctgcaaaaaatgaacatccagggaaggctcccaggcaggacccagcgggcccacacgcactcatgtcagtgcatgcggtgcctggaatcttacaggaagtgaccgagctgaacgtgaccagctgtgaagattcagagacttctgagccccgatctggccactcacggccctgggtagaatgtgtggggtgtccactcagccacttgttagaggaggtggcatgatctgggccgcagtgccccgaccaacagcgacatcccatgctggaatg

SEQ ID NO: 9375 - DNA, 241 bp, Homo Sapiens
gcccaatttatgacatgagcacaatgactggcaaaagccaaagtcttactgttggtcctcaaggaccctcaaggtctgacctgtcacccgttcaccctgctccagccacacagagctccatgtggctccatggaattctgcacactctcctgctcgaaggcttttatgcctgttattctctccccacctggatctctcttccttcaaatagccacacggctccctccctcatgtcatacat

SEQ ID NO: 9376 - DNA, 159 bp, Homo Sapiens
gagccggcccatgtgttgacatgagcagctgagcactagactcaactatgtacaagaaaacttactattcaatcttcctgacatcaaattatccattggacagaaccagatgtagtgacaagaaaatagccttgaaaacccagaccctctgtcatcatt

SEQ ID NO: 9377 - DNA, 351 bp, Homo Sapiens
tggcccagtggaacagcaaaaatttacatgttccaaagtctaccacactcaagaagttactaagaactcttgcagaataaaagtcaccattttagaaatgcaaacccacttccaacctttgcacagtccaaaaacaaaggcatttaaatgatttaaaagcaattacatacatatctacctacttgtttgtttagaattatttatagtctatctggggtttcatgtacaaaatttgtctctaaatcatgtacaaaaagctgtattttgaaaaagtcaccacatactgtacaagtttacaaggaagagatcccgttattttctctagcatttttggccttgcttgttccgctg

SEQ ID NO: 9378 - DNA, 373 bp, Homo Sapiens
agagcagaggctatatactgtaggcctattcaggaacttgaacttggagataagaagtagttatacacctcgggtcatccattgctgaagcgatcaaccttgaaaggactgctcctgtggaggataacaagctgtgaacctgcacactggagaatgaacgtcgtgatggctgagggggaagagcttttgcatcactaactttcagagctgaacgagctccagagggaggtcactgggaatctgacgatatccctgtggtcagtgggtacctgactactttcagaaaggtgattgttgactgtttctttgaaggtccttggggatacagacccaaatccctgcctcctccactcttggtttgcttgttccgctg

SEQ ID NO: 9379 - DNA, 957 bp, Homo Sapiens
gggggggcttcgcgtctccttctacggatatctgtggaccttatggaagcaaagactcttggaactgtaacgcccagaaaacctgtcttatctgtcagtgcaagaaaaattaaggacaatgcggctgattggcacaatttaatcctgaagtgggaaaccctcaatgatgcaggttttaccactgcaaataatattgccaacttgaaaatcagtttattgaataaagacaagatagaactagacagcagcagcccagcctcgaaggaaaatgaagaaaaggtgtgtctggaatataacgaggaactggagaagctgtgtgaggaactgcaggccaccttggatgggttgaccaaaatacaggtgaaaatggaaaagctgtcttcaactaccaagggaatttgtgaactagaaaactaccattatggggaggagagtaaacgaccccctctgttccacacgtggcctacaacccatttctatgaggtttcgcataagctcttggagatgtacaggaaggagctgctcctgaagcgcacggtggccaaggagcttgcccacaccggggatcccgacctcaccctgagctacctgtccatgtggctgcaccagccctatgtggagagcgacagtaggctgcatctggagagcatgctgctggagacaggccaccgagctctctgacgtcctgagacggctgcggacactggctccttccacgtctcaccaggcagacagtctgcctaggacccagtgccgcaggcctggatcagaccccaggatcagaccttcttggggtcttctggccagagcttgtcaccagccccatggcctctccaggcgtgctcatgcccacaacccgcggccagccccacgtggtgccgctcagccttctctgcccctcctgggaatctgtcattcgtgggtgcttcagagtaaaatcaatgagtttctgagcag

SEQ ID NO: 9380 - DNA, 535 bp, Homo Sapiens
cgatgccagcagctctcattaacagtgaaatgacagaggccaaagatggccaagtgaagacccaagtctcagaaaacccagacttgggacaactgcctgggaactaggatgctagagcagttctgtaatgctttgagacacagcaattttcacattggccattctttcccctcccctaccccttttcttttgagggacttttaatgtttgctgctttaggtggatggagagtccaccagtcccactcaatgctgctctaactctacccacaccccacctaattaggggtgctaataaaacatgctgaggttgagataaagacgggacataaggggaaaattcattccatagagctgaaatctggttttcaaggcctctgtggctttcttctgaacttaccaccagccctggctggaatgtagattgtgtttttagtaatgtgtactgtgagctgtcttctgtataatgtattttgtaatgtatttttctcatctaccaaaggatgaaacaaataaaattatttaaatagttaaaa

SEQ ID NO: 9381 - DNA, 603 bp, Homo Sapiens
  misc_feature (208)..(248): n is a, c, g, or t
atgattcagaattatcaaagatagtagattcgaatgacatgattgtctataatctcgctagccttgtactgtgtgtgcatagcaattacagggaagtaatctagctcctgactattatgttgaactatgtcgctgctttttacaaacttgtcttgatccaaagcagtcacaatgataaccctgcatatctgggaatcataagtcaacnnnnnnnnnnnnnnnnnnnnnnnnnnnnnnnnnnnnnnnnnattttcaaactgtgatttaatatttaaatattcctactgccatttttgtgactgaaaaactacacatgaggaaacgtcttagaattttccaatagaggaaaaataacacttgggcaatctgtcatgtttcacaacagttctcatttttctcatgatttgtgtagcgtggaatgtgtttgctcaatgtgaagggttttcattgctcaatttctctgtgtaagtcttttccttaaggtaataaaccatcagcaaagtcacatactggagttggtggcttttcttgtacaggcagttgttatgagacaatgatggagcattgagcatgttcaataaatgtgcagatggtggaaaaaaa

SEQ ID NO: 9382 - DNA, 761 bp, Homo Sapiens
  misc_feature (529)..(689): n is a, c, g, or t
  misc_feature (697)..(714): n is a, c, g, or t
cttgggtatacaatttgctgtgtagtgaagtggaaccaggctcaggctgctggtcccaacctcagagccccaccgcagcccagtagggatgcagcacgccccagagggctcatgtgggccccagatggcaatgccaccattgttgatgtgactccagagccagttattaggaagagcaagctcaccacagaggagtggaactgaggccccccagatgttgcctccggtgtccaagccacagcggtctggctgttgggaagatggccaggaatggactcataccattggcacattaggctaatcctggttttatgtgaagtcagcaattaagtgttcccactagaactgacctaagccactgattaatatttaatgagggaaggtaggggagaatctagccattttataatgccagaaatctatatatgttatctgatgccatttttctgaagtagcctcacatgtggtccccctgcagttcagcagttaacagatgacttttttagtgtaataaaatgtttatcatctnnnnnnnnnnnnnnnnnnnnnnnnnnnnnnnnnnnnnnnnnnnnnnnnnnnnnnnnnnnnnnnnnnnnnnnnnnnnnnnnnnnnnnnnnnnnnnnnnnnnnnnnnnnnnnnnnnnnnnnnnnnnnnnnnnnnnnnnnnnnnnnnnnnnnnnnnnnnnnnnncctgtggnnnnnnnnnnnnnnnnnnaaaaaaatttttaaacacttttttgtggggcgggggccccccaagga

SEQ ID NO: 9383 - DNA, 1026 bp, Homo Sapiens
  misc_feature (416)..(494): n is a, c, g, or t
  misc_feature (496)..(497): n is a, c, g, or t
  misc_feature (500)..(500): n is a, c, g, or t
  misc_feature (626)..(634): n is a, c, g, or t
aatgaaatattattgctggaggcgtcccaggcaagcctgcctgtagtagcgagtgatctggcggggggcgtctcagcaccctccccagggggtgcatctcagccccctctttccgtccttcccgtccagccccagccctgggcctgggctgccgacacctgggccagagcccctgctgtgattggtgctccctgggcctcccgggtggatgaagccaggcgtcgccccctccgggagccctggggtgagccgccggggcccccctgctgccagcctcccccgtccccaacatgcatctcactctgggtgtcttggtcttttattttttgtaagtgtcatttgtataactctaaacgcccatgatagtagcttcaaactggaaatagcgaaataaaataactcagtctgcagccccnnnnnnnnnnnnnnnnnnnnnnnnnnnnnnnnnnnnnnnnnnnnnnnnnnnnnnnnnnnnnnnnnnnnnnnnnnnnnnngnnggngagaaacggcccacaaaaaacctttcaaaacaattcttttggccccgggccccggtgggaaagggaaaatgggcattgtggttccccaggaaatcctggcaataaaaaggggtgggattctaaccnnnnnnnnncccccgggggaaacgggacgttcggaccaatcccgaatggatttctgaggtcttaattgggtcttttaaaaggggacccaacggagctgaatataaaataacgcctggccctgcacctcatcggatgagggggggaaggaaataaaacaattaggccgaaagggaacccaacaccaccggtataaataacctgaaaccccagcggataaaccccgggcccgcctggacataaaattttgccccggggaaaaagggcgggggaaaaagtggcactatgggcaccgctaaaaataaaaagggggaaaccccccaccggggagccccgcgagacctaatagcaaaattcgccaacaaaccctctttagggaaaatagccccatgtttttcacagc

SEQ ID NO: 9384 - DNA, 533 bp, Homo Sapiens
atgctggggtatgaaccaggtagtctgcccccatagctctgccccccagagctgtactgtctcccatgagggtacttctccatggagcagcctgaggcgatccctttattctgggcttctctcagaaatggattcccacacagtattcaaagcaaatttccccagaggaaatcctattggaagaacttaaaaactcagaatctttttctttgtccagagagttgaggaagcttaagctaaatgatacatgttttttaaaaaaaatcagattataaatttagtttttggtgattcattaaattctttactattatagttattttctagctgttcatcttttagctaaatttgttccaaagaagcaaaagtttggtttctactaagttctggattctggatgggagattgcactgtgtgtgacatgcaagtttcatggtgtgggagattgcagagcatttgggttactgcttttactctttggaagctgttatcatctgtatctgctttaaataaagttaaagatttggaacaaa

SEQ ID NO: 9385 - DNA, 454 bp, Homo Sapiens
  misc_feature (251)..(251): n is a, c, g, or t
ggaccaagggaggtgagaccacctcccccaggtcccctcccctttcaaaaacccatctcattttgccacttcatgcccctgccctaactgggtttttgttcattttttaaaaacagaccacccatcccatccgttttggcttcttgtcccctgtaaatagaccatgacttcgatcagtatttcttgtccccaccccttcctatccccagatgtgcccccatcccctgaaggagctggctgtctcagtcctngggtcgcgcacttcaccccggcagatggagggggcggaaccgggtgggcggggccgcttcgggctgctctggccagcggccacccctgcccagccgtcgggagggccgcatctctgtatataatatatatatgtatgtattgttcccggttttgtacggaccatgccctctgtcaggtcgtccccataaaagcagcccccaga

SEQ ID NO: 9386 - DNA, 551 bp, Homo Sapiens
taggagaagcaaacactgccaaagagggggtcctgggccaggtggtgagccaagtgggccaggtagagggcacgcttgcggaagtagcgctggttcagcccgtccttgtcctgtaggatttccctgggcatggtcagtgccacatccacattgatgtctggtcggatgcaggtgcccagaaggtagctgcccacaacagtaacctgggctgggggcaggaagcggaaacagcccttcacggcatagggcacttggtggaggggcactcgaaccccagctgggagccatgcctggtcagtgagctctgtctcagggactgagggcaccctcacaacccgctggttgacctcccgtaggaaggcatcaatccgatccttcttcttctctgacagccttacttcctttagtagctcctctacctgtaaacgaagcaagctggagtggaacaagatctcagtctcccgaaggcgattaagctcctcattggtaggctccttgtacagttctgccctgctgagcttcactggctgcaggaggcccttcgctggagg

SEQ ID NO: 9387 - DNA, 487 bp, Homo Sapiens
aatagttgtatttgaatgattccagcttatcgtaaatactaaactgaatggcttttatatttttaactgctgttaaatgttattttagcatttattagttgtttattatttaattcttcaaatagtcatatgaaaacatatatttgataaaggtcaattgttagatgataatgtgccattcattatcataggaatgtccttgcccatatataaaacatgctggcatgtattttacttgttaataaagttgtatagatgtggaagtgtgaacctgtgatgcatccttttcaaaatcagtttaagattcgcatattatcatgactgtgacctcactaaactgtttatgtgacaaacctttcaagattggagatgaaaacaacacttgtgaaattaggttggggttgcaacatcttttaacttctcagttatttgtatgtcaggagacagattgtggtttaattttaataaacaaaatatcatctttttg

SEQ ID NO: 9388 - DNA, 443 bp, Homo Sapiens
tacccagggcttttgcgtggtgacctgaccggctcggggcgtcccagcgacgcgggaaggggcagggcgctgacctgctgctgacctggtgggcctggacccggtccctaggctgtgaccgccgaactccactgcaacagacgggcgccaccaaagccaggccctgaggcctgggagtcctggactgagaaagggggttcctgggcccacctgctctgtgtagggctctgtcctgcggtgcccgagaatcactcgctaacccctatgcccggtcccggaccgacatcctggagccgcctgtgcagcctaatgccccctcgtggctgctcccagggctgcacctgccaggacctaatgttcttaggtccctctggccagaacccacacccggcccctccccacctgtcatactggtaactgtaacaagaaaaacgacatcactt

SEQ ID NO: 9389 - DNA, 771 bp, Homo Sapiens
gggatcttgagtgagggcacgctctccttagaggggcggaacagtttttggcaccttatcgcgagcggcagcttatgcaagagtgacttaaaaaagaaaggcaggtccggggccaggggctaagtagcggtgcggtttctttttctggattagtttccccatcttgcctaaaaatgtcctagtctagtctttttagcagaactccactccctaaacatgtcagaactacacttcccatcaagggtcagaaagaaacttccggcacagtcttttcccagcattccttgtttacttccgggtttattactactgaaggaagaacgccagatcagaaaagggagctcaggtaccttccagagagtgagacccagcgcccttgtctcgcacccagtaggctttcatccccgccatggcggagctgatccagaagaagctacagggagaagtggagaaatatcaacagctacagaaggacttaagtaaatccatgtcggggaggcagaaacttgaagcacaactaacagaaaataatatcgtgaaagaggaactggccctgctggatgggtccaacgtggtctttaaacttctgggtccgggtgctagtcaaacaggaggctggggggagggctcggggccacaggtaggggaagaaggctgggacttatatcacacgctgaaaaattaagccggatacgaaattcccagcctttcgggggatctttggagccgggcaggtccagagcccaaacaggagggggaggaaccccttgg

SEQ ID NO: 9390 - DNA, 903 bp, Homo Sapiens
  misc_feature (766)..(779): n is a, c, g, or t
gggagtccaactctagggcgctgctgcacagcgacgagcaccagctcctgaccaaccccaagtgctcctatatccctccctgtaagagagaaaatcagaagaatttggaaagtgtcatgaattggcaacagtactggaaagatgagattggttcccagccatttacttgctattttaatcaacatcaaagaccagatgatgtgcttctgcatcgcactcatgatgagattgtcctcctgcattgcttcctctggcccctggtgacatttgtggtgggcgttctcattgtggtcctgaccatctgtgccaagagcttggcggtcaaggcggaagccatgaagaagcgcaagttctcttaaaggggaaggaggcttgtagaaagcaaagtacagaagctgtactcatcggcacgcgtccacctgcggaacctgtgtttcctggcgcaggagatggacagggccacgacagggctctgagaggctcatccctcagtggcaacagaaacaggcacaactggaagacttggaacctcaaagcttgtattccatctgctgtagcaatggctaaagggtcaagatcttagctgtatggagtaactatttcagaaaaccctataagaagttcattttctttcaaaagtaacagtatattatttgtacagtgtagtatacaaaccattatgatttatgctacttaaaaatattaaaatagagtggtctgtgttattttctatttccttttttatgcttagaacaccagggttttnnnnnnnnnnnnnnggtgaggacatctgggtctcatttgcttctgctaggttaaacttttacttgacaacaaggattcctgctgaagtctgaaccttactgtgtaaccctcagtttccactaataaaaagtatctttt

SEQ ID NO: 9391 - DNA, 551 bp, Homo Sapiens
accccggatggacaacggccaaaaactctgctcaaacaaaaacactaccacacaaagacaaagaacatggcttcccaggacagagcagcctcattgctggccggacagttccagaaacagaccctgttagtccttctacttacctgctggatttttcaagcactaaatttataactttttgaaacaaaataatgtgtaattttccatttgggggcaaactctattcttgtgagcattattaaatcttgtttgtaaatatattgtctttctcttaatatttgctctgggtcaggaagaagctgttcacggtgtgataatactctttagattgtgctttcattattatagatgcatcatgtcttctgctttcacgtgtctgggatggggtcagaaatgcatcctccagctgacagaaaaatccaggatgagatcagaaggatactggtgttttctgacttttacaaaattacttgtttgttttcatttaaaaaaaagcataaactatgtttcttattactattagaattattaaatttcaaaatgaatccaaa

SEQ ID NO: 9392 - DNA, 938 bp, Homo Sapiens
  misc_feature (490)..(521): n is a, c, g, or t
  misc_feature (881)..(881): n is a, c, g, or t
tgtaagagaaagcaaatctgtacaaaaatactctggttgcaagaaaagctagggcacactgttcaactaagagtagtttagctgttggaaaaataagagcatttaattttatctaaaaatatgtataaatcccctcaaaatggtaatgaatcatacacagtacatactaaaaatatttaaaatagagaatattcctcacagaggacttttttctttaattactgctaaaaaaataattacaaagtccaaacaggcagagagatttagcacactgatcacacgattctccatcatcctccacgcttgctctgaagagggtttaaaaagtccagtttctcgttgatttcgctgctccatttagccaaggttggcctggccactgattggccacaagtgggtaatgcgcttggataggtcatgtttgtgtcttggaaatttgggtacgagttgcctttagcttaaatgtctttaaggaagaagaagaagaagnnnnnnnnnnnnnnnnnnnnnnnnnnnnnnnncacaaatgtccaaagggaattctggttggtcctctctttcttcggttatttttaggatcatctcggccatcttcgcccttcgtgggaggcctcctcaaggtcgagtgagctgtgtgtagacgggttgttcccagtgctgggggctgtgggtctgcgggatggaagggaccccagaggtgtcggcgatgggggtgtacatagggcgctgagcggggttcatgtaggtaaaggtggagtaaaggccggtgccctggcctgccgcgtggctgtagtaggagcctgagttctggtggtcggtgtagtcgtactgtgagcgggtgatgggcgggtaggaagggctgtaatttgggggagatgagnggttatagccaactggtgggggcagtgctgctggtgcttgctggagtggctggggtt

SEQ ID NO: 9393 - DNA, 522 bp, Homo Sapiens
  misc_feature (337)..(350): n is a, c, g, or t
aaggtaattagaacactattgtttatacaatattgaaaaaaatacaattttttattgtttgaactcaaatcaccacccagcactttaagcctaccctaaatagcacctacaataaatgtcatagcacaagcaaactgcaaagtcagcaggtaagcaagttagacagtgccagcagagagaccctccctcccccaaagcaatgagaagacagcgtgctaggtaagagtgaagtacaccattacatgttaaatagttaatactacccttccagcaagccacagatgctagatggataactcagtacggttaactaaccacagccctacatcactgcacnnnnnnnnnnnnnnaaagaaaaccttttgcttcatgcccgtaattaacataaagtaagtaaattctttgtctttttatttaggaaaataatcatgctaaaagcaagttgtactttatatagattttcaaacaaagattgattgtgctttttgaataaaaaagatagggtatcttccaacctcacta

SEQ ID NO: 9394 - DNA, 289 bp, Homo Sapiens
ctgctggcccttacgcgctggaataaagaagcacatctcaggaggtgctgggaagaaacttgggatttcatctggggaacagagttgctgccagtgcttcagttagcatttagctggtacgataaaggaaacttaatctaaggagtctcagttcataattctacagactgagcaacattgccatctgtttggtgtaaatcaatggctgatttcctttattaggggcaaaacctatagattggtatgtggtcttatttataagaggagggggccaggcgcggtggctcat

SEQ ID NO: 9395 - DNA, 840 bp, Homo Sapiens
  misc_feature (752)..(752): n is a, c, g, or t
gggacaggctccctggctggcgtcagctaaagtggctgttgggtgtccgcaggcttctgcctggccgccgccgcctataagctaccaggaggagctttacgacttcccgtcctgcgggaagtggcgggcacgatcgcaaggtagcgcagaagcttctcaatggccagcgccagctgcagccccggcggcgcactcgcctcacctgagcctgggaggaaaattcttccaaggatgatctcccactcagagctgaggaagcttttctactcagcagatgctgtgtgttttgatgttgacagcacggtcatcagtgaagaaggaatcggatgctttcattggctttggaggaaatgtgatcaggcaacaagtcaaggataacgccaaatggtatatcactgattttgtagagctgctgggagaaccggaagaataacatccattgtcatacagctccaaacaacttcagatgaatttttacaagttacacagattgatactgtttgcttacaattgcctattacaacttgctatagaaagttggtacagatgatctgcactgtcaagtaaactacagttaggaatccctcaaagattggtttgtttgtttttaactgtagttccagtattatatgatcactattgatttcctggagaggtttgtaatctgaaattctttatggatattcctagctatatttcatacaaagtgtttttaagagtgggagagtccattaaaacacctttactcctangaatatagattcggcagccttcagtggatattgggttttttttccctttgggatgtccaataaaagtttatccctggggtccgaaaat

SEQ ID NO: 9396 - DNA, 569 bp, Homo Sapiens
aaccggccagtaaccctaacggttataaggtagcgaggacctgggtggcgaattcggcacgaggggaagtggcttctgcgacaacatgcttgcggacctcggcttaatcggaaccataggcgaggatgacgaggtgccggtggagcccgagtctgactccggggacgaggaagaggaggggcccattgtgctgggcagacgacaaaaagctttggggaagaaccgcagtgctgatttcaaccctgatttcgttttcactgagaaggaggggacgtacgatggcagctgggccctggctgatgtcatgagccaactcaagaagaagagggcagccactacattagatgagaagattgagaaagttcgaaagaaaaggaaaacagaggataaagaagccaagtctgggaagttggaaaaggtagaaagaagcaaaggaaggctctgaaccaaaggagcaggaagaccttcaagagaatgatgaggaaggctcagaagatgaagcctcggagactgactactcatcagctgatgagaacatcctcaccaaagcagatacactcaaagtaaag

SEQ ID NO: 9397 - DNA, 257 bp, Homo Sapiens
cggaacttaaggaatacgcaccaaatgtaccctttttattaataggaactcagattgatctccgagatgaccccaaaactttagcaagactgaatgatatgaaagaaaaacctatatgtgtggaacaaaggacagaaactagcaaaagagataggagcatgctgctatgtggaatgttcagctttaacccagaagggattgaagactgtttttgatgaggctatcatagccattttaactccaaagaaacacactgt

SEQ ID NO: 9398 - DNA, 813 bp, Homo Sapiens
  misc_feature (47)..(47): n is a, c, g, or t
  misc_feature (71)..(71): n is a, c, g, or t
  misc_feature (159)..(159): n is a, c, g, or t
  misc_feature (164)..(164): n is a, c, g, or t
  misc_feature (168)..(169): n is a, c, g, or t
  misc_feature (177)..(177): n is a, c, g, or t
  misc_feature (180)..(181): n is a, c, g, or t
  misc_feature (183)..(183): n is a, c, g, or t
  misc_feature (185)..(185): n is a, c, g, or t
  misc_feature (188)..(188): n is a, c, g, or t
  misc_feature (190)..(191): n is a, c, g, or t
  misc_feature (196)..(196): n is a, c, g, or t
  misc_feature (202)..(202): n is a, c, g, or t
  misc_feature (205)..(205): n is a, c, g, or t
  misc_feature (209)..(209): n is a, c, g, or t
  misc_feature (213)..(213): n is a, c, g, or t
  misc_feature (220)..(220): n is a, c, g, or t
  misc_feature (222)..(223): n is a, c, g, or t
  misc_feature (227)..(227): n is a, c, g, or t
  misc_feature (230)..(231): n is a, c, g, or t
  misc_feature (751)..(751): n is a, c, g, or t
gtgagagctcctggctttcacatttccagcctctcacgagactgcantccccggctccacctattgcaatnctttccagtccgcctggaatctaccatttgtcttccagcatcaccctcctgctttccctgccatacttcctccataaccccatcaggnagcgnaaannttctgctngtnntngngancnngtctncacacngcnatangctnggaacangnntcantcnnttacgtgttccttgcagagaacctgagcacctagtgggtgctgaataaggtttcctgaatgaataatgtaattgtttgttaagtcaggaggatactgaagcctgaacatcaatctgctaacacaagtcttgtcagagaccacagcttcatatttatgcatccagcaacactatgattctccagtgagagaaagacaccagcttaggaaaacaggtatccaagtctctatcgaggacaatcaaatcccggtggctcccaaaatgtggaaatgccagaagcacagtaagcacttaatataggccaaagcccatgctgacagagatgccgagaggatgttttgcagtcatccctgcccaacacacagataaagcaggcgctttaatagaagacattcaggatcccccaagcacaattccctatattccctccccagccagtattttaccagagttgacagtgagtgccaaaaatggctggcttaggttttggcaacttgctctcgaggaagaaaggcagcacncctgaccacaccacccacttccctcaggcagatgcctcataatccgggatgcacaaccgaac

SEQ ID NO: 9399 - DNA, 735 bp, Homo Sapiens
ggagactctggataacttctggagccatccatgggaaagttccaaccaaggaaatgtgtgttatatggttatgggaaccgagaggcaccaaagtcacagatcttcaatactccatcagcagctataacaacgtttcttgacttgaggtctctgtgaatcaccttgacaggagcctccatatgtaaataatgcattcctttggctacatcagtggcccaggtcataatgtgatccatatccatctcctcacttctgttactgttaatgtaatcatagagtgatcccagagaagcatattctgtgacaatgccatagttgggaggttcaagaattactccataaaactggatgatgtttctgtgactgaggacactgagtatttctgcctctttctctattttgaggagcttctttacagccacctccttgtcctgtgatatccatttggctcgataaacactcccaaaacttcctccaccgcagttttcaaaaaactgcaagtcatcaaatttaatttgcacaaaggaggcaccgagagacgacatctcataatgacaaagtattatacttccacaaaatctggctcccgggcggggcgtgagcagcagccgggggcgcggaggccccgcgcgcgacgaggcggcgggggttgggacgacagcggcccgcgcggccctcgtgccgaattcaacacccagcgctcgctacctagccaatagattgtcgctcccctga

SEQ ID NO: 9400 - DNA, 657 bp, Homo Sapiens
gtaagatagacagtcggcatcacgagcacaagcctgtctccaggcacgtacgacttggagctgaagccattgagtgtctgctccgctgatcgtcctgatgcccgaggacctgtggaccgtgtaaaatgacatgatggtcagctactcttcaacctcggacttccccagcagcccgtgggactggattggactgtacaaggtggggctgcgggacgttaatgactacgtgtcctatgcctgggtcggggacagcaaggtctcctgcagcgacaacctgaaccaggtttacatcgacatcagcaatatccctaccactgaagatgagtttctcctctgttactacagcaacagtctgcgttctgtggtggggataagcagacccttccagatcccgcctggctccttgagggaggacccactgggtgaagcacagccacagatctgagccaggatgggagtgaatcccaggcggaggccagagctggcagccagctctgcctttccactgccgggagtgcttgggcccagcctggccccctgaagagacagccaagtgtcgtccacatactcctcccagagtgagctctaaccaggctcatttgctctctccactactcatctctggaattagccgcttaaatacaggtttttgttgct

SEQ ID NO: 9401 - DNA, 866 bp, Homo Sapiens
ctaggactgagggcgatggctgctgtggccgtggctgttcgcgaggactcgggatccgggatgaaggcggagcttccccctgggcctggggcagtggggagggaaatgaccaaagaagaaaagctgcagcttcggaaggaaaagaaacagcagaagaagaaacggaaggaagaaaagggggcagaaccagagactggctctgctgtatctgcagcccaatgtcaaggcccaaccagagaactgccagaatcgggcattcagttgggcactcctcgggagaaagttccagctggtcggagtaaggccgaacttcgggctgagcgtcgagccaagcaggaggccgagcgggccctgaaacaggcaagaaaaggggaacaaggaggaccacctcctaaggccagccccagcacagctggagaaaccccctcaggagtgaagcgtctccctgagtaccctcaggttgatgacctacttctgagaaggcttgttaaaaaaccagagcgtcaacaggttcctacacgaaaggattatggatccaaagtcagtctcttctctcacctaccccagtacagcagacaaaactctctgacccagtttatgagcatcccatcctctgtgatccaaccagccattggtgcgactcggcctgcagtactcccaggcctggtcagtggctccaatgcccggtgtatgccctgcttcgtgccttgcagcaggtgattcaggattacacaacaccggctaatgaagaattctccagggatctagtgaataaacttaaaccctacatgaggcttcctgactcagtgccgtcccctgtcagcgagcatgcacaaagccatcaagttcttaacaaggaaatcacg

SEQ ID NO: 9402 - DNA, 195 bp, Homo Sapiens
ccctcaggagtgatttgaattagacaataaatagccagacagcacccccaggaatgggcacacatgcagcagctgtccaaaggagaagtcactttactttcctttaaacttgcaatgtttgtctttattttgttctttatattttcaaagtgaaaagaaatagtactgagtcaatttcttaagttttttgaaata

SEQ ID NO: 9403 - DNA, 379 bp, Homo Sapiens
aggttcaaggctggtactgtctgttctccgggtgccttaatatttgatgctcggtatgtaatttcctatgacaaaagtcgcttcagggttaggaaagatgttgccttcattcctgcccagagcactgcctgggcaataaaagttgattcgcaagtaagtataatctccttccacggacatacttatattcttgattgtggcaatgtgaaacggtgttgcaatgccaaacacgggcattattacagtctcatatttcttatcgatgtagatcttcatttcccgaatatgcggttccttaggcatcagagatgggtttttataggacacattagacttgcgagctttctgaatctgctgttctcccttttgttcagtcaat

SEQ ID NO: 9404 - DNA, 474 bp, Homo Sapiens
tcggagtggccccttggacgccggggaagaggagaaggcacccgcggaaccgacggctcaggtgccggacgctggcggaatgtgcgagcgaggagaatggggtactaagagaaaagcacgaagctgtggatcatagttcccagcatgaggaaaatgaagaaagggtgtcagcccagaaggagaactcacttcagcagaatgatgatgatgaaaacaaaatagcagagaaacctgactgggaggcagaaaagaccactgaatctagaaatgagagacatctgaatgggacagatacttctttctctctggaagacttattccagttgctttcatcacagcctgaaaattcacttggagggcatctcattggggagatattcctcttccaggcagtatcagtgatggcatgaattcttcagcacattatcatgtaaactttcagccaggctataagtcaggatgtgaatcttcatg

SEQ ID NO: 9405 - DNA, 356 bp, Homo Sapiens
ccctatatatgtttgactaaactacatctcagtggattactgtaacatttcctcccttcagcttccccattaattttccttccttgccttgttctttccattttccaaaaaacaaaagaaaaaaattccaaacacacacctagatgacctttcattacttatgttcctataggcagaagctaaggaactcacacctaaatggtataaaagggaacataatggaaaaatccctggttacatttagggagcaatcttactaataactcaggaaacttagtgagaaatctaagttaaaaaatcaggaaggttcataagaaaggacacaaatcgctctcactggtcataccataataggg

SEQ ID NO: 9406 - DNA, 546 bp, Homo Sapiens
tttctagtcatttgtcgagcagctgggagaacctgtgtcaagctcgagccgtcataggtccccatgaggtgtctgaagccccttcttggtgatgggaggcagagttgctgacgttctggagcatggacgtgagtcctcagctggctccgcgtgggcccttggagggtgccaggtgtgtggtgaccttctggatgcctttaacttccatggctgcgtcattcctgatttagaactttaaccggagcttcatctagtgattgcaaaactggaccaatgggaggacggcggcgcagcccgctccctccgtggaatggagctcagctcttcggaggcatcaaagcacctgtcgcctccgtggtccccctgccgagggagtgcggcctctgcaaggttcgggggtggcttcgtttgcctggagtggccggccctgcttgtgccatgtggatgtttgtgagcctcggtcctacagcactgtgtaggctgcatctgtttcgtgctggtcctgttgacttgtatgatatccacaaataaatattttcatggcga

SEQ ID NO: 9407 - DNA, 671 bp, Homo Sapiens
  misc_feature (440)..(480): n is a, c, g, or t
gacaaggatcctctattatagtttgacaagatgagtgtaaaggcatgcagagctgttgttggttcgtggcttccaaatcgtccgtgactggaacagcctggcgttcctctcaccccagcgtttggggccttctctgcacatattgtcataagaggacagcatgtttgtttaccatctgcccaggcaccacggctacaatcacatctagctgtatcagacagaagacaaagaacttactttctgtggtcattagttgtaagttttcttagcaatccctgattcaagttcaaaactttgctacctccagctagctttgttccttttaacgcacatgttaagtgaatgcggaacagaaaataaatgtaaaaacgaccattacagtgccaatatcgctaatatgatccctggatggaattggttattctgagctgtgacaaggnnnnnnnnnnnnnnnnnnnnnnnnnnnnnnnnnnnnnnnnnaagggcaagtgctgttttcctgttttcttccttatcttagttgtaatgaatcacttttataacttgtacctgctacactaagtattgtctcagcaaagtcattcattttactggtaacaaaagccaggaataacgtgctatggaacaatatcgtgcctatttcttttggtggtcaaacaataaatagggag

SEQ ID NO: 9408 - DNA, 554 bp, Homo Sapiens
atgtttagcttcttactgcaaaaacataagtaaaacagtcaactttaccatttccgtattctccatagattgaagaaatttataccacatatcgcatatgaccatctttccatcaaatcaatgtagagataatgtaaactgaaaaaaaatctgcaagataatgtaactgaatgttttaaaaacagaacttgtcactttatataaaagaatagtatgctctatttcctgaatggatgtggaaatgaaagctagcgcacctgcactttgaattcttgcttcttttttattactgttatgattttgctttttacagatgttggacgattttttcttctgattgttgaattcataatcatggtctcatttcctttgcttctttggaatatttctttcaacacattcctttattttattatacattgtgtcctttttttagctattgctgctgttgttttttattctatttacaggatgatttttaaactgtcaaatgaagtagtgttaacctcaaataggctaaatgtgaacaaataaaatacagcaaatactcaaaa

SEQ ID NO: 9409 - DNA, 477 bp, Homo Sapiens
gcctgggagcatccgagttagcgtctggccgggcccagccccaagccccatctgcaacacggaccctcccccggcacagaccccctctcccctctagcaggcacggttcagccccgagcgcaggcctccctggtctcttccccttccctcccccaggcgccgtcccacccctcaatcccggggcctgccccttctaccggtgttgggcggcagcttgtatttgggcccggggcctccgtagtgcgccgcgatggggccgcggggccggtgtggccgccaaaggcccacccaggcgtccgagcccatagcgcgggtggggggcgcttacggctcgcagcacctgcggacagaaggcggtggccgcggcccctgcaccgcaaattcttggggagcgcactttcccactaccctgggatcagcgcggggcggggcggggcctggaccgtatccctggcgccagcaaaacaaacgcgagct

SEQ ID NO: 9410 - DNA, 911 bp, Homo Sapiens
ataaaggtggctccagaaagggcatcctttaccccaagcccaaagcctgatgggtgtcccccatggccaaggtcccagccgagagccccacgctcccgcccaccttccccagtagcccaggcctgggcagcaagcgcagcctgaaggaagagggtgctgcccacagtgggaaaagactgcgggccgtgtctccctttcttaaggaggcggatgccaaaaagtgtggggccaaacctgcagggtccggcctggtctcctgccttctgggcccagccctggggcctgtgcccccaaaggcctacaggggcaccatgctgcactgcccgctgaacttcactggcaccccgggccccttgaagggccaggctgcactccccttcagccccctggtcatcccggccttcccggcccacttcctggccaccgcaggcccctcgcccatggccgctggcctgatgcacttccccccaacgtccttcgacagtgccctccgccacagactttgcccggcctcatctgcctggcacgcaccaccagtcacaacctatgcagcgccccacttcttccacctcaacaccaagctgtaggccagcccatggtgttgtgtacactgtggagtcgacaggggcctacaacaggcaggtactgctgccagggggctctgaactagtgcctgctacccaggacacccgggccatgcccctggctgggcagcctggcacaagtgaagaagaaggcagtgggaaaactgggtttatctcaaggcagcagcctgagcccaggagcagaggacccagttgttataaggcgctgggagaggatgggcagctcccactgccccagagcggagctcgaagcacccaggttgcccacggaaaatccaataaaaagacaccagtgtgaatccacgt

SEQ ID NO: 9411 - DNA, 776 bp, Homo Sapiens
gtaactcatcaggacttaccagactgctgcttttgggcatcatctgctgggttgatgatttggtttggccaagagtcttgccaagactttaatctatgcctcttgttctacatgaattcttgggaattactcacgttccataggaagagtgcatccccaggtgatggtttttggttatggtatgatcctttcacaccgaggatttcattgtttaaaacgtgtttctttaaaagaagccttgataacgagagtgggggaaggaggcagcagactttgaagactgtggcctttggtgttctggagtagggggagggaaggagaaacatgttttccacatcatcgcaagtgtgtgccctttgccccttttcaggatccttagagttgcctccctccctccaccccgacagttttgcaataatgtgccttatcagttgtgagtttacaggtgaagcaatttcccaaataaatggatgtaagtgttctgtgtggtgcttgtttgaacatgtagctaactttcaactacctttgccagtgggaattaggatcgtggctgaaaattggacagtccaaaatggtgtcttaagctttccactctcaatgcttcttaccaaaataatttctcagaagccagattttaatcttcattttctctctctgctccctgtatagtggggtcagtagtaacaggagtagctaccggatgggcagcaggaaagcatagggaagaagcagagtgccagtctagcttttacagaatactcaagaagaggctgtca

SEQ ID NO: 9412 - DNA, 862 bp, Homo Sapiens
  misc_feature (183)..(183): n is a, c, g, or t
  misc_feature (200)..(200): n is a, c, g, or t
  misc_feature (209)..(209): n is a, c, g, or t
  misc_feature (215)..(215): n is a, c, g, or t
  misc_feature (229)..(229): n is a, c, g, or t
  misc_feature (233)..(233): n is a, c, g, or t
  misc_feature (239)..(239): n is a, c, g, or t
  misc_feature (245)..(245): n is a, c, g, or t
  misc_feature (249)..(249): n is a, c, g, or t
  misc_feature (343)..(487): n is a, c, g, or t
  misc_feature (500)..(511): n is a, c, g, or t
  misc_feature (537)..(546): n is a, c, g, or t
  misc_feature (607)..(668): n is a, c, g, or t
  misc_feature (738)..(746): n is a, c, g, or t
  misc_feature (794)..(820): n is a, c, g, or t
accagatccggctctgggagctggaaagggacagactccggttcactgagggtgtcctgtataaccagttcctgtcgcaagtggactttgagctgctgctggcccacgcgcgggagctgggcgtgctcgtgttcgagaactcggccaagcggctcatggtggtgaccccggccgggcacagcnagtcaagcgcttttggnaaaggcagnaaacanattcctgaaaaacncggnattggnacaggnaccnggcgggcgggactgggcggggcggggcatcagaactcaggtgttttttatttacgcgtcagggcttttcttgtttaataaagttataatagctnnnnnnnnnnnnnnnnnnnnnnnnnnnnnnnnnnnnnnnnnnnnnnnnnnnnnnnnnnnnnnnnnnnnnnnnnnnnnnnnnnnnnnnnnnnnnnnnnnnnnnnnnnnnnnnnnnnnnnnnnnnnnnnnnnnnnnnnnnnnnnnnngctgtgggggggnnnnnnnnnnnntaaaaaatttttaaaaactttttgtnnnnnnnnnncccccaaaggtaagggaaagggggcttacttttttccaaaaaaactccgggcatgaaaagnnnnnnnnnnnnnnnnnnnnnnnnnnnnnnnnnnnnnnnnnnnnnnnnnnnnnnnnnnnnnnggggggcccggggggcttccggggtctttttccaggggtggccccgccgcgcccccaaaaataaaatttnnnnnnnnngtgggcgtattttttgaaaaaatgggggggaatcattttaaacacctnnnnnnnnnnnnnnnnnnnnnnnnnnnacacggggggggagaacactcgaacgcccccggggggattaa

SEQ ID NO: 9413 - DNA, 926 bp, Homo Sapiens
atggggcccccacgtctgtgcacacaagattccctgggtatctcggccgaaacctctggcgccccctcgcggcggatctctctctctgctggtccgcccctcttttcgcttttgttcttcctctttttttcccaatcggaacgcgggatttgaatgtgaaccacgttagatctgagacgcagacgtgagaaacgccactgataagagacacggaagatcggagcccagccccgtgagccggtcggggacagcacgggggtcagcgtgcggccgggcccggctcaggctcgctgaggtccaggaacgggcacctccacctggacacggcgcgctgccccggcaaccccccaggggtctcccaaacgcagaccgggacgcagcgaccacaagcgtggctgcgggacgggggccttggggcccgggcgtagtgcgcccgctcggcacctgccccaaggcgccgccgggtgaagcaggtgtcccggagggccgggccgcggcggctcaggggatgccctcccttctctggcagcactgcgagggcggcgcggaccagtcgtacacgtaggacaggcgcagctgcacctcgcgcttgcacaggcggccctcgcgcgccagcgtcgcgtgcttctccagcatgtcctccaggctctgcttgtgcgtcaccaggtactggttgctgcagccgcgggaccggtattcggtgtcgaagcgcgggtcgtgctcccgctggacgtccaccggcgccagccaggcgcccagagacacgtcctcgctgtgccaggcgcgcaggtagtcgcggctgaggcgcaggtagtgcaccaggtcggccgagagcacgtagccgccgcccagcgcgtagggcaggtagtagtcgcagagttgccaggcggcctcgcgccagcgcccccccggcttgacgcggccgc

SEQ ID NO: 9414 - DNA, 548 bp, Homo Sapiens
accttttgtaagtgccatgtttattatctaatcattccaagttttgcattgatgtctgactgccactcctttctttcaaggacagtgttttttgtagtaaaatcactggtttatacaaagctttatttagggggtaaagttaagctgctaaaaccccatgttggctgctgctgttgagatactgtgctttgggagtaaaaaaagaaagttatttctttgtcttaaagaatttttaaaaaattagtcatgagacttattcatctttccagggaacatactgattggtcttaaaagactagacagttaagtaaaaggtggctggaacatctatttttctacaaaactggaaaaatgaacctggttctagaagaatgtacaccaaaataaaacatgtgaagcagtattgattctttattgggagtacattttttaggtctcttaaactttaatttcacacagtaaattttgaatctcaacagcaccagacacatggggttttagcagcttaactttaccccctacataaagctttgtaaaacccgtgattg

SEQ ID NO: 9415 - DNA, 443 bp, Homo Sapiens
  misc_feature (176)..(176): n is a, c, g, or t
caggcagggtaggacaatgtctggaggctcacggttttatagactaggggtccccaacccctgggctacagaccggtaccagaaccgggccacacagcaggaggtgagcagcaggcgagcaagggaagcttcatctgtatttacagccacccccccattgatcccacagcagcctngagctccgcctcctgtcagatcagtggcggctggagattgtcataggagctggaaccctatggtgaactgcgcatgtgaggaggttgcgcgcttcttttgaaaacctaatgcctgatctgtcgttgttgcccatcacctccagataggactgtctagttgcaggaaaacaagctcagggctcccacggatcctacattactgtgagttgtatatttcactatatgttacaatgtaataataatagaaataaaatgtacataaatgta

SEQ ID NO: 9416 - DNA, 460 bp, Homo Sapiens
atggagaaagtcagcaactaatcattaaattggaaaatattggaatggaaccattggagaaactggaggtcacctcgaaagttctcaccactaaagaaaaattgtatggcgacttcttgagctggaagctagaggaaacccttgcccagttccctttgcagcctgggaaggtggccacgttcacaatcaacatcaaagtgaagctggatttctcctgccaggagaatctcctgcaggatctcagtgatggtaagcgctttcctaattttaattagcacgtcagggtcctagatactgtgtagcaacccccatcccttgatgcctgctgtttgctgtttgtaactcacttgtcattcattaactcaagctgcctgagacatctcctgggcactttgttaacagagtgtgttactgtatgtgtctgaaagtaataaaagtactttttatctaaatgaaaaaa

SEQ ID NO: 9417 - DNA, 489 bp, Homo Sapiens
agcttcagcagaagcgggcccacacagaggagccacaggccaagaaggtcagagcccagtgaagatctgggagaccctgaactcagaaggctgtgtgtcttctgccccacgcacgcacccgtatctgccctccttgctggtagaagctgaagagcacggtcccccaggaggcagctcaggataggtggtatggagctgtgccgaggcttggggtcccacataagcactagtctatagatgcctcttaggactggtgcctggcacagctgcgggccaggaggctgccacacggaagcaagcagatgaactaatttcatttcaaggcagtttttaaagaagtcatggaaacagacggcggcacctttcctctaatccagcaaaatgattccctgcacaccagagacaagcagagtaacaggatcagtgggtctaagtgtccgagacttaacgaaaatagtatttcagctgcaataaagattgagtttgcaa

SEQ ID NO: 9418 - DNA, 705 bp, Homo Sapiens
  misc_feature (646)..(660): n is a, c, g, or t
ctggtacgggagtggaatgaactggatcacatcatggaaatcattctggggtcctaaaactgtgatagaggggatcgatccttcctcatgtcatcttcggtggcctggatccctgaatgcaactctgggtgtgtgtttttgtgggggctcgaagcagtgactatggcctcctttgttcccatttcagggttccacaaactgtcttgcatgtgtgtgtgtgtctggttaccccgaccttctgtgaaggtgggtcttcctgaattaatttatctattccaaatgccttaacgaggactctgtttctgggagtctaactttccacttacacatttcttccacctttcctgctagttcccactcccctgtgaccactggggcctcagggaagataaagaaagctgggcctgtcgaaggatgacagggatgtgctgccaggttgctatagaaacccaggctctgcctcttgcaccttgagggggtgggaggggctggtgtcctccctccaggctgaaccccacttcctcggcaggaccccagtctcagcagcctcctgatttcataaccaggccggaccacgtgcaatagggtggaaaccaaactgctccatgccgggttatttaaaagaaaggcagagtttgtggtggcnnnnnnnnnnnnnnnggattgtttgtaatttttttaaataaaagtattttggaaggaaaa

SEQ ID NO: 9419 - DNA, 1047 bp, Homo Sapiens
  misc_feature (563)..(683): n is a, c, g, or t
  misc_feature (693)..(706): n is a, c, g, or t
  misc_feature (811)..(862): n is a, c, g, or t
ctgttacacgctgcttgtagacatgttaatatagtaatacctttatgatatattgagtttaaggactactctttttctgttttatcatgtatgcattattttgtatatgtacagggcaagtaggtatataatttgataaagttgcaattgaaatattattaacagaagatgtaagaaatttctgcatggtctaaatctttgtgtactttatttgtaaattatttgccctggagttttagaaaatagtttctgaattttaaacttgctggattcatgcagccagctttgcaggttatcagagatcaaagattgtaataataattttgtaaattgtaagcaaaaagttatttttatattatatacagtctaattgttcatcctaattgttcctgttttcatctagtcagagattcagtaagtgccttggaacaatattgaattctcttagcttgtgtgtgtttctttaatatttgaactcaagtgggattagaagactatcaaaatacatgtatgtttcaggatatttgacctgtcattaaaaaaaacaaacagttttacagtgnnnnnnnnnnnnnnnnnnnnnnnnnnnnnnnnnnnnnnnnnnnnnnnnnnnnnnnnnnnnnnnnnnnnnnnnnnnnnnnnnnnnnnnnnnnnnnnnnnnnnnnnnnnnnnnnnnnnnnnnnccttgggggnnnnnnnnnnnnnnaaaaaattttttaaacctttttttgggggccgggccccaaaaggaaaagaaaaaggggcaaaattttttccaaggaaaaccgggacaagaaaaggggtgggattnnnnnnnnnnnnnnnnnnnnnnnnnnnnnnnnnnnnnnnnnnnnnnnnnnnngggggttctgggggctttttgggatctttccacgggggcccaagggagctcaattttaaattaccccccgcccgggaatttttgggggaacgggtggaatttattaaactttccgcccaatgggaacccctcccaaaggggttgtggaacctgaattccccgggggatccaccccttggcccctt

SEQ ID NO: 9420 - DNA, 246 bp, Homo Sapiens
acttttactttttacctcttgtgtatatgtagggaatttatagggaaatatgtactttatggaataaattttaagaactaaaatatattttattttaaataaagtaatggacctttaatcttacacagctaaattactgattatatatttgctgagctgatttaagggttaaaaaaattgtatcaagagttttattttttgacttcaaagccttcttaataaagcctcttttctacatgtgaaaaa

SEQ ID NO: 9421 - DNA, 758 bp, Homo Sapiens
aggcgcgaaaagctgccattggcgcttcccgagtcggggactgggggcgtgcgctcctccaggcagccgccactgccgcctacctccacgccaacatcgttgtctaacccgggatcagccaggggcacgtcgcgcagcaagctgggcaccatcaccgtctggtccatgttgttcacggcgccaatgaagcgattcatggcgttaaagagcgagtgcttctggttgtaggtgtcacagatttgcatcatggtggccgcgcggacgttggagcgcagggacgcaggggcacggggatggtcggccgggtcaaggggatgcccgccttcacgcgctctccaaaggcccgcgctgggggcctggctatagccggtgtggcgggattcccggcactcctccgccctcgccaactctcgtctcgctggcagaccggccctgcgggatgggcggcttctcctggctttggcgcccggaaactcgcgatggctgagggtgctctgtgggtcgagccctggcctcctcttgcgccttgagactctcctgctcgttggcaattcagtgttctcgctgcaagcggctgctacgcaagggcgctgctgcggtcagtggctggactgtgactgcggacggcggtgactgcgttggccccctacccatcccaggtgctcaatttatagtccaggaaaggtgtcgccggcgctcagggccacacctggtgtctcctcctcccgcctcccccggcagcaccgagataaaaggcc

SEQ ID NO: 9422 - DNA, 510 bp, Homo Sapiens
gagatgatgatgatggtcaaagggtgcaaaatctcacacaagactgaggcaggagaatagggtacagagatagggatctaaggatgacttggacacactccctggcactgaagagtctgaacactggcctgtgattggtccattccaggaccttcatttgcataaggtatcaaacccacatcagcctctggatttgccatgggccagacctgcactctggccaatgattggttcattccaggacattcatttgcataaggagtcaaaccacaccagtcttggattggctgtgagccaattcacctcagtctctaattggctgtgagtcagtctttcatttacatagggtgtaaccatcaagaaacctctacagggtacttaagccccagaagattttgctaccagggctcttgagccacttgctctagcccactcccaccctgtggaatgtactttcacttttgctgcttcactgccttgtgctccaataaatccactccttcaccaccc

SEQ ID NO: 9423 - DNA, 454 bp, Homo Sapiens
ggaagacagtcgaggatccccctgctccgcccctctctgctgtgacttctctctctccctgtcttcactttgttcatttctcttctgtgttctgtccccggggcaaggcccgactgtccgctgcgtcctgcccgaccctcctgtacctccggcctcccagcggccccctcgtcggcggtggcgtcgagcctgttgagactgttagccgccctctactcccaggctggagggacctctccagaccctgggctgcggctgaggcgcatccgttttcctgccctgagcatctgtctctgaaagtgtatggcgggtggtgggcaaggggcactgggaagggaggccagtgcctagagtgaagacagctgctgttttaatatatttttgtgactttcaaatcatttcccccactccttcagggtgagttgcaggactggttcacactatgcgcagctgg

SEQ ID NO: 9424 - DNA, 552 bp, Homo Sapiens
atgtatcctgtgtaacaaacctgcacgttctgcacatgtatcccagaactttaataaaaagaacccagtaggtgctcaataaatgttactaacatctatttcttcattcattcttcaaccattacccactgagtgcctatttggatacttggcttagtacctgggtgatgaaataatctacagcaaacccccatggcatgagtttataacaaacctgcacatgtatccccgaacttaaaagttaaaaaaacagaatctgcacaagtctaagctacttccttgaggaaaagactcgagctgagatctcaaagaagagtagaagttgcaggggtaaagaggccaaagaagagtgtctcagatgagagcggcacgtgcaaaggccctgtggtgggaggagcctggtagctctgagaaactccacaaaggcacggtggtggctggaatgcagagatgtgggggcacattgaaaaccttgttaaagtgcttaaaatgattatcataaaggtagaaactaataagtgctaaataaatgttattctcgtccgtttcaaa

SEQ ID NO: 9425 - DNA, 766 bp, Homo Sapiens
ggcccctcttgtatatacataatagcagctttctattaaagaactacatgaactgaaaagaaatgtttatggaaaggggccagatacccaggcagcaaggcaatgaggatactaaacaagagttaagtgctttcaacctctctgctctacagatcaggttaaaaactctaaacccttcaactttaggtcaaagaacagggcaaatacaaattaatgccatgcttcaaatgcagcaaccagatggagctgcaagaaattaaacactcctatagactatcacttggaaagcacagcctcttgaacctccttcattacagatacacccactgatcaaagatgttacacaattcaaactcaacaaacagaaaagagtagtggaggtgccaccaacacaaccctcttatcatagaaagagacatgtaaacacacaagagggtgatggagctgcacccagcactggatgttcactgagcacaataagcctgaaggagactacacagcagagacccaggaaataggtctttctccatatctacccctatcaaaattctgaatttgtaaacactgaggtcagcctgtccatttttagtcctgggttagtggagaaggaagttccaaggtttttgactcccctgaaattgctaaatagggcttcacaaagaggcacacacggcgctcatgagatgattttgaaataatgttaaagaaattcaaagatgagacaaattttacagatgttagaagtcattcccccttttcgagcctt

SEQ ID NO: 9426 - DNA, 624 bp, Homo Sapiens
  misc_feature (208)..(208): n is a, c, g, or t
  misc_feature (365)..(365): n is a, c, g, or t
  misc_feature (505)..(505): n is a, c, g, or t
  misc_feature (522)..(522): n is a, c, g, or t
  misc_feature (531)..(531): n is a, c, g, or t
  misc_feature (563)..(563): n is a, c, g, or t
  misc_feature (571)..(571): n is a, c, g, or t
  misc_feature (573)..(574): n is a, c, g, or t
tgaaacagcgcctggagtgtgagaaacagcaaattcagaatgacctgaatcagtggaagactcaatattcccgcaagaggaggctattaggaagatagaatcggaaagagaaaagagtgagagagagaagaacagtcttaggagtgagatcgaaagactccaagcagagatcaagagaattgaagagaggtgcaggcgtaactggganggattctaccagggagacacagtcacagttagaaacagaacgctcccgatatcagagggagattgataaactcagacagcgcccatatgggtcccatccgagagacccagactgagtgtgagtggaccgttgacacctccaagcttggtgtttgatngggctgaggaagaaaggtgacagcaatgcagctctatgaagtgtcagctgatcgacaaaacaaccttggacaaactattgaaggggaagaagtcagtggaagaagttgcttctgaaatccagccattccttccggggtgncaggatctatcgctggngcatctgcntctcctaagggaaaaatactcttttggtaganggccaggngnnagaattaatcagccagaatccacagtccatgcttctggaggcccaggcag

SEQ ID NO: 9427 - DNA, 985 bp, Homo Sapiens
  misc_feature (20)..(20): n is a, c, g, or t
  misc_feature (32)..(32): n is a, c, g, or t
  misc_feature (53)..(53): n is a, c, g, or t
  misc_feature (73)..(73): n is a, c, g, or t
  misc_feature (170)..(170): n is a, c, g, or t
atctggaatcaattggagcntatgacttattnatccaggacatttatttgcanatctgggtgtaaacagctgnatgctgggcagagcccacagggtaaacaccccacgagaggatgccttggagggtctcgtcacagaccagggggcctccagagtcactctggcaaggntcctggcccccggtcccagtccagcaacatatcaatgttgttggtgaccacgccagggtagaagacctcacactctttaagggctcaggatagtgatgctggagcaggtcaggcccttgttgtacttcactctccggacggccgtggtgccccaaccagcaacctggcactggtctccgggctgagcacagcggtagggaagctgcaaggcccggacgcgggccaccaggcactacgggcctggccagctttagcaacatgagatcgtgctcatccgttcgccttggcaggatgggtcctgagccctggtggtacttgggatggacatacagagcgagtggtccggcggagctgctcgccctgaagaagcagcaggtggtcatcccctactcgagcccacagtggcttgtttccgcagtgcgcggccgtcagcacccaactctggtccaccaggacacccgcgcagtggaacgagaggccgttgaagagcgagacctgccagggctgcgagccgcgcgcgcacggggcgccataggcttcggggtccaagcgcgtgtcgttttgggggagcagcgccgcctctgcggcccagagttgcgcacatcagcagcggcagcagcttcgcacagagcccagggcgccagaggcaggcggagaggtggaggtgcggagctctcatggccaggatctgggagtcgccagataggaaggagggaggggacccagacgtgcctctgacctgcctgtggtctgccactgcctcgtgcgaattcgccacccaggcctcgctaccataaggccgtatagttacttgc

SEQ ID NO: 9428 - DNA, 567 bp, Homo Sapiens
tggttaaggaaaaatgggtacaaactgaacattttcatctggggtgcatattcctccaataatttccaaatatttctggggaaaaaaaagaaatggcaactttggacaagaacaaagtttaaaagtcagttggaatttcttttaattaaaagaccaaggggacaagaagctcctttgttacagtacattacatatggctcttatgtagaataaaatagacatcagagtcaaatgtttctaccagcaccaaactcttacttgtagcaggtgaacagtgaagcaagatttcttttactggctttgagattgtaatacatcttttacatgcagtgtgttctttggtagacttaatcgttgagtgaaattacagaatttgcaaaggaaaaaaatgtaaaatttgagcacagtacttctcactataagctatttatacagaattcagaaaaaatgtcaatcctagtaagatttttaaatacttcttaaaaacttgctaattagcttctgtgtgttcagacacacaagacaagtgaaatacactgtagtaaataatagttttgagatatcttt

SEQ ID NO: 9429 - DNA, 720 bp, Homo Sapiens
  misc_feature (300)..(300): n is a, c, g, or t
  misc_feature (536)..(656): n is a, c, g, or t
tgtaaaggagtttgcaggaagcagacacctccttttgggatggccagaaataatgactgaaatttgactttgcatagtctgatagacaagagcatttccgatgaatataatgatagcttgttgaaatgaatttctcctatgatccattttgacctttcttatttccttgttgttaatagcatttactttgtttctcgaagctgaaaaccttaagggccttcgactcctccctttcctttgtccatcatgtctaattgatggactcagagctgcatgctttcaacaaacattctctcaccntgaatcttcaacgtgaaccctgcaagattggtatttaaatgttctcacttaaacggatagaaaaactgaggctaagaacagttaagtcacttcttcagtgtccctagctactggttgttggaactgggtatctaaaaagagagaccagagatctttctggatggactctaaaatttcatgctgaaatggagaagagctgaagagcacagaggagagagaatagagaataaagaggnnnnnnnnnnnnnnnnnnnnnnnnnnnnnnnnnnnnnnnnnnnnnnnnnnnnnnnnnnnnnnnnnnnnnnnnnnnnnnnnnnnnnnnnnnnnnnnnnnnnnnnnnnnnnnnnnnnnnnnnnagttttagaaaattagctgggcgtggtggcactggggaggctgaggtgggaggatcgcctgagc

SEQ ID NO: 9430 - DNA, 402 bp, Homo Sapiens
tttctagtcatttgtgaccgagttgtagctgtagggtacatcaatgaagctattgatgaagggaatcctttgaggactttagaaactttgctcctacctactgcgaatattagtgatgtggacccagcccatgcccagcactaccaggatgttttataccatgctaaatcacagaaactcggagactctgagagtgtttccaaagtgctttggctggatgagatacagcaagccgtcgatgaggccaacgtggacgaggacagagcaaaacaatgggttactctggtggttgatgttaatcagtgtttggaaggaaaaaaatcaagtgatattttgtctgtattgaagtcttccacttctaatgcaatacatatcccggagtgtgctgacaaatgataaaca

SEQ ID NO: 9431 - DNA, 976 bp, Homo Sapiens
  misc_feature (21)..(21): n is a, c, g, or t
  misc_feature (44)..(44): n is a, c, g, or t
  misc_feature (50)..(50): n is a, c, g, or t
  misc_feature (91)..(91): n is a, c, g, or t
  misc_feature (109)..(109): n is a, c, g, or t
  misc_feature (404)..(412): n is a, c, g, or t
  misc_feature (440)..(528): n is a, c, g, or t
ggccttcggccgggggcatgncaacttccttttcacttgacaanattgcnacttcggggagccgcgggctcgctgtgcccccaaggcttcnaaggactttccagaggantgtacaggggatgccccaggagagggggctgaaccctttgtgaggttggcacggacttgactccgatggccgctgcccttcctcttcctgatgagtcacaggctgcggtgggcgctgcggtcctggtggggccgtgcggtgagggccgcgcgctgggagccgcatgccctgggcccaggcctgaccctggtaccgaagctgtggacgttctcgccacactcaaccccatgagcttccagccaaggatgccctggccgattggaaatgctgtaaaatgcaaactaagttattatannnnnnnnnggtaaaaaagaaatgtccataggaaacnnnnnnnnnnnnnnnnnnnnnnnnnnnnnnnnnnnnnnnnnnnnnnnnnnnnnnnnnnnnnnnnnnnnnnnnnnnnnnnnnnnnnnnnngaaacaacgaacacataaagacgcaacgaaaaaccacacagagagaacagaagcggaggcgagagggcgacgccacatgacagcacacgcggaccgacggagagcacaacggagagcacaggacacagcgagagcggcagacagaagaagcatagcgacagccaggtaggacggcgagggcaccaacagaggggggcagggaggcgcgcaagcaagacaaagaacagagacgccacggaggagagaggcacacaccccagagacaaaggaggcagaaagggacgggacagggagagcagaccaaccacgcgggtggaggaaagggagagagaagaagaggaccgaggaaacagaggaggaagaaagaagacggcacaaaaagcgccgagcggcagagaggggaaagcaaatagcacaagccagaggaaagccaccagccaaagcgcac

SEQ ID NO: 9432 - DNA, 315 bp, Homo Sapiens
gttacactgcttggatgacagtttcactggaagtctgcctatatcccgtgccgcacctggtgggccctcttctccacaaagcctatggtgtgtgcgagtctggcactgttcccgctgtctgtgccagcatctgctgtcaggtggctcaggtcttcaacggggcctcttccacctcctggtgcagaaatccaaaaagtcttccacattcaagttctataggagacacaagatgccagcacctgctcagaggaagctgctgcctcgtcgtcacctgtctgagaagagccatcacatttccatccgaagcagtagacg

SEQ ID NO: 9433 - DNA, 799 bp, Homo Sapiens
  misc_feature (607)..(630): n is a, c, g, or t
  misc_feature (741)..(741): n is a, c, g, or t
  misc_feature (775)..(775): n is a, c, g, or t
aaccttctgcctttgatgttacagatttaatacagtttatttttaaagatagatccttttataggtgagaaaaaaacaatctggaagaaaaaaaccacacaaagacattgattcagcctgtttggcgtttcccagagtcatctgattggacaggcatgggtgcaaggaaaattagggtactcaacctaagttcggttccgatgaattcttatcccctgccccttcctttaaaaaacttagtgacaaaatagacaatttgcacatcttggctatgtaattcttgtaatttttatttaggaagtgttgaagggaggtggcaagagtgtggaggctgacgtgtgagggaggacaggcgggaggaggtgtgaggaggaggctcccgaggggaaggggcggtgcccacaccggggacaggccgcagctccattttcttattgcgctgctaccgttgacttccaggcacggtttggaaatattcacatcgcttctgtgtatctctttcacattgtttgctgctatgtggaggatcagtgttttgtgttacaatgtcatatactgccatgtactagttttagttttctcttagaacattgtattacagatgccnnnnnnnnnnnnnnnnnnnnnnnnatgtgatcaattttgacttaatgtgattactgctctattccaaaaaggttgctgtttcacaatacctcatgcttcacttagccatggtggacccagcgggcaagggttctncctgctttgggcgggcagacacgcgggcggaatnccacacaggctggccgggggccgg

SEQ ID NO: 9434 - DNA, 314 bp, Homo Sapiens
aatgtcatataagcgggagagattgtccaaggcacatgttggctagcaggagagctgtgacttgaactcaagtcatctaaaattcagcgtacctttcaaatgcctaggattttctcaggaatccttcctaaagaagtggattttcagtcacagaaatctatctcttgaagctccaaagccttttatttcggttttggatagacatttattggtttcttttcgaatagagatcttgctgaaatgtatcatatacatccctattttgtcttaaagcatacctgaaagataatttagtcaatgactcagagtcataa

SEQ ID NO: 9435 - DNA, 355 bp, Homo Sapiens
ctcttgtatatacatgctttgctaacaccacctgaactggattgacaaattttccttcaatcttcatgatgctagaagttcccaggtcatctgggctaagagaaaaagtcaattcagatactctctctatagggatcttctccagtttaaactgaatggtggtgttgttcaggatgtgaaaagcttgacctctatgcaaagattcaaagaaatcatgtcgtgtgaaatgagcttcctcctgactgttggcactgccagacccggaaggtgggcaaaacatccggcttccttcagacccaacagcttctctacctgccaactggatgtatatacaagaggggccgagctcgatttt

SEQ ID NO: 9436 - DNA, 278 bp, Homo Sapiens
tcgctacctattattgtttgactaaagaaagcagccctggcttaaataaagacacaattaaggctccaaatgaggaactggccctgcagaaaatgccaggccacaaccacggttcttggtaactttgctctgcacattatccactaaagaaatcaaatcaccttttccatctcctgacacggtgttacagggagccacagagcaacagggggaggctcgcgctcatgccctgcgggggaacgagtggagcacccacacttccggtcaaacaataaata

SEQ ID NO: 9437 - DNA, 420 bp, Homo Sapiens
gatcgagctcggccctattatagtttgaccatgtaaagtaaaacagttctggtacacaataatagtgccacattttcatcatagaaatggaactgccgggtcaaggatatgtatgtttatatggacatatgtgaattttcttcctggcatcccttcctttgggaaccatgccttcttttctctacggttccagggaaagtttcagtcctagttaccctaccctctactttaagctggaccagttagagcttgggtgttttcttttggaacaaaccggcacgcctatcttttcccactaggatgactaaggtaagatactgtgattaagttgaggctgccagtgtgtgttttccttactgtgtttagagagtctctgagtattgaacacaagctgaggcaaggatagtcaaacaataaata

SEQ ID NO: 9438 - DNA, 576 bp, Homo Sapiens
gctcggtacctattattagttgaccctaacacctctccaaaccagacatcatctccttttcacagatgcaggaataggttcagaagaaacagattaaaagtggccaaatagggatgttaacacaagcctggctgactccaaaacccacgcacgttctccactccatcaagcttcctgggcttacctcaacaaggaagcatcttctgaacaaaccagggattctctatcttaacttgaagtggacacattataaagcttcaattctatcacaccaaaaaaacaccttaaactccaccaagacccagcaagaagagcctcatggcaggctaggactgagttcttcccagaagacaggtctaaaacacaagcttttccaccttaacaatggatgtctcctgaccccttcctccagaaatcaaatggccaatctgatgcccacttcagcttctgtcatccctctgtagtcagacaaggagggctcgctcagcttgcatttccttcctgaagagtattcactacctctcttgttcaaacactatgtatcactcaatattctattccttctgcgtcaaacaa

SEQ ID NO: 9439 - DNA, 1107 bp, Homo Sapiens
caccccagcacacctcacacgggaccacagccgcgctgccgagggccaagcacaaaggttccagtgagcgcatgtcccagcccctggtggccaggctccccttgctgagccgctgccacttcaccctgtgggaagtggccccagccatctcctctagaccaaggcaggcagccccgacatctgcttcctctatcgcccaatgcaaaatcgatgaaatggggagttctctgggccaggccacattcacattcccctccccctgtggtccagtgaagcctccggaccccaggctctgctctgccctgccctgcacccccctcgtcagaagtacatgaggggcgcagagatgagcacacagctttgggcacggtccagggcaaactgaaatgtacgcctgaattttgtaaacagaagtattaaatgtctctttcgtgcgcccggccgtgccggccgacatacaggccctggtcgcccgcctgccggcccgcgagaacccttttccaagagcattggcgggttggcccggcgggcccccagaagggcaacggaaccctcggccgtagccggtctttccaacgagaagccgggcacacgtgacatagcggtctggcattcccccgcccactccaacagaaacgccccggggggcaatgccgagccgcgtctccgcaacaaattcccgcaatggccgctttcttgaagtgcacttccggggaatccctccacacccgcgcgagtcccagcagaggcccccggagtttcccaaatttacccccccctgcccctggcacgacttcttgcatgagggcgcgcgtggtggcgaactgctcccgagcagccgtcctcgtgcgctgggagcgtgggaaaccccgttgctcccagcagcgccctcggtcgtggcccgtcgggcagtccccgcgagcggtggaaagctaactgacccctttggcgtcgcacattggagggacagggaagagtagcgacgcacaagcgcgacggaccgaagctctccggccacgagaagaagcgggcgcggagctgtactcagcggaccgcccggtcgagacttgtcgcaaccccgccggggccccacacgcgaccacgcgg

SEQ ID NO: 9440 - DNA, 673 bp, Homo Sapiens
  misc_feature (280)..(288): n is a, c, g, or t
aagtcctttatgtaacatccagataatgtgatactgtctctttgaagcaccctgtaaaccttttagagatttgaagttgggtcttgactcttaatgcatgtggacagtcgcgagcgtttatgctgtcggtgtgtctgtgttggacaaaacaatctgtaatctacagcaaagtacattctacattccgttcatggggcacacccaggggaataagaataaaatgctattatgactaagttgtaaacctatgcacatcccttgcattttgggcaactttatnnnnnnnnngaaactgatttttattaataataatcatgtagtgaaatgtgtttgtaattttgtctcaatttaatttgttgtaaggtggggtggggggaattgctggtttcaccatttcagatctgtgttgtctaagagtattaacgttttaattaagcaaagaaatgatttttaatctgtatgtaattgttttaaagcacccattttaagagaaaatactgtgcaatgaagaaaccagtttaggcatttgctataaactgaaatattccaaaagaatcatctataacagccctgtaaattcctttaaaatgataactaacaggacagtttgaccaattttttttaaatatacttccttttatgtgttcaataattaaatgcctttgggtccttc

SEQ ID NO: 9441 - DNA, 502 bp, Homo Sapiens
cagctgggcccaggatggccgctgtgtagaagatggcaatgtagacgggcgagcagctggacttgacgttctcatccaggtaggtgacgcccagcgtgtagaggggtgtggcacccacgccatgcaggaactggcccagcatgaagaccagctggtagcgggacaggcccgaggtgctgtccgcacacaccgcgccggggttggcagggcacgtcctgacacccgcgtccaactccacctcatagcggccagccgtgaagtggggcagcgcgaacaccagcgaccccgtgcccataagcagcacgccccagcccagccagcgcggcttgtgccctgagcccccgaagtagctgacgaaggtgaggcagaggcaggcggcaatgtcgtaggagctggcgatgagcccgctctggtagctgtgcaggtcatagcggcgctccagggaggtgatgactgtgttgatgaagccattcacagtcatcccctgcaggaatgcggccgc

SEQ ID NO: 9442 - DNA, 851 bp, Homo Sapiens
ctggctgaaggtttctgagagaccaaagaccagtgttaatttaatttcttccttatggccaaccttgccatctggcattgaagctgcttatgaaattgaagccagaaatcaagtttttctttttaaagatgacaaatactggttaattagcaatttaagaccagagccaaattatcccaagagcatacattcttttggttttcctaactttgtgaaaaaaattgatgcagctgtttttaacccacgtttttatagaacctacttctttgtagataaccagtattggaggtatgatgaaaggagacagatgatggaccctggttatcccaaactgattaccaagaacttccaaggaatcgggcctaaaattgatgcagtcttctactctaaaaacaaatactactatttcttccaaggatctaaccaatttgaatatgacttcctactccaacgtatcaccaaaacactgaaaagcaatagctggtttggttgttagaaatggtgtaattaatggtttttgttagttcacttcagcttaataagtatttattgcatatttgctatgtcctcagtgtaccactacttagagatatgtatcataaaaataaaatctgtaaaccataggtaatgattatataaaatacataatatttttcaattttgaaaactctaattgtccattcttgcttgactctactattaagtttgaaaatagttaccttcaaaggccaagagaattctatttgaagcatgctctgtaagttgcttcctaacatccttggactgagaaattatacttacttctggcataactaaaattaagtatatatattttggctcaaataaaattg

SEQ ID NO: 9443 - DNA, 1284 bp, Homo Sapiens
  misc_feature (581)..(608): n is a, c, g, or t
  misc_feature (1080)..(1137): n is a, c, g, or t
  misc_feature (1167)..(1176): n is a, c, g, or t
aacggcatctaccccatactcctgccataaactccagataaagtaaaccatgcagtactggctgttgggtatgaagaaaaaaatgggatcccttactggatcgtgaaaaactcttggggtccccagtggggaatgaacgggtacttcctcatcgagcgcggaaagaacatgtgtggcctggctgcctgcgcctcctaccccatccctctggtgtgagccgtggcagccgcagcgcagactggcggagaaggagaggaacgggcagcctgggcctgggtggaaatcctgccctggaggaagttgtggggagatccactgggacccccaacattctgccctcacctctgtgcccagcctggaaacctacagacaaggaggagttccaccatgagctcacccgtgtctatgacgcaaagatcaccagccatgtgccttagtgtccttcttaacagactcaaaccacatggaccacgaatattctttctgtccagaagggctactttccacatatagagctccagggactgtcttttctgtattcgctgttcaataaacattgagtgagcacctccccagatggnnnnnnnnnnnnnnnnnnnnnnnnnnnngggggggccctctcaaaagtttctcccccggggggcccaggtttccggcgtaccccagcctttcgtgtcaccaagggggcccccatatagggagctcgccactcatctacagcctacggccacgggcccgacgcgattaacaacgcgccgggacacggggaaaacacggcacacccgggggaactctgggcaagggacccttaccccgcgagcggggcgggcaccacaagatgggggacacaacccacaccccaagacagaagaactctcacacgcgccccctaaggggcacaactactaacacctcccacacccgcggccacaacagggcgctcaaacccctcagccgcgcccaaacgcgcctggcccgccccccgacacacgtccggcgcccccacccggactctctgacatcgccacggcaacgacgctcttgtactcaccccggggacccaccggccgcacaaaacgnnnnnnnnnnnnnnnnnnnnnnnnnnnnnnnnnnnnnnnnnnnnnnnnnnnnnnnnnngagcaccccaccgtggcgcggcagacgcannnnnnnnnnacagctgccacaaacacacgcccgcgaagacacagaccaccacccgcccccgccaacgaccccaacgccacaggcacccgctgccgccaacggccacacgacggccga

SEQ ID NO: 9444 - DNA, 629 bp, Homo Sapiens
  misc_feature (263)..(440): n is a, c, g, or t
gggagcggcggagctggctgctggcctcagttctgcctctgtccaggtccttgtgacccgcccgcgtctcctaagggagcgtgtcctggccccctcccgcagcggctcggaaaaaaggcagcaccgcgtcgttgacggcgcgggctctggactcgctgcttggtaaaaaccttcctcttcctccagtgcgggacgcactctctggtatctcttttgacctcccggaggctttcctttgtcggtcgcggcgccactgtactatnnnnnnnnnnnnnnnnnnnnnnnnnnnnnnnnnnnnnnnnnnnnnnnnnnnnnnnnnnnnnnnnnnnnnnnnnnnnnnnnnnnnnnnnnnnnnnnnnnnnnnnnnnnnnnnnnnnnnnnnnnnnnnnnnnnnnnnnnnnnnnnnnnnnnnnnnnnnnnnnnnnnnnnnnnnnnnnnnntctgcgaaaagagaaggcaagaacaaaatctactaccttgtcggcccgcctcggccctcaaaaaactttcaaaaccatttcgtttgggcgcgcggggcccagtaagggaaaggaaattgggtcaatagctggtttccctaagggaaatccctggaccatgacctagcggcttggaattctcccccaaat

SEQ ID NO: 9445 - DNA, 476 bp, Homo Sapiens
tcttcttgctgccgtcccagacaacagaagttaccagatgaacagacttggatgggccacgggggtggagagctggaaagcttagctgtgcctctcgatgatgattaagatttcaatatttacagcaaaaccacaaagcaaatgatagaataaagcaaaacaatggaaaatctgagttcactcgtgagagaggtacgtatgtgagctctgaggaaattacagagggaacgcatgcagcgggacagctctcccaatcgcagcgtgcaaagtagacatccatagtgtcttttgaaaaatgaaaaacacattactttgaacagccaagaaaaaaattgcaatttattaagattcaataaagcgttgtactttcgaaagcaactttcgatgcatgttcttcaacagtcacattctatgaggaaaacattaagagccacgaacttgttgtttaatctcagagttacagacatattaagttc

SEQ ID NO: 9446 - DNA, 570 bp, Homo Sapiens
tttagttccattctagaatgtggggagtgggcacaagaaaaactagtatagctgaaatgcatctgttaaaaatgtcatgattgaaagcagaactgagtttcaaattacaaccttaaaattgttgttgatatttcttcacatatcagctgcccattttgaaaaagaaattatccataaaggtaatgttggtgctccaatttgccagccattcccaacccccttctcccttacctgccttcactaaagaacccagaaaagctaattgctcccctttcagcctctgttgcaactaacaactctcagtggcctcaggacacagctttggccttgggaattctgggaaaacttttacttcctgattaaagatacatatgcagctaggccacctcctcccccccttactgccataaacaccaaagtgatgactggagctggaggagttatttgaaccacgacggaagggccaagagaaccacgaagatgccagttgccacattgttgagctgctgacccaacaccagccattgcctgtctctaaacatcttatgaaataaaaccagttttgtttaa

SEQ ID NO: 9447 - DNA, 647 bp, Homo Sapiens
  misc_feature (174)..(174): n is a, c, g, or t
ccggagctgccggagtggctgcgggacctgcctcgcgaggtgtgcctctgcaccagtactgtgcccggcctggcctacggcatctgcgcggcgcagaggatccagcaaggcacctggattggacctttccaaggcgtgcttctgcccccagagaaggtgcaggcaggcgccgtngaggaacacgcagcatctctgggagtaaatgtcccttcaacggtaatggaagccatgtgcagacaagacgccctgcagcccttcaacaaaagcagcaaactcgcccctaccacccagcagcgctccgttgttttcccccagactccgtgcagcaggaacttctctcttctggataagtctgggcccattgaatcaggatttaatcaaatcaacgtgaaaaaccagcgagtcctggcaagcccaacttccacaagccagctccactcggagttcagtgactggcatctttggaaatgtgggcagtgctttaagactttcacccagcggatcctcttacagatgcacgtgtgacgcagaacaccgacagaccctaccaatgcggccactgctcccagtccttttcacagccatcagaactgagggaacacgtggtcactcactctagtgaccgggctttaaagtgcggctactgt

SEQ ID NO: 9448 - DNA, 590 bp, Homo Sapiens
caagcggtgctgcctaccgtgctgaacaaattccgcatttatctaactcttttgagattcttggaatatagcatatctgatgaaataaccaaggcagttgaagatgactttgtggaaatgcggaagaacgaccctcagagcatcactgctgatgatcttcaccagctgctcgtggtggctcggtgtctgtctctcagtgctggtcagacaacgctgtcaagagaacgatggctgagagcaaagcagctagagtctttaagaagaacgaggcttcagcagcaaaaatgtgtgaatggaaatgaactttaaagatgtaatacctatgaagagtaatgggcaaactgtagccccataattgtaaaattcagatattcatttataccacattgttttataggtaatttctatcacaaaccagtgacatttcctgaaatcaagcctggtaacacctgatgtttatatgatattcagtaaggacttttaccttactgatttcatggagcttttgaagtttgttttataataattatataaattagtaatgatgtaaaaaaagtatttgatattaaaagtttaatattgataatgtt

SEQ ID NO: 9449 - DNA, 1084 bp, Homo Sapiens
  misc_feature (825)..(844): n is a, c, g, or t
ggggcagttaagggggcaggagtggcgctgctcacctctggtgccaaagggcggcgcagcggctgccgagctcggccctggaggcggcgagaacatggtgcgcaggttcttggtgaccctccggattcggcgcgcgtgcggcccgccgcgagtgagggttttcgtggttcacatcccgcggctcacgggggagtgggcagcgccaggggcgcccgccgctgtggccctcgtgctgatgctactgaggagccagcgtctagggcagcagccgcttcctagaagaccaggtcatgatgatgggcagcgcccgagtggcggagctgctgctgctccacggcgcggagcccaactgcgccgaccccgccactctcacccgacccgtgcacgacgctgcccgggagggcttcctggacacgctggtggtgctgcaccgggccggggcgcggctggacgtgcgcgatgcctggggccgtctgcccgtggacctggctgaggagctgggccatcgcgatgtcgcacggtacctgcgcgcggctgcggggggcaccagaggcagtaaccatgcccgcatagatgccgcggaaggtccctcagacatccccgattgaaagaaccagagaggctctgagaaacctccggaaacttagatcatcagtcaccgaaggtcctacagggccacaactgcccccgccacaacccaccccgctttcgtagttttcatttagaaaatagagcttttaaaaatgtcctgccttttaacgtagatatatgccttcccccactaccgtaaatgtccatttatatcattttttatatattcttatnnnnnnnnnnnnnnnnnnnncaccgcttctgccttttcactgtgttggagttttctggagtgagcactcacgccctaagcgcacattcatgtgggcatttcttgcgagcctcgcagcctccggaagctgtcgacttcatgacaagcattttgtgaactagggaagctcaggggggttactggcttctcttgagtcacactgctagcaaatggcagaaccaaagctcaaataaaaataaaataattttcattcattcactc

SEQ ID NO: 9450 - DNA, 554 bp, Homo Sapiens
gcagatgaggatgattacagggactttgtcaacctggatcatgcccacagccttctgagggactatcagcagagagaaggcattgccatggatcagttgctttcccaaagccttcctaatgatggtgatgaaaaatatgagaagaccataattaaaagtggagatcagacgttttacaaattcatgaagcgaattgctgcttgtcaggagcagattttgaggtattcctggagtggagagccactctttttgacctgccctacatcagaagtcaccgagctcccagcctgcagccagtgtggaggccaaaggatatttgagtttcagcttatgccagcactggtcagcatgctcaagagtgctaatttaggtctttctgtggaatttggaacaattctagtttacacatgtgagaagagttgctggcccccaaatcatcagactcccatggaagaattttgtattatacaagaagacccagatgaattattgtttaagtagagcatttccttttattaatataaattaaaacaaatgtttacatccaaaaaaaa

SEQ ID NO: 9451 - DNA, 113 bp, Homo Sapiens
aggggttttactgcatactcacaaatgttgtctataatttgaaaaatattgtcatatctggccctttgatgagaaaaggaaattacaataataaagttttatgattttaaata

SEQ ID NO: 9452 - DNA, 1008 bp, Homo Sapiens
tggtttaagaggcataaagaacataatttattttatacttaatgttcacactacctaaatgaataaggaaagggccctacaaggaagagttatgtattttttggtaattgtttctgagtttagagattcaggggaagagtaatcctctatttgtgggctcttcttagcatccctaacccccaaggagatagtacatggttttgacttggttatttcactcctgcattctttttcccccaaattttaagttgggtcacattgtgctggctgcaaaaagaaatacagggtgcaactggttataatcattttgaagaataatttgctgtgcaatagagctttggatctgatacaagaatttagaaatataaaacaaaataactataaaagttaggaggcatttgaatggcatttccttagaaaaacctgctaactctgtatcattctgatgtggattcctagtcatgtggggtgaaatgcatatttttccccctttgctggatcactggcctttcttcaaaagctataatgccatgaacacacatcctaggagtctctataatgttaacagaagctccaaataccaagccaatcaaagatgggagagggcaggggaaccataaaggcgaagggtccaaaggtggctgttactgagaacttgccctttccaaaatgtgaaagtcatagtgcttcttgcttgttctcagcttaaacttgttaactgagttaatttgtttcttcagtgcattctgtgcagctgaaatggaggggaatgtggctaagacggtgtaggtggaggccaagtcactaggtttagagcgttcagggttggcagtgttgtccccactgccacagcagagggggtgaccgacgtggttgggactgggggtcccggagccaccggatcttggcgccaattttaaagagttccccaaaaagcttttcagcttccatgcgagttattccatctggtagttcagtaatttccaagaccttcccaacaactgtttc

SEQ ID NO: 9453 - DNA, 873 bp, Homo Sapiens
  misc_feature (35)..(35): n is a, c, g, or t
  misc_feature (51)..(51): n is a, c, g, or t
ctggaagtcctcattgagaatgagtatgttcatgnaaatgtgacagctganaatatctttgtggatcagaggaccagagtcaggtgactttggcaggctatggcttcgccttccgctattgcccaagtggcaaacacgtggcctacgtggaaggcagcaggagccctcacgagggggaccttgagttcattagcatggacctgcacaagggatgcgggccctcccgccgcagcgacctccagagcctgggctactgcatgctgaagtggctctacgggttactgccatggacaaattgccttcccaacactgaggacatcatgaagcaaaaacagaagtttgttgataagccggggcccttcgtgggaccctgcgatcactggatcaggccctcagagaccctgcagaagtacctgaaggtggtgatggccctcacgtatgaggagaagccgccctacgccatgctgaggaacaacctagaagctttgctgcaggatctgcgtgtgtctccatatgaccccattggcctcccgatggtgccctaggtggaatccagaactttccatttgcagtgtgcacacagaaaaaaaacaatgaagcaatgtgactcaaggcctgctgcttaatcacagataagcttctagaacaagccctggaatgtgcattcctgccactggtttcaggatactcatcagtcctgattagcctcccggagggccccagtttccctcccgtgaatgtgaagttccccatcttggtggcctgcccttcagccagtgtcctaacaaagctggatggggttgggccggcccacaggggggacccctcctacccttgactcctctgtgctttggtaataaattgttttccccg

SEQ ID NO: 9454 - DNA, 626 bp, Homo Sapiens
  misc_feature (15)..(15): n is a, c, g, or t
  misc_feature (26)..(26): n is a, c, g, or t
  misc_feature (38)..(38): n is a, c, g, or t
  misc_feature (124)..(124): n is a, c, g, or t
  misc_feature (162)..(162): n is a, c, g, or t
  misc_feature (220)..(220): n is a, c, g, or t
  misc_feature (285)..(313): n is a, c, g, or t
  misc_feature (322)..(322): n is a, c, g, or t
tccagccgcctgcanccccccttcancccccacccctnattgctgtccagtacccccaagcccccagggacgtcagaaccacggagctgctcctccatctcgacggcgctgcctaatttagtancgaggaccttgtgtctcttccacaccagttgccagagncagtgagcccccccagagcccctctgagaagaggaaaaagacctttgtgggagagccncagaggctgggctcagagacgcgcctcccacagcacatcagggaggccactgcggctccccacgnnnnnnnnnnnnnnnnnnnnnnnnnnnnncgcccggangaccacagctgccagcgccctgcaggaggggcagacacagagacagcctgggagccccatgtacaggagggagggccaggcacagctgcccgctgtcaggcggcaggaagatggcacacagccacaggtgaatggccagcaggtgggatgcgttacggacggccaccacgcgagcagcaggaagcggaggaggaaaggagcagaaggtcttggtgaagaaggcggcctgcaccaggacccacttcggcacagctgccctcccatgggtgatggtgatccagagcccatggaagagtctccaagg

SEQ ID NO: 9455 - DNA, 976 bp, Homo Sapiens
  misc_feature (138)..(138): n is a, c, g, or t
  misc_feature (213)..(213): n is a, c, g, or t
  misc_feature (415)..(502): n is a, c, g, or t
  misc_feature (511)..(523): n is a, c, g, or t
  misc_feature (637)..(645): n is a, c, g, or t
atttatggaatggaaaaactgaagtgtcccattcagaacactttggaaaaggttgtctgcattaggggatgtttctggaagcatcccttagagaagctgcctgaggaatctccttgccaggttgtaccagattttttnttttcttaaatgtattgtatatattttccttaaaatgtcttcattggctgaatgattcctatccgtagtaatatnttaggtacttgttggatttttaaaggaagattatttattttcagatttgctgctataattgaaaacctagtaactggtcctgttgattgtgccttcatcactgtttctctgtgccacgaccgttcatgtgtatttgaaataaagaagtttaaaaagccatgttgaattcaagattccttctaataaaaataggtgaaacttnnnnnnnnnnnnnnnnnnnnnnnnnnnnnnnnnnnnnnnnnnnnnnnnnnnnnnnnnnnnnnnnnnnnnnnnnnnnnnnnnnnnnnnnctttgccgnnnnnnnnnnnnntcaaaaatttttcaaaaccatccttgggggcggcggccccagaaagaaagggaacttggccatagttgttcccaagaaaaccccggcgctagataagggctgggcttcccaccnnnnnnnnncgccggggggaaccggagctcttgaaaaaaccccatagggtgttccgaggggccgtccggggcatctaccaacgggaagccaggcggcgccgcaattactatttacccccgcccctgggacattaagccaaagagtggggttgacactctctccaaaccatttttgccagaaataggaaacccccctcctaaaaaccgtgtcttcacgccaccccctctttttcccgcacgcgcggttatcccggcacgctcccttgcccggcccctgcggccactgcctacgcgttgtctgggaccccacgtgggatacaaaaaaacgtggcggcactcc

SEQ ID NO: 9456 - DNA, 1037 bp, Homo Sapiens
ggaattccgctggcattagggaattccgctggcattagggaattccgctggcattagggaattccgctggcattagcattgctgggatctcaacttctctattgaggagggggttcctcccgctggggttcatatggcctcactcaggccatccctgttagaaggtggtacctgatggtctgttctgacgggtgagggacagaggcatctggatgaaaatctcgacgctttctgggaacagcttccaatggcatgggagttctgtatttaaaagcatgaactgtgtataaaatggggaaatggaggcaggagactttgaggtaacatggtctggtggtggcatgagtcctccagaaggtatttgtaataaggttccacaccccagctctctcagctgtttttaatgaatgtgtgtgaggaacagatgggaaagttgggagatctgtctacagagaagcaaagttgtgggtctcttgctaacttcaaggtgaaggatattgggcaccctaagtttgggaacttggttgataaatacgtatatggtccattccataaaccagtggtgagtgactggcctgggttctagacctctgggaaccagcacctgagtcacagctgtctaggcctcggtgctggcctgggttctagatctctgggaacccagtgcctgagtccaccagctgtccagtgcagccattttgcccagggctgcttcccgagggggatgatgggaaattcagcagtgtagactcactttaaacaagctccggtgatcctgaaatgctgaagatcgtgtaggtgggttgtggggtcagcagagctgccatctgcccacgtctggaaaacaacacacggtgagtcaccggttggccatgagatctccccacttaaaggtgctgtgagcttgtctctaagatatatacctcttccttttgtcttttgctgtaagctttgaccttttgcagatctgatgaaaatacaacctcttattgtatagtttgccttgattataagccatagtaaatcgagctgttcgc

SEQ ID NO: 9457 - DNA, 2138 bp, Homo Sapiens
  misc_feature (365)..(365): n is a, c, g, or t
  misc_feature (449)..(458): n is a, c, g, or t
  misc_feature (1563)..(1696): n is a, c, g, or t
  misc_feature (1709)..(1722): n is a, c, g, or t
  misc_feature (1831)..(1841): n is a, c, g, or t
  misc_feature (1878)..(1918): n is a, c, g, or t
  misc_feature (1948)..(1957): n is a, c, g, or t
  misc_feature (2038)..(2046): n is a, c, g, or t
  misc_feature (2077)..(2086): n is a, c, g, or t
ctgcagtcctcagttgttggggtaaatcccacatggcagagtaaggcaccccacagaaattaacttggagagcctgagaaattcccagtggccttggcatagctgtctagaacaccatctctaggaaaatttaattctgtccctggccagctattgttcttccacttcgttttctgctgtcccaaggccagatgagtggaatcaccatctgactgttgtcaataaaatgtatctggcgtgaacagcaggataacccatgttctccacataaggataaccttacgtgaaaccttcctgctgacaaccatgcagaggaatttttccacttaagtcagagccttcctccccatctggaattcacagcntgttccctggcagcacacaggagggtattaaggacctttgtgaggctaggtacactgtccacacctctttggggaagttacgannnnnnnnnnccatcataattcagtctcttcttattctacagtgtgcactttatgcctctcgccttttgataatagttgttcagtgaaggaagtcagctgccagaatattaagaagggtctccctttatgtcagtacaactgttagggcggccttcccatttactttaggtttcaagaggattcaccggaagcacatgccccggtctagtcccatttgaaacagttctgctttactgagaccctaggccggtctccttgctgaccctagcgctgctgcctaggtgccatttcctttcctcctcagtcaaatacaggctgcacattttgtcacttaatgccagtacaatctgtgttactcctaaggacttttgggattttgatgagacctgcgagggagaagacactgagaagccagtgatctgcaagcatttgctcttgtttccacatcacctctgggatatttacagctgttgtttccaaatggcaaatcatcaactaaaagcacttgtttcaagttttgttctgcactcccacgactgaagttgtagattgagctgaataaccatgggaagtgaccaagcaaagacactcgattggagtcagttgaatatttgtaccctcagtggagcccttctggtcttttcttccacttctgcagaatttcctctagcaaatacttctttctccttgcttgcctccaccatgatatttgaataagagatggccagaggataacacttgtctcttaaaaactaagctaaaaagaacctagaaccttcaattgagcagttgtgaaaattgctaatggtgccaaggccaagcaaagagtttcagaaaatgactgagaaggagcgataacccccagaatgcaaaatcaggggcatcattatccggtgcttgaacaaggactccgctctacaactggtttttttaggacttgtgaggaacacagcaacggaaatccatccacaaaggatgcagtgccccaacttgtactgcgcctgaatagtcatgtgataatttactgaagaaatctagtgtactttaaatttttttcataaaagtttacattgtattgtaggttaacattaaatgttttatagcaaaaacttcnnnnnnnnnnnnnnnnnnnnnnnnnnnnnnnnnnnnnnnnnnnnnnnnnnnnnnnnnnnnnnnnnnnnnnnnnnnnnnnnnnnnnnnnnnnnnnnnnnnnnnnnnnnnnnnnnnnnnnnnnnnnnnnnnnnnnngattttggggcgnnnnnnnnnnnnnnaaaaattttttaaaacctttttttggggggcggggcccaaaagggaagggaaaggggccaaatttttttcaagagaaaccgggggaaaaaaaaggtgtggaattccccnnnnnnnnnnnccccccggggaacccagaggcttggaaaaaacccaannnnnnnnnnnnnnnnnnnnnnnnnnnnnnnnnnnnnnnnnccccccacgggcctccaaatataattgaannnnnnnnnnggggcccttttatgagaaaagggggggtgaaattttactaaaaagtttccgggcgcaaaagtggagaaccccttcccaaannnnnnnnnaagaaatacccgaaatccgccgcggggccgnnnnnnnnnnttggcgcctctccgaataaataacttttccccccaggggaaaaaaggggggc

SEQ ID NO: 9458 - DNA, 601 bp, Homo Sapiens
  misc_feature (199)..(199): n is a, c, g, or t
aagtcgaaccagactgatgcaatcaagtggcgcctaagaaatcacatggcatttttgggggataatcttcagtactatctccaggtagatgtgttggagtctcagttctcccagctgcttcatcagatcaattctacccggagactttggaaagcatccgattggctcatgaccacttcctgagcaatttgctggctcnaatcctttatcctattgaaacctgtgtttcactgcctgaatgaaatcctagatctctgtcacagtttttgttcggctggtcagtcagaacctaggcccactggatgagcgtggagccgcccagctgagcattctcgtgaagggctttagccgccagtcttcactcctgttcaagattctctccagtgttcggaatcatcagatcaactcagatttggctcaactactgttacgactagattataacaaatactatacccaggctggtggaactctgggcagtttcgggatgtgaaaatttctggctcataaattgaaataacagccacgttcccaaggttgtaacagaagattcaaaacatcccattctagccacacacaaataaatatctgcggcttaaaa

SEQ ID NO: 9459 - DNA, 1063 bp, Homo Sapiens
ccagtaactatacggtcttttctgtagcgaggcctgggtggcgaattctggcacgaggctgggatcatggcggatgaatcactgcgagctcctgtcgccgtgcccggggcggcatcggggcggggctgggtgggcggcctgtgccgccgctgcatgcgctgggctcggcgccctggcccagcgccctggcagcgtgtccaagtgggtccgactcaacgtcggcggcacctacttcctcaccactcggcagaccctgtgccgggacccgaaatccttcctgtaccgcttatgccaggccgatcccgacctggactcagacaaggatgaaacaggcgcctatttaatcgacagagaccccacctactttgggcctgtgctgaactacctgagacacggcaagctggtgattaacaaatgacctcgcggaggaacggacgtgttggaggaagcagaatctgtacaatatcacctcattacatacaaactcgtcacaggacaacaattagagaacgagacagcaaaacatcgcaggtgcctgtgaagcatgtagtaccgagtgctgcagtgccaaggaggagcgagctcacgcacgcctggtgtccaccatgtccgacggctggaagcaacgagcagcaggacaagcatcgggctccgactatacaacatatgggaacgaaagaccaagaccgagcaacctctgcagtcggtgtccacagcagctcgcaccaacaggcccgctacgcgaacggcagagaacacagagcagcaaggccaggaattatggcaagcaatcgagcgctctaggatagctgagggacacaagcatacgaccagccggaagacagtgaattgcacggtatatgccacggcgaatggtaaagtgaaccgcccaatcgtcacggacaggcatgggctggtgagacaggaaaacctgcgctatcaggattaataacccccagcaaacaccacgggtagaacacaaccgtattgtaagcacacatcaaaggcagcgacggttaacacacacccgacccacacgggaccaaggcccgagagggaccac

SEQ ID NO: 9460 - DNA, 396 bp, Homo Sapiens
gttaatggtagctgcgactttaggtggggtatattttcttctcctaagagaatagacagtttttccagattcatcatcattgactgtcaagaaaggacccttcagcaaggctgtaccctcaatgcagttgatggcctgtcttcacggatttacagacttggcctgatgcccatgtaaattcaagctttggcttgtggtaacaaccacaagaagacaagcatctgtggtgcggaggcaagcaggctaactaggagttgacaagctaagaaagtgaaactgttctttcttagttaactgtctttctctggagctctgttattttgagtataatatttccacgacacttagtaaatgcaagctaaaatgtaataataataaattgtattggagaaacct

SEQ ID NO: 9461 - DNA, 440 bp, Homo Sapiens
aggtaatttaaaaaacttttcccaatagaaaatgaaatattattgaaaataatatctattttttagctttcagcaattgatggtgctttgttgtggtgtctgctggaagtctactgccattatagggaaccttgcttgttagcttctctagatctctattctaaacaatctgttagtgatgataaattctgtaggagggtctattctgagccgttaacttcctgtaaggggaaaatgggtgggttaccagaaataccattgaagcagggtgggctgtggggtggaaggttggggtatttgtcttgagaattaaaaactacgaaacacttttgtacacaactgattttttaaaaaataaacacatttttaaagatgttgaatttttccccccttattgggaattcttaaaaataaatgcatgcatgttttcccctgaaaaa

SEQ ID NO: 9462 - DNA, 202 bp, Homo Sapiens
aaccaaagacactgaccatagattgacttatacttttataagtctaattgaaatacttggggtactatgaaaggactgttccttgagtggctacgattagaaaatcaggactaacaaacttttctttgtctggaagcatatatatttgtgatataattttaatatgtataattttggtttaataaatcaaatctatgacaaa

SEQ ID NO: 9463 - DNA, 475 bp, Homo Sapiens
ttgggggtgattaaaaacttcatacatgaaacaatgaaggattaaaagacagtatacaatcaagtgctaacttgtggagaaatgcatttaggagtgcgatagtgctttagggatttcaagaagggagagatgtatttggagttgttgttgccatttcagtagaactgatctcagggatgaggacagaaccatctacatttgttgcagtcctttggaactgtagactggtgcacataccctctctttcgggaagagatagaaatctttggtttgatactgattagcacagtcctagatttctacagctttggtaggctaccagtgatcatatatacaacttatcgtatatataactaccttgagcagcatgtcccaatgtcgtttttggttttcactgtccctcctttttgagaaataagcaggatgttggccaaagtagggcttgtttgcagcaagtagcatcctaacctccgta

SEQ ID NO: 9464 - DNA, 475 bp, Homo Sapiens
gggtctcaagttaaaaaaagaaagcaaggaaagagtaatttacaacgaaggaaaaaaacccacagcacacccttcgcggctgtcagcgctctcctgatgtcacagtggctgcgtgtccttggggtgggtgaggtgtggggagcccagcccctggccctgcctcccgcgccccgctccccttctctctcttactcggttaagccatagcgaggcctccgctcgtttcagatatgaatttgttttatagattataaatatgcatatacagtgtatgtataaagcagaatgcctgcctttcctggttattttttgtaccatattgtaaattatattatttattctttaccaattttgggaataaaaggtgttttggttatttaatataataagagctgttaaacttctgtttaaatttccagttcaacttgtaaatgtttttattgtgcataaatacatactaatgttgatctaaaaa

SEQ ID NO: 9465 - DNA, 423 bp, Homo Sapiens
aatcctccacttctcatgtggttgaaccagtgtgttttttggtaaaatggtgattgtagataagattagttccctgatcccctgccccctgtcccctgcctcttttcccaattcccttccttatgctggacttttaaagcttaaaaaaaatccgattgaatataaatgcctaatttcattctttgtgaaatggttgcttcctcctgattccctaattgtgctgtgttcgtgtcttgcactggaattcaacattcccttctccttttgtactgtgttgtgcttgctgtctctcccggacacccttaaagactgtctttttagcaaaaaatttcagtaaagtgttttctgtaatctttttttaaaaggtgagaactaattattgtccatacttgtagcattcttcattaaagtcttgcttctctc

SEQ ID NO: 9466 - DNA, 676 bp, Homo Sapiens
tgggaaaagaaaagcagaatacttgagatgaaagttggcatacaaatagtatactatcgccagtagttatatgacaaacattatcggcctttctagtgtgaatgaacattagacacattattgtcattcctagtttaaagttaaggttgcgtggttggattttcccactatctttttctaatttttctaccatttggagaccgtaggcatttgggcctgtcaccccttggatgggttcctagtttgtttacattttcctgaaccctcctgagcgcccgttcttggtctaatccccagtcgtgatgattccacacttcctcaaccgcatgttgtcttgcctcattcatgagctggtcagcgtttcgtctctttaactgacatgttccccagtgctgtttgaactgttgagtttccgttgctggctgagtgcgttttgtccttcacgtaaccttcgctggtaaaaataagcccatgtgatgtccaccagtggatgaatgctggaccgagagccctagcttctggatccaggtctaggcccttcatctgctgctctgtggcccagggcaggtttgcttgacctctgcctcagttctcgactctaaaggacatactgacctacctcacaggggtgttgtgaggattaataaatgttggtactctgctttggaaatgtgaa

SEQ ID NO: 9467 - DNA, 1321 bp, Homo Sapiens
  misc_feature (740)..(894): n is a, c, g, or t
  misc_feature (902)..(918): n is a, c, g, or t
  misc_feature (943)..(952): n is a, c, g, or t
  misc_feature (990)..(1111): n is a, c, g, or t
  misc_feature (1137)..(1147): n is a, c, g, or t
gttctcgctgcgggcctcagccacaggcatgatcttcacgcctgcctgcagctcgcccgcttgaaggacaaggacaaggctgcccccgagatggtttctctgctgaagagaaataactgtgggaaagccctggacatcgcccgccaggcccgagacatgctgggggggaatgggatttctgacgagtatcacgtgatccggcacgccatgaacctggaggccgtgaacacctacgaaggtacacatgacattcacgccctgatccttgggagagctatcacgggaatccaggcgttcacggccagcaagtgagccgctccatcaggggcccgaaactctcaagcccctttctggagagatgcctggctggaccgtaggagcgctgtgctctgagcttagaaagggaggtggcggatggagtgggaagtgagagacactgatttttaaatatcaaaatttcccttctgaagtcgttcggatgtgttccttaaaaagaagatggaattctctgtagagcgtctcaatccacttttaaccatggatgagagcagactccatttaccctgaaatagcagcttctcttgagaggagagtgacatggaagcaactccgtctgctgcagctgaccccctcacactgagttcacagtgcgccctccctccctcccatctgggggtagtgccttatgctgggtgttggagcagagtgagggagaggaaaataaagacctgcacatctgnnnnnnnnnnnnnnnnnnnnnnnnnnnnnnnnnnnnnnnnnnnnnnnnnnnnnnnnnnnnnnnnnnnnnnnnnnnnnnnnnnnnnnnnnnnnnnnnnnnnnnnnnnnnnnnnnnnnnnnnnnnnnnnnnnnnnnnnnnnnnnnnnnnnnnnnnnntctttggnnnnnnnnnnnnnnnnnaaaaattttttaaaacctttttttnnnnnnnnnncccccaaaggaaaaggaaatgggcaaaattttttcccnnnnnnnnnnnnnnnnnnnnnnnnnnnnnnnnnnnnnnnnnnnnnnnnnnnnnnnnnnnnnnnnnnnnnnnnnnnnnnnnnnnnnnnnnnnnnnnnnnnnnnnnnnnnnnnnnnnnnnnnnncccccgggggtttttttttatatttnnnnnnnnnnngggcccttctttggagaaggggggggaaatttaataaaaactcccccgcccggtgggaaccctccccaaacgggggagtgtaaaacctgtttttccccgggggggattacaaccccctgtggccccccttggggaaataatatttccccccccgggggaaaaaaagggggggag

SEQ ID NO: 9468 - DNA, 2118 bp, Homo Sapiens
  misc_feature (1815)..(1828): n is a, c, g, or t
  misc_feature (1902)..(1970): n is a, c, g, or t
attaggcgcgttctgcgtggctaagttcatcacctactaggacggaggtggggtggggagaaccaggtgtccttctaaaatacagcacaagctacagcctgcgtacagccataacccaggagtaacatcagaaacaggtgagaatgaccactttaactcaccgggcccgtcgcactgaaataagcaagaactctgaacagaagctggaaagtgaggaagcacagtccattgggagaaacagtccagaccatgaagattctggagactctaaggatatctgccttactcttatggcagaagtattgctatctgggactaaaagcataagaggggtacacatctttctggaatgactgcatatcatcaggcctgcgagggggcatcctgatagagctggccatgcggggtcgaatctatctggaacccccgaccatgcgtaagaagcgactactagacagaaaggtactgctaaagtcagacagcccaacaggtgatgtttactggatgaaactctgaaacacatcaaagcaactgaacccacagaaactgtccaaacatggatagagctactcactggtgagacctggaaccccttcaaattacagtaccagctgagaaatgtacgagagcgcatcgcaaagaacctagtagagaaaggtattctaaccactgagaagcagaatttcctgctatttgacatgactactcatccagtgaccaatacaacagagaaacagcgactagtgaaaaaacttcaagatagtgtactagagcggtgggtaaatgaccctcagcgtatggacaagcgaacactagcactcctggtgctagcccactcctctgatgtgctagagaatgtcttctcctctctgacagatgacaagtatgatgtggcaatgaatcgagccaaggacttagtagaactggaccctgaagtggaagggacaaagcctagtgccacagaaatgatctgggctgtgctggcagccttcaataaatcttaaagccggcaggtggatttctccttttcccctgctggctggtgactgtcagagaccccatcactgagttttgtgtgatgagatgttttcatcatttttgtttccttttcttgaatcagacttgtgatttggggagagcaacttcagggcttctccatagaccttgaccattataagcagaccttatttctccctacacttccactccataggtaaataaactgggtgaagccacacacacccaatgaacattttctcccatttggtggtttagtttcacccagtgtgcttttggataagcagaaatatctaaatgggattttgagttctccagctatagaatgtgaatgagataaaaagtgaactatctattatatttttctgagtttgttttctatcataaatacatgttttcacagcctttgtctctcagactctgctaaataatgtagcttattgaaataactgtcgctgaataaggagcaatgagaaacaaaactaatttttggagcagatggtctctggaattgcatatcctgctagtgattttctcatctttccttttctaacctaatgagaatgtcccagattcaattacctggatgtcaaagtcctagagccagaaatatattctctcatccctcttagcattctcttgctccctcattcactagggcaaatgtctaaatgaagaaaagtctctctcaacacctcgttcatgcaatcagcattagaatttgtaaggaaggaaggggggtggcatgaaaatttccattcttggggtatatgactgtcctgtttcccccaggccacnnnnnnnnnnnnnngctttggagacagggtcttgctcttgcccaggcaggattcacagtagtgcaactcacagctgactgcgccttgnnnnnnnnnnnnnnnnnnnnnnnnnnnnnnnnnnnnnnnnnnnnnnnnnnnnnnnnnnnnnnnnnnnnntactcagctttcttggtgaggttagacaagagtctcgctttgttgcccaggctggctctgaatcctgggctccagcaattcttccacctcagcctcccaaagtgcttagataacctggctagagccattgaaccgaccctccagacta

SEQ ID NO: 9469 - DNA, 2040 bp, Homo Sapiens
  misc_feature (29)..(29): n is a, c, g, or t
  misc_feature (58)..(58): n is a, c, g, or t
  misc_feature (93)..(93): n is a, c, g, or t
  misc_feature (118)..(118): n is a, c, g, or t
  misc_feature (126)..(126): n is a, c, g, or t
  misc_feature (217)..(217): n is a, c, g, or t
  misc_feature (243)..(243): n is a, c, g, or t
  misc_feature (247)..(247): n is a, c, g, or t
  misc_feature (277)..(277): n is a, c, g, or t
  misc_feature (288)..(288): n is a, c, g, or t
  misc_feature (346)..(346): n is a, c, g, or t
  misc_feature (350)..(350): n is a, c, g, or t
  misc_feature (577)..(577): n is a, c, g, or t
  misc_feature (582)..(582): n is a, c, g, or t
  misc_feature (645)..(645): n is a, c, g, or t
  misc_feature (659)..(659): n is a, c, g, or t
  misc_feature (726)..(726): n is a, c, g, or t
  misc_feature (735)..(735): n is a, c, g, or t
  misc_feature (1041)..(1111): n is a, c, g, or t
aaagttgtcagaggttccagtcatgacgnaggtctgtgaagtacgtggtactgtgggnggccctcgttgactcacgttgccctgcatccaacncccgtggatggactggaccttagcnagacgtcnaggagcggcggtagggatgcagtgtcggccgggaggtaccggggcatggcgccgtgctgctgcctaagccggtgcgacccgcattcctacntctgccgtggtcactgcgtccggcanatangcctggaatccaaccgccgatggcgtgcgntgtcctctcanagcatgccggcgcagtaccggcctacggcacgatacggtatcgtgtgctcgtggagangganacgcagcggagcgcgagacgtgtcgatcatggtgagaagtcatgcgcgtaggtggggtgtacgtcgttgggctgcgatagcacggacgggccgcgctgacagggtcgagcgcgtgcgatagttatacacgctgtcgtgcggcatgccgtggcggccatgttgatattaaagcaagtagacgtagacgatatatgcgggggaggcgccaggtctcactgcggaagacnagtcngcctcgtcgccgtgacgcgccaggacgcgcgggcgtcataagcagcgcagaatgtagcagtgncgtgcgtgaggcgngggagcggacgcagcgggggtgcagcgtctggtaggcaagtgcggtgcgtggcggtgacgagggagngagcgcgcncgccggacgcgacggccgatctcgtatagacagattcttaccgcgagccaagaccggcgcgcgcgtgcggcggtcgacgaagcagccgttcgcgccgcttccgtacgtgggcgcgagaaaagagaggggatgggaacgcgggaagaccgcgacgacccactcctatcgcctcggtgctggggagcggagacgaggaggacagaggaggggcgaggaggttagagaaatgcgaagggggcaccggtgggcgccattcctcggtgaagagggggcgcgcgggaaggggacgccaacgagagggcgctnnnnnnnnnnnnnnnnnnnnnnnnnnnnnnnnnnnnnnnnnnnnnnnnnnnnnnnnnnnnnnnnnnnnnnnagccagcgtgccgtgtccggggggcttgcttagcgaacgcggctggggtcgcggttgggctctctcctgggggggcccgggccaacaccaaatgtttgtgaagcttttttgggggcgcgaggcgccgcccaggattgattccagcacgcctcggcggccgcagagcggcacgggagcccgaggggactgtttgccgtgatgcaggtggtttttttgctaatcaaatactgcagtactgatttaatcagtataaaatcgaaagagctttagatctgtaataaaaatccaaatttggggaagggcaaactttaaaacagcagccaagtagagaagggttggggaagggagaggtgagtgaacaggcacattggaactgtggggacatgtaactgaccactgtcaaaccagtgtaagtttcttggtttctcatggaaaacattttatacacctatttttcttccttccatacttaagtccatcagtgtccaaatacgtctgttccattttttgtctgatttttgttgggatattacaacacagtattgcatttactccagttcctgctccatgtgaaaaaattagatgatttcaaatactttcttcagctccacaataagctgccagtcactcttctgcatttcatctctgaaccagtctttgagtgcatcaatggactgccggctgatcttactaacaagaatatctgtagcttcaaaatgtcttccaaacattttgggtgactcaccagggataggttctatttttacacaaacttctagtcctttttttgcaacatccacttgtttatgggttatttgaatacttgttactatttcgatgtaacaaaatttttgtttggacaacacatggtgtccctgtttcacttgcctgcttcaccgtccccccatacttcggtctcgagaattaaa

SEQ ID NO: 9470 - DNA, 418 bp, Homo Sapiens
gcccccttgaacccgcactccccgccggctccccaagacctcaccgttggccatcgcattacgcctcgccgcgcacggacacagggaggacgatcccggggcccagaggcaggaatgtggcgggccggtctcgcataaccagccccctccccccactccaggccccctccacatcccgttcgcctccctccaggactccaccccggctcccgcgacgccagctgggcgtcagaacccaccggggcaaccttgcagaggacgacccggggtactgccttgggagtctcaagtccgtatgtaaatcagatctcccctctcacccctcccacccattaatctcctcccaaaaaacaagtaaagttattctcaatccatcctcttgcagcacagagtctcttttaaaatttgttgtgtatct

SEQ ID NO: 9471 - DNA, 601 bp, Homo Sapiens
ggccctcgacatccactttgaaacaagttactaaagtggattgtcctgtttgcggggttaacattccagaaagtcacattaataagcatttagacagctgtttatcacgcgaagagaagaaggaaagcctcagaagttctgttcacaaaaggaagccgctgcccaaaactgtatataatttgctctctgatcgtgatttaaagaaaaagctaaaagagcatggattatctattcaaggaaataaacaacagctcattaaaaggcaccaagaatttgtacacatgtacaatgcccaatgcgatgctttgcatcctaaatcagctgctgaaatagttcaagaaatcgaaaatatagagaagactaggatgcgtcttgaagctagtaaactcaatgaaagtgtaatggtaatacaaaggaccatacagaaaaggaaatagatgaaatccacagtaaatatcgtaaaatacataagagtgaatttcagcttctggtggatcaggctagaaaaggatacaagaaaattgctggaatgtcacaaaaaacagtaacaataacaaaagaagatgaatctacagaaaagctatcgtctgtatgcagggga

SEQ ID NO: 9472 - DNA, 661 bp, Homo Sapiens
aggtgcttgtgaggtttggactcatgctgagaaacccacaggaaagcactgtccaggtaggattagaggcttcccacttaaaactatttctgagaaatcttaggttttatcactgctatggtttcccatatttacttgggactgttctgactttctttttccagcccttagcttgggttagaaaagtggacatgtaagtgaacaatgcattacttctaccttaggtttaggagtaatatacccggaaatctaagctcatggaaacatgttttccatttttgcttggagtccgtttttctagttgtacatactttttgatccatatatgtgtgcatgtcaagaaataaaagaatcacacaacaaggagatttttagcatgatactggaaataaaatgtccaagctgacaagtattaattgcctattaaagtaaaagataacaattgtcaggcagaaggtgtttcacattttgataattccctttgatctcagaaacaagctcaggtactagcttggctttaggtagcatctggatttattccatgaccaaatacagatgtttttgagaagacaaggtcttctcacatcctttaaatgtcccactggaagaatcaaatagtttagtgtcgtacgataaaaatgatgcaaatgtcgctggccgc

SEQ ID NO: 9473 - DNA, 1460 bp, Homo Sapiens
cagggcgagaaagtgtcaaacatatctggccataatagtcatcgaaggcacgaggcagggggagggtcccacccgagacagcggagaaagtgggatacaaaggggggagcgtagagggcagtagggggggaggactgcaatagaatacagacacggaggtgtagggaggagaggacacggcgtagtggggggccacggcgcgccgagggaatgaattagtgttaagtgtcgccgataatcagccgcgcggcgaccgaggtgtgtgagttgtaatgggcggcccggagcggcgccatagaacagggatgtggctacagtcggactaagtgaaggaggagaaaatagcagcggcggggtctatcgctcgttagcggggcgcgcgagcggagcgctcgccgacgtaagccggggcagtagcgcacgccagggactgggatgcgcggaagcgggagagagcactagagtgtagtaggggcgcgagtggcagccatatagtcgccggcaagagggggaaagcagacgggggctccccggcggcgcgggtgcagcgggcccaaggctacgcggggaggacccagggacgtcgtcgtgggggggaagcagcgacaaacgaggggtagcttgcgccgcccgggtgccgggttttgtgtttggtgggggagccggccccaccgtacgttgtgagcaagtatgtggaggaggggcggaggaaggtgggaaagggatgcgcataagacgacagggtgcgggcggggtgtggggtgggcatttgggaagacattgtgggggtagaggcgggggcaggcggaacctcttttctctttgtgccagcgtacccaaggaaatacgcatgtgcggtcacgagggcttcccgttgaaagcacatattgcggcgtatggtggggggttttgtgatagtggtgtgcactgtttgtgtttatggtttgttggacttgtattgtggtggtgttttgtgtttgagtcagacgatcttcctttaatacaaagtcgatatatctacatacacgggggtgggaaaaccacccggctgcttccgctggaataaacagtgttgaaagtaaccgcagacctgcccttgtacaaagaggaacaactcgcttgctcagggtaggcgggtagaggggggcctgtccttctggttttgctcccaaactgccccacagtcccagggggaaagggtccctgatgtggggcagcacagccatacagccactgtccccgaagaagtaggatcctctctgtctccttgggggcgggagacggggagacagctcaggctctcagaggaggaccactgtcatctctctcctcttacagcagcgtccccctcaaccgcacccaacgccactgggtccgagctcccccatgaccttaccctcagaactgtatttgatatgtctgaaaatttaatttataaaaatgaaacaaaaagggggaaa

SEQ ID NO: 9474 - DNA, 531 bp, Homo Sapiens
gatcaaaatgtttgaagaaaggaactttatttttgcaagttacgtacagtttttatgcttgagatatttcaacatgttatgtatattggaacttctacagcttgatgcctcctgcttttatagcagtttatggggagcacttgaaagagcgtgtgtacatgtattttttttctaggcaaacattgaatgcaaacgtgtatttttttaatataaatatataactgtccttttcatcccatgttgccgctaagtgatatttcatatgtgtggttatactcataataatgggccttgtaagtcttttcaccattcatgaataataataaatatgtactgctggcatgtaatgcttagttttcttgtatttacttctttttttaaatgtaaggaccaaacttctaaactaattgttcttttgttgctttaatttttaaaaattacattcttctgatgtaacatgtgatacatacaaaagaatatagtttaatatgtattgaaataaaacacaataaaattaacacttgatccaga

SEQ ID NO: 9475 - DNA, 793 bp, Homo Sapiens
  misc_feature (121)..(121): n is a, c, g, or t
  misc_feature (145)..(145): n is a, c, g, or t
  misc_feature (148)..(148): n is a, c, g, or t
  misc_feature (206)..(206): n is a, c, g, or t
  misc_feature (224)..(224): n is a, c, g, or t
  misc_feature (230)..(230): n is a, c, g, or t
ccgtctgggggcaagctgcttagagcgctcctgcggagcctcagtgctgtagttcacaggggatgtggccgaggcggggccctgtacgaggggtatgcacaagtcactaatgcgccccccngaagtgctccctcacctcaagggnacncggtgcttgctgcgtaaggaatctcggaagctcattgttcagcccaacactcgcctgnaaggctcagacgtcagcnttctgnaatacgaggcgtcagctgctggcctcatccgatccttctctgagcgtttccaggaggatggacccgagttggaggagatcctcacacagctggccacagccgatgcccgattctggaagggccccagtgaggccccatctggccaagcttgaggaagatgtgtggccttgcccccaattccatcagaccaaggctgcaagtggccctccattcgtgtgtgtatttaggggctggggagggggaggggcaggagcttggaccttggtactacctcagctgagggtggtgacacaaccccttccatttgtcagcactttccagcctgccaattgcttcccctctgtgatctcatttcatctgcactgccatacgtggagtgagcaagacagggcttaccatcctgtctaccagatgaggaaatggcagttctgagaagtcactggtctagatcccgcaggtggcacgtgacagctagggttcaaaacgttctcaccaaatccaatgctcctcacatattaattttataaccagacaaataaatattagagacaaccaccagatcg

SEQ ID NO: 9476 - DNA, 686 bp, Homo Sapiens
  misc_feature (255)..(255): n is a, c, g, or t
gggggctctaactgcactttcggcccttttgctctgggggtcccacaaggcccagggcagtgcctgctcccagaatctggtgctctgaccaggccaggtggggaggctctggctggctggcgcgtgtaggacggtgagaagcacttctgtcctaaaggtttttttctaatcgaagctttaatggagcgttatttatttatcgaaggcctcttgggtgagcctggggaatcagcaaagggaaggaggggtggtggnggttgataccccaactccctctacccttgagcaagggcaggggtccctgagctgttcttctgccccatactgaaggaactgaggcctgggtgatttatttattgggaaagtgagggagggagacagactgactgacagccatgggtggtcagatggtggggtgggccctctccagggggccagttcagggccccagctgccccccaggatggatatgagatgggagaggtgagtgggggaccttcactgatgtgggcaggaggggtggtgaaggcctcccccagcccagaccctggggtccctcctgcagtgtctgaagcgcctgcctccccactgctctgccccaccctccaatctgcactttgatttgcttcctaacagctctgttccctcctgctttggttttaataaatattttgatgacgttaaaa

SEQ ID NO: 9477 - DNA, 498 bp, Homo Sapiens
gcgaggagtggcggaagtccagcaggcgggcctcacaagtcttggagaagcgacccaggggaagtggaggtggggggaaagcgagaagcaggcgagccgcgggcgccacgcgcgcggagccgctcaaccgacttgtcccttaaatgtgtcttggatcccgcagtgatgacgtgagccagccaggcccgaaaggtgaaggccagtgcagagaagcttcccaggggattcctgggttcccccgaaagacaagcgaggtcattgcagttcacccgatgttgctcctgtcccgtgcgtcccggggaggctgtccttggtccgaggctgctcgttgcagcccctcccctgctggcggttacgatgcgtggggtccccctccccacccagccccggccacgtcgccgtgtcccgcctgtgcctgtgacgtccctgtggacctgtgagccatcccccccttatctctgctctgaatactgcatgaagcattaaacgtgcaatgaa

SEQ ID NO: 9478 - DNA, 1012 bp, Homo Sapiens
  misc_feature (827)..(827): n is a, c, g, or t
ctctggatctgtctgatcgattttcagctattcagcgtcaagagaaaagccaaggaagtgagacttctaaaaacaaatttaggcaagtgactctttatgaggctttgaagaccattccaaagggcttttcctcaagccgtaaggcctcagatggcaactgcacgttgcccaaagattccccaggggagccctgttcacaggaatgcatcatccttcagcccttgaataaatgctctccagacaataaaccagcactctttatgtcatctaaaacattctcagtctccaataaaaatacaaaccaggtcagaccatggaggatgtgaacttgcatcagttcttcagttaaatccatgtagaactggtaaaataaagtctctacaaaacaaccaagatgtatcctttgaaaatatccagtggagtatagatccgggagcagacctttctcagtataaaatggatgttactgtaatagatacaaaggatggcagtcagtcaaaattaggaggagagacagtggacatggactgtacattggttagtgaaaccgttctcttaaaaatgaagaagcaagagcagaagggagaaaaaagttcaaatgaagaaagaacaaatgaatgatagcttggaagatatgtttgatcggacaacacatgaagagtatgaatcctgtttggcagacagtttctcccaagcagcagatgacgaggaggaatgtctactggccacaaagaaactacacactcatggtgataaccaagacaaagtcaagcagaacgcgttggtggagccgtattttaacaggtgatgcacacgagagaactagntctggcaaaaattttccctccatattggagggtggtccggaacaaaagacggagagaagaaaaactggttggggcacacgctgttacgggcatggtgacattctctcactggcgattttgccagcgaagagagcagaacagcacattgcgtcccggctccaaaaaccgaatccggtaattcaccc

SEQ ID NO: 9479 - DNA, 368 bp, Homo Sapiens
ttgcccctggtaaaagtcagaacctgggatgaccagaaagtaacaggacagatttctcccagcaaatcagtctccacaaccaaatgaatattgttctccaaggagtcaagctatagactcacaatgacaacgtggccatggctcaaaacactctctgaaattacaaaattgctttctgagccaatttaaaagtcacatgattgaatccaagctattttactttaaatggtccttttgctttgcacctgagacctcgcttggccacagacgtcattcgctggactccctgggcactaaatgagtgtctagcatccttaaggctgctcaacacacagccccagactctgaatatgattccaagaaatatt

SEQ ID NO: 9480 - DNA, 334 bp, Homo Sapiens
gggggaaatactcacttacaccaccaaaccactggggccacccacatcgatacctgcagcatctttagtcaagttggaggagaaagacaacacttggtctaagacacggcagcaagacatccctgcatattgttccagataaaaatgaaagctgctcacacccacttgcctccccaatctgttaaacagcttcgtgtctagtatgagctcagtacttgccctgtgaaaatcccagaagcccccgctgtcaatgttccccatccacaccctgcttgctcctgtgtaacagctcagatgatgaataataataaaactgtacttttttggatggtgc

SEQ ID NO: 9481 - DNA, 460 bp, Homo Sapiens
atcatctaacttgggtccctgcactagaggaggtaggaatgggttggcggagtgggggggtggtgagctgtaccccaatattttggagctggaagttcctgggtatgatgcagggagaggtaccacccttcctaagccaacagtctcactccctcctctcattgctccccattccagctcccacctcccaggattggtgtccagagagtgggctgtgggtgagtctactgcatgcctgcagcatgtgagtggatccatggaagtggatccaccagcacatgtggggtgttagcatgagatgatccacctgggcctgtgctataaggtatgtgggcacaggcctgtgcagtcttaggctatctgtgctttcatttttcttcacacggtggcaggtctacactgcccagccccaggggtgggccttcctcacctcttccctcttgattttcagtctcagctt

SEQ ID NO: 9482 - DNA, 817 bp, Homo Sapiens
  misc_feature (214)..(214): n is a, c, g, or t
aagaccacagtgactacaggtatgtggcagctgctttggctgtcatgagaaatgtgactcagcagatcaacgaacgcaagcgacgtttagagaatattgacaagattgctcagtggcaggcttctgtcctagactgggagggcgaggacatcctagacaggagctcggagctgatctacactggggagatggcctggatctaccagccctacgnccgcaaccagcagcgggtcttcttcctgtttgaccaccagatggtcctctgcaagaaggacctaatccggagagacatcctgtactacaaaggccgcattgacatggataaatatgaggtagttgacattgaggatggcagagatgatgacttcaatgtcagcatgaagaatgcctttaagcttcacaacaaggagactgaggagatacatctgttctttgccaagaagctggaggaaaaaatacgctggctcagggctttcagagaagagaggaaaatggtacaggaagatgaaaaaattggctttgaaatttctgaaaaccagaagaggcaggctgcaatgactgtgagaaaagtccctaagcaaaaaggtgtcaactctgcccgctcagttcctccttcctacccaccaccgcaggacccgttaaaccacggccagtacctggtccccgacggcatcgctcagtcgcaggtctttgagttcaccgaacccaagcgcagccagtcaccattctggcaaaacttcagcaggttaacccccttcaaaaaatgatacctacagggaggcagataattttaaaataaagtaaataaaattataaa

SEQ ID NO: 9483 - DNA, 610 bp, Homo Sapiens
ctgtctagaggatccgctcggatgcaagtgtctggaacatgttggaagtcgtactcaggatgaatgcatcctccactttatgagacttcccattgaggagcccataccttgagaattcagatgcttcccttgggcctttggcctaccagcctgtccccttcagtcagtcaggaaatccagttatgagtactgttgcttttttggcatctgtggtggaccctcgcgtggcatctgctgcagcaaaagcggctttggaggagttttctcgggtccgggaggaggtaccactggaattggttgaagctcatgtcaagaaagtacaagaagcagcacgagcctctgggaaagtggatcccacctacggtctggagagcagctgcattgcaggcacagggcccgatgagccagagaagcttgaaggagctgaagaggaaaaaatggaagccgaccctgatggtcagcagcctgaaaaggcagaaaataaagtggaaaatgaaacggatgaaggtgataaagcacaagatggagaaaatgaaaaaaatagttgaaaaggaacaggatagtgaagtgagtgaggctaccacatcagaagaaaaggagactgaagaga

SEQ ID NO: 9484 - DNA, 370 bp, Homo Sapiens
  misc_feature (313)..(313): n is a, c, g, or t
aaggcaggtctgtcatttttgaatactgtaaaactgtgataaactttatattgaagctgtattttaatatgaccgctttgaatccttacatgaaatgttctgggagttgttataaacacaccccaaggaagcaatatttaataaaactaggtcaaaaacaaaacaaaacagtgacactcacttgtgtgtatataaactctagagacatcttaggccctccccttcatctttaacctggtggatggagccagttattaatttataataatacatgtctgaaatttgaccaaaaacatcttctttatgtcaaggntaatatattttcttcaagacattccctaacttgactagtgggttaacatttagcacc

SEQ ID NO: 9485 - DNA, 674 bp, Homo Sapiens
  misc_feature (247)..(247): n is a, c, g, or t
ttggggggtcactagagccagtcaaggcaattattttcaaccagctcttcctaaaatcttgactgctgtctgtaatttagtgaacactacatctgaaccaagttctttgaacttcacctgatggcccgatccagtgggtctggagtagggccaagaaatcatttctaacaagttcccatgagactctgatgctgcaggttgggagaccacactttgagaaccactgttttaaactgagaacctaaangcttcccctacccactctgcagagatgagcttcctcttcttttccccaacccttacaaccacctcagttccctcaacagctgggctgagttcaaacaccagctggataatgaaaacaagttagaagtcctattaaaaaaatctaattatggatgactctcagtttattctattacggagtttttagaagcaattttacagctccaaattagaactgctttacatactaataagacttttcaacaagtgatggtgatgaaggcaactgcatgatgaattaagctgcttttcagagagcattcctagaggatttaccaagacaagagaaatgaaagaaaaatcaatatctatgtggaaggcatttaagagatttttttaaattatattttaaagttggtaaagattttgtgctgggcacactggctcat

SEQ ID NO: 9486 - DNA, 594 bp, Homo Sapiens
ttaatttgaaaaccttgctgttacaaattggacctttatacattttctgaaaacaatgaaaagagtatatttaaccttttctggctgtaaatggttaccttcctgtaactgcccccgcaccctggaggcatggagttgtgtgcatcctgcttatgtaccaattgttttcagtgtttctaagaatggagtctgaatgggttcttgaaaattagcccaggatcaaatgctattgcagacaaagccaataaaaagttggacttcttttggggataacaagttttggaagagaaatgcaggccatatgtgcgcatgaccgagattttgaaaaaagatgtacatagtgacatgtttggtgcatggtttttgaggagggcttttgtcaaaaaggaggtataacctttcccccacagacctgagagctgtgccttttctatgcaatattacagacgttacatcggaacccagatggctgtattcacatgtaggtttgggctgtaatctaaacaattggacagattaaatgtacatggaaatgagcagtcttacttttgtagttttatattatacaataaacagttaaaagatgaaaaataa

SEQ ID NO: 9487 - DNA, 408 bp, Homo Sapiens
  misc_feature (16)..(16): n is a, c, g, or t
cttctagtaataatanaatgagtgatttggaacaaacatgtagcagaggaaaggtgagcaaactttttaaatgtcaaaagacatcaaaagacaagataatggagaaatggtgggccaaaattcagaaacagttgggagagtcatgcatttggggctaattttctcctggggatgatggtctagtctaggatctgaaaagcctagaatctctgcagcacttttgacacctatatgaagctgggggaaagaaagattctagcaaaaattaaaatgcacatcttttcaagagcacataagatttgtacaaatgagtaaaatgatatgggatttcaaaatactgaaatactatgttttcgaatacagtgaaatttggctagaaatcaataaaaatacaactaaatgattcat

SEQ ID NO: 9488 - DNA, 840 bp, Homo Sapiens
ctcggtacccaagcttgattgcctatttagctattcacaaatcactgtaatctttgaaacaatcttgtcgttcatttgtattaatatttggatattgtgagttaatactttagaaaaaaatccatcaactcagccccgttagcaaaactgtttggattcatagtttttatatgtgttaacagtagaataaattttgaaggggctatttactaccaatgactaaggggaaaattatactgtcactatcatttgacttgaacatttgtggtattgtaaaagtcttgtcagttgtgttctaaattgcttaagccatacgttctcttaaacaggatgtttttttcttcctttccagcagcctttttcttctttgtctgttatggttaatactccatagattttagaaattgagaagttcttgaaacattttattttcttgagttcatcacttttgactcttgtatgagatgtgatttgtcataaaagatagccttccactacttcactaaatgaatttcagagtaaacactgtgattctgcagagcggattcagtaggctttccaatgttttctcctgctatacagtgcctaccaccttgagggcacttcagtactagaggatgaaaactgaaacgttgttttgatgtttattgaataacgagattagagaatatttgatttttgttgtcagtgtattaaagaaattttcacattgataaatgttctctaggaatgtgtctacattcatcaggtgtgaactcttgtacatgaattttgtaccttgaatccacatatatattaagtgtatcatcaatataaaaataaacattatttgcttaaaaa

SEQ ID NO: 9489 - DNA, 420 bp, Homo Sapiens
ccaatgatgaaaaattataagaattcctttttaagtcatgtcaagaaaaaaagtacctcattactgcttctatttgatacttccctggaagtcctctcaaggcaataagaaaatgaaaggaaataaaaggtataaaggctagaaatgaataaacaaaaacagtatgatttgtagacaatatggctgaacacatagaatactccgagaaatccacagattgttagaattaagaaattcagcaaggttggtgaatacaaagtcaatattttttaaatgcccattcttagttagcaacaaaacctaattagaaatatatcttttaagaatagagattgctttgataaaatttattcgtgtaggtatttcatttgatatctgtctttttaaatatattggtatgaataaatttaattcgactgt

SEQ ID NO: 9490 - DNA, 440 bp, Homo Sapiens
cggccacctggagcctccacacctaagctgcgcctcctgtcatttccatgctgggctctcacatctatctggttgttcttcaccaccctccaagtcctctgacctaattttctgctcgcaaggtcccctggcagtggcccatcctgtcttctacttgaaacgtctgagtcacttggtctaaaaagtagcctcaggtggccagaaggccgagttgtgtaatgagttggggcagggtggtggggtaggtgcatgggagggtgggccctctggggaggcccaagcagcttgttttgcaaaggcccaagtcctcctgctaggaaaagcttttgcatgtgtcctgaatgtgtctctgtaaacatagctgttatttattattgtgatgttgggacctttagcccatagcggatgcctcctcaggaatattctcgatttaataagct

SEQ ID NO: 9491 - DNA, 1155 bp, Homo Sapiens
  misc_feature (303)..(303): n is a, c, g, or t
  misc_feature (1075)..(1075): n is a, c, g, or t
  misc_feature (1143)..(1143): n is a, c, g, or t
atgttttataaggttttgattaaaaatgttggcttctgaaggctgtatgccttaccgacaaaaacaggccaatctgaaagtatgtttacctctagtccaaataggcatcaagaatttaaaaaatgatatttaggtaccaagtccagattgtaactcttggaatttttctcctggaagcatttagttatatttctgtcccctttcaaaatgaaccacctagagaaaagcaagtcagaaaattgtctgccctccagttggaggaaaaatattaaagagaagtgaagtgtaatacccaataatagncacatatttatctttatctgtattgaggttcttttaaacatttttagaacagtaacagatggttatattcataaacttaaataagatttcctccaagttctggaatatatgtatacaatctcaaaacactgtacatatcactcactctccctttaggaagaaatggaaattaaagttaaaagacttccttggatacttctaagtaaaagtaaatgataatggaagggaactgaatgaaagataaattctgaaaaaagctaacaaaatcaagtccacagtttgactctttgtttccttggaaagcaacggaagcacttagcttgggtttgaatatacagaaagggtcatgcagtgagttgcaggtggcatgctatcctttcagagttcaaatgcagggaacctggcttttgtggggactagcaggtcagccaggaaatatattgttccagccattccttcaaagagagagaaaggggtgtctggtgttctgcatccatgttctccatactctaagcaccattcagcaaacttacaggccctatacaggtacttcatgtcctgtgtgaggttgtagagtgtcaggaaggcataggcattccctgcagaaccgtggcacagcccatatcccttcttcagcaacccatattgccagatcacatcagcacactgataggcatcacagagatacttttcctctctgaatacctgcatcaggtagtaataaattccagccaggccatgagcagcccctacataatattcctggtaccantcatacatcagtggagactttgccgtgaagtttctcttcctagctaggttttctccagaggttaaaantgttcacaaatc

SEQ ID NO: 9492 - DNA, 662 bp, Homo Sapiens
ggcctgctagtcaggaggatgctgtgcacactgtgtgtgatgaatctcgccagaaaggctcctgaggtcccaggttggcacttctccctgcagccattgtagaagatctgctggtccttgcaggcaaagctacagccagaatgtccgtttgaaactcctagctcatctgtcaccgagcttcatccgaatgtgccacggagcttgctctccacttcctccgtgcagtggccctgccacagccctccctcggcacactttgaccctttgtaggattggaattagcaggactcggctatttaaagcaccagtctggggtcgcctgggcccctgctgaccccctcctccagagcagccagcccagcccgggaacaagacggacttcctctcccttcggactcacagcctttgcagagtcaagctccacttgaagctcactcagtaatatcctttcaatgtgttttatattgttttgactgcctttttttgtagaaataaaaattgaccttagaatttatcgtcagataaacttgtaaagatttgaatattaatgtcttttcaaggcaaatgggattgtccccgcactagtagagaatccatgtcgctctgacaccccaaggaagccgacgatccaaatgccgtgtgtcaccaaccccgagctgggg

SEQ ID NO: 9493 - DNA, 619 bp, Homo Sapiens
ggggatgctgctgcggagggtggtcgagggaggccgggcggtagccgccgcggtccgtggctcgggggctcgccggttctccagcccggactgctgccagaggcttcctggaggtggcagctttcttcaaaggcaccatcccggagcgcaagcccctgatgggcgcagaaaattcgggacagaccacgtagaggtgggctcccaagcaggtgcggacggcaccaggccgcccaaggcatcgctgccacctgagctccagccgcccacaaactgctgcatgagtggctgccccaactgcgtgtgggtggagtacgcggacaggctgctgcagcacttccaggacggtggggagcgggccctggctgccctggaggagcacgtggctgatgagaacctcaaggccttcctcaggatggagatccggctgcacaccaggtgcggaggctgagccatccctgctggactccctaccgcaggacggagtccaggacgcagccgcagcctccttccttcacaccccctcacagactccttgtgtccaacgggaataggaagaattagttactgacttcacctgagaaaaaaataaattctctatggtggtttcacaggaaaaaaa

SEQ ID NO: 9494 - DNA, 485 bp, Homo Sapiens
catgcactttgggcatatgtggaccagggcttaaaaagctacatgacaaagccgtccaaatccctactcccccacctaaagactgggaattcctcacctggaattggtgctgtgtaccctcgcaaaccaagccaagaaccagtcagatgaggcaaaagaggcttaaggggagtgggtatgagaaattagggcccagtcgagacccagatccactgaacatctgtgtctttattttgctgcttgtatttattgtagtcaaatgctttacatcagaatgatgaaaataggcttgccactttctcttattttaattccatggtagtcaatgaactggctgccactttaatataactgaaaattcattttgagaccaagcaggatcaagtttgtagaataaacactggtttcctagctatcctctgaaaacagtatgaaacatgaccaagtacataatggatttagtaataaatattgtcgaattgcta

SEQ ID NO: 9495 - DNA, 453 bp, Homo Sapiens
gcagcgggatcgtgcctagctgtgctcaccgagaaggacttggaactggagcaactgcgttctgtggccttgcatcatgggctgccaggacgcagaagtcctgtgggtggtggcggtcctggggaccagctgacacatcatcctctgatagcctgacccaagcattacaacttgcagcggccaatgagcccactttctttctgtacgctgagcaactggcccgcaagacggtggagatcacatcactgaggaagcagaagcacaggctggaggtcgaggtgcatcagctgcaggatcggctgctggaggagggcgaacggcatcgtgaggaggttgcagccctgcagagccacatcgaaaagaacatcagggaccagagcagggagggagccaatctggagtacctcaaaaacatcatctaccgcattcctgaccattacctgactccctggg

SEQ ID NO: 9496 - DNA, 348 bp, Homo Sapiens
ttacttgaaagccagtacagcactgaactgtgtcaacttatttgtgatgccttacaattatccagtccttcttcccctcttagatgacttgtttaaagtgcataaagcaaaaccaacattgaagtggagacagtcatttgaaagttatttgaagacaagtgcctccctactatcttgggcccttgaagaaagctgttaggatgatgggagcacctaacctaatagcagacagtatggaatatggacttagttacagtgtcatttcatacctcaaaaaactgagtcaacaggccaaaatagaatctgatcgagtcattggatctgtaggcaaaaaaagtagtacaggag

SEQ ID NO: 9497 - DNA, 408 bp, Homo Sapiens
ccaagcccagtcttgctacgtggcacagggcaaacctgactccctttgggcctcagtttcccctccccttcatgaaatgaaaagaatactactttttcttgttggtctagcattgctggacacaaagtgtagtcattattgttgtattgggtgatgtgtgcaaaactgcagaagctcactgcctataagaggaaataagagagaaagtggaggagagggacaaaaggagtaattatttggtatagatccacccatcccaacctttctctcctcagtccctgctcctcatgtttctggtttggtgagtcctttgtgccaccacccataatgctttcattgctgcatcctgggaagggggtatatggtctcacaagttgttgtcattgtttttttgcatgctttcttaat

SEQ ID NO: 9498 - DNA, 722 bp, Homo Sapiens
  misc_feature (47)..(47): n is a, c, g, or t
  misc_feature (432)..(446): n is a, c, g, or t
  misc_feature (512)..(528): n is a, c, g, or t
  misc_feature (559)..(573): n is a, c, g, or t
accttcctactaccagggggtgtactcccggccccatttatgaactncctcttaagaagacggacggcttcaggcccggctaaactctggcaccccggatcgaggataagtgagagagcaagtgggggtcgagactttggggagacggtgttgcagagacgcaagggagaagaaatccataacacccccaccccaacacccccaagacagcagtcttcttcacccgctgcagccgttccgtcccaaacagagggccacacagataccccacgttctatataaggaggaaaacgggaaagaatataaagttaaaaaaaagcctccggtttccactactgtgtagactcctgcttcttcaagcacctgcagattctgatttttttgttgttgttgttctcctccattgctgttgttgcagggaagtcttacttnnnnnnnnnnnnnnnttttgtgagtgactcggtgtaaaaccatgtagttttaacagaaccagagggttgtactattgtttnnnnnnnnnnnnnnnnntaatgtaagggtctgttgtaaatgaccaagnnnnnnnnnnnnnnngcattcccaatcttgacacggtgaaatccaggtctcgggtccgattaatttatggtttctgcgtgctttatttatggcttataaatgtgtattctggctgcaagggccagagttccacaaatctatattaaagtgttatacccggtttt

SEQ ID NO: 9499 - DNA, 646 bp, Homo Sapiens
  misc_feature (603)..(603): n is a, c, g, or t
  misc_feature (606)..(606): n is a, c, g, or t
gagatgcgttcttgctatgttgcccaggctgatcttgaactcctgggcttgatctgtcctcccacatcagcctcccaaaatagtgctgggattataggcatgagcaccatgcctggttctgaaattatcactgaacgttttgtaactctttgacttttctctcaaggccaaaccaccagtgatttttcaataatttttagtaacaatattcttttcccaaatgaaataatcttcagaatgcccataaataaaacaccgaccatagaaggatgaattccttacgatgttccaatcttcttctgcttggcagaaatattctgttctttgtggaactctgaaatgatttggcagagccctctggttcactggggaacagatttgaggaccatggtgtaaatgggatttagggtgccgatacagaatatgactctctcctagcacaagatgtaagaggacatgttgccatagtaagaaatggaatgctacctgctgcccactgacagggaaatgcttaaatagacacagggcacccaccgctgcctgtgttagcaacagcagcagctggcgtctagcaagggcttcctggagccatgtgctgtcccncanctttgcaggccccacctcggacccttctcccaacgacact

SEQ ID NO: 9500 - DNA, 540 bp, Homo Sapiens
tttgagttatttacatttttaatgtaattttaaaatcctggatcccaagaagtcttggcttgaatttgcttttcttcataacaaacaattctgtctcccacttgaaattccatattgtcttcatctaaactgagaccacaatccattcccgttttgacaattgaaatgtcatctttatggtgtttcaatgaggttaatgagcccttccaaattacatgtccattacgggttagtttaaaatttttttggttttctaactgtcccttttggactctgcagccagccacaggaacttttttcttcccttctgttacagagaaggtagctagtatagaggcctcacctactgggtgctcttccacagcacagggtaatctgctgctcagttcctcttgcaaatcttcaacaagacgggtaaatattttgtgaagtttaatttttactccttattttgcagctgacgttggaaaacattggctgcattccattaaaagcatatataacgcgatcaaatgtttcagcaaggttacaaccattgga

SEQ ID NO: 9501 - DNA, 1003 bp, Homo Sapiens
  misc_feature (83)..(153): n is a, c, g, or t
aaacgacaggctggtactggtctgggatgtaaggatcccgcaggcggtagcgaaggcagcagcagcggtggcgacatgagcannnnnnnnnnnnnnnnnnnnnnnnnnnnnnnnnnnnnnnnnnnnnnnnnnnnnnnnnnnnnnnnnnnnnnnagcgagacacacaagctggtggtcgtgggcggcggcggcgtgggcaagagcgcgctgaccatccagttcatccagtcctacttcgtgtctgactacgaccccactattgaggactcctacacgaagatctgcagtgtggatggcatcccagcccggctggacatcctggacaccgcgggccaggaagagttcggggccatgagagagcagtacatgcgtgctggccacggcttcctgctggtgttcgccattaacgaccggcagagtttcaacgaggtgggcaagctcttcacgcagattctgcgggtcaaggaccgcgacgacttccccgttgtgttggtcgggaacaaggcagatctggagtcacagcgccaggtcccccgatcagaagcctctgccttcggcgcctcccaccacgtggcctactttgaggcctcggccaaactgcgtctcaacgtggacgaggcttttgagcagctggtgcgggctgtccggaaataccaggaacaagagctcccaccgagccctcccagtgcccccaggaagaagggcgggggctgcccctgcgtcctcctgtagcccaggcaagagagaagcaaccaccacaagctctcgggactagctgccttcgcaccttgctgtgtgacctgaggccctcactgagcctcaattttccaggacacatcacatacccacccttacttcctggcctcttctgggctactgccactgtgtgccttctgccaacgcctcctgtccccacctaagcctggtgggggtgaggggctccgggtcactgctgtatataactcccctcccccagaaaaataaatgtcactgccaacgtcaa

SEQ ID NO: 9502 - DNA, 611 bp, Homo Sapiens
gaccgtgattccctctactacaaatattatgtcttgtaagttagcatttttagcacacaggagaaattttatgtaataaaattactgtatcttttggatttaacaaatttgtatttgaaacacattctatgtctgataattcttaatggcacttttactaatttatttggggatcttgggtacattcttaatttgtgtttattcttcacgcttgacttgcaagtgggatattcccctgccacaagtgtcaaacagtgatattcttcctgtgttgtgactggacagttttccagatcttttttgggagattttcctacagcttggttgtatgtcttgagataacaccaccaaacagctctcagaaattcttttttgattgatcagtagctatgatgattctcctccatgacactaaggattagtttatatatttaagagaaataattgctaaaattaaaatgcctctatcaaggaatgctattataaattattgttaacattctcaagtattaattttttaatttcattggtgtagcaaactctaagcccagccactcattttacatggccatggttaatctttttattaataaaaattatacttagaataa

SEQ ID NO: 9503 - DNA, 951 bp, Homo Sapiens
ggtcaagaggccgcaggaccagctgcgcttcccgcgcatgctcatgaagctggtgagcctgctcacgctgagctctgtgcactcggagcaggtcttcgccttgcggctccaggacaagaagctgccgcctctgctgtcggagatctgggacgtccacgagtgaggggctggccacccagccccacagccttgcctgaccaccctccagcagatagacgccggcaccccttcctcttcctagggtggaaggggccctgggccgagcctgtagacctatcggctctcatcccttgggataagccccagtccaggtccaggaggctccctccctgcccagcgagtcttccagaaggggtgaaagggttgcaggtcccgaccactgacccttcccggctgccctccctccccagcttacacctcaagcccagcacgcagtgcaccttgaacagagggaggggaggacccatggctctcccccctagcccgggagaccaggggccttcctcttcctctgcttttatttaataaaaactaaaaacagaaacaggaaaataaaatatgaatacaatccagcccggagctggagtgcaagatggagagggcgcgggcttctagggacctcagtgacactgggtgcccgaacctgattgagcaggtgggactgggtgtccccaggctgttgggaaaagggtggcacatagggtcccagtgttgggtggtgtgtcgcctgctgtgaaagttcaggacagaggcctcagcctcagggtcacctccctggacaaggtgaatcagaactcacccttgaaggataaacaggatttaagtgaatgaggggacctggacttctgtccgaacaacaagtgtttgctgaggcctcctgtgggccaggcactgggttggccattctagagatggagacattcacccaataaatgtttccagagcattaaa

SEQ ID NO: 9504 - DNA, 324 bp, Homo Sapiens
ctttttaattaacttgtctttcattgcacttcactctgcctgttttcaaggggagtaagattggtaacatttggggagactgtatctgtctacttagcgtggctgttttgagggactgtcccatcagtgaacaaactgcatggccttggagagagactctgggctcttggctcagatgtgttcatcaaatactcctttcagagctgttgtgggtgtaagtgacatgatgtggccaaaaatccaaactgtgcagttgcgttgtgacaaacatgcaatgtgctgtaaaaattcaatacagtttaaataaaatctctatattagtaa

SEQ ID NO: 9505 - DNA, 508 bp, Homo Sapiens
atgctgcccccttggaccctcggccttctcctgctggccacagtcagaggaaaagaggtctgctacggacaacttggctgcttttctgatgaaaaaccatgggcaggaacccttcagcgacctgtaaaattacttccctggtcccccgaggacattgacacccgctttcttctgtacacaaatgaaaatccaaacaacttccaactaatcactggcacggaaccagacaccattgaggcttcaaacttccaactggaccgcaagacacgcttcatcatccatggcttcttagacaaggcggaggacagctggccatcggacattgtgcaagaaaatgtttgaagttggagaaggtgaactgcatctgtgtggactggaggcacgggtcccgggcaaatgtacacccaagccgtgcaaaacattcgggttgttggggcggagacagctttcttaatacaagcactgtcgacgcagctagggtacagccttgaggacgtgcatgtcatcg

SEQ ID NO: 9506 - DNA, 510 bp, Homo Sapiens
tctccagtttcattcatctgtcagcacatttcttctctcccatattattccttttttgagagactcctttctgctttttagcttaaattactcttctatatatatattacatcattgcagaaatccaacagattgacattcatttaaagtattcccaataccttcataaaaatgacaggaggcccgttaactttactgaagtctcagttgtggtttttactttgaccaattattttgttttacactggggttgaatagctgtggcctaaccttgggctttttgagaaatgaatgctgtcattcatttgggtgacttgggcaaccttggaaatacatctgagcacctgttggctcatgtgggctgtgggtcaggaatgtgatcttcttgctgagggtcttatgaggccaagtaaaatgtctcaagaccccctggcccttcctgtcttgtagggttttttgtgttatagttgtactttcctctacttctccccttccttgtactatccctat

SEQ ID NO: 9507 - DNA, 161 bp, Homo Sapiens
ccacgcgtccgcccacgggtccgcaggcggatcacgaggtcaggagatcaaggctatcctggctaacatggtgaaaccgcatctctactaaaaatacaaaaaattagctgggcgtggtggcgggcgcctgtaggaggctgaggcgaaaaaatggcatgaac

SEQ ID NO: 9508 - DNA, 516 bp, Homo Sapiens
  misc_feature (43)..(43): n is a, c, g, or t
agacacaactgtggcattccatattatcatacaggaatttganaatgaatagtggatggtgtatataatctactgacactttattaacctttttaaaccaccaaggtttgagacagctgtgcttcctagctcttccctgttaagagcagtccatgttctgtctttttatcttaggcagtgccttgtgttgccttaatgccttagtacaggaaaagctccagttggatgtcagactttttaaaaagtacatgaatcagtgctgcataatttctatatggcaagtttggaggcatctgctaaagaatcagtacacgtgctgcatttggtccagagagttagcagagtgcatgatggacagtgttttgtctcaaataccatgtggatgcttggatttgatatttgtaactggaaagaagtaaatggatgagccattgatagacattctggcaactattaggaacatgaatatcaagtgatagaatcccagggaaagaaaggaagcaaactgaatgtggg

SEQ ID NO: 9509 - DNA, 464 bp, Homo Sapiens
  misc_feature (117)..(117): n is a, c, g, or t
  misc_feature (343)..(343): n is a, c, g, or t
  misc_feature (398)..(398): n is a, c, g, or t
  misc_feature (438)..(438): n is a, c, g, or t
  misc_feature (447)..(447): n is a, c, g, or t
cagactccgccgtggtcatggaggagggaagtccgggcgaggttcctgtgctggtggagcccccagggttggaggacgttgaggcagcgctaggcatggacaggcgcacggatgccntacagcaggtcgtcctcagtctccagccaggaggagaagtcgctccacgcggaggagctggttggcaggggcatccccatcgagcgagtcgtctcctcggagggtggccggccctctgtggacctctccttccagccctcgcagcccctgagcaagtccagctcctctccccgagctgcagactctgcaggacatcctcgggggaccctggggacaagggcccaangttgggccggcttgaacccctgaaggttaaaggcccggttaacaagttcaagggnaaccctggaacgggggaaaagttgcttgccttggttcggnccttcgggngaaagaaagttcggggg

SEQ ID NO: 9510 - DNA, 555 bp, Homo Sapiens
  misc_feature (161)..(219): n is a, c, g, or t
  misc_feature (408)..(470): n is a, c, g, or t
ccgccatcagcctcccaaagtgctaggattacaggtgtgagccactgcacccggccctgccccagtcttgaccattctactaattttaaagaacatcttggaattttacactcttggaatcatagtcgtagaatcctttttttgagacagagtctcactcnnnnnnnnnnnnnnnnnnnnnnnnnnnnnnnnnnnnnnnnnnnnnnnnnnnnnnnnnnnagttcaagtgattctccgtacctcagcctcctgagtagctggaattccaggctgtactcactgctttgctcatatcctcgctcattaccagggacaggccagcaccccctgcattgcatctcacatatccactgatggatggagaacagactgaaattcagtgccttagagaccacacactccaacccnnnnnnnnnnnnnnnnnnnnnnnnnnnnnnnnnnnnnnnnnnnnnnnnnnnnnnnnnnnnnnnttactgttttccccacactgtaccacaaactttcaccattcttcaggtttggaaaaatactaataaactgatcaacactaaagta

SEQ ID NO: 9511 - DNA, 147 bp, Homo Sapiens
ctgagccaccgtgcctggccatgaaaagatttttttaaaagaggatcaggtaatatcattctaaaaaatgaccaagaaagaatttttaaatttctccattatcattagaaacatcagaggaaatcaatcgtggaactttttttgttg

SEQ ID NO: 9512 - DNA, 673 bp, Homo Sapiens
  misc_feature (39)..(39): n is a, c, g, or t
  misc_feature (58)..(58): n is a, c, g, or t
accacagtgattcaacctggggagtgacagcttgcgacncatgggccaattacccacntgtgggcttggccttttcccaggctttccttcccaggcttccctggcctggagaacagtgtggattaacagttgagatcctccatcctgagcctgatccccatcccacaagaggacacaaccatcagctctccctagcaggctcctttcctcagggctgccctatcaccccctcaaacccccacaacctgcccccaggtctggttccagaaccgcagagccaagtggcggaagcgcgagcgttatgggaagatccatggaggggcggaaccccttcacggctgcctatgacatctctgtgctgccccgtactgacagccaccctcaggtaagaccccagccctacctgaaccaggacctggcagggtcaccaaaaagaatatgaggtctggcctgaagaaacctggagagcgtcagcgttctgtatggcagtgggtacaccacttcacttcttcctctgcaaaccggggctcttgcctgtctcatgaatgacgcatgcggaacaccaaggaatcacagaagaaaatttcgttttgagaacagtggcaggggcctcctgagatgccacgccagtgttgggggtgagagggggtagacctgagcaaccgggcaggct

SEQ ID NO: 9513 - DNA, 415 bp, Homo Sapiens
gcccagctcttctgaaacactgctatcttgctccttccatcttttgcttaggttttctcttcctgggctactcatcccctcaacacatacatccacactgggcatcctccacaggacttccaaaataccctggacctctctttgtactcaccccattccattaccatgatctgttttggaatctgtttctcccatttatttgtgagcccttggcagataggggtggcacatctgtgtgttgtgcacatctgtgtacatatctgtgatgaattcgttgtttggtatatgtgctgtgactgttacatttaactgtattggtatatatgttttgtatttctatcatttaatcaacatttatgtgtcagcctctaagctaaatttaacaatgtcaaaataaaaccaaccaaacaaaaca

SEQ ID NO: 9514 - DNA, 956 bp, Homo Sapiens
  misc_feature (120)..(120): n is a, c, g, or t
tacaaaaaacaattgttatttgtgtacttttaaaacctcacagtaatattttcacactaccttcttggctgaaagttcacactcggaattccagagcagtccatggccaggcccactggntccccttgctctctccttggctttggtaaccactggccccagggactcagcctgctttcctatccatcccctcagtagctgtcaccatgcaggttaccccttctgtttcttctaccactaactccatgtctgactgcaagtgaaaggaacagaagcccaaacctttgggttttaaggagtttattgctaatctgtaaaacagaaagagacaggagataagcatgacaaaatatagggaagaaatgacttttgcctaaacttccaaactgtgtacaattgaagcctctgctttatagctcttagcacacctctcaaataagaaggcagtactgggaaggctctgaacctgtggcagaaccactgatagctgtggagctattccaaggagtctgggaatcagggggattatcaagatcattgttagaataaattaatcttactgtatatatagcagaagttttcaagcatatgtaaatgctactaataaccaaataattacaccttgtttttctttaaactgtaactctcaagtatgtctctacataattttttgatggtagtgtctgcatgctcaaaaagcttgaaaacactactggagaagaaggtctcgggagtgtgatgaaatactgtttacatggcagcttcatcatttaattggtgaaagtgactatgtgtcttaaactctctgagcctcagtttgcacatccaaaagcaaggatataattccatgaaccttaccacttcaagttccacaggcagaatagcaagatgttaactgccactctgaggaccaccaaataaaaggacaatttattaggccactgtcgagcatgtag

SEQ ID NO: 9515 - DNA, 348 bp, Homo Sapiens
cataagtgattgcagaattttgttcttctcataatttctggtttagaaaattatggagccttacatcctgatcatgctgggccttagaattctgacacagtgagtcatcacatttcctcccactcctgtggccttgttccaccatgactctcacagtacagtgtaggcttagtgtagtattattcccttggaaagggtctggcctaccatcacatgccccaagaaacttctggttggtaaagaagataggctgcttattgccatgtgtagtcacttccaagtgcccactgcctttccatcctgcaattgtggcctgtgtataattaaatgattttagcctcaaaaaaa

SEQ ID NO: 9516 - DNA, 848 bp, Homo Sapiens
  misc_feature (212)..(212): n is a, c, g, or t
  misc_feature (259)..(259): n is a, c, g, or t
gagaacatctggagcaccctgcgtttggcattgtctatgttaggccagagcgatgcctatggggcagccgacgcgcgggatctgtccaccctcctaactatgtttggcctgccccagtgacagtgggacgggctgccctgtgagtgtccacctggagggatccccgctttggatgtgattccctctccccaaatgggcctaccaagggggcngggctgatgaccataagcggtacggcctttcaggagctgcctcaacngtaggggtgggtagtctgtgttctaagttccgtacataatttgtaggaaaatgagctgtgtcatctctgagtcccttggtaattcaagggctgtacatccagctacagatctctctgctcatcatgccctttcttggtgctgctttttgggtaggaccccacgatttagggtaactgttatcatcagctgccatttctgatagggtctaccacatctgtaatgtctgtcctttcccccacttttactgggaattgatagtccagcttccttgggcagtgtaagtaggaggttcatctgctgtgcgcctctaatgtctgtctggctgggatgtgttcaggagttggcctgttgggttgaattgttgatttggctgagcagagctgagtttcggtaggagtgctcatggttctgtcattcttggacctctcctggctgagctctgattccctgtgagcacgatgctgatgcaatagtcctgtgtcatcactgcagcggtcctcaggagctgccagggccaattgctacagagtgtctgggtgtgtggcataggaggaaggtttgcttgtgaaatgaggctgggtgggagcg

SEQ ID NO: 9517 - DNA, 467 bp, Homo Sapiens
  misc_feature (154)..(210): n is a, c, g, or t
attccaatataatttcctgagagagaaaggagttccatgcagggagttatacataaaccacagcctacttttatggccattttgaattacttttgtatttcaaattcactttttaaaacttcacccatggggcgggaggattgcttgagcccannnnnnnnnnnnnnnnnnnnnnnnnnnnnnnnnnnnnnnnnnnnnnnnnnnnnnnnnaagcaagacccccatctctaaaaaaatcaataaataaaggaaacttcacccatacccacagaagagaaaattgtgaatgagtgcatcaacatctacagtacacaaaaacagtagtctctgaacattgttagtagggtcctaacagttatgatagccaagtgaaaactctcaaaggaaagtgaaaatattccttatatcaataacatggagggaatctaccaattttatgtttttaacaataaattttatgccttttc

SEQ ID NO: 9518 - DNA, 1178 bp, Homo Sapiens
ctgctgaggtgtggccagtgagtctgggtgtgagctgccacctgacagccagctctgaggtatcaaaggagctccgagtgcaagttgaagacttcagcaagccagccccgggcccccacacccgttcataggcagtcggaatgcagatctcggtggcaggtggctctgcacagtccagagtgataaaacaatcacagatgactaaatgccagggactgtgtgaagtcagttactgcctgcagtctgggtcactctgcccttcatcagacactggtggcaccatgacagtgaggagaacggagcacagttccttccgtgcctcctgccggcgctgctcaaggtgtgcatggctgagtcctggacaagcattttgtatttttgtagttctcactccttaggcccaatttcaagttaagtcgttaactcatttagaatgaatattaaggatactgcctctaacatatcaatagctgtgctgagctgtctaggaagagaaattagtccagagaggtcctaagtatcaaagcagattttgtaaagaaaaaaggcaacacgtcagtgagaaaagcagcacaagatccgggctcggggactcttttccctctttccgaaacataactggttttgtatgtgctctgagtcctagtttttatgtcttggctgagaaccacagaaaggactagatattcatacatgcgagagcacactgagactgcatgtttatttggcataatgctagaaaaaagtccgcaaagaactgccagaaccaggcctgtgaccaagtttacagtcatctagtttctctcacaatttcaaaatgtcagatcagaagaatctttggcgattaatccactctccattttatgcgtgagaaaaccaaggccctgatggtgtccctggtccaagtccagtgcctttcacaatgaggcttttggctcttaccctctgaagtggggcagtggctcactgtgaggggagagggtcagatcttgttagtttgatcttaaggcactcacaaaatgccctgatttttcttgtctttgtgagaagacaaaaaacagtctggtagtttttcacatcatcgtgggaacccagaaatatatgtacagtactcagaatttaagggaatggaagaaagaagaaaatgagattctcttttgtgagtacagaattagaag

SEQ ID NO: 9519 - DNA, 487 bp, Homo Sapiens
gtgagggcacagctctgagctgctgggcttctcagcagtgccaggtgggtcacattgaggaggggatctgggcagacttcacagtgtccattcctctggtttgctctgttgggaatcacaggctgccacacagcctgggggccaggacctcagcagaactgggcagtagttctggggcctgatccagacagttggtctaaggacttgccctgtccccaccatatgaccatccaggggtaggacagtggacagaggttgcctctgtctgtctttccacccaagccttcattctctaactcacacaacagccccaagtcaccagatgattctggcccttccaggccatatttatgcctgatgtatcttctgtagagactcctggagggggctggagggaagggcaacctgaaaggctcagatccaggtgaactgggccagattcactcatggctttatcaacaggcttcccgagaatggagcaagaggg

SEQ ID NO: 9520 - DNA, 517 bp, Homo Sapiens
cgactcagcaaggaggagacgctgcgcgccgccatccgctacataaagtacctgcaagagctgctgagctcggcccccgacggctcgacgccccccgcttcccgcggcctcccgggcaccgggccctgccccgcgccgcccgccaccccccgtcccgaccgccctggcgacggcgaggcccgggcgccctcctccctggtgccggagtcatccgagtcctcctgcttctccccgtcgcctttcttggagtcggaggaatcctggcattgatcgggcctgtggccgcccccggcttggaggatgatccgccggccccgtcccactttcgggagcagcgggaggctgttgggtcacccgcgatgcgccgcaggacggtgactgtaggaggtccgcggcgctcccgtgtctgcgacaccctccctcctccaccagcttggggcggaagtgcagggcagcgggtacgatgggcacgatagagacctaggagctccgtgggtgaagcgaggggcagggcctg

SEQ ID NO: 9521 - DNA, 786 bp, Homo Sapiens
ctcaacacagatgaacctcaaaaacctcacagcaggtgtgaaagactacctatggtatgacttcacttatatgaagcgtccggaagaaagttgggaatccacgtgttgaacttaccctctcagagctccaagatatggcagctaggcaacagcagcagattgaaaatcagcagcagatgttggttgccaaggaacagcgtttacattttctaaagcaacaggagcgccgtcagcagcagtctatttctgaaaatgaaaagcttcagaaattgaaagaacgagttgaagcccaggagaacaagctgaagaaaattcgtgcaatgagaggacaagtcgactacagcaaaatcatgaacggcaatctgtctgctgaaatagaaaggttcagtgccatgttccaggaaaagaagcaggaagtacagactgcaattttaagggttgatcagcttagtcagcaattggaagatttaaagaaaggaaaactgaatgggttccagtcttacaatggcaaattgacgggaccagcggcggtggagttaaaaagactgtaccaagaactacagattcgtaaccaacttaaccaggaacaaaattcaaaacttcagcagcagaaggaactcttagataagcgcaacatggaggtggccatgatggacaagcgaatcagtgaactgcgtgaacgtctctagtgggaaaaaaattcagctgaaccgtgtgaatggcacgtcatcaccacagtcccctctgagcacatcgggcaggtcgctgctgtgggccttatatcca

SEQ ID NO: 9522 - DNA, 524 bp, Homo Sapiens
caccactattcgcagctcacacagtttacctggagaccacactcgactcttgccagtgcaaactgcccccctcggagccgctcagcaggacctttgtttaccgggatgtgacggactgtaccagcgtcactggcactttcaaactgttcttactcatccagatgattcttaatttggtctgcggccttgtgtgcttgttggcctgctttgtgatgtggaaacataggtaccaggtcttctatgtgggtgtcaggatatgctccctcacggcttccgaaggcccccagcaaaagatctaacattcttgctcaaagttgcgagagaaagtagcacatggagtaggctgcactgtcggtgttaagagaaattactctcacaagagcagaggcctgaagattctttcttctgtggagcaaatgaatacagtgactcgtctgtgagctgaggcttgagcaattccagcccaggaggctctccggcctgggaacagagtgggattttttgtctgaggaggctgagtctgg

SEQ ID NO: 9523 - DNA, 717 bp, Homo Sapiens
tgcagtactataggcggtctatggtagcgaggcctgggtggcgaattcggcacgaggcacccttcccgatgcagtccctgatgcaggctcccctcctgatcgccctgggcttgcttctcgcggcccctgcgcaagcccacctgaaaaagccatcccagctcagtagcttttcctgggataactgtgatgaagggaaggaccctgcggtgatcagaagcctgactctggagcctgaccccatcatcgttcctggaaatgtgaccctcagtgtcatgggcagcaccagtgtccccctgagttctcctctgaaggtggatttagttttggagaaggaggtggctggcctctggatcaagatcccatgcacagactacattggcagctgtaccttatgaacacttctagtgatggtgcttgacaattgcttaacacttttccccttaacttggggggaaggacccacttggccgccaagaaagccaccacgttgacggtaaaccataattgggagcttttcacgtttgacccaaccttgggttcccccgttttccacaccagaaagggaaacgctacactccaccttgtcccccaagaatgcggacattttcaggtataggttgccctgaacccattgggatggccttgccgcaaggatttgggacgtcaacccagccctgagtgaaacataacccggcagttaggatgaaggcggttccg

SEQ ID NO: 9524 - DNA, 522 bp, Homo Sapiens
cctgggcgtgtgctatggccagagctaccagatgggtccagctgccgcaggctctccaggcactgtcccctaagtgacagctgttactgcctgggagagctcaagtgcaaagactatcctgttctcccataaagaggaggaaaaggaagatacagaaatcggtgctgctcccaacagcagatcaaggcagtcgtcaggaactcaggatccggggggtcttcacggcttctctgcccaggggccagaaccgaggaggccaggagggctgcctggggctaaggggtctaaggacctcgttgcacacgctaccaggagcaggggcatggagcacaagtgaagggggctcccggagacccaagccggtactgtggtaccccaaggaactgcttggaagagatgcttttggttttttccgttgtggaagatgcatctccctggaatcattccatccttgccctggcagctgtggtggtcattataagcatggtcctcctgggaagaagcatccaggcaaccagatcg

SEQ ID NO: 9525 - DNA, 670 bp, Homo Sapiens
ctagtaagaaggctgccacaacttcgtttcctttggaggactgagaccttcccaccttagcaagagctttccatgttgaggtttgcagtgagagtcacattacccagagaactgaggggactgcagttatgcccttgcagatacgggaacacgagggctgaattaatgagccagagccatagacaatactgccaaaaagtcccaagttcccccgagcaaatacccaggaaggatttgtctggatatcaccttcacctcctacttagaacagggttgccctgaaagtccctccacccatcgcaggagaagaccttggagagtggctagcagaattcaggcaaattctttgtttctgcattctatttgagcagcctggccacaggccaaggaaaactctcttggagaatagacattacctgtggagaatgatttgagaaactctgatccaggaatatccaacactacagtggcatcctggggtccctactaaccggtcccctattaatctacctgccctgatttcttaccatcctctccctcactcactctgctccagccactctggccttcctcaaaaacagacagacttctaccttgaggcttttacatttgcctagaactctctagctgctcgttacctgcgacctatgagggatcctctagatcaccg

SEQ ID NO: 9526 - DNA, 583 bp, Homo Sapiens
  misc_feature (297)..(297): n is a, c, g, or t
cttgacccccaatccaaccccttcagaccttttcctgggaactctacttccaaccgcagtccccaagcaaggcccgccctttcccaggctgcaccctctttcaaaagcgggggtcccagcctctccatccttcaggtccccgtgtttcactccagattgcccgcagcggcctcgaggtgcaggaaataaccctgcagaggtgggagccagctcctagtgtacaagggtcaggcggcacttaggtgagtagaacgggccaggctggggcccttggtgactggggaggcagtgtcccanggtacgtgttgccaccgaatgagccggcgtagccaggtggtcattcttcaagagaagctgtggatctggacttctatgtgaaatctaccaatttttaaaggttggctcagggtataaaccacccaggccaaagaaaacatgtcggctgggtggggccgggccaggggccccagtcagagagttctgctgaggccccgccgtggacaggacctcggaaatggtgggcgtaagccagtggttttcaaagtcatcattccatttgctccagttggctttcactgccatg

SEQ ID NO: 9527 - DNA, 466 bp, Homo Sapiens
  misc_feature (29)..(29): n is a, c, g, or t
ttcctttaagaccaaagagaattccgtgnggaatgggggggaaagccacggtccccgtctgacagtgccgctgccatattcaggtgtaagctaattgctctggtgtgggaatgcaggcctaatgacagaaatcttggagaagccagaaatacagatttgtatgtgagatgtcctgattttttaagttgttggcagaaattaattcagaaatcaaatctgcaggccaaacaaggtgcaggacccagctttggccccatgcccctgtaagtcctctgggacagtcaccgctggggtcctggctgctctgtcattgagggatgctgggcactgctgccgggtggccagggtatgggcatgtgcccagcaatgtggctccttgccccgctggccagtgtcctgggcccctgacaggcgctggctgtgagtggtttgtacatgctacaataaatgcagctggcagcattga

SEQ ID NO: 9528 - DNA, 164 bp, Homo Sapiens
gccgtgttaggaaattatttattaatttacaagacaggttttaactcagccgaggtgggaaatggtgtccctgtccctcccaaagcacagagcacagaaatgaggccgtttacatggcgagtctccgtgctggtgtttaagtcattaaaaagatactcaaagag

SEQ ID NO: 9529 - DNA, 654 bp, Homo Sapiens
  misc_feature (414)..(515): n is a, c, g, or t
  misc_feature (517)..(530): n is a, c, g, or t
ttcccgccctctactgacaggattggtctttctggtggctggccttatgctgggctctcaggtccccacctcagccactgcagtgaatcaactcaggtgtgatggaaaggggcatcttatgatagcacaagatgcttctatcagtcaggaaattcccagggttctgtgagctctgcgccaggaactgggcacaaaacccaaatctgagtcttgtatcacagtcacccaaaggaagtactatcctcagctcttgctagcaggtcaggagcctgttgtgtaggaactgtgtgcaggcctccagaggtggatagatctgaaatccggagtggtcagggttgggacagctgcccttaattcacatccttccattttggagattgaaaggaaaaacagactggatgcattggctcaccnnnnnnnnnnnnnnnnnnnnnnnnnnnnnnnnnnnnnnnnnnnnnnnnnnnnnnnnnnnnnnnnnnnnnnnnnnnnnnnnnnnnnnnnnnnnnnnnnnnnnntnnnnnnnnnnnnnntgagccagccatggtggcacacgcctgtaatcccagcagcttgggaggatctgaggcgggaggatcatttgagcccaggagatcaaggctgcagtgagccatgatcgcacccactgcactgcag

SEQ ID NO: 9530 - DNA, 262 bp, Homo Sapiens
  misc_feature (128)..(128): n is a, c, g, or t
ttaaggagttcacaagaaactgatctttactcaacaaagttctacacaagtggaatctcacgccacctcggcgccaatccccagcacagcacagtaacaaatggacagacccgggagcccgcaggganagagggtgaggagggaaagagggactgtggctcaaggccagtctgggtccacagccctgggtaggggagaaggttgagaagctgaaacttcattgtgcaaaaaacaagcaaaaataaattaaaaaattaaatag

SEQ ID NO: 9531 - DNA, 464 bp, Homo Sapiens
  misc_feature (416)..(416): n is a, c, g, or t
gccatcttggctttgagtagcagtgttcctcgtcacccatttccccctcaggattacaacacctgctatcaaatcatctaagctgaaaacatgagatgcgcttggaaaggcctagtcagaagccatttcctcttatcatttccctctcctatgcaccagtaaggcccgtccagagccccagcagggagtgggccctgagtccacactgtccctgagtgatccaggaggctgcccacatccccacatgtgcactgtggttccagtgtagctgctgtgagcccactgccactgcctcagaagggagccactgtgaacctctcgagtggctccaaagagcagtggctttttgagaatggcccatacttctggcccggctggatgaagggaatgccgaccctttggcctctccccctccntccatctcttctctctcttgccctatctctctttctacttcagaaaaa

SEQ ID NO: 9532 - DNA, 578 bp, Homo Sapiens
gaccagcgcggacggcggcgacggaggagagcagctcctcactgtcaagcacgagctgcggactgctaatttgacaggacatgctgagaaggtgggaatagaaaattttgagctcctgaaggtcctaggaactggagcttatggaaaagtatttctagttcgtaaaataagtggccatgatactggaaagctgtatgccatgaaagttttgaaaaaggcaacaatcgttcaaaaggccaaaaccacagagcatacaaggacagaacgacaagtcctggaacacattaggcagtcgcaatttttggtaacattacattatgctttccagacagaaaccaaacttcatctcattttagattatataaatggtggtgaactttttactcatctttctcaaagagagcgtttcacagagcatgaggtgcagatttatgttggagagattgtgcttgccctccgaacatctccacaagttggggattatatatccgtgatattaagcttgagaatattctacttgattctaatggccatgtgggtgctgacagatttttggtctgagtaaggagtttgtggct

SEQ ID NO: 9533 - DNA, 431 bp, Homo Sapiens
  misc_feature (43)..(43): n is a, c, g, or t
  misc_feature (328)..(328): n is a, c, g, or t
tgagagggcccggggagacagggtagtggtgagggactgcttngaagatgcttacactggtaggtttgaagacagaggatggggccacggagcttaaggaatgcagagagcctttggaagctggaaatggcaataaaatgaactcactcccctagagcaggggcttccgatcttttggctcccctgagccacactggaagaagacgactgtcttgggccacacataaaatacaataacactaacgacagcagatgaactaaaagaaaaatatataatgttttaagagtttacaaatttgtgtcgggccacattcaaagcagtcctggnccgtatggccgcaggctggaaaagcttgccctagagcttccagaagcaatgcagccctggagatcctttttattttaattaatctatttatttatgtatttac

SEQ ID NO: 9534 - DNA, 524 bp, Homo Sapiens
  misc_feature (166)..(166): n is a, c, g, or t
ctaggcttagaggaaaagatgtcagattgtactgtcactggctatgtacccatattctctaagacagggtagcatttgtctttcaaactgcagggtttgaaatcagtttttgtgggtgattgcaattttttaatgaaatgcattagaacatctaagcacgtcaccntacagttttgtgatggtgcatttttgcattgcagtatagatctgtgcatagatatatgcattaagtgtagcaaatccgtgatgtaaattttttactgctggtcatggtccaaaaagtaagatacccctaggaaattgagtcacttaggagcatggatgtataaggcaggttttatagaaccatttagattcaaccattaatggtagagtggcattttaccaaaaaaatggggggtatttgatttgggtgctgtaaggcaatttgctaggacatgggataatcagattacacaaaatctaggcagtgaacaagtcttcatcctggcccaggaaatagcctattaaaaaatgctgtccag

SEQ ID NO: 9535 - DNA, 368 bp, Homo Sapiens
cccggggccttcaatttacgttctttacactacggggactggggtcgtctttgcccacgtcccgacaacttgttccctgaccccctcagggatggccccaaactgtccctgcctctggcaccccctttcattggttccatccatccccacaacagcctgccaatcgaagcccgtccctgcatccaggatggtaccagctcccgcccctcgccccccacctccacaggtgccttaaagggccctcgtccacccaaggtggggggcaggggccctcactctccggccctggtgtgggggaaagagtgaggggttgggggatcggcagttgggaggggcgctctgagattaaagagttttacctctgagat

SEQ ID NO: 9536 - DNA, 1120 bp, Homo Sapiens
  misc_feature (43)..(56): n is a, c, g, or t
  misc_feature (98)..(107): n is a, c, g, or t
aatgcctgaacacatctttgacctgttcaaattaggactgagnnnnnnnnnnnnnntactttgttgaatcaactgtcctagccccactgcaaagaggnnnnnnnnnntcggtcagtggcatatttcccactgaaattatgtccccaagtagcatgctagaattcttccagcaggtacaccacacaatggtgacacagcctaatgtgtggtcagtgtgtgccacgttttctgcactatacccaggtttgatggcttgatgttaacttctgaaaatgtagctacagtgttcttcattataaacagaaacagaaaagaattactcctaataattcctgtatcaaactgtaactttatgaatataaatttagaaatgaacagatggcaagcatgaatattttcccgaagcgttctagtgcaaaatgcattagcactactgacattttcttcctatgccctgctcccagattaaaaacttaacacttacatgctcaccactagcagaaagggatttccagggaccagaatctcagagaaaaggagggttcattcaaacataactggtgctgaatccttgcagctgaaaattatcttgcaagtatatatgctggcccttcatttaaaatgaacttgcagtttattaaaagcgatcaaagagctctggaatcttattttcaagaaccagaatatggcacacattttaaatttggacagacttctagcggacagttacttctcaagaattttctatacaaaagctgtgccaggcatatattttctcaccaggacacatggggcagcggacccctggtgtcagtaagaacacacccagaatgatataaccagatatttttcagtttctaaattaaggcatattcaaaaaattccatgtacaagtttacaccacttttctaagttactcaccaggtaattaaagcagattcacagatgaattactctcagtttaactatatgcaacaaccatgccaataacttttcttctaaattttgcataataatggttaaaaaaagtggtagtttaactatcatgttcacaattgtcatttttcaaggcagtagaagaccaagacattttaaaatgatataaaatttaagctttata

SEQ ID NO: 9537 - DNA, 490 bp, Homo Sapiens
tatatcaaatcgttgtggaaggtgattaaaaatcaaaattcttttaaatatcaacttaattttttctaagtaagatacaaaaaattttcatctaaagtaatatttcactttatattgtaaagaaggtaggtatattggtggctgaggtctcttgaaattgctaaagggaaatttttctatggtaatgctcttacggatataaacctcagttaaatggaattatctatgggatgtgtggttctggttaactaaaaattaaccagtaaacactctgtagtaaccattacagaaaatacttctgccttaaaaaatatgatatgccagagatgagttagtgtttcttgacgttggagaccttttaaatgcctcatctgttgtactgaacaattgaaactgcatgcagccataaaagggacaagaaacagaactgtttactaactttgggacatcccctggagtttttaaaaataaataaatatatattattata

SEQ ID NO: 9538 - DNA, 376 bp, Homo Sapiens
tggtcgcaagtccctgaggcgggcagcaccaccttgcagagacataattgaggccaaccggaggtggctggaacgtgtcaagaatgaccccaggttacctctcttctcttcaacacccaagccaaaagctactttgagcctcctgcagctgggccttgatgagcacaacagagtgaaggtgtatcgcttctgaggccctgagcaggggcttggggcagcccagcctctcctccacccagaccaagtgcctgaggagctgcctgccttcttccatctgagaaagcaccctccttccccctttgacttgcaggagccaccagggaccagggggttgagtggaacagtaaagccacacattctgtgactatataaccta

SEQ ID NO: 9539 - DNA, 310 bp, Homo Sapiens
tttatatcttctgactgagctctccctgattgacatcacctcatgcgatgacctccctcattctgtgctgcctcagcacttatcttttgagtttgtactgtggtccatgtacttactaatatgttgctttgtaattattttctagcactctgtgttacagtttcatatttgtatttatttccaaaattaaattgtaagctccttgagggcaggaataataacttttacatttgtatctctgcacccccgagtgcctagtatagtgctgagcacatagtaggcgtttaataaatgcttgttgaagtaaaaa

SEQ ID NO: 9540 - DNA, 237 bp, Homo Sapiens
ccctccccacctcccaccccccaccctgtaaactaggcggctgcagcaagcagaccttcgcatcaacacagcagacaccaaaaaccagtgagagccccgctctctaccgcccggccccagcactcgctagctttcctgacacctggaactgtgcacctggcaccaagcggaaaataaactccaagcagccagtagccccgatggtgtgtgcctgagctgtgtggcccgaggttccat

SEQ ID NO: 9541 - DNA, 969 bp, Homo Sapiens
  misc_feature (769)..(769): n is a, c, g, or t
accagctgcccctccttccacaagtactcaagcctgtttgtaaatactgaaggaattgatggggttgaggaaaggaggtgcatgtgaccagggtcccaaggccacagcttttcagatcctaggaagcaagtggcatttgcttgagttgtggcctcggaaggagaatgtttatctgttttctaactttgctgacaccaggattctccctgtcattgagaagaaagcattatctaattaccttcaggtggtttacttattctgtaaagaatatgtgtaaatattttgtacagagccctgtatcaaataaacagccatatgtggttactaatcacctcttctgtcattccgtccttggccaccgctcagtgggaatggtctctgatctggatgctcccaccttccatgtcaggcccagaactgtgccatggtctgtggactcctggtcagccttgactggctaggagaccttgggcagtacctacagtcttgctgtttctgtttcatctgcaagaattatgacccacacactccagctgcagcccagggcactgtgatattttatacgtgtgtagatgtttttgtccacagttcctggttcatcactcccataaccctttgttataatgttgggacactgcaggcctcagaaaacggaatctctgtctgtgaccttctcctgccccattcacttgctcaacaccagacttttatctgactgtagctcataaagaccctcatcccagagagggtgctgccccatacccggaanggagaacgctgcacagaagaggccagaagcatctggacagacagggccttgctgggtttagaccttatgctttttgtccagtttcatctcaacacagctggcatgcttcagccatggcctatccatgacgtcctcactaaagggcccaggaacaccggaactttcttgaaaactggaactggtgggaggaaggggaaaca

SEQ ID NO: 9542 - DNA, 526 bp, Homo Sapiens
ggcacccagcatcatgaagccaagaaaggtgggcctcgacctgtgactcacacccagtggacagtgctgagcacggggtcagggctggagggcacaggcagagggcagctcccaggctggctggcaccccaagggaagagctggtctccctcagaagccccttcctccacagacttctgatcatctccctcttctcccctcctttcacaccgaggctcctgctctcctgtgcctccgaggcccccagctggaagtgccttgttgcctctgccctttgaagtcggaacaattcctagcacctgtcggaaggtcaaggccaaaggcaaattcaaggccagactgtgacaaacccagggctgaggcctgccccatgaagaggctgagccccctgaaacccctgccccttgttggtacattccagaggcgcaggggcctgggggatatgaagctagggaagcccctgcttcgattccccactgcccttgtcctggatccaacaccaaataaaaagaaacaagtgaagtaa

SEQ ID NO: 9543 - DNA, 442 bp, Homo Sapiens
gcggccgcacacaggaagaacaggatgcccttgggcgtgttgaggacctgcaggcacggcggtgcgaaggcccaccagccgcacgccacgctctgcccggccgagatgtaccgcacctcatgggtcccctgggcgccatgcttctcggcccagagctggcagaggggctgcttgctggtgtccagggggctatgggcagcggagcggagggagccggggctcaggggtgtgcccggggatgccctcctgctgggtggggtgtggtcaagcccgttttccatggctgagttggggctggggaaggtgagcggcttgtcccccagctgatgcaggggcatctccgcgcctccgcctggtgacctcgaggcttcagccacgcagtgggagtggcctcagcgggagtggccaagtggtatctgaggggctggtgtgtccgtccccg

SEQ ID NO: 9544 - DNA, 416 bp, Homo Sapiens
  misc_feature (260)..(260): n is a, c, g, or t
caggaggaggaggggcctggaaaagtgtagtgggtgccactgaaagattcctaagcaggagaggaaggtgatgtgatttaagaggacagtggctgttgtgtggaggacagatcggagagaagcaaaaggaaacgggaagacttaatggacagaggctactgtagtcctgaactgagacaagactgccttggccagtggagatggagaaaaacagtaaaagatacctgggagtagtagaaacagttaagttccagatcacngcatgcccgttgcgcggcaccctggccaaagagggacagctccccaagcgcagggactcagcttcctgtgcactgtcatgacgcactgcctgacccaggggtgcagtaagtccctgctgactggatgtctgaatgcagcacttgcagaactttgtc

SEQ ID NO: 9545 - DNA, 690 bp, Homo Sapiens
cggatgtcgagcagcatctccggcctgtacccagtagatgccacccagttgtgacaattaaaagtgtcttgagactttatcatgtgtcttctgccctaggtgagaacccttgcactagaggaaccctacaccccaaccctggggggaatgtagggaagaggtggccaagccaaccgtggggttagctctaattattaagatatgcattataaataaataccaaaaaaattgtctctggcaatagttaccttcccagatacaggtccccccttttttcccctaactcttttaagcaatgattgtaactattaggagacattgctctcccacggtatgtttttctttttagacaatgcagacaccaggaagttgtggagctaggatccatcctattgtcaatgagatgttctcatccagaagccatagaatcctgaataataattctaaaagaaacttctagagatcatctggcaatccgcttttaaagactcggctcaccgtgagaaaagagtcactcacatccattcttcccttgacggtccctattcctccttccccttgcttcttggacttcttgaaatcaatcaagactgcaaaccctttcataaagtcttgccttgctgaactccctctctgcaggcagcctgcctttaaaaatagttgctgacatccttccatgtgatgaggcgc

SEQ ID NO: 9546 - DNA, 508 bp, Homo Sapiens
tatattccagtaaaactttatttagataaataaggagctagacagattttgcccatggaccatagtttgatcatggccaacctatgatctaaaccaaagtccctaggcaagttgcaatagaaaagttgtgtgagacagtgagattttgcctttgttattcaatggcaagctagcccatgctgacacagaaattgggcccttgtttgttaaaatgcgaaaatactgtaacactggcttaatggttagctggcaggcattcaggaaatggctatcagaagatggaagaaataacttacacaagggtaattgatatcatggaaaggtcaaactgccccgtgagataacctgaaaggcagatcatctaccctttactaaagaagaaagacagaaaaacaaaatatttcgtagttgctggttcactgcacttggacaaaacgtacagaagagatgaactcagaagagactggtcagttcgctggcaaatgtgaaaaggaagagaattcaaatt

SEQ ID NO: 9547 - DNA, 701 bp, Homo Sapiens
cgtctgtggcttggaacctgcccttcgccaaggcactggggggttaaggagcagatccctcaagacggccttgggccagaagctcccttggagagctgggcacctcgaggagcgtctgggagcctcaccctgtcccagtggctcctggcacccctgggagcgtcagcaccaccccaaagctgggtgcctgtgtcgccactaaacagaagggaaaccgaggcaggggggccggctggcagtggagcattctggcagcgccgggcgaccaagtcccgactggcagcggctggagtttggttttcagaagcgaaggctggcgttggcacacagggaaggctgcccgatgacgtgcctcgactgtgttacatttactgaaggagagcggcctcctgggcacgccactcaggcacggtgaggctctgtggcaccaccagccgcatggcagggcagagagtggcgccgtcctgcatgccccccacagcagaccagagtcccgtcctcacgctgcacagtgggtgatgtgagtttcaaaactacgcctccagaccgagaaaccctcccagctgtcagcaagccgtggcgccgagctgccgggcacctgctggctgctctccagtctcaaggagctgggacagcgggcacggggaggagctggcctcgagcccaaaggtcgtagggagccaggcagggcccaggagcgc

SEQ ID NO: 9548 - DNA, 383 bp, Homo Sapiens
ggtgagctcccaaacaagtctgaaacccagaaagcaaactgaagactttcccatattctttagatatgtagatacttgtagacctgtcctccactattcattttcacaggtattcggaaggttgtgtgataaatgaaagctttcccacattctttacgtaaggtttatctccattatgagctctttcatgtctttgaaaggaactggaataactgaacgtttttccacattgcttacattcataggggtttttctccggtatgagttctttcatgtattctaatggaactggcataattgaatgctttcccacattctttacattcatagggtttttctccagtatgagttctttcatgtgttcggacagaactaggacagtc

SEQ ID NO: 9549 - DNA, 500 bp, Homo Sapiens
  misc_feature (12)..(12): n is a, c, g, or t
caggatgcacgnatgtattgcaagtcagttggctacccccacccagactggatatggcgcaagaaggagaacgggatgcccatggacattgtcaatacctctggccgcttcttcatcatcaacaaggaaaattacactgagttgaacattgtgaacctgcagatcacggaagaccctggcgagtatgaatgtaatgccaccaacgccattggctccgcctctgttgtcactgtcctcagggtgcggagcacctggccccactctggcctttcttgggaattctggctgaaattatcatccttgtggtgatcattgttgtgtatgagaagaggaagaggccagatgaggttcctgacgatgatgaaccagctggaccaatgaaaaccaactctaccaacaatcacaaagataaaaacttgcgccagagaaacacaaattaagtactgcttacaatatctttaggttcctgaaactggtggcacatgacctgctaaatttct

SEQ ID NO: 9550 - DNA, 404 bp, Homo Sapiens
gcggcagtcgctacttgcctagtagcctcagccgctgtgggctcctggggagatggaggggccggggctgggctcgcagtgcaggaatcacagccatggcccccaccctccaggatttggtcgatatggcatctgtgcacatgaaaacaaagaacttgccaatgcaagagaagctcttcctcttatagaggactctagtaactgtgacattgtcaaagctactcaatacggaatttttgaacgatgtaaagagttggtagaagcaggatatgatgtcaggcaaccagataaagaaaatgtgtcgcttcttcattgggctgctattcaacaacagactggatcttgtaaggttttatatttcaaaaggtgctgttgtagcatcagttgggtggggataccagggg

SEQ ID NO: 9551 - DNA, 763 bp, Homo Sapiens
  misc_feature (34)..(34): n is a, c, g, or t
  misc_feature (345)..(345): n is a, c, g, or t
  misc_feature (476)..(476): n is a, c, g, or t
ttcctcactgatagctgatcacattaaacaggtnaaggtgctaagaaagtttaagactgatcttttggcaatgacagtttaggttaactctgtttggaattcctaaaaataaaaagaaatcccttaaaaaaggctgacaaactgaccacttggccttgaatcgactgttagggtcacacctgccaatgccaggggacatgacaaaaaaatagagaatgccaagataaaaagttcactgcattcaatttggcctaatttcttgataatagtttcctattagattttcccgattaatactgatggctcttacctaggctgtgataattaggttttgatctattgtgnccttaatgatcacaatccagttgactttgaaaattgtcttaattaatggctctttccttgtcagcttttgcctccagtgcaggattcattcccttccccactgccttggtttaactccctctcttactganccccagaaacaaatagcattggaggatcactttcttcccataaaacaagactttaaactattttaaaacatttctcttgacagaggagcaatatgagatgatgttagatgaaatgaggatcagaatgaaaaggcaagagaacaagctgtcaatgaacaggaaaaattccatcttagaaaacaaccaaagtcaagcacaatgttaaagtgacaagttgaagtaactctaaaaagacaagatgaggtagattaaaatccaagaaagtcagcacaagctaaaagaaacca

SEQ ID NO: 9552 - DNA, 502 bp, Homo Sapiens
  misc_feature (348)..(348): n is a, c, g, or t
  misc_feature (414)..(414): n is a, c, g, or t
tggtccacctcctcctcaagtcgtgcagatgtatggccgtaaagtgggttttgccctagatcttccccctcgtaggcgagatgaagacatgttatatagtcctgaacttgcccagcgaggtcatgatgatgatgtttctagcaccagtgaagatgatggctatcctgaggacatggatcaagataagcatgatgacagtactgatgacagtgacaccgacaaatcagatggagaaagtgacggggatgaaattgtgcaccgtgataatggtgagagagacaacaattgaagaaaaagaagtcaggtctgaagtgtacggtttgcagatatgcctggaaaatcaaggangaaaaagaagaacatgaaggaactgactcctcttcaagccatgatgcttcgtatggcaggtcaagnaatccctgaggagggacgggaagtaagaggaattttcagaggacgatgatgaagatgattctgatgactctgaagcagaaaagcaatc

SEQ ID NO: 9553 - DNA, 659 bp, Homo Sapiens
  misc_feature (36)..(36): n is a, c, g, or t
  misc_feature (401)..(410): n is a, c, g, or t
  misc_feature (418)..(535): n is a, c, g, or t
gacttggagggttggtcctcttgcctcctggaaaanacaaaaacaaaaaactgcagtgaaagacaagctgcaaatcagccatgtgctgcgtgcctgtggaatctggagtgaggggtaaaagctgatctggtttgactccgctggaggtggggcctggagcaggccttgcgctgttgcgtaactggctgtgttctggtgaggccttgctcccaaccccacacgctcctccctctgaggctgtaggactcgcagtcaggggcagctgaccatggaagattgagagcccaaggtttaaacttctctgaagggaggtggggatgagaagaggggtttttttgtactttgtacaaagaccacacatttgtgtaaacagtgttttggaataaaatatttttttcatnnnnnnnnnnaaacaacnnnnnnnnnnnnnnnnnnnnnnnnnnnnnnnnnnnnnnnnnnnnnnnnnnnnnnnnnnnnnnnnnnnnnnnnnnnnnnnnnnnnnnnnnnnnnnnnnnnnnnnnnnnnnnnnnnnnnncttttttaaccccttttttttgggggccgccgggccccaaaaaggaaagggggagcggggcccttaccccggccccaaaagtatttttcgggactttttcttggggcggcggggcccccccacc

SEQ ID NO: 9554 - DNA, 442 bp, Homo Sapiens
tctagagatctattgatccaggcaggacaggagtcactccttagaacccgagcggctgtcaggctgatggaggaggggaccactcacccgcacagagccagccccctcacatggcttcctccctgaggagcatctcccacactggggcttccaacgatctttgctctgcgtgtgctgaaaggacagcgtccagaatcagcctcagcctggacttctgttaccatgggaggataagcttgtcatgctcacagatgtgcactcctagtgccacgcctctaaacgttccccagacggcattggggcctctcgccggggagcttggctactgtctcgatccccggccaagcagagctcatggcgaactttctcagtgtccacagcagacaaaaatgtccacagccagagctcccaaagtctgccgggccctgtggcacttgcacct

SEQ ID NO: 9555 - DNA, 410 bp, Homo Sapiens
  misc_feature (17)..(17): n is a, c, g, or t
  misc_feature (355)..(355): n is a, c, g, or t
gggcggcggggcgcganagagcgcggttgacctccctttctctgctcagctccagcgtcatttcggcctcttagttcttctgaaccctgctcctgagctaggtaggaaacatgagcggcaccaacttggatgggaacgatgagtttgatgagcagttgcgaatgcaagaattgtacggagacggcaaggatggtgacacccagaccgatgccggcggagaacccgattctctcgggcagcagccgacggacactccctacgagtgggacctggacaaaaaggcttggttccccaagattactgaagatttcattgctacatatcaggccaattatggcttctctaacgatggcgnatctagttctaccgcaaatgttgaagatgtccatgctaggactgcagaggaacct

SEQ ID NO: 9556 - DNA, 799 bp, Homo Sapiens
gataaagcgagatggtagttctgcgctggtttgcagtctgagtgggaaagtcctgttgttgatgagcactccttggttagcgtaacatgcgaaagttctttttgtgacctcagaatgtctctggatctttcctcatttgactgactctgtgccacgtcatccatagtttattgttagtatgaacacaactgtaacatttacctggtatctacatccttacctgcattggaaaatgtttgctacctcactaacaaccatttgcctcctttaagaacactgatgggctgcactttttggatagaaatagaatttgatttcagaatgtatgcttggtgagtctcagtgcccaggaacacttttggaataatttatcagacattgaacttctgtgattaatcgcttttatagatttactcagtctttaaaattcgtctctgatttgccagagaaaaacggtggtagccatggaaatcgggagtgaaggagcactgcttcattgtggctcagcccttcctaggggcctctgccctttgatgtccttgagctactcttcagctctggaagttgtggacaaaccgtaggaatgtatgtgtgcgtgtggtggagtgattgtctgtgaatgacaggccctggctattgattgatgttgcatcaatttagcaaattcatttcctcattcttgatggcctgaatatatgtctgcacttttaatgctcctcttaaccagttgtaacatcttaccatttccctaacaaattgaattagtttaataaaatcttttgacacatgttaaaaaaaa

SEQ ID NO: 9557 - DNA, 547 bp, Homo Sapiens
  misc_feature (536)..(536): n is a, c, g, or t
caaaaaaataacccccccagaaacacaaccctcatatttaaagctcttaagttcagggtagcggtctcaaactgccaaacactaggatgaggatgtgactctgcatgtgttttggatgagaggaagcatcgtcccagtcacttttctcctcctgtgctgtcctttcaaaaacaggtctggatttcacgctctaccccaagaaaaagaactggttcagaaaacacttccccaagtttctccaacagaacactgtggctgcagggcctggtagtgtgaagggcagcaactgacatataaaaatgtacttaaaatcagagtcaaaaaatggttttaagttttaatactcttaattagctccctgctttatactgtaactccacagaagacatagggccacctaggattcacaggaaggagcagctctgattcttacatggctggctccgatgcccccacagcaggcctcttcctcccaagtttttcctctccatttcaaaaagcactattttacttcacatccagagctggatggtttnggttgtttctt

SEQ ID NO: 9558 - DNA, 579 bp, Homo Sapiens
ccgaattctaagtccccaataatctcacaccctttaaaataagtatgtgtaaccaggatgtcttaaatgatccttgtgtaccttttctgtcatattcagaaaccgttctgtgcctgctgggagtaattcctttagcaattaagtatttggtagctgaataaggggtcagaacttctgaaaccagagatctgtaatcatctctattggcctggggtgcctgtgctataaatgagtttcttcacatgaaaaacacagccagcccaagatgacttatctgggtttaggattcaatagtattcactaactgcttattacatgagcaatttcatcaaatctccaaactcttaaaggatgctttcggaaaacacgctgtatacctagatgatgactaaatgcaaaatccttgggctttggtttttttctagtaaggattttaaataactgccgacttcaaaagtgttcttaaaacgaaagataatgttaagaaaaatttgaaagctttggaaaaccaaatttgtaatatcattgtattttttattaaaagttttgtaataaatttctaaattatcttctggaaaa

SEQ ID NO: 9559 - DNA, 565 bp, Homo Sapiens
atgagccaatccagggatttacagggagcaaaagcttcgagactgctgaagcccagacaggaagagaggctggatgagatcaacaagcaattcctagacgatcccaaatatagcagtgatgaggatctgccctacaaactggaaggcttcaaagagaaatacatggagtttgaccttaatggaaatggcgatattgatatcatgtccctgaaacgaatgctggagaaacttggagtccccaagactcacctagagctaaagaaattaattggagaggtgtccagtggctccggggagacgttcagctaccctgactttctcaggatgatgctgggcaagagatctgccatcctaaaaatgatcctgatgtatgaggaaaaagcgagagaaaaggaaaagccaacaggccccccagccaagaaagctatctctgagttgccctgatttgaagggaaaagggatgatgggattgaaggggcttctaatgacccagatatggaaacagaagacaaaattgtaagccagagtcaacaaattaaataaattaccccctcctccagaaaaa

SEQ ID NO: 9560 - DNA, 734 bp, Homo Sapiens
ttgtggaaaccgagtggggactttactgatagtgacagtgatgacttcggagaggctgacggccggtacttcagggtgtgtttcaaaaagctgcccctggagggaaggtggtagggaggcggtggggagctgcactcaccccggcctgtcccctccatgctcagccagcagtcacactgcccagatttctttcttttcctctgccgcctgctcagcccgctgctcaaggcctttgcacaggctgccgccttcctccgccagggccagctgcccgatactgagttgggctacacagagcagctgttccagttcctgcaggccaccgcccaggaagaagggatcttcgagtgtgcggacccaaagctcgccatcagtgctgtctggaccttcagagacctaggggttctgcagcagacgccgagccctgcaggccccaggctccacctgtcccctacttttgccagcctggacaatcaggaaaaactagaacagttcatccggcaggttcattggtaggctagaaccggtaaggaggagcctgtgctgagacttctcagccccagaacacagctgtgtcctagagccagaagatggagaggaggctgcaaacccttagctgctctataaatataatcattgaggcttgattgtcccttgccatctcttgctttttcccttctttgatgtgataaacaaggggacgagacgagttgtcttttccccagcccagcagc

SEQ ID NO: 9561 - DNA, 501 bp, Homo Sapiens
gaagacgcccgagacgctgcttccccagaagtgctggggcagggaggcccaggagatgagagagaaggtccgagtaggtgatagaagacaagggggagaccgagccggaggctgaggaaaggaagagggcacggagttgccaggagcaaaccaaagtgaagagagagataggaagctgcctcggggccaccccttgcaaagggggtgtgtcccacaaacgctgctatgggtggggtggggggctggggtgctgcgtagccagtgtttgactttcttttcaagtgggggaaagtgggagaggactgagagtgaggcaagttctccccagcccctgtccgtctgtctgtctgtctgtggtggtttctgtttcttgggaggcatggtaggatcataagtcattcccctccccttccaggcctcctgctatatttgggggacctgactggtttggctggagtcccatgaggatgtgggccctttaataaaggatagcaaacaggg

SEQ ID NO: 9562 - DNA, 523 bp, Homo Sapiens
gacctaggatgacaatgcggagagtcttggtctgaatctagtgcgactaccacctgccagcttttggggggtatggaaatactatctaaaagttggactgcatgggtcaaatcattatgagacttataaactaaaactttagatacccatatagaaatgtctttgaggcaaaaacaaacctaaagaatgaaggctctttcccttctctgaaaaaaacaaaacactgctcttcacacaaccggaagtcaagaccagagatttggagcaattgtctactaatttggcacaaagatcgtttctttagaaaagtggcattggcttttgaatatgaaatcttctcatagctgcctaaaaaagactagaatgtatatggatatcagaaacctttaataatacataatttatgcaaagataagataaagcaacataacactaattataaaactatttttaaatccccatttttaatgaaaaatatacatttgtatttaatttcctttgaataaaacaattgtaaagtaaa

SEQ ID NO: 9563 - DNA, 448 bp, Homo Sapiens
tagggcatcctgcgagcctcactagccttctggttcatgcctttgacaagcatttttgtgccccctctgcttactgtgacagtcgatgatgaatcttgcgttgccattttctgctgtgggtaactgcgtgcagtgtcttgccttgctttctcttcttactgtcccacagcttggtttcatgttacaaacagaaaagctcgaggctcccaccccgccacatcccaacttcatttccccctcactgtagcccatttccaccccaccacaaagttgccacaggttttctttgtatagaatatttattttgaagctctattttaatagtatttattttagaaagtctactattgtaagagttcttctgtttgtgaagaaaaaaacaagttaaaaactgaatgtactgatttagaaaatatatataaatatatattgttaaatatacacggaa

SEQ ID NO: 9564 - DNA, 971 bp, Homo Sapiens
  misc_feature (848)..(861): n is a, c, g, or t
  misc_feature (866)..(919): n is a, c, g, or t
agcttttccatgcatggggtctgacacacaccgaaactcaaaagtttgggaacaaggaagttcccttgtaacaggtacagggcccaggtgttcgttttctgtgtcaaaacacaggctggttgtggccctacaaacctaagttcagacccactggtttgcagatccagacgtggcctaacaccggatatgggggagccacctgagggatgttttccgccccttgcttgtggccttataaggcagagatatcgacgcgcggatgcccctggaagcaccccagcatcacaccccggcttgtgcggggcacggctggagcccatgcaatagggcagaaggcaacggaggccaggtctgtcccggctggagaacagcgtccacgcagtcctgcctggggtcaggccctcactgaccctcaggggagcccccaaggtgctgtctgtctagacaggctgtcccaccccagggtggctagtggccatatgcagggaatggtgcttctggctgtggcacgcactggatcacccaggtcccagcagacatggccgcccaaagtcagcaagcctcctttgtgctatgtggagctcacagcctcacatgtgaacacccgtgtctgggttgcctggggtgatcctccctcctgcgtggtggctgtctctggaaagcatcccttgccgctgccacgggcagccccagcccccgtccgtccaggctcacccacagtagtgatgcagacgtgacgtgggggaagggggctgagccctgtggctgggttctgacaactgtaacggttttgtcgagcttaggcccctttggagggagaatcaataaataacaaacaccaactaccnnnnnnnnnnnnnngggcnnnnnnnnnnnnnnnnnnnnnnnnnnnnnnnnnnnnnnnnnnnnnnnnnnnnnntggtattcaaaacgtggtgggcctaatacgtgaagtctatataagatttccg

SEQ ID NO: 9565 - DNA, 580 bp, Homo Sapiens
tgatatggcggggcatggccatgacagaggagcagcataagtctgtggtcatcgattgcagcagctcccagcctcagttctgcaatgcaggaagtaaccggttttgtgaggattggatgcaagcttttttaaatggtgccaaaggaggtaacccttttcttttccgacaagtactggagaactttaaactaaaggccatacaagacacaaacaatttgaagagatttatccgacaggcagaaatgaatcattatgctttgtttaaatgttacatgttcctaaagaactgtggtagtggagatatacttttgaagattgttaaagtggaacatgaagaaatgcctgaagccaaaaatgtgatagctgtccttgaagaattcatgaaagaagctcttgaccaaagtttttgatcatatgttttgagataattgtatgatcaagttgtatatttaagtcttagtgtttgaaattgcagttataattgttcataggattgctatttaagatgatttgaaactcaatccagattttctttttgtattttaccaatttaacttaaataaaaatctgaagaacatct

SEQ ID NO: 9566 - DNA, 739 bp, Homo Sapiens
caattgttgctgtcaacattcagtcacttctccttatttcacatggcagcaaatatgtatgttttgtggagcttctcttccagcatagtgaacattctgggtcaagagcagttcatggcagtgtacctatctgcaggtgttatttccaattttgtcagttacctgggtaaagttgccacaggaagatatggaccatcacttggtgcatctggtgccatcatgacagtcctcgcagctgtctgcactaagatcccagaagggaggcttgccattattttccttccgatgttcacgttcacagcagggaatgccctgaaagccattatcgccatggatacagcaggaatgatcctgggatggaaattttttgatcatgcggcacatcttgggggagctctttttggaatatggtatgttacttacggtcatgaactgatttggaagaacagggagccgctagtgaaaatctggcatgaaataaggactaatggccccaaaaaaggaggtggctctaagtaaaactgggattggacagtagtggtgcatctggtccttgccgcctgagagccccaggagacatcggctagagtgaccatggctatgctcccgtctggaagatgccagcatctggcctcccactgttttcagctgtgtcccccagtccgtgtctttttagaatgtgaatgatgataaagttgtgaaataaaggtttctatctagtttgtaaacagaaaaaaaa

SEQ ID NO: 9567 - DNA, 395 bp, Homo Sapiens
cagctcggtacctcacatcggctaacggcgctggggcctgctgggccgggatatagtcgtgtttagctaagtgtcgagagcattaagaagaaagtcctggttggaggcgcaaggcctgcagcaccagctgtggaatccccaataatgtgactgcacagctccgtcctcaaacatttgcaggtgatcaccactgagggggcacatagctgtaagtgggcgttcctggggcccggtacgtgggcacagtgaccgggtggggggcgacaggagctggggagtgagcagtcagcagggtacctgctgacatggccatggtggtcccagccccatgcccatgtgaccccgtgtcctctaggaggggggatggagcaggtacaccgtgcagcatccgttag

SEQ ID NO: 9568 - DNA, 491 bp, Homo Sapiens
  misc_feature (446)..(446): n is a, c, g, or t
  misc_feature (470)..(470): n is a, c, g, or t
tccactagtgtaggcgatccatcaaattctggtcaacatctttgacatcctgggcctcacgaaggaggtccataacttccctctactgctacctttagtctatcctcgaaggcttgatctgtcaccatctcatccccagttccaaggtttgctatgagactctctaattcctggagcttcactctatgatcagcaaccttatcctttaccagccggtaacaagctggacattcctggcagccaggccaagaccgatcgtagaaatagttttcttcacactggtcacagcgatatcccacaaagccttctctgcattcacagcgaccatcatctttgcactgaagtgaaagagatccctcaggatgacagtcacagggttagcagccttcaggccaaacccaaagtgttgacctcacagcgctcacagtgctgaccagtgatgccgngcttgcactcacactgcccgtgcngatgtcacacgggtaccgagc

SEQ ID NO: 9569 - DNA, 369 bp, Homo Sapiens
  misc_feature (89)..(89): n is a, c, g, or t
  misc_feature (113)..(113): n is a, c, g, or t
atccaggctggttgcggggtacctgcacagaacttctgcaggaactggtgcgtgtagcgcaggatctccatcatcttggcatcaccctntgtcataggggattctgcagcagngtccagcatgaccttgtgggcatccatgttcttcagacagccgttgctgcttcttcctcatttgctccccaaccccgcacatcttgttcagcctttccaggatgcccttgacgatctggtagttctcactgcttttctcccctggtgggtgcagaaagccctcctcgtccgtgggacgctctttcttgtccttggcggcgcctgcctccacctcctcacccttgcactgcccttctgtcaccacagctctgactct

SEQ ID NO: 9570 - DNA, 867 bp, Homo Sapiens
catggcgtaacggacagattcgcgagcttctcctacttctctagcgctgtggctcactgaagcgtactacgccggatgtcttaagatatcgcgagacctttacctctggtttcttacacatcctttagaaactggaatttagcgagaatacattctttcatactgcctcctcccttgtttttctgtctcagagaggtagtctgtcctaaatatcccatgtagcccaggccactgaattaaaacggagcgtattcgttctctgccccaccccgcaactcctgaaagcggcgcaactcaattacttgatccttatatgccccacgcgggactcatactacgtttcccgtgaacacgtgcagtccaaaccccgcccctgatatttatctcagtggacggtggccggaaaaggacaatggtttccatgtcagcggataaacgctctcccctcggctcccggacgcgacggaggtcgtagtagtagtgagtacgtgctgaggagcaaaggagtaaccaagagatccagtgaccgacagagcaagagccatgccgcgccggggcctggtggctgggccagacttggagtattttcagcgtcgctatttcacgccggcggaggtggcccaacataacaggcccgaagacctctgggtatcttacctgggacgcgtgtacgacctaacgtcattggcacaggaatacaagggtaagggccacacgttgggccggggccggagtgtgtgtgtgtgcacgcgcgcgtttgcctggttctcgaagggctggcattgacagtggctgtgctgctcttttcaagggacctgctgctgaaacccatcgtggaagttgcaggccaggatatcagccctgttg

SEQ ID NO: 9571 - DNA, 350 bp, Homo Sapiens
acctcagatcggctatcggcgaacaattgagacgctatagctagagtctaaggcagcagtccgcaatctttttggcaccaggactggtttcgtggaagacagtttttccacggatggagaggatgatggttatgggataaaactgttccaccttagatcatcaggcattagttagattctcatgaggagtgcgcatcctagtttcctcgcatacgcagctcacaacagggttcgccctcctatgagaatctaatgctgccactgatctgactggctgtggagcccaagcagtaatgctcgctcatgccccctaccccaccttctgctgtgctgccgttaggccgatctga

SEQ ID NO: 9572 - DNA, 507 bp, Homo Sapiens
cggtgccccttatgttctgaccccccttcattttatgactgcatgcgcctccctctacttcatctacactgaaaaagtgttcgttcaacatgattggcttcactcgaagccctctagatcccatttcatatatcccatcgaccaccattattcccttacatgtttgcacagccttatactgagcattacattgtaaacaagcttgggaatttcaggtatccaaaggtaattatatacacaaacgcttctgttttattgcacagttcacaatatagctggtgattacacaaccaaccatgttaagatgaatatcgactatttagacaaatacatcgattttgtccccaaccacaaatgaaacaagaaagacacacatattcgccaccatatcaaggttgtgcctactctctggtgcagtcctgagggctcataccactctcagtgtgttcaatacggaatccataacatttctggtggcatcacacaaggtgggtcagaacataaggt

SEQ ID NO: 9573 - DNA, 600 bp, Homo Sapiens
accttatgttctgacccacctctcagagagactgaatagaactagactccagaacagaagaccctctctgcaaaccctcagtgtcttttctccggcctcccaattcatgaacacttgtacagcccacctttgaccccacctttgacccaaaacacttaggttgaactccaggaatttacctttgtttttgtttttaggagctagatgacagaaaaagccaccggttcaatggacttgcttttgtgctggaaggggcacggagctttgacttctcctcgctggggctgcctttgctgctacttcagcactaatctcttcttgagtttctgctaatcttttcttggccacttctgttctacgatcacaatctgcaatgaatgactgcagatgatccatggcatcaagttcaaagaaaaaatcttgttctttggatgcaatttcataatccgctcttaaagccaggtcatggactttcagacattctccaagatccattctagttccagaaaggacatcatgaggacaacagttgagaaggtgactcttgcatactctgtcatcactgaatttgattcgttgacgagttgtatctccgtcccg

SEQ ID NO: 9574 - DNA, 431 bp, Homo Sapiens
ctctgaccacccaacaaaagtcaaactcaccaacctatgaatttgttttcgtaccaataaatttacttcaatgaacagttatgcaacttaaaagaaaccataagcagaatggataatctgcttccaggagggcacataagaggcatttaagaaatgttggttcccactttccctttctgttaaggaattcataacttctgaagcaaatacctgtcccttctaggcacctgatttcaaaggcatgcatatatattttgaatatgacattatattcaaaataatataactaaaggttctgattctctttactttctctccataagaggaatgcaattcttaactcttaccaagagcaactgagctaaataaataagtagctcattaaaggagatactttctacacttcgatgaggtgggtcagagcataaggt

SEQ ID NO: 9575 - DNA, 693 bp, Homo Sapiens
cgtcatggctgactcttgaggataaaccttatgctctgacccaccaggagaacagaaaaaatacagtcttttctaagaagttatggcgactgcagactcagtgccaaaatgaaaaagacacagtccaaagaagtgaaactccacaatctctgatctgttagattggggctagttgaacagacatttaaatctaatagtcatttgtatacaatgtaagacatggatacaatatgcagtgctagcctgtattttcctatttgaatatcccacataaattactacagataggataaaaaagacacatatctatttagatgacttcctagtttccattccaaaagcagaagatatgtacttaagcagcacatgctacagtgtcttctctttcaaactatctgttcctagcctctagggattttgttttgttatgtttcattccactgcctaagaaactaagattttgccagcaagagggccaatatgacaaatcatcgatgattcttagcatggagccaagaagcctgcctccttgatcagattttcagctggaaagatatccacaccttgcctagtccaatatttgttaagtgagaatataaaaatcaaagatgttctgtcacactctagatttgtattaaatgtccacaaatattaaagattcacatgatacatatttagggtgggtcagaacat

SEQ ID NO: 9576 - DNA, 526 bp, Homo Sapiens
agccaactaatgttctgacccacctggttgtgcggcctgggctgggctccaaggcaggctccatgtccaagcaggagcttgacgacattctcaaatttggcactgaagagctattcaaggatgaaaacgagggggagaacaaggaggaggacagcagtgtgattcattatgacaatgaggccatcgctcggctgttggaccggaaccaggatgcaactgaggacactgacgtgcagaacatgaatgagtatctcagctccttcaaggtggcacagtacgtcgtgcgggaagaagacaagattgaggaaattgagcgagagatcatcaagcaggaggagaatgtggaccctgactactgggagaagctgctgaggcatcactatgagcaacagcaggaagacctagcccggaatctaggcaagggcaagcgggttcgcaagcaagttaactacaatgatgctgctcaggaagaccaagacaaccagtcagagtactcggtgggtcagaccataagtggtaccgagct

SEQ ID NO: 9577 - DNA, 572 bp, Homo Sapiens
accttatgttctgacccacctgtagccacatgaaaagagtggctctggaagaccctggtgtaactttggtgtagcacatgggctgtgggctctgtgtgcacactcgagaccgagcgcaagtcaccactgccatggagtcacctgtggacccaggggctgggctagtcagagcagtagatgggatgaggatctgggggccttgagtggaggggcagctctcagtgagaagagggtgcctttggctgcatctgcccgctggatagggagcctaggaaccaacccctctaccagtggagatgctgtatgggtgccctcgtcctggagaagggaccaggatggaaaggacggacctccaggaacagccagcgccctggcttcctgacaggcagctcccaggtggggagaagggcttgttgaacacaggtgtgaggtttgcagatacagggtgatgaggtggggccagtattcagaatgcagaacctgaccctccaccatcacggaccatccgtttgtgagcagcacatgcagctgtggtgccgtgttggagcacagggtgtgtgttagtgagcgtg

SEQ ID NO: 9578 - DNA, 483 bp, Homo Sapiens
aaaccttatgttctgacccaccctggatttggaagacaggaagcaggagaagaaagttctgaggactctagcttggtgggcctagtggagatggacattttaaactaagatgcggcagccttgggtagaaatgggatgttcagctttagacaggagacttttgagacgcttggtccaggaggtaattggaagtccatcagcatgttatactagcccgccagttgagcatgaaggcttttctctttcagttctttctgagttgttaatgatctcttatatccaactggctttccttatttgttacacaatcgaatagtcaatgttccctggtgactgcagagtttctacagaagtacttaaagatgatcgtctggctggaaggagacttctcttgaagtctccattgcataggaagcacattgcttttaactgaattgtgtattatgggtcctaaaaaggtgggtcagaacataaggggtaccg

SEQ ID NO: 9579 - DNA, 926 bp, Homo Sapiens
accttatgctctgacccacctcaagagatggaaatgaccgacaccctggggggaatattatttattgacttatttattggttaggttcttggttttttcattaaacatcagggagcggggtataggcagagatacctaggaaccaataaaaatatccccagggtttgaggagcagccagttgtaccaagaaacagtggctgaagatggagaagaagcagagggatcagtaaggtaaagagggctgggaggagtcacaacggaataaggaacaggtaccatggtgcacttactagagatgaagaatagccaaggggtccagggtataggtggaagaataatgaagcaaacaggacatgagtcagacgctggagccagagaccaagaaacagtttctgaggctggagaagtggtgatcactgaggagcagggaagagccgagggttaaagaacagtgagaaggatcatgaaataggaggaggtatcaggaaatagaggaaccaaatagcagccagacggagcagtcagtatccagaggggtgaggaagcagaacgaatcagataaaatggaaaaggcaaacatatccaaggaactgggtatgagcctgagggacaagcaacttcccgaggaaccaggaagcagttccttggtttagaagagagcttgagggcacaggccaaagacagcgataccagggaacaagaaatctgaaatacgacccagagaatggattgcagtcagaggaagcaggagacaattgctgaggctgtagaatgggcagagggatccagggcaagggacagagcccatggaacaggtggaaagatgagagaagagcctctgaagctgcagcatggcctagagtactgtggaacactggagcaaggaacagctcactgagcctgggggcagcctggccaaagaaag

SEQ ID NO: 9580 - DNA, 673 bp, Homo Sapiens
gcgcacaaaggagctgctcagtacaatcacagatccttctgttattgttatggctgattggttaaagattcgtggtactctaaagagctggaccaagttatggtgtgtgttgaaacctggggtgctactgatcacatcctttggatttaaaaggtctttggagcaacttgaacaagttttctgggtgagaggaggcggtgggcgggcaggtggaactgtatatccagtgaggcacagtgtgggagcagaatagctgagtagaccctttcctctgataagcagttggccccttctggaggatttttttacaaccagagcaggaaactcgaacagctgtggctggaactgaaggaagcattttattcatgccagatgacgccagtgagggctgaaagccagtagtcaactgtggagcaagagggctgccactgactgaaaacacagcactaattttcagttccccctcttgagtttttggctgttggccatgattatactcttgagcatggtcaggttccatctttaatttggtctagtagtccctgctgtggtgccatggtttggtcatactcatcatccaaaggttcttctttaattctaatatttgatgcaaaggaattccccagttccgaaccaatggattctttatgggcaaatgggtagctggaatccc

SEQ ID NO: 9581 - DNA, 822 bp, Homo Sapiens
gggagacttccggaaggactttggcgagggggcagccattttggggggtgctgatggatacctgcggggtcggctatgttgccctgggggaggccggccccgtggggaacatgactgtggtagactctcctggacaagaggtgctaaatcagcttgatgtcaagacctcttcagaaatgaccagtgcagaggcttccgtagagatgtcattacctacccctttgcctggatttgaggattctcctgatcagaggaggctccctccagagcaggaaagcctctccagactggaacagccagatctttcttcagagatgtcaaaggtctcaaagcctagggcctcaaagcctggccggaagagaggtggtaggacacgaaaaggccccaaaaggccccaacagcctaatcctccatcagccccactggttcctggtctcttagatcaatccaaccctctgtccacccccatgcctaagaaacgaggtcgaaagtccaaggcagagctgctgctgctgaagttgtcaaaagacctagatcggccagaatctcaatctccaaagaggccccctgaggactttgagaccccttctggggaacgaccccgccgaaaggctgccccagtggcacttctgtatcttcaggaactggctgaagagctctcaacagccctgccctgcccctgtgtcctgtcctgagggccccaaaggtgaccaaccccaccaaatccgaaaaagatccggcagccagcagccctgtccagggtggaaaaaaagggggatggtgcctccccgggatgaagactttttttctccaggttggagg

SEQ ID NO: 9582 - DNA, 681 bp, Homo Sapiens
aaaatcgagctcgcccatctttcgctgactcctggtggcacgatcattattctaagatggatacccggggttgcccccttcctaggacccctgatcttcctcttcctgttactaatgattgggccatgcatatttaaccttgtatcccgcttcatttcccaaaggctgaattgttttatccaggcaagcatgcaaaaacacattgataatatatttcaccttagccacgtctaataccagagcctacgaggaaaccattcggaagctccagaacccaggccctaatcacaacgcccctatccagcaggaagcagccagatgatcaacgacgccctttttcctttttatactaaagtaagaaataagaatgttagcccaaactgcactattttgcagacccctaccattttacaaactggtcagagtggaaaattccaccagggcctgagctgtgagaaacatcctgtcaggcaggtcccaggcctaacccctggctgcactaaattccttcattatcagcagccaaacacaccgcccccaccccattttcacaacaatcccagacctctcctgcccgggactgtaactggtccagcctgtaagcgggaagggggctctggcactagctggtaccccctctccgcaggtctttctcccaataaatctgtgaagacattgaaa

SEQ ID NO: 9583 - DNA, 1109 bp, Homo Sapiens
gggtccggaattcccgggatttctgagacagaaggttgtgttggggaactgaaggagtttctgtgggcggacagggaaccctgcgtttctactgtgtgattctgccaccttcctggcccgacgccatgggagtgacttgtgtgtcccagatgcctgtggccgagggcaagagtgttcagcaaaccgtagagctccttacccggaaattggagatgcttggggcagagaagcaaggaacattttgtgtggactgtgagacttaccatacggccgcctctacccttggcagccaaggtcagaccgggaagctgatgtatgtgatgcacaactcagagtacccattgagctgtttcgccctctttgagaatggcccttgccttattgctgacaccaactttgatgtgcttatggtgaagctcaagggctttttccagagtgctaaggccagcaagattgagacccggggcaccaggtaccagtactgtgacttcctggtgaaggtgggcacggtcacaatggggcccagtgcccggggcatctctgtggaggtggagtatggcccctgtgtggtagctagtgactgctggagtctgctgctcgagttcctacagagttttctaggcagccacacaccaggggctccccgcagtgtttgggaacagacatgatgcggtctacggcccagcagataccatggtccagtacatggaactcttcaacaagatccgcaagcagcagccaggggccggtgggctgggaattcgttagtgatgagcagctgccagctgagctctgtcaccaggggtactccacagaggagcaggtgctgactttcaggtccctggaccccagaaaccagggtagacatggactctactctccttctctgggtctcagctggggcttttgttctggggctgagtcccctccccaaccccttggactctcacacatagccccccatcagctgtgttactcccgggcctttactggatttggcctggcctccaggaatgggaaatattttaaaagggggggaaaaatttggggcacttggccccccttttaggggaaaaagggttggaacacgggaagtgcccccttccctg

SEQ ID NO: 9584 - DNA, 1059 bp, Homo Sapiens
  misc_feature (540)..(581): n is a, c, g, or t
  misc_feature (583)..(640): n is a, c, g, or t
gggcttgttgcaacttttcacttctcttgtgtccaggtatgcagcaaaattctgcaatttcaccttaaagatactgttggttttacagatgctctccaacctattttctataagatgaggtagtggtgaactcagataacaaacttctcttctaaactggttctgcttctaagacaagcatctcctgccctctctccttcctccccatctctcgcacgcagtctagagatggactgagccttgcttctcactggcagtgttgagctttggagatgggatggttgctatgccaagccttggtttctctgctcagaagaagtagagaagctataatcaattaaaagcatgctgtgatgtgactcctggaagtgacgtaggagtgagtggcaggttgtttgatttaataggtatcttaatcaagaattaagcttgcaacattggctttgctcagatgcagatggaagtgtgatcacaatcattttgaatccctcttcctcacttttttttctaagaaaataaacattttactgtttttatggnnnnnnnnnnnnnnnnnnnnnnnnnnnnnnnnnnnnnnnnnngnnnnnnnnnnnnnnnnnnnnnnnnnnnnnnnnnnnnnnnnnnnnnnnnnnnnnnnnnngtttttgtgtgaaaaaagggggggcccccatatatggggaggcacgcgtattatatatagtgcgaggcagcacggggccggcggttataaacacaagcgttggcgtgggcagcgggaaaacaacgcgcgccccggctggggaacaccttctgggggggaggagacccccctctaatctagcgcgcggggcgggggacaccatttatgtgtggcgcacctactctctccatctcccagggaggatttttagacagcggctgcgaggggggatgcatattcctacacgattcttttcacgcggtgtttctagtgggcgtgtttaaccaccaccgcgcggccgtattcatgatcgggggggtccttgggtaagaaatttggggcctgacaggcgggtaattgtttctcttggagggactaca

SEQ ID NO: 9585 - DNA, 835 bp, Homo Sapiens
ggagcacacacacatctgcacctcaaccacagactacacttgctgaactggctcctggggccatgaggctgtcactgccactgctgctgctgctgctgggagcctgggccatcccagggggcctcggggacagggcgccactcacagccacagccccacaactggatgatgaggagatgtactcagcccacatgcccgctcacctgcgctgtgatgcctgcagagctgtggcttaccagatgtggcaaaatctggcaaaggcagagaccaaacttcatacctcaaactctggggggcggcgggagctgagcgagttggtctacacggatgtcctggaccggagctgctcccggaactggcaggactacggagttcgagaagtggaccaagtgaaacgtctcacaggcccaggacttagcgaggggccagagccaagcatcagcgtgatggtcacagggggcccctggcctaccaggctctccaggacatgtttgcactacttgggggagtttggagaagaccagatctatgaagcccaccaacaaggccgaggggctctggaggcattgctatgtgggggaccccagggggcctgctcagagaaggtgtcagccacaagagaagagctctagtcctggactctaccctcctctgaaagaagctggggcttgctctgacggtctccactcccgtctgcaggcagccaggagggcaggaagcccttgctctgtgctgccatcctgcctccctcctccagcctcaaggcactcggggcctgggtgggagtcaacgccttcccctctggactcaaataaaacccagtgacctcaaaaaa

SEQ ID NO: 9586 - DNA, 842 bp, Homo Sapiens
tgggagcggcaccaccgcctctgtggtcagaacctgcatggccagagcccccacggccagggccggccgctgcttcctgtaggcaggggctcctctgccaggtccgccgactgcagcgtgcccagcccagccctcgacaagacctcggcaaccacatcgcgttcctcaacacctgcttctgtgacagctatcgacaccaacggactctgagccccggactctgcttaccctgatggctgctcagcaccacagagtgcttgggctgagggactgactgttggaacccgtgcatgtagctgccgggtcatcagcaagaaatgaattggaggcaggaagagtccaagcctgaataataacaccccacagcctctctgtgcacttgctgtctgcggagccagtgtgccattctctgcacatgggcagccagcctgagctgcctcctccatggctttcctggtttgttcctctctccactgaagctgacttagccggccccttttcagtgtagaccaccagctcccctccccatctccttgagtcagcagactgtccaatgtgctcagccaggctggaggcggcaggcggcaggcagcaggctgtggaggaggccctcggtcagggagcggcctgcctcaccctgaatagctccttcggccccatctccatcctcagcagatgacactggattgggctccccggggacttggggtaagcaacaggggggcattcagggactctttcctcacccctgctggttcagacatgaataagatcttcaaagtcccccagggaaaaggaagtcacctggttgcacattaaaagcgcacccggtaggtaaccac

SEQ ID NO: 9587 - DNA, 874 bp, Homo Sapiens
  misc_feature (645)..(645): n is a, c, g, or t
  misc_feature (647)..(647): n is a, c, g, or t
  misc_feature (666)..(666): n is a, c, g, or t
ggattcaacttccctgttctcatctttggtaggattctgccagttgcttttgcatcttctgttcctgggtaatggtgggtcttaatggaggctgggtggaccactgcccgtccactcttcaacaggaggaacagcatgccaccacagtaacacacattagagaaaggacagaggtctgctccttcctgccacctttctcctggccccttagcattcccccagtccctccctcttcaccttgctccgtctatgtcttcccagctcagccttttccccactcttaaatactgtactacttcactgtaagaacgaaagaatagttaggataccaatgagtaaaagggttcctgttcactctgactctgtgcaaattgtattacagtagaccgctgacgttcccaagtgacagatccagggcctttcaaacatccccaaagtcatggccatactcaccattagccagtttctaacatctgtttcagggtatccagctgtagatgttcttatcccccatacttgtgagttcttggggttgctcacaaatactaggggtttttgttgtatttttaacaaatatatcctaatgtcatatttattctcttttgtaactgctgtctttacaataaagaaatcatctgcaaaacncnacaatccgtcgacagtganccctgtccggccgcctcgggccctcaaaaagttttccagaccatttcctttgtgcgcgcggggcccagtaaggtaagggaaacatggggcataggctgggttcccaaggaaaaacccggggccatggaactaaggccttgggattcctccaccaaataaaaaaacaccccccggtgggacaaccgaaagcgtttccgtgaacaaaaaa

SEQ ID NO: 9588 - DNA, 446 bp, Homo Sapiens
  misc_feature (238)..(251): n is a, c, g, or t
  misc_feature (254)..(254): n is a, c, g, or t
aatagaacgatgggtggtaaccatcctctcctagcacctcacaccaaataccaagcagcaccagcagccctgcccaaacattctgtttctccaaaagcctcccatgatgggcatggcatcaccacactggaattcttcttaggttctttattagtttttcagcacagttaactctttctacgttgacctagagttttgttttacattttatcatctcatgacagcagccaccagaatnnnnnnnnnnnnnntantatatatgtatagatatttatagatacatctggaaacagcaaaaaacaaaattccaagatttgcagtgttatctacagtaagagggatgaatcctaccagctttcaaacagtcacatacagtatccagaagaagcacatgaggcggtagcactgcgcagaaactaacacgccaccaggctagtcatggctta

SEQ ID NO: 9589 - DNA, 332 bp, Homo Sapiens
cctagaggattctcatctaaataagtataaaataaaggctgtaagtgcgctgttttgaattaaacatcacattggcaagatcagaggagcttgtgaagtgagaaggaaatggggattcctgtgatggaacctccactagtattattcttttggcagctgagacttcaggggattctcactataaaaaaccagcagtcctttaatcacacattgtaaagcatttgtgatgctttgcagggagcctttacttccaagatttccctgttgctttccttcctgagcacaataggttcaagatggctaatgctgtttcctagttatgccaagaacct

SEQ ID NO: 9590 - DNA, 676 bp, Homo Sapiens
ccttatgttctgacccacctccggtagtcaatcacctcctgagttactttgatgattcttcctaaagtactttcggcgtctctgtttggataggacctggccagcggtgacacggcatggctgagcactatgtaggcataatcgaagacctgcttcacctgcatggcgccataggagctcccggccaacgtcattccctggcagcagggggtcctcaatgcacagcatcgacggtctgtacccgctggtcatggctttcatgatctcctctttggcgatataggcacctccttctttgattctaataccggttttcaagtaattaaaatttctcccatagagttcaaaaaattctacaagaagcattccaaggttttcatcagctctccgggcatcaattcttggatgcaactgtagaaagctaatggccattaaaattaggctgtatgagctaattccacctgtaaaaacttcattcaggtccctctgcagaaggaactgtttcaatactaaaatcaagtaaggcagcaatgaatatttcttcatgtaattcttgatgaactccgctgcccggacgcccgtctccatgttaaagctgatgtcaactttcacttcagtctcctgatctgtgagctttattattggtaccgtagccttgtcagcctacactagtgga

SEQ ID NO: 9591 - DNA, 346 bp, Homo Sapiens
cttatgttctgacccaccaaggaacacgttaatatgaacagatcagtaagaaaatggccaatcctgcttgacaggctatttatttctcagttctgggtcatgagttaataatgaccacaaatgaagtaatctttagcaagtaaaatggtgcctagtttatactttggaattcaatataagagtaggccatggtgtccccaaggagcaccagggtgccaactgctccgccacctgagcaagcctgagaactctcaaaccaatacaagaacattaatgacaacagagaaatttggcaatgcaaaaacagctgaaaagtgcacgaagccatttgctcattttaactatc

SEQ ID NO: 9592 - DNA, 513 bp, Homo Sapiens
accttatgttctgacccacctatagctattactgaaataaacgagtagaaagaaacgttgctgagccgaagttaaacctaaagctatcccctggatctttctagcaataaacccatgttgaacctaccatgaaaactttcattcactgtgcttttggttacgttgcctcctgattagtcattaattttaatgaggttttttccttgtgttgagtatgaatagaccttacagtttgaggatctctagaattccctgaattattggaaagacattcatgactcccagtgtgactagttaagagccccagggagcctgtgaagactagaatctacaagtaacctgcactaagaacgaaattcagtaaaggagactcaagcttagctcctggccatcttaaagggctaatgtatgtctttcacaggtttgttcaacattatcagtaattcacagtatagccaagagcatgagatataagtctcttgaaaaagccagttatcggggagtgagctttga

SEQ ID NO: 9593 - DNA, 1347 bp, Homo Sapiens
  misc_feature (904)..(912): n is a, c, g, or t
  misc_feature (941)..(956): n is a, c, g, or t
  misc_feature (1068)..(1076): n is a, c, g, or t
  misc_feature (1171)..(1185): n is a, c, g, or t
ttataaccccccccaccaaccaccctaccatgtgcgatccaacataacccccgtgtgaccggtccggcattcccgggatgcggccgtcttcgctgtggtgactttaactctcggttttcggttatagccggccggcgctcacttgtcttcaggaagctcggagcctttggtggagccggggagaggaagggtgggtgcaagagtgaaaggcgagaggggactgcaagcatccgggtcggctcctggccggagcaagatggctgagggcgagcggcagccgccgccagattcttcagaggaggcccctccagccactcagaacttcatcattccaaaaaaggagatccacacagttccagacatgggcaaatggaagcgttctcaggcatacgctgactacatcggattcatccttaccctcaacgaaggtgtgaaggggaagaagctgaccttcgagtacagagtctccgaggccattgagaaactagtcgctcttctcaacacgctggacaggtggattgatgagactcctccagtggaccagccctctcggtttgggaataaggcatacaggacctggtatgccaaacttggatgaggaagcagaaaacttggtggccacaggggtccctacccatctggcagctgctgtgccagaggtggctttccccaaaggagcccctggggaaactcccgcgcattgcctaccgaacagggcatgaaggcagccttcgcagccttttcctctgccgggctccggccaagaatttgggagagcttctccggatgggaatgcccccaaaaaaacccaaattggtcctttccaagggcgggattccaaatcccgggcaaaccttatgtggcaggggttaaataggcgcggaacaataacttatccagaggnnnnnnnnncctttattccaacggcacagtgggggaannnnnnnnnnnnnnnnaggcccaaaagctctaagggcgaaaaaattgggttgtgggggcgtctcctcgggcaactggaacctttctccccgggggtttttctaagggcccccccttatcaattccctnnnnnnnnnacactgctctcccacccacctcttgtaatttaagaatccccatcccccaaattaaccccggggaccaacccccccaaacacctctttttgagggnnnnnnnnnnnnnnngacgcccccatgaagaattggcgacaaaccccatcaacgggggaatcttacacaatgggttccgccgcggccataggcgcctccccccggtcggttctataaccccccaaagcatgtaaaaacctctgggaccccacttcttctccgcaaaaagcccctccc

SEQ ID NO: 9594 - DNA, 392 bp, Homo Sapiens
caattctggacttcggggcaattctggactatccctctctgtgcatcctcttcatttgatttgtgggaagcctcaagtggagccaaagaaatgtcccagaagcattgtaggggcttgtgtggcccacccacattcctggccactggcaagtcagtcttacaacaaggcctgccatcatcactgacagagtaatcccagcctgtctgccatccccaaattacgtggtcaccgcctggattgaatgttatgtcactgactggggagaaacccaagaatctttttcttaaatgatcgtatgtttcccttacaccaaaagcaagcaaaaagccagtagaggtcactgagtctcttaatcataatttcagcattcatattgcttccggggatcctct

SEQ ID NO: 9595 - DNA, 300 bp, Homo Sapiens
acactactactaccatggctacctggctggttcagcgtgcgctcaggtcgactggagagccgcgaggtcatcgagtgcctctatgcatgtcgggaggggctggactatagggatttcgagagcctgggcaaaggcatgaaggtccacgtgaacccctcacagtccctgctcaccctggagggggatgatgtggattttcttcaaccatgccctgcagcatgtggcttacatgaacactctgcgcttatgccacgcccggggtcaaggcccttcgacacatcaccactgcttgtcaagtgc

SEQ ID NO: 9596 - DNA, 701 bp, Homo Sapiens
cggagctggggcgacgaggcgattgcgggggcctgggctagctgctggctaccaatattctactttctgtctctatgaatgtgactaccctggttacctcatatttatttgcagtgacttaaaatttggaggcaaattttccttaagaggatatcaagttccagtatcttcagatgttgataagccgttagaatctccctggaaaaggagacatgaatgtctgcaatgatacttcctgacaagaagttgatacaagaaaaggaaaggagattaacagctagtgagcagaatttcgaacagcaggatttcgtattttttgcttccaactgcacacttccgttgcccacttttaaatcagagatacctacactcaaaacccagacaaggcaaaaggatacttttcttgtatattttttgagatcgaagaaacgacaatgtccaggaaacagaaccagaaggattcatcaggattcatttttgaatttgcagtccaataccgtactggcccagggaggagcttttgagaacatgaaagagaagataaatgcggtacgtgcaatagttcctaataagagcaacaatgaaattatcctggttttgcagcactttgataactgtgtggacaaaacagtacaagcattcatggaaggtagtgccagtgaagtactcaaagaatggacagtaacaggcaaaaaaaagaa

SEQ ID NO: 9597 - DNA, 827 bp, Homo Sapiens
gtcggaggaaggccagcatctaggggcagccagtggagggctgccagaggcctgttcctggagggtcactgtgctttttccaaccacactgtggagtctcagataccatatgtgaatctgcataaggaaggtcagcttgaggtcatttaaaagggattcttcggaaaaagtctcactgaagggttggcaggaccctgatggtaagagtcaagcccagcgtgggtgacgccattccaccagaggtccagttcagtacatgccttactgccggcctccacccctctctcgcctgctagcaagtgggctgtgggagggtgacatcggggaggaacaaagctccttgcccgcacttctgtccataggagacccttatctctagccagtgcccaacacacaggcactcaactagtatttcttgagtaagcagcatgcttttataccgttcctgatgtttatccagtgcttcataaattgcaaagcatgttttttcacagcagccgttcctttgagcctcataacaaccctgtgttcttaccgacaagcaaaactatgcagactttaagggttttcccatttggcgcagaattttctttcttctcccagactgacccaccagctctttgtgattcagaagacgttgaccttgagttcaggctctgaatcccattcatctttgtccggcttcctccaaccctgaaagtcaagtctatgtcctgatatagtgatctctccggtgatccatttcatttcagcagcttaactggctccggtgaatgaagcaactggaatttcctgctggcccaaagcagagaaactttcagtgtccc

SEQ ID NO: 9598 - DNA, 901 bp, Homo Sapiens
ggccgtcggtaacctggtttccgagagtgccgggcggtcggcgggtcagggcagcccggggcctgacgccatgtcccggaacctgcgcaccgcgctcattttcggcggcttcatctccctgatcggcgccgccttctatcccatctacttccggcccctaatgagattggaggagtacaagaaggaacaagctataaatcgggctggaattgttcaagaggatgtgcagccaccagggttaaaagtgtggtctgatccatttggcaggaaatgagagggctgtcatcagctctgattaagaaaggagatttcttcatgctttcgattctgcatggggtacagccagtcacctcaccagagaatgacggctggagaagaaaactctgtaataccataaataagagtgcttgtaataaaagactgtgcacaaggattaatatttcccttcttaagtatcaaaagaactctggaacaaattataccattaggaaggttttcatgattcagttgattttccaaaaatgaagctatctcacccagctgggtttggaggagcaatctgcttattattctgtcgttaccacttactcaagcgagctgtgatatgaatacaagcaaccagtgggctcgggaaggtccgggtctcttctgccatcttccagataagagatttcagtaaaaaactgccatgctgagctgccttatagagctcttcgaaaatgttcgagttgataaagctctttgaggacaaggtacttcgtgcacctcatgctgaagattgcaccgtgttggaaaataaatatgaagcaagtcaaactagatgcatacacttgtgtagaaatcaataatcaattaatagaagtgaaaaaatagacattaaaatgatttatttctactttgc

SEQ ID NO: 9599 - DNA, 1075 bp, Homo Sapiens
ggtctgtctcacgaccagcgctggcttttggcttcctgcactgacctccatggggaattattagagacctgcgttgtaaatattgctttaccaaacaggtcacggaggagtaaagtatctgcacgtaaaattggactacagaagttatgggagtggtgcatagggattgtccaaatgacatctctaccctggagagttgtaatcgggcgacttgggcgtcttggccatggggagcttaaagattggagtatcctccttggagaatgttcactacagacaatcagcaaaaagctcaaggatgtgtgccggatgtgtggaatctctgccgcagactctccttctatccttagtgcctgcctggttgccatggagccccaggggtcctttgtagtgatgccagatgctgtcacaatgggctctgtttttggccgaagtactgcactgaacatgcagtcatctcagctcaacacccctcaagatgcttcttgtacacacatcttggtgttcccaacatcatcaaccatccaggtggctccagccaactaccccaatgaagatgggtttagccccaacaatgatgatatgtttgttgaccttccattcccagatgatatggacaatgatattggcatattaatgactgggaacctccattcctctcccaactcttccccagtaccctccccaggctctccttctggaattggtgtgggctctcacttccagcatagtcggagccagggtgagcgtcttctttctagagaagcaccagaggagctaaagcagcagcccctggcccttgggtattttgtatcaactgccaaagctgagaatcttccccagtggttttggtcatcgtgtccccaggctcaaaaccagtgccctctcttcttaaaggcttcgctgcatcaccacatttcagtagcacagacagacgaacttctgcctgccaggaattctcagcgggttccacaccctcttgactccaaaaccacgtcggatgttttaaggtttgttttggagcagtacaacgctctgtcctggctcacgtgcaatccggcgcacgagtagattg

SEQ ID NO: 9600 - DNA, 846 bp, Homo Sapiens
cacaagtctgctagtcgcctccgtctgggtaccagccccctattactctgcaggcgtgtgaagaaagaaggaaactagctcggaccgtgcaggtttgtaggtctgttggcctgtaggtttcggcacaagtttcagcgagagaaggagaaaactgccttggttggaaccttgcagattcatcacaagagagctacaagagcctggaagaagctgaagactgctaccctccatccttactcaccctggacctgagagacctcttcaatcaggtggagcaaggccctctcctgtcctgccccaaggctggcacagacttgagcatgggccgggctcgggaagtgggttggatggcggcaggactgatgattggggctggtgcctgctactgcgtttacaaactgaccataggaagagatgacagtgagaagctggaggaggagggggaagaggagtgggacgatgaccaggagctggatgaggaggagcctgatatttggtttgattttgaaactatggctcggccctggactgagcgatggggattggactgaacctgcggccccaggtggcactgaggacaggccctcagggggaggcaaggccaaccgagcacacccaataaaacagcggccattcccctatgaacataacaatacttggagtgctcaaaattgtaaaaatggcagttgtgttctggacctctccagtgtcttttcattcagggaaaactgttgtttgcgagcccaaggatgcgggctttcatttaggcaggatatcaatagccatttggccagcctctcaatggctagaaacacgagccccactcagaccccacctggtaaaaag

SEQ ID NO: 9601 - DNA, 1231 bp, Homo Sapiens
  misc_feature (50)..(50): n is a, c, g, or t
ctaataattaacaaccatgatgttcgattacctgccaatttattgtatangtacttgaacaaagcagctgaattttatatcaattatgtcactaggtctactcaaatagaaaatcagcatcaaggcgcccaggatacatctgatttaatgtcacctagcaaacgtagctctcagaagtacataatagaagggctgacggaaaaatcatcccagatcgtggacccttgggagaggttgtttaagattttgaatgttgttggaatgagatgtgaatggcagatggataaaggaagacgaagctatggagatattttgcatagaatgaaggatctctgcagatacatgaacaactttgatagtgaagcacatgcaaaatataaaaaccaagtggtgtattccaccatgctggtcttctttaagaatgcattccagtatgtcaacagcatacagccatctctcttccaaggtcctaatgccccgagccaagttccactggttcttcttgaagatgtatcgaatgtgtatggtgatgtagaaattgagcgtaataaacacatccataaaaagaggaaactagctgaaggaagagaaaaaaccatgagttcagacgatgaagactgttcggcgaaaggaagaaatcgtcacattgtagtcaataaagccgaacttgctaactccactgaagtgttagaaagctttaaattggccagggagagctgggagttgctctattccctagaattccttgacaaagaatttacaaggatttgcttggcctggaagacggatacttggctttggttaagaatcttcctcactgatatgatcatctatcagggtcaatataaaaaggcgatagccagcctgcatcacttagcagctctccagggatccatttctcagccacagatcacagggcaggggaccctggagcatcagagggcgctcatcccagctggcgacgtgccactttgccgctaggggagtacagaatgacatgtgaaaaagtccttgatttgatgtgctacatggtactccccattcaagatggaggcaaatcccaggaggaaccctcgaaagtaaagcccaaatttagaaaaggttcggatctgaagctcctgccttgtaccagcaaggctatcatgccatactgcctccatttaatgttagcctgttttaagcttagagctttcacagacaacagagacgacatggcattggggcatgtgac

SEQ ID NO: 9602 - DNA, 1419 bp, Homo Sapiens
gaggcagtgccaacatccccctggtgcccgatgaggagctggacgctttgaagatcaagatctcccagatcaagagtgacatccagagagagaagagggcgaacaagggcagcaaggctacggagagagctgaagaagaagctgtcggagcaggagtcactgcatgctgcttatgtctcccagcatggccattcagggtgcacagccgcaacggaaagagttacacgttcctgatctcctctgactatgagcgtgcagagtggagggagaacatccgggagcagcagaagaagtgtttcagaagcttctcccttgacatccgtggagctgcagatgcttgaccaactcgtgtgtgaaactccagactgtccacagcattccgctgaccatcaataaggaagatgatgagtctccggggctctatgggtttctgaatgtcatcgtccactcagccactggatttaagcagagttcaaatctgtactgcaccctggaggtggattcctttgggtattttgtgaataaagcaaagacgcgcgtctacagggacacagctgagccaaactggaacgaggaatttgagatagagctggagggctcccagaccctgaggatactgtgctatgaaaagtgttataacaagacgaagatccccaaggaggacggcgagagcacggacagactcatggggaagggccaggtccagctggacccgcaggccctgcaggacagagactggcagcgcaccgtcatcgccatgaatgggatcgaagtaaagctctcggtcaagttcaacagcagggagttcagcttgaagaggatgccgtcccgaaaacagacaggggtcttcggagtcaagattgctgtggtcaccaagagagagaggtccaaggtgccctacatcgtgcgccagtgcgtggaggagatcgagcgccgaggcatggaggaggtgggcatctaccgcgtgtccggtgtggccacggacatccaggcactgaaggcagccttcgacgtcaataaaaaggacgtggtcggtgatgatgagcgagatggacgtgaaagccatcgcaggcacgctgaagctgtacttccgtgagctgcccgaggccctcataacaaggacgtgtcggtgatgatgagcgagatggacgtgaacgccatcgcaggcacgctgaagctgtacttccgtgagctgcccgagcccctcttcactgacgagttctaccccaacttcgcagagggcatcgctctttcagacccggttgcaaaggagagctgcatgctcaacctgctgctgtccctgccggaggccaacctgctcaccttccttttccttctggaccacctgaaaagggtggcagaaaacggaggcagtcaataagatgtccctgcacaacctcgtccacgtgcgtggacaac

SEQ ID NO: 9603 - DNA, 589 bp, Homo Sapiens
gtgaatgggtgactggataggctttacagagtgggtgcttttttctctctgcaattacctgtcatagcatttgtgctcaccacgaaggatggtctctgccttctctgtcggtgtatgccatctgaacctaggaacacaaagtatattggcctcaaacggagacccagggttgccagttttccgtgggccttcccctcccttgaaatgtctttaattacctccccttcatcgtcaggccacgtgtgacttctgttcttagcactgccagggtcattgacttccatctaagcttgcatcaggaagatgttccttctgtgatcattggtactgaagccagaaaagctctcattcaggaactctgaagagcaaaaagggacaaacactaactgctgagctgggccatttgatctcctttcaccttgcattgctgtcacagcaccttgtatgatggcaggacaggctccagcagagagaactgcacagtgaccactgtatttttcacgctcttccagggatccctgtcccccgacattgaagagatctcattcaggccagagacacagagaccacatagtccagaatgcccgca

SEQ ID NO: 9604 - DNA, 604 bp, Homo Sapiens
attatggactcgtgcggcgcggtaatgaggcttctgggctctaccagatgtacggtgtgctggccgatgtcatcctgttgaaggagaatccacggcctttgagtacctggaggagttccccatacagatgctggcccagctggagacactcacagggaggaaggcaaagcacgggctcttcgtcatcaacatggaatatggcagaaatttctctggccccgacaaggacgtcttctttgatgaccggtctgtggggcacacagaagatgcctggcagtctaactttcttcatcctgtcatctactactatagatacctccccaccgaacaggaggtgaggttccgccctgcacactggcccctgcctcggcccacggccatccatcacatcgtggaagacttcttaacagactggactgccccgatcgggcacatcctacctctgaggcgcttcctggagaactgtttggacaccgacttgcgaagcttctatgcagagtcctgcttcctgttcgccctcacgcgccagaagtgacacccttttgccagaggggtacctgaggatgcggactcgtgagtacgagagctttgcagcacagagtga

SEQ ID NO: 9605 - DNA, 607 bp, Homo Sapiens
cagatttctcggggaatgctgggtgatgttggagagtagctggagaggtgggctgtagttagggctggtaggtgtgtagttgggactagtaggtgaatagctgggtgatgtcgggctgtagctgggtgatgttggggtgtaattgggactggttggagaatagttcgggctggtgggtgagtaacttggggaagtgggtgagtagctgggggaggtgggtgaatagcttggagaggtaggtgagtagctgggagaagtgggagaatagctgggtgaagttggcgagtagctgggagatgtcggcgagtagctgggagacgttggcgagtagctaggggaagtgggcgagtagctaggggaagtgggtgagtagccgctccttctccagagcccgtctggtgagctccagttcatcctgcagcctttgctgttctgagccccgctccaggacagaggcttgtaggaacatggctacctcctgcagactgctgacactggccttggtctgcggctagggagagtgccaagtcctgggccttctccctccactcaatctcctggcttctgtctgtctcagggctgcctgtagccgctccagctcccgctg

SEQ ID NO: 9606 - DNA, 225 bp, Homo Sapiens
gcaattctggacttcagggcccttcaaactagcaatgttgtctgcatccttaggttcattgattcactcatgccacaggtcagggcccactgtggacccggcctttggctgggccccttcgttgctgttctcgctgctagaagatcccccctcttcctggtctccaggtctcagcttctcacttcccagaccagccttggaccttggacctgccctcctcctgga

SEQ ID NO: 9607 - DNA, 632 bp, Homo Sapiens
tcgtctagaggatcccggggcattctggactgctgttattatctttggaaatggagaagaaagagcccagatgcttgaaatccacacatgataatggtgatgataataatttagtggttctgatcaatccctccactagaaccagagatttgctacatagtatgcaaaagtagaagaattggagtagaaagaaaaatcaaagacctggataattcataagttaatcgagcttcttaataattgagctgactttataaatcaaatgtctcatcaatccagagactcattaaataaaatgattacacgccaggcatgaagggctagatttggctattttgagaaggaaagtgcccaagaatagcaactggctcagtcctttaggtgtctacactaatatcaaaggaacaggccaggcccaaggagagagagggaatatgtttctgtgcctgatcctttctctagattttatctcagttgtatgacattgaagcacctgactgagcaattgagcatgatgtgttctcctgaccatccttctaaaaccattttccaccagtttctaccttctgatggcgctttagtcacctgcacttacaaacaggtgcccaaattggccctctctccccctcttt

SEQ ID NO: 9608 - DNA, 362 bp, Homo Sapiens
agtgctacctccacaaacagatctaccagttctgctgtgagcatagagggtcaaacaaaggctacttctttccctgagtggcaaactttctggcttcctaaaccctgagtactttagagaagaggaagaaagctaggactactgtgtccaaaggtgttttccagaatgctctaatttgtctgaagatactgtgtttcatttccagacaagagttcaagaaaaaaaatccagactgtggctcctttaggccctggcatgggaagatcagactgattagcatatgcaactaatctaaacattttatgggccagcactttccttccctacctctgccagtgaatgggatcgctctagagcacccg

SEQ ID NO: 9609 - DNA, 503 bp, Homo Sapiens
taatgggctccatctactgatgtgctatctactgacctgctgtctggaattattggctccatctactggcctttggcgtgtatctgatatttgtaacaaaatagagcatgatatttgaaagaatgacagggcacttttattgaaaacactgataaacaatttggtttgaagatagaaagctaacatgttgtattgtagaagatatataggtatagcctttgctacatagtgcactctagccacttgtgataatgaatgttttatagacaaactcagagccatatactgtgtacagtatgactctgggcactctcattaaacaccacacatggttcaggagtaaaccaggagacaactcaagctgcagtcgaacagtatcctgccctctttctccatgctgcatcgattccggagaaggtccaggatgcttgctctaagatcaggggtcagagactggtggaagtggtcctattctgtcagtgaagtccagaattgccccataa

SEQ ID NO: 9610 - DNA, 385 bp, Homo Sapiens
  misc_feature (302)..(302): n is a, c, g, or t
tactaatgccaatttttcatagttattatagttattgtcagtagtgggttttttaaaaatcaagttattatgacatatatggaggctcaggaaagcccagcagtgtgtggttgacattaatttggtttcagaaaataaaagggctgcctctagcatgtccttagagctcctcagcctggtatttaagagcactctcagttttgacaactgggcactgagaactatttgtacctttctatagtgaccatccaaaccacttgcatatattaattttaacgtgtttgatgataatattgatgacnaaaatgtatgtataagcagagcaggcaagtcactctggtagggaaaagtgcagtgaagtccagaattgaagactcctgctaga

SEQ ID NO: 9611 - DNA, 664 bp, Homo Sapiens
gggagtgcgaatcatgggaggcggctggtggtgggctcgggccgctcgccttgcccgtcttcgcttccggaggtcgctactgccgcctcagcggccccggagcgggggcgcccgggggtccttcgcccccggccacggtccccgcgccggggcttcgccgcccccagtgtccgagctggatcgtgcggacgcctggctcctccgaaaagcgcacgagacagccttcctctcctggttccgcaatggcctcctggcatcgggcatcggggtcatctccttcatgcagagtgacatgggtcgggaagcagcatatggcttcttcctgctgggcggcctgtgcgtggtgtggggcagcgcctcgtacgccgtgggcctggcggcgctgcgaggacccatgcagctgacgctggggggcgcggccgtgggcgcgggcgccgtgctggccgccagcctgctctgggcgtgcgccgtgggcctctacatggggcagctggagctggacgtggagctggtgcccgaggacgacgggacggcctccgcggaaggccctgatgaggcgggtcggccgccacccgagtgagcgacacggccgtggggcctggcaggcgctggacagcgcccgaggactgggacattaaacctgacctcccctcctccagaaaaa

SEQ ID NO: 9612 - DNA, 883 bp, Homo Sapiens
gggagaccgacttggacggagccgagctgaggctcggcttcctgctgatggtcagggttttggcaactccccggtgtgagaggggtagggagtgctcccggcggcgacggggccgagttcaccagccgccggggcagtagtcgaaggcccggcgcggcatgtcctgggtgccgcggtgcgggcagtgaactgcgcgccgggcgggatgggccggcgccgggcgccagagctgtaccgggctccgttcccgttgtacgcgcttcaggtcgaccccagcactgggctgctcatcgctgcgggcggaggaggcgccgccaagacaggcataaagaatggcgtgcactttctgcagctagagctgattaatgggcgcttgagtgcctccttgctgcactcccatgacacagagacacgggccaccatgaacttggcactggctggtgacatccttgctgcagggcaggatgcccactgtcagctcctgcgcttccaggcacatcaacagcagggcaacaaggcagagaaggccggttccaaggagcaggggcctcgacaaaggaagggagcagccccaccagacaacaaatggggagcggaaacccagcacgaggggctagaactcagggtacagaatttgcaggcggtgcagacagactttagctccgatccactgcagaaaagttgtgtgcttcaaccacgataataccctgtttgccactggagggaccagatgggctacgtccggtgtctgggaaggtgcccaggcctggacgaaggttctggagttcaaaggccacgaaggggaagattggagaccctggctttagggcctgaatggcaagttggtaaccgtgggcccgggacctttagggcctctgggagc

SEQ ID NO: 9613 - DNA, 854 bp, Homo Sapiens
  misc_feature (512)..(512): n is a, c, g, or t
  misc_feature (795)..(795): n is a, c, g, or t
  misc_feature (807)..(807): n is a, c, g, or t
  misc_feature (820)..(821): n is a, c, g, or t
ggggttcccactgtgctcctaactgtgcagcacctgggagctctggcctggggctggaggccctggtaggagctgcagttggaggccgttctgtgcccagcagcggtgagcggctcccatgggccctgtgtctgcagggagccagggctgcggcacatgtgctgtgaaactggcacccacctggcgtgctgctgccgccacttgcttcctgcagcacctcctaccctgctccgtgtcctccctctccccgcgcctggctcaggagtgctggaaaagctcacgcctcggcctgggagcctggcctcttgatatacctcgagcttcccctgtgctccccagccccaggaccactggccccttggcctgaggggctgggggccccacgacctgcagcgtcgagtccgggagagagcccggagcggcgtgccatctcggctcggccttgctgagagcctccgccctggctttctccctgtctggattcagtggctcacgttggtgctacacagctnagaatagatatatttagagagagagatatttttaagacaaagcccacaattagctgtcctttaacaccgcagaaccccctcccagaagaagagcgatccctcggacggtccgggcgggcaccctcagccgggctctttgcagaagcagcaccgctgactgtgggccccggccctcagatgtggacatatacgggctatttccctattttactgggtcttcacatttagtacctggtaataaacccccccctttaaggagagaattaaaccttttttgccgccncaccacaaaacncaaaaagcaaagnnaaaaatgggcgggcccgcctccggcccctccaa

SEQ ID NO: 9614 - DNA, 659 bp, Homo Sapiens
ttgggcccggctgctgccggcggcggcccggcgcggtgcgggcgttcgcgggcgccgggagctgcaggggccccgggcggcggcgaggccggagaggggcgggcccgggacaccggcacccggcgccctcggagccaaaggcgcgcggctggacacggcggggccctcgcgcgcctggagacgatgccaaagctgcacggcttcgagttctggagccgcaccctgcgaggggcccgccacgtcgtggcccccatggtggaccagagcgagctggcctggaggctgctgagccggcgccacggggcacagctctgctacacgcccatgctgcatgcccaggtctttgtccgcgacgccaactaccggaaggagaacctgtactgcgaggttgtgccccgaggaccggcccctcatcgtgcagttctgtgccaatgacccggaggtgtttgatcacgcggctctcctggctcaggattactgggacgccattgacctgaaacttgggctgccccacagatgatacccaagagaggtcactattggcgcctttctgcaggaacgagtggggacctgctccaaagaatgattttgctggcccacgagaaactctctgttcctgtcacgtgcaaaatccgtgtcttcccggagattgacaagac

SEQ ID NO: 9615 - DNA, 839 bp, Homo Sapiens
accgggaaggcagggtggtcacaggcctttccaggggggcgtgtcccttgaaacttctctcaggtaccaaggtgtcccccgttgggttccggggctggccaggacccccccgctttaaagtatctcctctcccgcagggggcagcttgctgaagaaagccacgcctggaggcccacagctggactttcaggggcatctgcctcgactcgctggcccagggcccagaagtgaatgtagacatactgatccaaatttactgtcacctggacctcatcctgagggtggtggaccaccagcgcgtaggccagggtgtcctcagacagcggggagaagttggcctgggccagcaggggctccagagcccgaagcacctcctgctcattagacagacgctggggatccgttagtgatggctgatcgagggtctccctgtcagggttgatggggtcatataaggcctgcagccagggccaggatttggtggtagtggaacagggtgcagaagtccacgtgggctgagaacagcctccaaagccgccttctctgccggactcgagtggaattccatgtattaggaggcggagcagctgctccttggagaagggaatgaagcgctcgcggtactgctgggcccagtcgcggggctccctggggttccacatcttgcgatactcccccattttggctgccagcgatgagagggcccgggggggcccgaggagcgcgggcaacagtggccatactcggaccctggacccccagaccccccgggtcacatgcagcatggctagaccctttccccggagccttagccaaagctcgactgtcattgagcctcc

SEQ ID NO: 9616 - DNA, 449 bp, Homo Sapiens
  misc_feature (47)..(69): n is a, c, g, or t
agagcccccgcggggggcttcccagcggcgtcgctgctgccccctcnnnnnnnnnnnnnnnnnnnnnnnttctgcttggcgcgcatcttctcgcgtttcgccttccactcctccaggaagtctgtggtgctgccgccgaggccgctgctggtccggtagccaccggtcgccatattcccaaaggggccggtcgggctctcacctcaggccgcccaccagggctccggccgctgcctcctcttccttcctgcggccccgaggatgccaggagacgacctccaggagagggacggccgccgctcccacagcagccggcggggctgaggtgaaagacaaaagggggcgggtaagggaagcgtaagatccccgcccgacccaagggtctgcccccgggctgacgcaccttggagtcctcgagcgcgcccaccagtcactaccggccagcagcc

SEQ ID NO: 9617 - DNA, 653 bp, Homo Sapiens
cggttcattcgagccatgttaatttagttaaaaaacactcaatagggttatgaaataattaaaaaaattgaatacagaaatgatgcaaagaaactgaagtctacttcaatatactccacttgaaattctcagtgctttgagtatgaagttgtaagtaatgataagtgaaatgaacctcctaacaagaagcagcaattcttcaatccagtaatactgaggccaacagaaaagaagtgcactgaggtttaccccatccaggtcagaactcttgtaaaatgctctgtggatttcaattcaacacttctgtgtccaggataaccactcttatgggggcttcttggtggagcagtaatcagtttctacagttcacttgtctgcatagaggtcgtgctgtgcctggcagtaatctccactgcccttcagaaactccataaatgtgtgaccaagaacaccacagaattgaggaatatgtttactcattgaagattgtggcctaatcatacagccggtcccgaggcggcggcgacacaggcggtggcggtggctgcagggcaggaggcggcggtggtcgtggcggagcggcggtggcggcgatgcaggcggcggcgggggcaccagacatcccgggaattccggaccggtaccagcctgtt

SEQ ID NO: 9618 - DNA, 845 bp, Homo Sapiens
  misc_feature (162)..(162): n is a, c, g, or t
gttggaagggttcccttcttgaggaagatttcggaaaatagttccacaaaggaacctgtgccatcagctttggattattagggatggcatgaaatgcactgtagaaagaacgcaccagttgcattctcaattgctgtgcgctgttgagtagtcagtcctgtngtagcagctgaagaaagagaagctgatcttgcactggtctgttgtgcacctaaattatgctttccagaagtggacccagagtgacacaataaaaacagaagtgctgtccatagtggattgacttcagaaccaccaagccaatctttcataatatggctattgccaacttctgtcaaaaacctaagaataggagcaactaagtcggctgtgataggcatcttattacattgttgtgggacatgatggcgcctgagtttgtcctgggaaatatctattgactgggcaatgctttctgagctagaaatgtggctaaagcagaaactagccagactcctcacaagaagagaaggcaaacctgagtctagtaattgtttaatagcttcaggagattgagaagaggaagcaagggtagccaaatgtgattcagttaatgcgagaggtgcttgtgcatttttagagtcatctgttaaagacgaactaagatcctgctttttgctatcatctgtcatggacagtctatgatgacattgcactggaggaggggtaattcccatccagcccatgagcaaagaaaaatagtttgggtgtacgtgacacattgagcaaagtagactgtcaacagctttcttcaaaaccatattgcagggaagagacatggaccaattaaaaagtaactcaaagcc

SEQ ID NO: 9619 - DNA, 516 bp, Homo Sapiens
tgcttacttaacccagtgtggtgatgaatacagcaggggcttccttcaaaaccttaaccttattcaagatcagaatgcgcaaacaaggtggaagcagggcagatatgatgaggatggcaaacccttcaatcaaagatcttggcttttggggcatgagcgaattctcacaagagcaaagtcttatgaatgcagtgaatgtggaaaagtcattaggcgtaaggcatggtttgatcaacatccaaagaattcactttttagagaatccttttgagtgtaaggtctgtgggcaagccttcagacagcggtcagctcttacggtccataaacagtgtcacctgcaaaacaagccatacagatgtcatgactgtggaaagtgttttcgccagctcgcgtatcttgttgaacataagaggattcacaccaaagaaaaaccttataaatgtagcaaatgtgggaaatcttttagtcagaaggcagccttattagccatcgcttggtcacctgggttaagtaagc

SEQ ID NO: 9620 - DNA, 680 bp, Homo Sapiens
actctagaggatctcggcattctggactcggggcaattctggtactcggggcaattctggactcggggcaggtctgctgccgctggaaccaggagcgcaggcagctggtatggaaaatgtggttgcagggcagtctcttggcaccagtcaccatctcttctcggcagatgatgcagacattgtccattgcctggagctcctctggggtggcatctggatacagggtgttcatgttgcggatggctcggcgagacatgatggcacctgtcacagctttcttgaactgtctcatggccaggtacatgggccggatggcaaagagtgggaaggtgtgcaccttgatcatgatggtcatgaaggccatgtacagcagaaccttgatgaggcctgtaaacagctctgtgtagagcatgtacacagccttgttgtcccagaggttctcactctggaggtcacggaggtgcagcacatacttgatgaagatggtgagcaccatcgtcatcaggatggcatactcaaagccaaacaccagctgcacagaggccccacgggtcaaggatgctgtgataggcgtggctgacgaaaaggaagtccaggatgtccaggaggaacattagagctgtggggaaccccacacatgacgggtgggggggtcagcccaggggcccaaaagcttgttt

SEQ ID NO: 9621 - DNA, 273 bp, Homo Sapiens
tcggggctggggatgacagggccagaccaggtaaagacaaaagcaaaaccagaacacttcaaaaaaaacaaacagtgggaggtaccccccaaaaaatgagatgagcaacagctggactacttgttccagctcttctgtgactcctgaactatgactctagccatggcacaccaaagcaaggctcataaatgtttcctagcatctcagaatcccagggattttcagcaagaaatcactgaagtagtacagaattgccccgagcggatcctctag

SEQ ID NO: 9622 - DNA, 601 bp, Homo Sapiens
  misc_feature (142)..(160): n is a, c, g, or t
gcttgggagcttagccggagatcgcctgaccctgggagactaagcccggagaatcgcctggacctgggagccggaggttcccgtgagccccggcggcacccttgcactctagcctggccaccacgccgcactccctcccccnnnnnnnnnnnnnnnnnnntcccaaggggctgcagctgccaaacccaataccctctatttaacccctactctgttttacaagagaaataaaagaagtatcagcagagctcaggtgctaacacctgttgagggctgacctacaaaactctgcctacaaaactctcttagacaggtgaatatgccactagaagttaggttgctggtagacctgggggtccctgcgggagggtgatggtttctttaccaccccacaggagatttcagtggcaaggcatgcctgcagtgggctttgggccatgcatcttccaagtccataggtcttcacctgggtggcagtgagaaaaagtagaaagtaatgagcctcctgtgtctctggaaggttctagggatagggtagagggaagaagagaacaacagcctggcttgtgctgtttgtggagtagcctgagatcctctagag

SEQ ID NO: 9623 - DNA, 494 bp, Homo Sapiens
gctgagatgacagtcggcccactctgtcgccattgggcgagacctacctagtcctgacgacaacggacaaaggccttaaggggcctggaaggtgagcgaagtcccgaacgacgacgggtggaacggttagcggccatcgggcggttggtcttcattctaccagactttgctgtcggaagagagaaatggtagaatgacaggccacgtttggcccgttggaaatgcccaccaccctctgggaagatttactggccgtttatggaaggcctgtgtatataatatgaaaaagctgctctcaactccaccccaaccttttaatagaaaacatttgtcacatctagcccttctagatggaaagaggttgccgacgtatgataaaatagagttagaaagttacacatcttgtaaattctcatttgtttaaaagaaatcatagaaaatacatgtcttctggagatgacttttggaaatggagtgtcaagcgcctcagcacg

SEQ ID NO: 9624 - DNA, 359 bp, Homo Sapiens
gttggatcctggccttcaagcctctgcagactctcatcctctgtcacagggtaggtgtggatggtgcccgtgaccatgttcaagatatgaaccagctttaagtttaagatgtcatccagggccttgaagcagccattgggcccatacgtgggatccgtgcccctctgtcgggggtgccacatcagcatcagttgcagccacttctccagtcgctcagccaggacactgttaagattattggggtagggtaaagagcttgaaaacttcaccgttccactcaagtcttcgctaacaacaatgtccacctcactcttctgccgcacttttgaatgcctgcaaatatgaatcttgttaggtgc

SEQ ID NO: 9625 - DNA, 853 bp, Homo Sapiens
caggaccagtcttaatacctaaaatacattagtatcaatagatagaacccacacccaagaactccttggggccttcaataacttttaagagtgttaaggtgtcctaagaccaaacattttgcaaattgttgctttatcaggatttttgttatttctagaatgcatttctttctaactgatctacttgggaaaaaaatcgttacctcatggcaattattgctttcctatcaatatggagattatatttctgaaggagactgaccaaaattatattaaaaggtttaaataaaacaagtggatccatgttataacatgaggaagagagctgccccactagatgtctgacattagataactcagagtcccgcctctccaacaagtctcccttactagagaaacggacagattctgttttgtgggatgggataaggagacaatctgaagtagagtttgacacaatattattctgcccatatgaaattctggtagccagggtgccaggtgtattcataatccagatgctgtcaattttaagcctgaagccccaagaggcgagcagtgtttaatacatcatctcttgttaaatagcagccacacagttggcggtagccagtgaagcattccctgccatgtaggacacgccagttgtctataaataggaccctgccaggctttagtttgacccaaaactcattctcaggtctactcaactctatcgttagagtccggtgtgctgtataccagcgatggacgacatcataaggatcggtattgatgacagcccggtcatagttgttgtacctgatcaaatacagctctttattccatgggtagatatttaagactggtcgtg

SEQ ID NO: 9626 - DNA, 438 bp, Homo Sapiens
ttggtaagactgactcagctgctgttcaactcccccctggctgaactgcttttgctaatactgttaagctgtggcccaggagacaaaacgtcctgaggtactagatatatctgacgcatgcaaaaggcaaaacctccctatttctcatatttagaagatactggtatatagtcttcccaaatcaaaaaatagaaggcaaaatggagataagaaaaaccgtgccaaacctcagctatacatagagtgctttggaaattgttagtagactgaaataatttctatctagctaaagtagataggcgtaatctaatcaaaagagtttaattcagatcagttgagagtatctgactttagatctgctgctgttcggaaattgctgaagtctaaacaaattaaccccactctgaaccaacatacatctccttgattgattcaggg

SEQ ID NO: 9627 - DNA, 562 bp, Homo Sapiens
ttacaacagctccagttacaacagctacagagaaaagaatctcaggagaagactcaggaataaaaacagagaaagagattacaggctaaaattactagaaatcctcagaaaacaaagaaggaaaaagaaaccaggaaaaccatcagcccaattaattaaatcaaggagtgaccgggagatccagtttactaaaagaacggaaatttcttgaatacgaagagttgaggacgaacaatcaggaatagtctagagcaattgcccagtgtccaaagaacaggagcataaagaagagctggcaagagtgtctccagatggtgacaagtttgcagacttttactagactactttgaggccaacaagccaaccctggccctctacttatggagaaggcctacacaggattctgggatacagatggaaggatgacatcttttcaggttctctctttacagatgtgattgtccttccaattcctgagttctaactccaggcttgtgttttgaagggctcctctgagccacatggaagatcctcgggtaccccaatggagccctggaactat

SEQ ID NO: 9628 - DNA, 995 bp, Homo Sapiens
  misc_feature (607)..(607): n is a, c, g, or t
ggggggtgagagtcggcccaaaaagcggcggccgttggaggtggctgcggcagctgatgtggcctcatggatgagctggtacacgacttagcctcagccttggagcagacatctgagcagaataagcttggtgaactgtgggaggagatggcgctgagcccccgacagcagaggcggcagcttcggaaacgccgaggtcggaagcgtcgttctgacttcactcacctggcagagcatacctgctgctacagcgaggcctctgagtcaagtctggatgaggccactaaggactgtcgagaagtggctccggtgaccaattttagtgactctgatgacacaatggtagccaaacgacacccagctctcaatgccattgtcaagagtaagcaacattcttggcatgaatctgactcctttactgaaaatgcaccttgtcgaccactcaggcgcaggcggaaggtgaagcgagtgacatcagaggtggctgctagccttcagcagaagctgaaggtgtcagattggagctatgagagaggctgcaggttcaagtctgctaagaagcagcgtctgtcccgctggaaggagaatactccctggacctcatcangccacggattgtgtgaatcagcagaaaataggactttcctaagcaaaacaggaaggaaagaaaggatggagtgtgaaacagatgaacataaactgggctctgatgagaacatgtcagaatgtgaaaccagcagtgtgtgtagcagcagtgacactgggctctttaccaatgatgaagggcgacaaggtgatgacgaacagagtgattggttctatgaaggagaatgtgtcccaggattcactgtccctaatcttctgcccaagtgggctcctgatcattgtgactgaagtagaaagaatggattctggattggataaattttcagattccacattcctcttaccttctcggccagctcaagagagggtaccatactcgcttatatgaa

SEQ ID NO: 9629 - DNA, 955 bp, Homo Sapiens
  misc_feature (718)..(726): n is a, c, g, or t
  misc_feature (750)..(780): n is a, c, g, or t
ggcgatcagtcagggggtgggggacacaggactcacggctcgcctcggcctctacctggagtgatggtggctcagttcgtcctagttactggctggttcttcacaatctcaccccacagattgatgggtcaaccttgagaacgatctgcatgcagcatggcccactgctgacattccatctgaatctaacccagggcactgccctgatccgatacagcaccaaacaggaggcggccaaggcccaaactgcactgcacatgtgtgtgttgggaaacactaccatccttgctgagtttgccactgatgatgaagtcagccgctttctggcacaagctcagccccctacacctgcagcaaccccaagtgcgccagctgcggggtggcagtcgctggagaccggccagaaccagtcagatcccgtgggacctgctctgaatctttttggtgggtccactgggctcgggcagtggagcagcagcgctggtggcagcagcggggccgatcttgctggcgcttcattgtgggggcccccaaactattcttctagcttatggggagtcccaacggtggaagatccccataggatgggcagccctgctcctttactacctggtgaccttctgggaagagggtcggaatcaatctgaacttaaaactttcaactctgacctcgtgaccttttttggaacagcagcagcactaacttgaccttttcgannnnnnnnncaacttgcaataaatacatttttnnnnnnnnnnnnnnnnnnnnnnnnnnnnnnnggtgggtcattgacagactgtctgagcacatagttgcctcccttataacttcagttttttcgttgggaatatgaatccaaaaagagaacatatcactcttgaaatacttgaatcatgaacgccaacctagaaagacaatgtgaagcaagtacacataccatttaaatttaaacac

SEQ ID NO: 9630 - DNA, 1322 bp, Homo Sapiens
  misc_feature (797)..(797): n is a, c, g, or t
  misc_feature (1036)..(1036): n is a, c, g, or t
  misc_feature (1076)..(1076): n is a, c, g, or t
  misc_feature (1195)..(1195): n is a, c, g, or t
  misc_feature (1223)..(1223): n is a, c, g, or t
gggaggggccacatggctgagggggacgcagggagcgaccagaggcagaatgaggaaattgaagcaatggcagccatttatggcgaggagtggtgtgtcattgatgactgtgccaaaatattttgtattagaattagcgacgatatagatgaccccaaatggacactttgcttgcaggtgatgctgccgaatgaatacccaggtacagctccacctatctaccagttgaatgctccttggcttaaagggcaagaacgtgcggatttatcaaatagccttgaggaaatatatattcagaatatcggtgaaagtattctttacctgtgggtggagaaaataaaagatgttcttatacaaaaatctcagatgacagaaccaggcccagatgtaaagaagaaaactgaagaggaagatgttgaatgtgaagatgatctcattttagcatgtcagccggaaagttcggttaaagcattggattttgatatcagtgaaactcggacagaagtagaagtagaagaattacctccgattgatcatggcattcctattacagaccgaagaagtacttttcaggcacacttggctccagtggtttgtcccaaacaggtgaaaatggttctttccaaattgtatgagaataagaaaatagctagtgccacccacaacatctatgcctacagaatatattgtgaggataaacagaccttcttacaggattgtgaggatgatggggaaacagcagctggtgggcgtcttcttcatctcatggagattttgaatgtgaagaatgtcatggntggtagtatcaccctggtatggagggattctgctaggaccagatcgctttaaacatatcaacaactgtgccagaaacatactagtggaaaagaactacacaaattcacctgaggagtcatctaaggctttgggaaagaacaaaaaagtaagaaaagacaagaagaggaatgaacattaatacctgaaactataggaaaggttaatttgcctataattatatatacattccatagtcatncaggaatatattgtgcagagagagtatccttgactgcttnagtcagccagttcagcatggataccaacattagcttttcttcttggttatatcatctgcccaaaatagagaacttatgatctattcatgggtggttcaggctttatttgggaggactantttggacttaatcacgccttcatctaantttaacaaggtaaccgttgccccagggcagaaccctgaattaaactggcccattttcagaccatgtccagttggccttttgtataggtgggaaaaacaa

SEQ ID NO: 9631 - DNA, 502 bp, Homo Sapiens
tttcctcctccagcacttaaaatgtgcctttctcccacatagaggacagtgtgcctaatttcttacgtaatctggattttcctcgccaatgatatgttcttggattcacagaagtggcaaatgggggtttccctctttgaagaggaaccttctccttcatggggttcagcaggaggttttatcttttgaagctcagggcagaaatggtttgggggaaattaggtcatgggtctgggatcagattctgtgaagttactgagcttcaggacctgcatgtgtttgtgtgcatgtatgtgtcccctgtgtatgtgtgaatgagagagggaagaaaaagaagaaagagaagctttacttggatatctgcctctattatgaaggactctcaagtaacagccttttgatgtaaagagcagcttccactgtctctgaaactgcagcgagttgacaggtgatgcggctgcatttaggaagcctggaccctctaccttccatgctggctgcg

SEQ ID NO: 9632 - DNA, 895 bp, Homo Sapiens
cgcgccgtgggggaagtcgtgcgcaggcgcggacagcgctgcttccgcggcggttggggtggtggggccccgggcggcgttgaccatgacccagcagggcgcggcgctgcagaactacaacaacgagctggtcaagtgcatagaggagctgtgccagaagcgggaggagctgtgccggcagatccaggaggaggaggacgagaagcagcggctgcagaatgaggtgaggcagctgacagagaagctggcccgcgtcaacgagaacctggcacgcaagattgcctctcgcaacgagttcgaccggaccatcgcggagacggaggccgcctacctcaagatcctggagagctcccagactttgctcagcgttctcaagagggaagctgggaacctgaccaaggctacagccccagaccagaaaagtagcggcggcagggacagctgaccagaccacgggcagggcctgcctccgtgtgcccctcagctcagccccagcaagtgtgtgctcagagcatctttgttcttcacggcagcagctaccttccctcactgtctcaggtgccgagaggggcaggtgccagcctccactggcatcagtgacaagcccagggcacagcccacccgggggtcctcgcttcatgctcacacaggctatggggatggtgggctccaggtcagctctgcaaggggcttgtctctgtggcacccacactcctgccctgccagggaggctctggttgtctgagcaccatgggggccccctcaacttgtccctcctcagccagcagaggcccagggcaagggacaggaggacaggggttctccttcaccacagaacccaaacctcaggtctcacccctgtggcctgtgattatgaataaagattatctttgta

SEQ ID NO: 9633 - DNA, 956 bp, Homo Sapiens
  misc_feature (543)..(543): n is a, c, g, or t
  misc_feature (556)..(564): n is a, c, g, or t
  misc_feature (864)..(864): n is a, c, g, or t
gggggagggagctgaatgtgaattgagtagacgtcagtatgcagaacaggaattggaacaggttcgcatggctctgaaaaaggccgaaaaagaatttgaactgagaagcagttggtctgttccagatgcacttcagaaatggcttcagttaacacatgaagtagaagtgcaatactacaatattaaaagacaaaacgctgaaatgcagctagctattgctaaagatgaggcagaaaaaattaaaaagaagagaagcacagtctttgggactctgcacgttgcacacagctcccccctagatgaggtagaccacaaaattctggaagcaaagaaagctctctctgagtggacaacttgtttacgagaacgactttttcgctggcaacaaattgagaagatctgtggctttcagatagcccataactcaggactccccagcctgacctctgcccctttattctgatcacagctgggtggggatgcccagaagtctcccattccacccctatcccaattgctggaagggagttgaatgcactttanatggaaggagcannnnnnnnnaaattaggtggttcaccaatttttcccccgggggaaccccatgggggcttaagaaccctgcccgtggggaattccttttaagcccccagaagagccagcccagccccctggtggcccgggttttccacgccccgcgaagccatttggtggcccggttcccttccgcccctacaagcccctcccaggcggaagcgctcaagcttttggagtcccaacaacgcgccctcccccaaggccgtttcaacacccccgtccgggggaagccctttaaccaagccccgggcaaaagcagacaccccncaaatttccctttggccctttcccccccgtaatcccacgaaatatcccctcccccggcgggtacaagttttgcgcccccgcccgccccttta

SEQ ID NO: 9634 - DNA, 321 bp, Homo Sapiens
cactgggatcacaggcatgaactactgcccctggcttcttggcattctttacctttgaaataatacgcaaaatattctgtgttctctgtgtgtattcttctggggagataactttcttcatcactttattaaaggagtctgtgtctcaaaaaggttaagagccaggagactagactagtagcagatgctgggagaaatggagagctaaggaaaatgaaggaactgagacagatagaaggggaaagatccgaccagaaagaaagactaaaaggaagataaataaacaaaaaagagagaagaagaatttcattagctgttgta

SEQ ID NO: 9635 - DNA, 361 bp, Homo Sapiens
tgagcctagccaccttctcttaatagaaatccaggaggcctttccctaccttccactcgcaacgccacccaggcaaatccatattccagaacagaaaaccaacacttctccaaatgaagcactgtacggaaaggaaggcatgtgaaatcatataattttggactcaaatgctgagttaccatgtataagccaggtgacctggggaagtcacttaagcattgtgacactcagtttcccagtctgcaaaatgggtataataatgcctgcttcaaaggattgtggtaaggattgagtgagaaagcaaatgtgaaaatgcctagcagagtcagctaaaaaacagatgtcaagagctgttgtaact

SEQ ID NO: 9636 - DNA, 317 bp, Homo Sapiens
agctcggtacccaccgcaggactttacagtggaggcatttcgccaacagttgggatgtagctccagggctcaagcacagaaatctggctcttcaaggtaaacagtatcagggatggtcctgacccctaatctggggacactgcactcgcacatcttctcagtgtggttgattttctatttcttccaaaatacctgcctgccacctgtagggggagaccatatccataccctttgacatgaaacccaaagcgcctccctgtagaaaggtcactgtcccaccccttatctgagctgttgtaactggagctgttgtaact

SEQ ID NO: 9637 - DNA, 568 bp, Homo Sapiens
  misc_feature (48)..(48): n is a, c, g, or t
tcggcttaagtgacatgaaggattcactggttgacgtatctggtctcncagagatagggtgggcttatgttagaattgattcagtaaaacaacgagatgaagagctgggtctcagccctgccgtttgcctgctctccacagcttccgtgacataatcacttccttcttggggtcacaagatggctgccggtgacgtccagagccattgctttcttgtttaaggctggcaccaagtgctctagtcctatgcagagatggagctagcgttccccaaaacacaagctgtgtgggggtgatgtggctcaccaaatgaaaatcaagaacgtaacaaaggaaagagagttggacggctgatgggcgccgccatcatgtctgccacgccatctgagtatttaaaaaatagcttagcagcaatgcatctaaaaatgctgcctgtgagatcaatgttcccaagaaaatgtaaaagttaatttctcttctttcaccgtgaggctgtctgactttaaactattttcatactactggaagaatttctgtgatttctcataaatggctagctgttgtaact

SEQ ID NO: 9638 - DNA, 869 bp, Homo Sapiens
  misc_feature (523)..(523): n is a, c, g, or t
  misc_feature (583)..(583): n is a, c, g, or t
ttacaacagctcacaagaggcagagctgggatttgggctcagatatgtctgaagattccagtaatccctcaggtctttttgaaggaggatcctactcctataaacatgatgcccattaaggaaagcacttcattttcagtgggctgaaatattatccacacatatacccttctaaatgatccatcagagagagagaactttttctgtccagccaaatgtgcacattcttcacatagctactcagaaggaaatgggtgtgtcattcttcagaccataggatagatgccaacatgtcccttggtagaaactacctgccagccagactatggatacaccttctctctagctcagaggctgcttttaacacgacaggttcccatctcaccctaaaggcacttatcagctgtgagtcaggtctctgcaggaggaagcacaagcatgtcagcctggtgtagctagggggctgtaattgcattcactagtcttcatccagaaaatctaccttttattaagtccttatcanatagtcatatatagaaaagccaaaattattttttgaaaaatcagaaatagcatttctatntgctatgtaattgaatcaaaagcgtttcagctttggctcttctctctggaatccacccttttgttcactagctaagcaagtatgagcaccatataaaaactacaagcaaactttccgaaaaatgtagagaaaattaattctcctttctatgtgtgactgtacacacaatctggaaaggagtgggtctggtaataattttgatttctgtttcactgtaataaaacaatcaatctacataaaaactacagagcaaagggagaacagcaaaattccctaactgttgtaa

SEQ ID NO: 9639 - DNA, 551 bp, Homo Sapiens
  misc_feature (514)..(514): n is a, c, g, or t
agttacaacagctagtaaagggcagagctagaatatgaacccaggaatgtcggagtactacaagctcttaactaccatgccatactggtggcaacaattagtaattaccaagacttcaaaggtatggtgactcacaggggcaagagttaatgtactcttctctttgcaaagatttccttccaggcaaatgatgataagttctatcgttcttgagggctgtggcagtttcccggtacatggtggcagcaatgggatcacagccgtgggtaagctaggctagcaaaccaaagcatcctgtcctcagacagatgagaatgttaccatctgaacttcttcaggtcaattttcgaatactaagctgaatactgaaaagacaccttttctatttcattctccctctgaatgggtaatatccagccactccaattagtttcatattaggtatcttttcttaaaatctctgttggcatcatgtccctgcttagcctgagaatgtgcagagacagaacgctgngacgggaggtatcctaggacacactgactactttcat

SEQ ID NO: 9640 - DNA, 500 bp, Homo Sapiens
ttaatgaagatccctgaatcagtattaagtctcaagtaacttggaaaaatctgtcccgacataacagagacaaaaaaactattgaattattttgtgtatttcaaggttgcgtccctaacgtgtggctactcccccaacaactcaggtccctgacatctacgccatccccttaaaactcggtgctctactttcctctcctccactggttgttcccaaaatgtctcaaggctttggagaataaaaaatgtgttgaatactgaggaaagaagaaacggagtttagagagatgtaaaggaaattaaatgagaaacaagtctagttctaaaaccaaaggatatttagactcaagagaggaggtcaaaaggaagttgcagatgacaatgcctgaattaactacttgctggatgcaagactgaaaggcaagagggatggggtttggagggagttagagtttactgacctatgctaggcaaatgtgctcatactgagctgttgtaact

SEQ ID NO: 9641 - DNA, 189 bp, Homo Sapiens
gatgtgtactacaggaaagttacttcaacaggtccatgaagttcaggaccaggggtgccacgtaggagagaagacggctattcacactgttataaccactcgttatcacacagactaggacggcacctcatacatattgagacatttcaaaaataaaacccaacatagctttcaatagctgttgtaact

SEQ ID NO: 9642 - DNA, 383 bp, Homo Sapiens
ttacaacagctttagcaccatggatgtcacctctagcacttgtcgaatctcctcctccgagaacccaatcactgccattgcactctgtacagccctgaagctggaggcgtcgtccatgccatccactctggatacttcatgattcagataggcatagccagttgtatcccgctcaagcttcagggccttcagcagctgttcatctgctccagccagcagctgatagaagatgtggaagttcctttctcctttgagctgcttcactaatcgggatttctcaagcagatagtttgtgatgacaccaccgaggggggatcccttgaagtcaaattcaatatccatgtattttccaaatcgggaggaattgttgttgcgaatggtct

SEQ ID NO: 9643 - DNA, 416 bp, Homo Sapiens
  misc_feature (25)..(25): n is a, c, g, or t
  misc_feature (346)..(346): n is a, c, g, or t
gtacccagttacaacagcagcttcnccttggtccaggtgggatcctcttgtgtaaatgttgctactgaacgcatagccatcggctagatgatactctgatacactggaatgctctgtggataatctttttatttcctgtttgcgctgatgttctgctacatttgccacagattctgccagttgataaagatcttgttccattgtggctcccataaagttcagcaatgggggcacccagccattgcggaaacgaggaacatatggtggaataaactgatctaatggccactctgctctggctttcatccaagttcctcccaatgacatccacagctgccgttcatcnccattgacagtataatttaagaaatcaaccgtggtccttattcagtaggggactaagtactgaactggag

SEQ ID NO: 9644 - DNA, 927 bp, Homo Sapiens
tgaacctcccagagccctccgtgattgttggaatggtgagcttgtcggccacagactgctacattgtgcatgagatctacaatggggagaatgcccaagaccagtttgagtacgagctggagcaggccctggaagcccagtacaagtacattgtgattgagcccactcgcattggcgacgagacagcccgctggatcaccgtgggcaactgcctgcacaagacggccgtgctggcgggcaccgcctgcctcttcaccccgttggcgctgcccttagattattcccactacatttccctgcccgctggtgtgctgagcctggcctgctgcaccctctatgggatctcctggcagtttgacccttgctgcaagtaccaagtggagtacgacgcctaataaactgtcgcgcctgcctctgcacacactcacctcctccaccccggtggtgctggtccggaaggacgacctgcacagaaagagactgcacaacacgatagcactggccgccctggtgtactgtgtaaagaagatttacgaactctatgccgtatgatttcagtagaacagggagcgaagcaaaaccacccggcccacaagagacaacagagtattcagatcgccacactctgtgaggcagcagagcctgggcaggtgtttggcttagtatttgttatttttaaaaaataacagatcacgggtgtacccagggtttttcagctcattacactaagatgtggatttccataacccaagaggggggtctgaggctgtggaagtccgactgggcagtggaatgctgatggaggcagacgctgccgagggggtgtggacgtgctttgggggaggtctttaagtctattgtttaactgtaccatccagagcccaccagaagctattgatcattaaaattatgagaatttcaaaaaaa

SEQ ID NO: 9645 - DNA, 775 bp, Homo Sapiens
gtgaggaaagaactctgtgctgagcagctgctggcccacagcagctgaggaccatcgttgcaacgatggtcctcagctcaacgatggtcctcagcttcagacagattcagccgaatactcaagcacatcttgacccagaggagctactacccactctacccgccccaagaagacatggccattgactatgagtcgttctatgtttacgcacagctgcctgtcaccccagatgtcctcatcatcccgtcagagctgaggtacttcgtgaaggatgtcctcggctgtgtctgtgtgaaccctgggcgccttaccaaagggcaggtgggaggcaccttcgcccgactctaccttaggaggccggcagcggacagggcagagaggcagagcccatgcattgctgtgcaggtcgtcaggatctgaggcttctgtcctctgctgttctctgctgtgtgggcccttaaagtcttagccaagagccaagacatagccctgtgacaaggtgaacagttgggtgggaaaggagagaggagccagccagggaggggcagctgcagtgaccaggcccagcagggaggacttgtgcagccgggcctgcctgtgagtggtgcctctcctggaaggaagctcttgcttctcagtccatgctccgtgtccagaagtaagccagctgtggatcccgcccactcagaaaaggcgagaaggctttgtgattttctacatgaatcaaacacagaaacaacttttggagaaattaaattctgagtgtgactttcta

SEQ ID NO: 9646 - DNA, 587 bp, Homo Sapiens
atgcctggaggtagcctggcagccgctgaacggcgcggctctcaacgtgacggggaagtagttcggcggcccgcggcttactaccccagggcgaacggacggacgacggaggcgggagccggtagccgagccgggcgacctagagaacgagcgggtcaggctcagcgtcggccactctgtcggtccgctgaatgaagtgcccgcccctctgagcccggagcccggcgctttccccgcaagatggacggtttcgccggcagtctcgatgatagtatttctgctgcaagtacttctgatgttcaagatcgcctgtcagctcttgagtcacgagttcagcaacaagaagatgaaatcactgtgctaaaggcggctttggctgatgttttgaggcgtcttgcaatctctgaagatcatgtggcctcagtgaaaaaatcagtctcaagtaaaggccaaccaagccctcgagcagttattcccatgtcctgtataaccaatggaagtggtgcaaacagaaaaccaagtcataccagtgctgtctcaattgcaggaaaagaaactctttcatctgctgctaaagtggtacagag

SEQ ID NO: 9647 - DNA, 989 bp, Homo Sapiens
  misc_feature (765)..(765): n is a, c, g, or t
  misc_feature (805)..(805): n is a, c, g, or t
  misc_feature (867)..(867): n is a, c, g, or t
  misc_feature (896)..(896): n is a, c, g, or t
gcggccgccccgcgctgtctgtgaggcgccagttccggggcgctgctcccggcctcccctcgctctgaggctcggggtccccagctccgcgtaaactgcacgatttcgccctctgctcagctcccctctgccccctctttccaagagagacttccagatcccacattttcttgactgatttttaagcatttcttcgtttatagctgtctgtttgcattctgattgggaacactgggatcattttcatcatgccgacagtggtggtaatggatgtatccctttccatgacccgacctgtgtctattgaggggtccgaggaataccagcgtaagcacctagcagcccatggtttaacgatgctgtttgagcacatggccacaaattacaagcttgaatttacagcacttgtggttttttcatcactttgggagttgatggtccccttcacgagagattataataccctacaggaagcactaagtaatatggatgattatgacaaaacctgcttggagtctgcattagttggtgtttgcaatatcgttcagcaagaatggggtggtgcaattccttgccaggttgtcctggtgacagacggctgtcttggcattggtagagggtcactgcgacattccctagccactcaaaatcaacgaagtgagagcaacaggtttccactaccttttcctttcccatctaagttatatatcatgtgcatggcgaatttggaggagctccagagcaccgattccttgggatgccttngacgtctcatagatttaaaccatgggtgaagggcagattnttactattgatggccccctgtgctttgaagatggtacagtctatggttggaaaaactgatanattttggcatatacgccctttcctgctgnttctcaagtgtggccaccctaactggctgatgtacaagtccttccccagccagaaaacctttttggtggtaaaatgaagaaatttggatccta

SEQ ID NO: 9648 - DNA, 307 bp, Homo Sapiens
ccgtttgtatatacatgtaacttacaggttagttttgaagtataataataaaagaaattcctacgaacccaccaaccaactacagaactagaatgtaaccaataatgttgaagcagctttatggtcctcccatctgtatcctcctgtcttggaaaatgtatatactttttcttcttcaaatttgggattataataaatacatctttgaatcctggactttcattatattataaccattcacccaagaaacatgttttcatactttctgtcagaaactacaaaaacctcagtgatgtatatacaagag

SEQ ID NO: 9649 - DNA, 865 bp, Homo Sapiens
  misc_feature (137)..(137): n is a, c, g, or t
  misc_feature (595)..(630): n is a, c, g, or t
gggccctctactctacccagcttgcgctccccagccgcaagtcggccgcgctttgcccgtcagcgcttggagctttctgcgtcgcttcccgctgcgcctgcgcggtcccgcctcgccccacgcgcgggctcgcgatntcggtttccccagacctgctcgcagcaccctgctgtcttcccggtccggcccgctgcccgcggcgccagcaccatgctcttctattcttttttcaagtcccttgtgggcaaggatgtggtcgtggaactaaagaatgacctgagcatctgtggaaccctccattctgtggatcagtatctcaacatcaaactaactgacatcagtgtcacagaccctgagaaataccctcacatgttatcagtgaagaactgcttcattcggggctcagtggtccgatacgtgcagctgccagcagatgaggtcgacacacagttgctacaggatgcggcaaggaacgaagccctgcagcagaaacagtgatggctcctcctcctcttcccctccctctttcattggtgacccataaccccaagtcccagcccagaacccctaacccccaatacttgaaggggttttnnnnnnnnnnnnnnnnnnnnnnnnnnnnnnnnnnnnaagggatgagtggatgagaggagtaatagggaacagctatcctctcttgagaaggggaggataagtaggctgggaaacttcaaagccttcccagtccccagcacctgcctttctcactacttctctggagatggtaggagagtttcctaggtctttccagggcagcatgtgattcatttggggatggaaggaatctgtcccgcatcgggaataaaatttatggatggaaaacaaa

SEQ ID NO: 9650 - DNA, 354 bp, Homo Sapiens
ctcttgtatatacatttatgtgcttcatctgggataaacgaacccaatgctttcaccagacgctcagaagaataaaaaacatggagaatttctagcttgaattcaacgttcaccagccaaatagagtttctataaagtggggtttgtaatacatccctcccagggctcttttaaggatactgcaaggagaatgtgagtgagaatgtttttgtgggctggaaagtgtcacagagatatcatgagaatgctggctgagttcacgggactcaggtcctaaggttgacaagaaaaaggacctttgtcacaggtacttctctggatttctgaaaagatgtatatacaagagggaccgag

SEQ ID NO: 9651 - DNA, 1019 bp, Homo Sapiens
gtcccaatgggaggaatcttatttgtgagaaagtgtgcgcccaaccaattttaaccattgcttataaacccagggaccgccccagaagcccatggggggagatttgaatgtcttaacaatgcttaggctagcttaagtgggaaatttaccattgtcaaaatatcagattttcccccacattaagatgtttgtccataagtagacccagcttagctgacttccttgagaaagaattgcgtctcaaacctctgttattcagctggccatattattaatcattactaaatgccagccacatgcaagggggatggaaaagaagaatgagatttgctcagttttagctttctgtggctgaagtatttttgagtcagttacatggatacatgaggattatagtaggaaatgactgaatatttttaaaaacataagtactatggaaacagtcatgtataaacattcgtgcagaagcacttacaaacatacactgtgcataaagttggttaagaagatgcttgttagaaatgatttatgtaggtgaactaagaatttgaaataacttaataccattgaagacatcatacacatacaactttggacattatgcattcttctggggatgaaccattgacaacttctggacttcattgctagctattttttacattgaggtgggaaaccaaagaagtgcagaacagaagcaatctactaggcacaaagctccctggttactgcccagatagactgtttccactcatcaaattgaagtgcatacttaatttaggaagggcagaccagtgcaaaagctactgatagtgaactggagggcccggtttccatcccttactctgccacactccaaagttcgatcttctgtaagtcactctaaatttatggcctttagatttattgcctctattaaaaagggcattgcaacaagtgacttaaacctcccccttttttattctcaaggatttgggattttacatagacaaaagtgaacaatctcatcaaagtcttgc

SEQ ID NO: 9652 - DNA, 285 bp, Homo Sapiens
tacctattattgtttgacggttgttataataaagtcattaagatttcaaaagacattatatgcatgggccaccttctcttttcatatgcaacaagaagtaaaatgggaaccctctttcaaaccagcaactgctcacaactaatagtggtatgagtaggtatttgtatttccactgagcatatgtgtataaatgttcattcattcatctcaccaacagttattgtgtacaattttcttctgtggatgtaagcaaagttcattaggctgatggtcaaacaataaata

SEQ ID NO: 9653 - DNA, 593 bp, Homo Sapiens
ctcttgtatatacatgcttctcaaaatatctatagtattgtcggtatttctttctcctactagattgtgatcttttatcggcaaagaccacctctcgtttatctctataccccccattgtgcccagcacatcagagattttatgtttggctgctgaatgagaaacaaatgggatactgttcttctaagcacaatcatcttatattagcattcatttttggaactcttctctaattcctgtcatttttgtatcacatcagaagaagagctatattccctccaccgcctctcctcgcctattaatcaccataccttcccacctcttacgggaataccgaactaatggtccttgtctcaatgacctgcctatcctttgtcccttcatgggaatcttctcacagatcaagttactatgatctacaaggccagttcccatagcctcgttccacttacacacgatcttaaccatttctgtccagtgggagtcacccactcacctcctaaaacctctatgcatgccccatacccctagtcataatactcttatacaaatgtttaacactttgcagttgaagacccaatgtaatacaagag

SEQ ID NO: 9654 - DNA, 435 bp, Homo Sapiens
  misc_feature (391)..(391): n is a, c, g, or t
cgttacaacagctcgatcagagctgcttcttgaggtaaacacacggcttctgcagaaggccctctttagcctatgggctgattgacacatgcccactcactgaggcctggatggatacagcacttgggccccttgagaacaggacatggagggttttagaaatggcagtggacatgcccggaagtttgcccatgatgtggcacccatagagtctgagatgggagcctgtgctggcgggggaccacaggagggcagtctagcaccaggagagggatggcaaggatagcagtatttgtccacgcctgtccagtgtcttcagggccccatgctcaggggtcatttgctgtgtctgcgtctctctcactctgtcagtgcagacaaagagctgcanacacagccttagcactttgcttccagaagcaagttaaaagtcac

SEQ ID NO: 9655 - DNA, 311 bp, Homo Sapiens
tcggtaccatcttgttatacatctagcatctgaaactatatccagaatgacactggattttcataaaagtgttgatcctcacacctctttatagtcttgcacctagcacagtggagtgaaacactttaaatagcacttgttccttgagtatatatggaaaaaagtgaagtattgataagtgctcagctaatatgagcagcatctcaggagtctccaattcttgaattaccagggagtatttttaccattttcccccagtgaaaggcctattttgagagacttaccctccaaaatgaatgtatatacaagag

SEQ ID NO: 9656 - DNA, 577 bp, Homo Sapiens
  misc_feature (487)..(487): n is a, c, g, or t
gccttacaacagctaataatatttatggactagttactctgtcccaggctcacttgaaacacttcacatatatgaactcatctgggccccacaggaactctgtgaggagggcgctactattatccccattttacaggtgaggaagttgaagctcagagaagttaaataatgcccagattcacatggctggtaagtggcagaactggcctgtattagaccttctggtttatatcttccctgacctggggttaccggtattatcagaacaaatcgctccgggtaatacgtttctctctgataataagatttccaaataataactgagaggttccttaatttcaaggcatataagatcctataaattcccgacatatccaaagaacctaggatgccctcgtgattatggtaattggcatggatccaggtatttctatactgacacaactctgggagtcaaagctagtatgtctacaggttatttcaacanaccaagtttccccctttctcaaggaaataccccttttctttgctccactaaccgtggcatgagggtggctctgggtctcaatttggcttt

SEQ ID NO: 9657 - DNA, 407 bp, Homo Sapiens
actttgtatatcattcttaagaaaaagaaatgtgatagcacaatggtacaggcatattcatagtttaaggctttgtctttctgtatttaatcttgcaaattcagtgataaggaattgctgtgacttttttttattagtcttgtagtgtttgggaaaatgtttcttgcgtctcctgtttcagaagcgtgattggtttacatatataatcactatgggttgtggtaggaaaggtaatttatttacctataattggttttatttttgtgaaaaaagaaaagtacaaaatgatttgtaattgctaattgtaaatgcatgcttcatatttaagtagacttagagaatgaaactatcatctcaggcacttaagttgtgaaatacgtaaaagttgtgaaatgtatatccaagag

SEQ ID NO: 9658 - DNA, 382 bp, Homo Sapiens
cccaaattgatagcgaggcagatcctaacagaggagatagttacatctttcttgcatggccaggggagcattgcagttttccacctcacactagaaacttctgagtccaatcaactctagttatgacctggggtctggtctttactctatcctgatgccgttcctttgagattttcagcaagcttaaatataactttccaaacctatttgggagaacaaaaaaataataatccgaactcttagagctcctttttaaacgagttgttcttcaatacttcttatcgctaagtccagttataagcctttttcactgaagcctcatgacaaccttataagacagggcttattatcatcccactttacagatagggtaactgaggca

SEQ ID NO: 9659 - DNA, 495 bp, Homo Sapiens
  misc_feature (379)..(379): n is a, c, g, or t
aggatcccctatttattgtttgacgatgggtttcttggtggtctgtgttgccacacagaccctacaggtactcaggtgccctataggtacttaatattctacaggtactcgtgtaccctacaagtactttactttgtacactatagatggtgactgtggagttgttctcaagtacgatggcaaacagaggaacaaagagatctaaataaaaagtgttaccctgtgacttctctaattaacactttaatttgctataatttctccttccaacttagcagaaactgcatgtgaaagctgaagttgtaaacagagtaggaactaacatgtgtgaatggttgagaacccattgggtagccaagatccctgaagatcttaggtncaaggggccaagacattctatatttttaactcagctgggttactatggaaagcaggtgatgtcattaagcacttggcgcacgaaactatgagctcttcaaggtcaaacaataaata

SEQ ID NO: 9660 - DNA, 430 bp, Homo Sapiens
  misc_feature (415)..(415): n is a, c, g, or t
ttacaacagctgctaatgcatccagcacagaaataaaaatcatggcttgatgccccccggatcctagctggccactcgcatgcagaaagcaactgtccatctgtgctcctataactttccccaggctgctcttcccgataactgcaggcagctgacagtcttggtgattactgattggggccaggaatgagggaaaggagtttggtgttttcttaaaggagtatggctctcatgactgtaaacaacaacaatgaaaaccgggctactgctgttgctaaggctgtagtagcaacatggtgtctttcgcaggtggacttctttgccccttaggtaaacagtcctgcaagccaggaatagaggctgtgtacgtgatagctcccctgccggccctggctgcttagatcaattaagcggngctagctgcacaatc

SEQ ID NO: 9661 - DNA, 234 bp, Homo Sapiens
tcttgtctaaaatcatagttgaatatgccacgatcaaatgtacttattgaatattgtcaacaattggtgatgtgttaggcataatgcaaagtgcattaagtaaacatgttctctgtcatttaaggtgcaagaaataaaattctcataggacacacttgaaagacgtacatgcaactgaataaacattgagcagatgtacatattcaataaagacctcactatctacagggcaag

SEQ ID NO: 9662 - DNA, 390 bp, Homo Sapiens
ctcttgtatatacatggctagatggaacaattaagttaaatcgataacacataagttgaaacttcacaggaaaacaaagtacagctagttgaagcaaacaatatcttataattatacatgtaatacagaatgatagagaaatgttttaagtacttaaaaataccttcgttcaattttcaaaactttgaacgtaataatttaggtagtaggaacattagatgcaatctatagaagaaatattagactcaatctatgaagaacatgaattctttcacaacctataatggatcctgactacctcatctataattttagttttctatagaatcaataatataattagtgtacctgcttaaaactgtattacatgtataaacagaggtccggcta

SEQ ID NO: 9663 - DNA, 1225 bp, Homo Sapiens
  misc_feature (445)..(445): n is a, c, g, or t
ttacaacagctgtcttgtgagagccacccatattggactttccatctgtcagaaggatgatggcaggtcggatttcctgccaggccatcgtttccatgccgaggacgtcgcatttggttgatcatcatgagatagacactgtttaaggccgcataggtgttagtcccagttccattttcaagatctttataagttggcattttccaggcttgcggatcacctcaatcattatcccggaagttgtcgttcaggacaaacaggaggactttgggctctgaggcaaaggtgataatgccaacgctcacattgatctcaaagctgaagatcctgtccaccatgagggaggcgctctccttgaagatgagaaagtcattttccgacacactctgcgaacagtccaggagcaggtagaggttcagatgaccagagcgctggatttggattntacggcccaggctttcctttgtcttctgggtgggattggtggccccaagcatgtgggagaaggaagtgcccagggcaggggccacgtcctcagggaagtcataagagtagggttggcggcagatgggctccgttccactccagaccccgttgccctggcactcccgctccgaagaccccgtgagcacaagattcgaggagcagcgatagcggaccttgtccccatgaccaaagcggaagcctgtccgcactgcgcccagtgaaatgcctgggttggggcagtggccagccccattatcacacacagctgtttctccatcccacatgccgttggggcgacactgacgcacaggcgagccccgcaatatgaagccatcctcacactcgaagctcacattgccacccacgggataggaccccagccgtggggtataaatgccattctcaaaggagacaggggctggacagcgcacaggtttgcagaccgccttagacagagaccgggtggctcctggggtctgccactgtccgctgctcttgcacagccgtgatgctggggatgggtacaggccctgggggcaggagtaggtgagaaggctcccaggagcccagccatggctgagggtgaaggtgccacccgagatattcacgttctgagggcaggagggagccgagtctgccagacctgggtacaggaacagcaggcaaaaaagaaccatcagtgggcccatggtgtcctccctaggggcggcgagaggtagagagccgcgggagggaaaag

SEQ ID NO: 9664 - DNA, 670 bp, Homo Sapiens
gagctgcatatgtgaagcagtagcgtcttggagtgctccacgtcttactcgctatattactccgaaaatatcagctgtctcatatctgaaatgtatggacgccataagatccagtatggggtttggtaggatgaaaagtttgcaacctacatagcagctagcaacaatctaagcaacaggggaaggagggaaggagacagactagagggggaaggcccggggtcgtggatctcagaaagactcctctagctacagtagatacacactactgataactagctacagtaatacacactactaatagacacagcactacagtagatacagcactaataaccattggcctacaggaaaatttgaataggaagcccttcatctaaaaccaccgcttgttcttccgaggttatgtaggtcagtgtttaggacaaaaataaagtgacaacttgagcataccgtggatcgagctgcaatgataattcagaataggagaaactcacattccatgttgacacccttctgtaatgacaacagcagatacagccacaagagaatgcagcctcaaacatgatcaactcactgcccccactttaaaacggtccttaaaggcagctgttctggaatctgcctatgagtacacagaatctccagcttcccccgtagtcataacggg

SEQ ID NO: 9665 - DNA, 546 bp, Homo Sapiens
  misc_feature (521)..(521): n is a, c, g, or t
tacaacagctccagttacaacagctccagttacaacagctttaaaaatattaaatctgctatagcaaatcctactcataagaatcaaatgcagaaacgggctatttggttacatggatatcaggtaggatcagggggcgtgtaacggtacgggggttgagagatggagaataaaaagatttcatgagaaacggttgtaaaagtggtaagaaaacgccccagatgagccattgataacacatgacagcagactggagaagtgagaggaaatgctaaaggttaaaaggggagggaggaaggcattctgaagtgacgccagtatccgggtagagtgcgtgggataaggaatgttatgagtattaatcagtggatcaaaaggctaagcgacacatggtgacacaggaagctgtagaataaaactacatcaaaagccgtgagagtaaaagaaaagtgacaggtagtacagatggaaaactgaaaatcattctcctaccacagacctggagcccagcagggagcaantgacattcgctgaggattgcaaaga

SEQ ID NO: 9666 - DNA, 472 bp, Homo Sapiens
agttacaacagctaccttggaacttagtaacccagtatagaaaatcaaacactttactagtttactaaggaatcccacaagctggagttgaccatatccttcggaaagctgtacccttctgggcctccctcatggcgagcaggaattccaggcttagtggatgttctaccttctttgacatgtagtgggtcatactcaaatcgatacatagtcttgcgcctgagtgtttggcttccaaaagtttgtctttggttagagctctcaggaaacgtttgctgtgctgggggcaaatgcctaaagcagaaatatcagaaagaaataaaagtggaaaaccagaggaatattatataagaaacaaatcttaaccaggtgggtattttgcatataaagagaaacttgatactgatgtaaggtattcgttcattagaagattacacagagtggtgaggagtatgggctctgcagcacacag

SEQ ID NO: 9667 - DNA, 1863 bp, Homo Sapiens
ggggctactgagcagcgccatggaggactctgaagcactgggcttcgaacacatgggcctcgatccccggctccttcaggctgtcaccgatctgggctggtcgcgacctacgctgatccaggagaaggccatcccactggccctagaagggaaggacctcctggctcgggcccgcacgggctccgggaagacggccgcttatgctattccgatgctgcagctgttgctccataggaaggcgacaggtccggtggtagaacaggcagtgagaggccttgttcttgttcctaccaaggagctggcacggcaagcacagtccatgattcagcagctggctacctactgtgctcgggatgtccgagtggccaatgtctcagctgctgaagactcagtctctcagagagctgtgctgatggagaagccagatgtggtagtagggaccccatctcgcatattaagccacttgcagcaagacagcctgaaacttcgtgactccctggagcttttggtggtggacgaagctgaccttcttttttcctttggctttgaagaagagctcaagagtctcctctgtcacttgccccggatttaccaggcttttctcatgtcagctacttttaacgaggacgtacaagcactcaaggagctgatattacataacccggttacccttaagttacaggagtcccagctgcctgggccagaccagttacagcagtttcaggtggtctgtgagactgaggaagacaaattcctcctgctgtatgccctgctcaagctgtcattgattcggggcaagtctctgctctttgtcaacactctagaacggagttaccggctacgcctgttcttggaacagttcagcatccccacctgtgtgctcaatggagagcttccactgcgctccaggtgccacatcatctcacagttcaaccaaggcttctacgactgtgtcatagcaactgatgctgaagtcctgggggccccagtcaagggcaagcgtcggggccgagggcccaaaggggacaaggcctctgatccggaagcaggtgtggcccggggcatagacttccaccatgtgtctgctgtgctcaactttgatcttcccccaacccctgaggcctacatccatcgagctggcaggacagcacgcgctaacaacccaggcatagtcttaacctttgtgcttcccacggagcagttccacttaggcaagattgaggagcttctcagtggagagaacaggggccccattctgctcccctaccagttccggatggaggagatcgagggcttccgctatcgctgcagggatgccatgcgctcagtgactaagcaggccattcgggaggcaagattgaaggagatcaaggaagagcttctgcattctgagaagcttaagacatactttgaagacaaccctagggacctccagctgctgcggcatgacctacctttgcaccccgcagtggtgaagccccacctgggccatgttcctgactacctggttcctcctgctctccgtggcctggtacgccctcacaagaagcggaagaagctgtcttcctcttgtaggaaggccaagagagcaaagtcccagaacccactgcgcagcttcaagcacaaaggaaagaaattcagacccacagccaagccctcctgaggttgttgggcctctctggagctgagcacattgtggagcacaggcttacacccttcgtggacaggcgaggctctggtgcttactgcacagcctgaacagacagttctggggccggcagtgctgggccctttagctccttggcacttccaagctggcatcttgccccttgacaacagaataaaaattttagctgccccaaa

SEQ ID NO: 9668 - DNA, 896 bp, Homo Sapiens
  misc_feature (668)..(668): n is a, c, g, or t
  misc_feature (720)..(720): n is a, c, g, or t
  misc_feature (854)..(855): n is a, c, g, or t
  misc_feature (876)..(876): n is a, c, g, or t
gcgctaaaccattcgtagacgacctggcgggtcagcgctgggcgtgcgtgcgggcaggcgggggcgctgacgagaagcaggaagagggtgcagtgccggcgtgggcggccggccgaggcggaggcgcaggaagggggcggcgagtcgtgcgaggctgcccttctcactcagcattatggatccaagcctgttgagagaaagggagctgttcaaaaaacgagctctttctactcctgtagtagaaaaacgttcagcatcttctgagtcatcatcatcatcgtcaaagaagaagaaaacaaaggtagaacatggaggatcgtcaggctctaaacaaaattctgatcatagcaatggatcatttaacttgaaagctttgtcaggaagctctggatataagtttggtgttcttgctaagattgtgaattacatgaagacacggcatcagcgaggagatacgcatcctctaaccttagatgaaattttggatgaaacacaacatttagatattggactcaagcagaaacaatggctaatgactgaggctttagtcaacaatcccaaaattgaagtaatagatgggaagtatgctttcaagcccaagtacaacgtgagagataagaaggccctacttaggctcttagatcagcatgaccagcgaggattagganggattcttttagaagacatagaagaagcactggcccattccccagaaagctngtcaggctttggggggaccagatactattttgtaatcgtcccgataagaaagaaatacttttcctttcatgatagagctgtcagttttctgtggatgaagaaattcagaaactgttggaggagtgtcactgtannattccatgggacgaggagaanaatgaaggaatatctggagc

SEQ ID NO: 9669 - DNA, 921 bp, Homo Sapiens
ggggtgcagggccccgccgccgccatgtcgggctcgttcgagctctcggtgcaggatctcaacgacctgctctcggacggcagcggctgctacagcctcccgagccagccctgcaacgaggtcaccccgcggatctacgtgggcaacgcgtctgtggctcaggacatccccaagctgcataaactaggcatcacccatgtgctgaacgcggctgagggcaggtccttcatgcacgtcaacaccaatgccaacttctacaaggactccggcatcacatacctgggcatcaaggccaacgacacacaggagttcaacctcagcgcttactttgaaagggctgcccgacttcattgaccaggctttggctcaaaagaatggccgggtgctcgtccactgccgggaaggttatagccgctccccaacgctagttatcgcctacctcatgatgcggcagaagatggacgtcaagtctgccctgagcatcgtgaggcagaaccgtgagatcggccccaaccgatggcttcctgggcccagctctgccagctcaatgacagactagcccaaggaggggaaggtggaaaccccaagggcaacccccacggtcctctgcttcaagagggtcccggggggggaggccgccgggcaaaaggtggccccggagtttggcatgggttaaggaaacccccctgtaccctggttcccagtaatcccgagggtaccttggcctaacaagtgtggcgccccaacccttgtctctggggacaactcttccgccaaccgctgggggaaggcaccataaagaaaactttgtccagagggggtggggtaccttgggcttcccacggttgggccctggtttccgtggaaactttaacggagggcctgttttcccctggaaaaaaggggggaggcgtctagagg

SEQ ID NO: 9670 - DNA, 950 bp, Homo Sapiens
  misc_feature (41)..(111): n is a, c, g, or t
gggagtctctgagcagccattgaaggggaaggaactgcggnnnnnnnnnnnnnnnnnnnnnnnnnnnnnnnnnnnnnnnnnnnnnnnnnnnnnnnnnnnnnnnnnnnnnnngacaaggaggtgggggcagctgagttagagtcccaactcttggactccatttgctattctcttctttctcccccacacctatctggtggtggtagtgggcgtttatatttgcgttccttttcattcatttctaaatctcttaaaaattttgggttgggggtattggggaaggcaggaaagggaaaaggagagtagtagctgaagagcaagaggaggacatggagatgaagaagaacattaacctggagttaaggaacagatccccggaggaggtgacagagttagtccttgataattgcctgtgcgtcaatggggaaattgaaggcctgaacgatactttcaaagaactacaatttctgagcatggcctaatggggaacctaagctcgctggcccgggcttcccaggcttaaataaaatttcggaaaactgcgagcctttagaggataaatataattttcccgagagggcttggcaaactccctgggccagaagaaaattgttccaaaattcctttaccctaaccttccaatcctggagggtgggaaaaccaatgttttaagacggctccctccagttacccggtaggaagactttctggccgaaaattctttgaaaaaatacttggaaaaaggtccctctcgccccccgcttttaaactggtgggaggagtcccccaaaccccctggtgaaacgatcctctagccattaaaacgttcatttcttctgaaaacttcacctggccggcccattatttgccaataacctcttaagagtggtgaatcttttgggcacccagggagcggggaataaattgtgaaggaccgcctcgcgggtaaa

SEQ ID NO: 9671 - DNA, 319 bp, Homo Sapiens
tatttattgtttgaccagcgctcatggctatatgcttcatctaccatcagataatgctcacttttcctactgtcttctccccagttaccctaagtcgtgcttggctacacctctcaatatagttgccaggaacaattctgcagtaataaaaatagtaaagagaagtctaggcaagataagcactagaacttccacccctcagatggagtaacaggagtaaaatatctttctccaaattcaacaatgggtagtcccatgccttcctagtttccatccaacaagttctattttctttccccagtttgtcaaacaataaata

SEQ ID NO: 9672 - DNA, 850 bp, Homo Sapiens
ggggttatcaagaacatggtgaaaggactgatcaaccatttcaaacagaacttaataccagtatgatgtattactatgatgatggtacaggtgtacaggtgtatcctgtggaagaagcattgcttaaagagtatattaagcgtcaaattgaatattacttcagtgtagaaaatttggaacgagacttctttcttcggggaaagatggatgaacaaggtttcttgcctatttccctgattgctggttttcagcgtgttcaggctctcactacaaaccttaatctcatcttagaggcactgaaggatagcacagaagtagaaattgtggatgagaaaatgagaaaaaagatagaaccagaaaaatggccaattccaggccctcctccacgcagtgtgccaccaacagacttctctcaactgattggttgtccagagtttgtaccaggccaagccttttgctcacatacagagtctgccccaaattctccaagaattggaagcccattgagcccaaagaaaaacagtgaaacaagtattcttcaagcaatgtctagaggtttgtctaccagtttgcctgacttggactcagaaccttggatagaagttaaaaaaagacatcagccagccccagtgaaattgagggaatcagtgtctgtccctgaagggtcattaaatcagctaatggtcttcagaagaaccacgaacaagaaagaacttgattttttggttgatgcacgagattgaaccaataaggacgaaaaaacccctctaactggattgggcctgataatggattcccaattattgaaattggatgacccaagaacttttaaccaagaatatttgaattg

SEQ ID NO: 9673 - DNA, 354 bp, Homo Sapiens
ctcttgtatatacatcccatttgggaaaaagttatctgggatctatccagctcaaacatgtttatattcttcaaagacaccatatgaaaatatgggctttgccaaagtaagatatttgataaatattaattcaggccttccgaaccttttccatatcatggcatgtatagaaagtaatatttgtatggcacactggggtaaactgacaaggtggcttagggctgaggagtgcggtaactcagttacacccttggataaagatctctaaccaggtgtttaaaaagttatcactgaggaagctgcatgacatagcttgttctccagatgtcattagttagcatgtatatacaagag

SEQ ID NO: 9674 - DNA, 863 bp, Homo Sapiens
ggatagcagctctactctgtgcaccatgctaggaagcttcctttttggcagaatatgtttggcagcaaagctatagagacaggtgcattcagaacatcctgggcaccagtcatgagtcttactgtgtcaaaaatctgaaaacacttgctgagaaccaaatttattccattggaaaaaccctctgtggagctataagcctcttggactcttcttcctagattaaggcttgcatttccctccctgtttcagtaaaagatgatgaaagccactatcaatcctcactgctgagtggcagggagaagcagcaccactctcagctcttttctaatcttgtaacttagtgctagaagtctctccaggctattaccatgggcatttgttctctgttggagctgtaagcagatgaacccaagtagagaagatagatcttggaaggagagatccattgagtccagaagccagatcagcaaatggaggaacctcggaggtgaccagaaagatctccatcggttgcccaaggctgtaagtagtgatggttttagcgatgaataacgtaattggctatgaagtactgtggcagagctgctgctttctgaaggcgagaaaccatttttagctcacagccacccttaagagaacttttggcaaattttgttgggcattattgaaatacatatacaaaaagttgctgattgcaatgggttactgggaatggaaatttaatgaacctttgccaatttaattacccttcattgggttttctattggattaatagggaatgggcctggaccttttttatttctcccacatatggggtccccttttaaccaaaaaacacggaaacctttttggggccattaac

SEQ ID NO: 9675 - DNA, 607 bp, Homo Sapiens
  misc_feature (131)..(145): n is a, c, g, or t
tatgttgacacccacactagttactttcagtcgtaaataaaatactgcaaatgttaattctgttattaataggtcatgagctttctcgtgaattctagaatttagggtgtttaactcttctcatatagtgnnnnnnnnnnnnnnnacttcgatgaaatcagagtcaaagcattttttagagtaactttcatctttcaaactcctgttctttctactagactcagttcacaagtgtaattattttgcataaataccctatcttccctcttatttattcactttctcttctgtgtccgcctgcccagtgggtctgtcaagacttttggttgtgggtgacaagaacttagcttaggcagaaacgataatgtgtgtgtttatatattggaaaaggctggcatagggaagtgctgttcttcgggcacagctggattgaggaccttaaacaatatcaataggaattgttccctttgcttccttcatgtgatggcaggtctcaactctccttttcagcgtcacgtcatccctgttcgggggacatgtccaactctactggtcattatcttacatagatgaaatattctaactagtcaaactataatagggccga

SEQ ID NO: 9676 - DNA, 641 bp, Homo Sapiens
ggggcagacacggagacagcgccggggcggagggtacgatggagaatttcacggcactgtttggggctcaggctgacccaccaccgcccccaaccgcactcggcttcggaccaggaaagcctccacccccgccaccgcctcctgcgggcgggggacccggcacggccccgcctcccaccgcggccacggctcctcctggcgcggacaagtcaggagctggctgtggccctttttacctcatgagggaactgccaggtagcacagagctgacaggcagcacgaatctgatcacacactacaacttggaacaagcctataataaattctgtgggaagaaggtgaaggagaagctaagtaacttcctgcctgacctgccagggatgattgatctgcctggttcccatgataacagcagcctccgctctctcattgagaagccccctattctcagtagctctttcaatcctatcacagggaccatgctggccggcttccgcctccacactggcccgttgccggagcagtgtcgtctgatgcatattcagcctcccaagaagaagaataagcacaagcacaaacagagccgtacccaggatcctgtccccccagaaacaccatctgattcagatcacaagaagaag

SEQ ID NO: 9677 - DNA, 629 bp, Homo Sapiens
tatttattgtttgactagaagaatatttctctccacaccttaaattagcctgttgctagaaatggtcattatataggaggaaagagaatataagcattgaaagaaaaagaagggctgtagtctagattggttagaacctatgtcactttctcccatatctagaagataagaggattttgcttttcaatcagaagtaaaattgagtcatcacaaaaataaactgtcaatgcataggttgttgctagactctctgactcttggccaaatccatcagctggaggaattgtcattgaagctccttggtagctagagttgtgcttgaatgaaggggaaaagcaagaaaacaacgagaaataatgaatccaagaggaaaagcagcaaactgaaggtccagaggcttatttttagccattctttttcctggccaaatgactcctattatggcagaataaatgctgcatttgaagtcagaacacttaggatgagtccatgcatttactattaactgggcatggaattctgaacaactcgtgttttgtttctgagcctcagtcttccatctggtcaatgggcataagtgtcttgacctacaaaccgtgtcacagctgtccgtgataaggtcgacggtt

SEQ ID NO: 9678 - DNA, 552 bp, Homo Sapiens
aatcaagctttaagtcacatttaaatgatttaagtgatttgttaatatacactagtacttgaaattaacaaaacaaaaattgcgatgtgtaattctacacactgaattagccactgcaagagattaagactttaatagatagcagtatcaaactttaatgctcttataatttgactcatattattcaaaccaaccatagacacttctaattttacacacgaagtaaatgctttacatttattttcagaaggtttcaaaagtatgcccacaagcttctttacagatacttttggccatgatacaaagccagtatatcactaaatgccaactgtggttatctttagataagaaatgcaggtagtccctactttttagctgcatccctttaaagatggtatcaccccgaccctcaatccatagttttcatcaccatgaaggcaaaagtattttgtacagtagagtatgtgctttatgcagaatcattttaaatgaactcagagaaaaacatctcatctagaaaacaaagaccaccaaaaatagccagtcctggct

SEQ ID NO: 9679 - DNA, 361 bp, Homo Sapiens
tttctagtcatttgtgtagatatgaattaataagtaaatgtaaaaatgcaccccaaacttacaataagttaaattaagggcaatccatggagtaaatttccttcaaatatcccaggtaaagcattaccaaattcctttcaagagattcttttacaaataaatatttctggtatgtatgaaacatttcactttactgattataaaaactaactttaaatggtcaatcaagttttatacctgagtctaatgttttatttgttctgaattctgcatgtggaaatactctctgcagggcttctaaaatcttgtcaacagtgttttgcaggagtggtttcacaacggtacaaatggggtaccgagc

SEQ ID NO: 9680 - DNA, 559 bp, Homo Sapiens
cttgcatttgtctgaacccacagaatggcacagtacaaagagtgaacttcaacaaatgttaaccgaactacaaccactaacatcaaccaaaacgtcagaggatcccaagatgaaatgtggattgcgacaaatgaaactaactgcattacaaatgtatgacataacttcactgaaggggcggtgaaaaaggagcttaccgaacaaactttggaacacggtgttttgacttgaaattgtaaggctaatgacaaaagaaactgtacataaatactgtactcactggggtatggggtaataattctaaatttgcttttcatgtgtacataggttgaaaaaataagtggatggataatggggtggctggagccaggtttcttatggtcagacaaggaagtcacagagtaaaaaggaggactagagtgaaccttgtggtaatggattataatcagagacatcaatatcaactcatgtttaacttaacatatatgccaactgatacatatagaaacaagttagagatgtatgtgtatacatgtcacacaataataggaccggctga

SEQ ID NO: 9681 - DNA, 105 bp, Homo Sapiens
gagagagagagagatgtcaaagagttataatccagtacggaaaaagaagacataaacacacaaagtaatatctgacaacggccgggcgcggtggagctgttgtaa

SEQ ID NO: 9682 - DNA, 381 bp, Homo Sapiens
ctcttgtatatacatctctcctatatactggtgaggtataatttctcaactagcctcactgttcctaatgaaatgtcacgctccagctatcacgtattaactgagactatgctaggctctgagggatgcaaagactgagtccccatcctcacagagcttgtggctgagttgggaaggcagacattaaacatttctgttcacacaagaaatacttgttttcaacatataagggagagctcatctagttgtgaaaattaggggagtcttccagaaggaagtaatcattaagatgcagtctgaaggatgagtcagagttagctttggaaagcggggatgaaagaaaatcacatgtacagagggaaaagcatgtatatacaagag

SEQ ID NO: 9683 - DNA, 265 bp, Homo Sapiens
taactcctactcctgctgcaaactccagctcatcaggccttgaataaatgattaccttcagctctggaaacagctaatctgaaaacgcaccttcccaaaactgtcataactatttttacccctttccagaaaaggaattagtgataaaagaagccatgccaactcatacgaataaggaaagacaatacagtttagaaggtacaatcttagtagccctctctagacaatcactgaatactttaaaatttctattttactcaaggtc

SEQ ID NO: 9684 - DNA, 392 bp, Homo Sapiens
gcaggtgaactagaggatccccctctgtatatacatatcatcttattttattgtatttttcactcctcccatgtaatgaaagttctcattctaaatctggtcattttaaggtgacactatgattctatttccattttaaaaatgacaaacacgaatgcacacatctcctaaaggaaaatgtcatttatgtaataagttgctttaatacaaaatgataagaccctgaaatttatttatttgctttttgaacccttgtgactagattatcaaaattaccatttgggtgtattttttttctttctactcgaagcaggaatatgatagagaaatagctccaagataagaaaaaggaaaacactgttgatgtatatacaagaggggtaccgagctcg

SEQ ID NO: 9685 - DNA, 478 bp, Homo Sapiens
cgaatcgagctcggccccctcttgtatatacataaaatagaatacattaaaaagcatacataaaatatagtaaatgcatagttcagccaagaatcaaagatgcagaagtactatgcatttatttgtttattccgtgatagaggtgaaagtattttctccttaatgcctggaaataagccttgggagataagactttgtcttgcccttagaactttgagtgtagaggtaggacataaatataaaccgataggaaaggttgaatgcaattaaaaaaaacagttgtactcactgacatttaaactattctagacattttttgaattgtttataggtttttgtcttaataagacggaacacgggataagatggcagaaacaggttaactcaatctcattatcaggactatccttataataaacttaaaatgacctaaatatctgtaacccaaagctgatatatgatgtatatacaagagggg

SEQ ID NO: 9686 - DNA, 494 bp, Homo Sapiens
  misc_feature (441)..(451): n is a, c, g, or t
tttctgagctagtgttactgatctgtttaaggaagtctcataactaacatctcagttgtgtgtcagcaaatgggtggtgctatgtgatgcaaaagctctacaaataccttttctcaacttcctaaatatttctttcacatagtcctgcttacactataggcgtactgacgtctttaattcagagaacaaagagggtaaaccttgttcctagtctaactcacctccacggttattaggaaactcaaatgtgggggactgagtttctgacgctttattatacaaaatcattagctcttttttaaaacctctaaatggtgagtcagctgccctaatctcatagcagaagaaacaacagccctaaataagaactgtcttattagaaatactagattccaaagacaggaaataacttcttcgtcagttatacacaatctgaatttnnnnnnnnnnncattatatccagcccctagctgttgtactgagctgttgtaact

SEQ ID NO: 9687 - DNA, 407 bp, Homo Sapiens
agttacaacagctccagttacaacagctcagccataaccttcagggttttaaatgtcactgttaatgcatcaggaagcccaaagacagacagtctggagaaatagtatgtaatgtttagatgattttggtaaacagctaagtttttaatgtatgtttaatgtgcattctgtttggggcctctgagtttgaatccctgagaccgagctgatgtttagcaaccatttcttaaccaggaaaagcctcccctactcccagcccatagccatttgagcttcactggcttttttgaacagaagcatttcccagtttttgcttggttcagtgaacacggttaccgtttaaaaacagtggctgtcgagttgtatgtctcaccaccctttgctctcctcttgagctacctcaagct

SEQ ID NO: 9688 - DNA, 608 bp, Homo Sapiens
  misc_feature (479)..(479): n is a, c, g, or t
agttacaacaactccagttacaacagcttctagcatgctccatcgtgacaacctaatattatcaagcctcatattttcacaggattatatacttattagatgtttgtttctagaaattatactacatatgtgttactaggcatatttaaaataagttactggtaaatggagttgcattctatagtcacttaataaatattaacaaaatatttataactggaaccttaatgaaatgtatcatcaaatcaggtaaaagcaacttgtccgcagttaccaaagcctagatacgcgttagatgcgccttttccggcctgtgcgtctgctctggttcctctcaggcagcaaagctggggaaggaagctcaggcaggagcctccccgacgccacaacggcacaagcagcagctaaagcaccgcactttgctctgctaaccttttacttaaatgaggttttgccaaatccacatctggaaccgcatnacacccatttgcaaggatgtttgttctttgatgaaactgcatctctactgcacatgagggctttcattgtaggacaagaggagagttcgtttatttttgtaactgttttacatgttccgattagttaat

SEQ ID NO: 9689 - DNA, 546 bp, Homo Sapiens
gccagtacaacagcttacaaagggaacccacagaatggatgtcctgaacatacggctctttcgtcaggtgcgggtacgcgctcagagtcaaattcatggcgtagtctctggatattggaggcaacaccagaaaggcgatagattccatccacgatgccatatctctcaatgaatgctgtgcagctctgaagaacctgcggcacttcaaaaccagaatttagaaggtgctcccccaggtcacaaccaaacaccctctctttcaagattccccgctgcttcagcttctgttttgttggacgagacttcatgaatgttcgtaagaacgtaatgagcttgccgtgctttttagacactcttgttgtggtacaagttttaagatcaatacttaaaattattccaaatgactatatttagcagtagattcatcaggatacaacagctctgcattccgtacaagagtgtagaaaataaatcataatccaactggttccaacctcaccaccacaggttaacttcaagttaggtcccacatcactgccgggttcc

SEQ ID NO: 9690 - DNA, 189 bp, Homo Sapiens
ttccctactggccccctagtgacaccagggaaagggttccacaagtatttctaagcagcttctgatttctgtaggcacctgagctttgtaaaagaaacagaaagtcagacaggttttaggacttcaccacatatgaaaaacccagaagcaaagtggtcaggtagaagaataaaagcagcctgctaagtg

SEQ ID NO: 9691 - DNA, 508 bp, Homo Sapiens
ggtggagggccacagcaacgtctacgccattggtgactgtgccgacgtgaggacgcccaagatggcctatcttgccggcctccacgccaacatcgccgtggccaacatcgtcaactctgtgaagcagcggcctctccaggcctacaagccgggtgcactgacgttcctcctgtccatggggagaaatgatggtgtgggccaaatcagtggcttctatgtgggccggctcatggttcggctgaccaagagccgggacctgttcgtctctacgagctggaaaaccatgaggcagtctccaccttgatggagaggccaggcgggagaactaccgcagcaggtgggcgtacggactgcttggcgcatggcacccgcctggcaagtgctagaactaatgctattcttctggaataagatgccaatgatgtggtggctagaaatgcaacttgtataaaacaaaaatgggagagagagaggtattaaacaaataccccccttagaggataaaaaa

SEQ ID NO: 9692 - DNA, 1143 bp, Homo Sapiens
  misc_feature (666)..(680): n is a, c, g, or t
  misc_feature (794)..(864): n is a, c, g, or t
  misc_feature (1016)..(1025): n is a, c, g, or t
tcgcgtgtctcaagctgaaggaagatgacgcagagctttatctgaaatcagaggggagctatccaaaatgggagtttgggggcagctaaagttgacatgcgaataaattgatactgaaacttagcaacttcttaaaagtgtaaagaagcctcataagatcataaggaaaatgtatatatgcttttcacagctttctagaattttttgacatttgattttcttgagacttgtaaacctggatatgttgaagggtatttgttaattttacttttcaaagatactttaaaacagtagagctagcaatgacaccttgcatttcatttcaacactgcttcaaggtttcttttgtatataattcttagaatgctcatttcttgtaaatggtttaatttgtacagcagaggaatgttattgtagtagtatgtaactattacctaatactgagtttttgcaaaaaacaatgaatgctcatatgtaattgaaatacttcagatcacatgaaaatgctgatttaacatttaagtatcacagcattaaaagaaaaagaaagtatgaaaccgaaaattttattatattgactcaatgttctagaaaatcattcttaatagaccaatgattgtacacccccccttgaatattttttctaataaaaccttccatgtcggnnnnnnnnnnnnnnnaaaaatttttcaaaacttttgtttgggcggggggccccaaagggaaagggaactgggccaaaatttgttcccaaagaaaacccgggcaaggcaatggggtttggaattcccccnnnnnnnnnnnnnnnnnnnnnnnnnnnnnnnnnnnnnnnnnnnnnnnnnnnnnnnnnnnnnnnnnnnnnnncccttttcgcggggtacttttccaagggggggccccaggcgcgaccctccaaaattaaaatttaaacccccgcgccccggggcactttttttgggaggagaggggggtggaaactctctttaaaccttctttctcggcccacctggggaaannnnnnnnnnaaaaggcgggagtggaggaaaccctggaacgtccccaggggggaatcccagccctctttggccccccttgggaataataaatatattctccccccgcgggggaaaaacagcgggggcc

SEQ ID NO: 9693 - DNA, 1107 bp, Homo Sapiens
  misc_feature (709)..(717): n is a, c, g, or t
ggggacacccacagcgatcacggccgggaggctcctggtgcagcggctcttcggcgggtcctcagatctgatggactacgacaatgttcccacgaccgtcttcaccccgctggagtatggctgtgtggggctgtccgaggaggaggcagtggctcgccacgggcaggagcatgttgaggtctatcacgcccattataaaccactggagttcacggtggctggacgagatgcatcccagtgttatgtaaagatggtgtgcctgagggagcccccacagctggtgctgggcctgcatttccttggccccaacgcaggcgaagttactcaaggatttgctctggggatcaagtgtggggcttcctatgcgcaggtgatgcggaccgtgggtatccatcccacatgctctgaggaggtagtcaagctgcgcatctccaagcgctcaggcctggaccccacggtgacaggctgctgagggtaagcgccatccctgcaggccagggcacacggtgcgcccgccgccagctcctcggaggccagacccaggatggctgcaggccaggtttggggggcctcaaccctctcctggagcgcctgtgaaatggtcagcgtggagcgcaagtgctggacaggtggcccgtgtgccccacagggatggctcaggggactgtccacctcacccctgcacctctcagcctctgccgccgggcannnnnnnnnaggctcctggtgccagatgatgacgacctgggtggaaacctaccctgtgggcacccatgtccgagccccctggcatttctgcaatgcaaataaagagggtacttttttccaaaacccgccttgcggcggtgcccccgttcttgtcgcgccggcctcggcccctcaaaaagttttcgaagaccccttcccttgggggccccggccccccataagggagagtgacccaggggccctttggcgtgttttcccgaggaggaaacctgggggctcatgtgacgcagagcggggggcgcccaccgccctcccgccacgaacggacagcaagcgcgcgcgccgggggcggcacaagcgggagtccgcacagtccgtggaaaggaccaacgcctcccc

SEQ ID NO: 9694 - DNA, 1664 bp, Homo Sapiens
  misc_feature (125)..(126): n is a, c, g, or t
  misc_feature (132)..(132): n is a, c, g, or t
  misc_feature (647)..(711): n is a, c, g, or t
  misc_feature (804)..(854): n is a, c, g, or t
  misc_feature (1120)..(1120): n is a, c, g, or t
  misc_feature (1174)..(1174): n is a, c, g, or t
  misc_feature (1391)..(1391): n is a, c, g, or t
  misc_feature (1567)..(1567): n is a, c, g, or t
cctgtgtccctggagtgttacacagtgcctcctgaagacaacctggccctccttcagctctacttccggaccctggttactggtgcgtccgcccacgttggtgccccgtgctctatgctgtggcnntgtggnctcatgtcaatagcttcatcttctctcagagacctaggatagttgatatagatggaaagatgggtacgttgtcctgtatccagcctttcaacagatgtctggccagacgaagaacattgtgtcctaatggtaggcaggagaccaaggagcagaaggcttgccttcctgggagcaggttgtttgagctgttttagagcagtgagccctaccattacatcctgatatctggggcttctgaaggtctgtgctgggagtgaagagtggcttagctatttacccgctctttggggacagggcaaactaaatgcatcccttcttacctaactcccaacccctgccctgggctgaggcatatgaatgctatagttgtgcattaaaataaatgttttttatctcctggaagccctatccccttcccctcccctgccgctgtgccggatcccccccgaccccaccttctaggaaacccgaatgtcgggtgtctcgtgctttgctatccctttttgccgcctttnnnnnnnnnnnnnnnnnnnnnnnnnnnnnnnnnnnnnnnnnnnnnnnnnnnnnnnnnnnnnnnnngccaagattgttgtgggccgccgtcccctgggggcagtggtgctttaggagcaaaggcgggaggccccttgtaccctttcgccttttggtttnnnnnnnnnnnnnnnnnnnnnnnnnnnnnnnnnnnnnnnnnnnnnnnnnnntgagaaagcagaccccccgcacggggtccgatttcgaagccgcttgccgccgtggccgagtattatcccgcactggcaccgccgggaaggtgtagcaggaacggcctgccgcccactataatgaatctcacgcggcgcccgcgctgagagcggcgccagtcaccgacgctcgtctcgcaccgcacagcctgcagattgttagctccccattggtagcgcaccgcgtcgaacgtgtgtgtccgcgcgcgctgaccatctacgtgtgntgcgcgaactagcaacgcccccgcgtctcttctgttttgtcggcacgcaagacntatacctacgggcggggcattgtaacggagatctgacgtgggcggaacggctacacgcggaattgtaggaggtggggtgtccaggtgcgcccgccggcggccttcccggcgcgggtcgtgagtgtgcaccatatatgtgttcttatgttccaccgccgccgccagtgtaacgccatgcgctgaaggtcccgcccggtgctgagtatttgtacccccncctccccacccatctgagcgtcggcggcgccgacgcgcgccccccgccgggccggtgtgataatgagattgggtgaaggacgccccccacggcgcgcatggttgaggcggcccagtgccaggaacggccgtctatggtgcggtgacccgcgtcactcgcggaggatgtgccgccgnctggactgacagtagacgcactggcggagatgtatgtaattgtttctgtcttgagtgttgctacagtctctcaatcgctcccgcccaccgagctttt

SEQ ID NO: 9695 - DNA, 919 bp, Homo Sapiens
  misc_feature (655)..(665): n is a, c, g, or t
  misc_feature (702)..(710): n is a, c, g, or t
ggggtgctgggtgcgggtgcgggtgcggggttgggcctgcgcatcgggtgagacgctggctgcttgcggctagtggatggtaattgcctgcctcgcgctagcaggaagctgctctgttaaaagcgaaaatgaaacaattgcctgcggcaacagttcgactcctttcaagttctcagatcatcacttcggtggtcagtgttgtaaaagagcttattgaaaactccttggatgctggtgccacaagcgtagatgttaaactggagaactatggatttgataaaattgaggtgcgagataacggggagggtatcaaggctgttgatgcacctgtaatggcaatgaagtactacacctcaaaaataaatagtcatgaagatcttgaaaatttgacaacttaccggttttcgtggagaagccttggggtcaatttgttgtatagctgaaggtttaattacaacaagaacggctgctgataattttagcacccagtatgttctacatggcagtggccacatactttctcaaaaaccttcacattcttgggcaagggacaactgcaaactggttttaaaactattttaacaaatctaccttgtaaacaaaagccagtttttacctccccttccctcccacggcggtgaatataatattttannnnnnnnnnnttgtcgggcccgccctcgggccccctccgagcacgcnnnnnnnnnaaaccccttccttttttgggtgccccgccgcccccactaaaggtaaagggagaacatgggcccaatagccttgtttcccctaaggaaaaacctcgggaccaggacaaaaaggcctgggggtctcccccccacaataaaaacacccccccggcggggaaacacggaggggtttttgaaacaacctctccaaaatggcaacttctttaaga

SEQ ID NO: 9696 - DNA, 1113 bp, Homo Sapiens
tatttttttccctcggttgaggaaaatttaaggtggccccttgtgggccaattatgtgttaaaaggtttggcattcttcgcccagtgatgggggaccagtatttttttcctaaaaaattgatattctgtcccagtgaaatagtaaacatgttggttggtttaaaaaccagaaacctgtttaagtttgacatgggcatgtctcttcggatttaaaaaagttatctttaaggtatggcttttgggaaatcattaataaactagccctctggaaaaggaatacaaatttcaagatgctaactaaatagaactcagacacaaggcaggtatttgtataatatgtctttcaattacaaattcatctacagtagaaacagaaaggaacataaaagtatgatctactttacagtaagctgtttttaaaataaaaattacagatcaatagtgaaggtgaggaaatttaactgagaaaattttcaaaatattaaaatattcaaaaacattgacacatgaataatacctatcttaaagtaataataataaatgacatgtgtatacaaacacatttaacatgaatcaggatttcttgttcttgatgtcagcacctactgtctaacgggtcgagacaaaatactgtgccttcaagagttagtcccattttgaacccctcctgcatctcatctaattttgattgaatatctggagggaaatctgctgctccacagttaaatgggtcaaaaggttctgctccaaacaggtcccgtttaatctcagtagatctactaggtactggaggtggctgtgtgccattgcgagtaggcatcgaagactggtgtgatattggagaaaatggaatcatatcaaagatgtcagtggagggcgacttaggtgtcatactgcctgctggaggtgctgatacttgagttattctcagttggttttccaaatcttgtactttatttttaagttccatattttctgtttctaagtcttggattcttttttgtaaccctgcgatctgttttcttgtttcaacatcttttcctcctgattctagaaatttcctgtatgccaggtcaaatgcttggccaattgttaaagtgatctcttcagcac

SEQ ID NO: 9697 - DNA, 534 bp, Homo Sapiens
ggaaggcctcaggcagacacgtgccctctgggtgatgtctgtctgctgccaggatggagcagaggagcgccacacatggaggaaagcccctgtaacgttacctaccttaaactccactcatcaaatctgagaaaagtatccactggtccccagggtttcagtcatgcttttgggggtcattgggtattagagaagtaagtatcttttctgagagagggggagtcaccccccctactggggattcctctgggctttattcactcccagccctggccctgacctttgtgggcctccctaatgcccagggcatggatggcttcagaggagtttttgaatcgaagcccagggtccttgttgatgtttcttctcctagccacacttggaggaaagttgcaggtgggttgggcagggagcaggcatggttctgctttgctgtttgtcttcctagttaaggctctttataaagagcttgttcttcatgttttaagcactttatgaagaataaaacattcatgcccttaaaaagaatagcaa

SEQ ID NO: 9698 - DNA, 605 bp, Homo Sapiens
gggagaaatgtcgaggaatcatcggaggcaagagtcagcgtgtgaatggactcaccagcagcaaaaacagccagcccatggccacacacaaaaaatctggacggtcaaaagagaagagaaagtctaagcacaagctgaagaaaaggagaggccatctctctgaggaacccagtgaaaatatcaacaccccaactagattgaccccccaattacagatgaagccaatgtccaatcgtgaaaggaactttgtgttaaagcatcatgtattcttggtccgaaactgggagaagattcgtcaaaaacaggaggaagtaaagcacaccagtgataatattcactcagcatcattatatacccgttggaatgggatctgccgagatgatgggaatatcaagtctgatgtcttcatgacccagttctctgccctgcagacagctcgatctgttcgaacaagacggctggcagctgcagaggaaaatattgaagtggctcgggcagcccgcctagcccagatcttcaaagaaatttgtgatggtatcatctcttataaagattcttcccggcaagcactggcagctccacttttgaaccttccccccaaaaaa

SEQ ID NO: 9699 - DNA, 507 bp, Homo Sapiens
  misc_feature (476)..(476): n is a, c, g, or t
ggtgtgccagggcatgaaggcagggctggaatggcagccctagttctgcgtcccccccacgctttggaccttatgcagctctacacccacgtgtctgagaacttgccaccttatgcccggccccgattcctcaggctccaggagtctttggccaccacagagaccttcaaacagcagaaagttcggatggcaaatgagggcttcgaccccagcaccctgtctgacccactgtacgttctggaccaggctgtaggtgcctacctgcccctcacaactgcccggtacagcgccctcctggcaggaaaccttcgaatctgagaacttccacacctgaggcacctgagagaggaactctgtggggtgggggccgttgcaggtgtactgggctgtcagggatcttttctataccagaactgcggtcactattttgtaataaatgtggctggagctgatccagctgtctctgacagtaaaanaccccgaaaacccaacattcccccccctggt

SEQ ID NO: 9700 - DNA, 821 bp, Homo Sapiens
ggaatccacattccagaggctcaggaagtggaaatggcctcaggtcattttgccttcctacatgtgcctgttccagatggcagggctcctttactgcaaggcatctctcagcgcctccagcagcctggaacccacgcctcctgaggacacagccatcaccagcttgcgccctccctctgctcctgagatgctgacccagcatggagcccaagagcagctcgaagaccatcctggccatagcagccaagcccccattcccagagcagaccctctccccagaaggacccgcaggcccttgttattgcctcgcttagatccaggacagagaggaaacaagcttcccacgggggaacaaggcctggatgaggatgttgatggggtctgtgaaagccacgcagcccctggtctggaatgcagttcaggctcagcaaactgtcagggtgctggcccctctgcagatggaatcagctccaggctgacaccagcagagtcctgcatggggctcgtgaggatgaatctctacactcactgcgtcaaagggctgatgctgtccctgctggctgaggagccgctgctgggaaacagcgcagccatagaggaagtgtaccacagcagccctggctttactgaaatgggctgggaagcccaccctgaaagagacggctgcccaagggatgaagccagccctcccacgagccaccaccctaccaccttccacataattaccgaacccgcatttccaaaagctttggttggaaagggaaaaaaccctggccccgccaaagggtggcccacaccccccgcccattgtgattcccccc

SEQ ID NO: 9701 - DNA, 775 bp, Homo Sapiens
ttggcccaatgcatggccctaaaggtgggaatcccaagcgcacttccccttaagaataccttgcaccctaagggcttggtcagtccctaaatccgtggacatccttggagaaccgagtcattctcatcaagccgacccccatttgtgaaaccggcctgggaagaccattgcatcatacaaggttgcaaattaaatcgcctgacttctgttgttggtgaatatccaaatgcgtgtttacaagtggcccaagactgtgggactgacgtacttgacctgtggaccctgatgcaggacagccaggacttctcatcttatttatcagatggactacatttgtctccaaaggggaatgaatttttgttctcgcatctctggcctttgatagagaaaaaggtctcttctctacctttgctgcttccttactggcgggatgtagcagaagcaaaacctgaattaagtctgctgggagatggagaccattagccaatcacaggagacccaaatctgcttgttatctacagaactcaaagttgtcaatacgtagaggtacgcttttttcctcaggcttaaacctttgccactgatattaataataaaagtattagatgattttccagggaagttttatacttaggtccattgtgtttcgacagtatttattaatgcagatatcagtgctacagctataaaatataccctgagcagcttgttaattctataaatgacaaagactatgtttttaaaaagtcacaattttataaaaatggtttttctt

SEQ ID NO: 9702 - DNA, 502 bp, Homo Sapiens
  misc_feature (211)..(220): n is a, c, g, or t
ctagttttagaagtttcaatagcactaaacagtctctgctctcaggaattgtcagaaaaaagaataaaatcacctgagactccacataccagattataaactcttctcgtaggtttgaatagcttactcacatgtcataaattaaccacagcttcatttgaccaccaggcctaaagtctgttgacagtttcagcatgactgaatcgctcannnnnnnnnnggctttcagaaatgggctgggttctctttagagtgggtgtaaacatgccatgtaataaatgatttccacttaatggtacaacagaattattgctttcttagatgtatgtgtagtaaaagtcaatatacacatttatataatttctttcttcaaaatcttatacctaatttgatatttctaaaaattgcacatgtaagtcatgtgtataacatgctaaagtactttaactgtgatcttaaaactgaataaaaatatttaataaaactatgaaatattttaaag

SEQ ID NO: 9703 - DNA, 862 bp, Homo Sapiens
  misc_feature (706)..(771): n is a, c, g, or t
gggtttcccccggtggagccttaggttagtgcccagtgcagtgccagactgtctcctctgctcctcccacctcatccctaggaggacccaccagtggagcacatgcagcctcagtggagatgcttggtgtggggatctgggtgaagggggttgagtagcgactgcctgggagatggctgttagtaggtctgcgcctggtgtctgcctcgccatcctggggtaaggggcagagagaaggacttgtcttatgtagggtgtggtcagccttggggccttacctacccagttccatgatatttcttgccctgttccccctggaatgtgcagtgggccagctgagagtacgccttgaggaggggggatgaggccttaatctgggaggcctatccccctatcccaggcatcccagacgaggactggctgaggctaggcgctctcatgatccacctgccccgggagggcagcggggaagacagagaaaagcaaacacattcctcctcagctccacccacctggagacgaatgtagccagagaggaggaaggagggaaactgaaaacaccggggcccctcggccttctctctgctagagttgccgctcagaggcttcagcctgacttccagcggtcccaagaacacctactaattcctctccactccttcatggctgggacagttactggttcatatgcaagtaaagatgacannnnnnnnnnnnnnnnnnnnnnnnnnnnnnnnnnnnnnnnnnnnnnnnnnnnnnnnnnnnnnnnnnttctcatgtttctgagggattacagcctgggaggattccaccgatcttcacttctagcaggtttttaacgtgacccttggctgtatttccc

SEQ ID NO: 9704 - DNA, 301 bp, Homo Sapiens
aatcgagctcgctcctctggtatatacatttcaagtgaacatgtaactcataccaagatagcccatattctgggccacaaagcaaatctcaataaatgtaaataattcaagtcttaatgtactctgaccacaatggaattattgcagaaactaccagaaagataagcaaaatccccaaatatttaggaattaaataacatacatttaaaaagagccatgtgtcaagaagaatttttttaactggaaaacatcctaaactcaactaaaatgaaaccacatcggctgggcttacgcctgtaat

SEQ ID NO: 9705 - DNA, 578 bp, Homo Sapiens
ctccatcttgtatatacatcacttctcctgcctcaggattagtccaaacccttcaacagcccctgctctgccctgccttgcaaggcagcctcatgcttgcccctctccatttcatctgctatggagtccaactgagcctcatctgccctttgaacacacactctttctcctctgggagtctctgaagtgggtaatatcctctgcttataatacgcttccccttaaacctctactctcttcctagctagcttcgactcctctgtcacttgtccgctttggcatcacctcctcatagaagacttctatgactccccagattctcaggagcatggcaggtgaagtgctcctcccatgaatggatggagattaaggagtgtgtgttattcatgcgtaattcaccagtgctcagctgagtacctggcactcaaatagttactgtgctggccaaagtaataacccccaccaccaccaattgctcatgtcctatgttacacagcacaattacataggcacagggggaactaagagcgcagataaaattaatgttgctcatcagctgaccttaaaacaagattatc

SEQ ID NO: 9706 - DNA, 827 bp, Homo Sapiens
  misc_feature (38)..(38): n is a, c, g, or t
actttatatgcgcttaaaaaggatggagtttttggaangaagggtagggacccaatcaattcttctttggggttgttcatccccactgagtggcctttgtaggtaacttttaagaggggcatagcaggggcgtgtttgtgtccacatccacagggcactagaagcctggggctccgcggccagcacatagaggtgccggagagcctggagatgataccggtgttcagtgctgtgagctgggaagtgcggataaagggcacagagaagagcggcaatggaagaatttgatgtgctcaaagagtaccttcctcctcccaaaaatagaagtccaagggccatgtggtgggctaagtgaaaaccatagttcatttcaccacccgttttcatgtgtaagaagcgacaaagctgcaaaacctttaggtttcctgagccagccatgaccatggcgagagacagcagcaccacgctcacgacaagtttcctaggttaatgaggacctgtaacagaagcattaggtgcagacagaataagtcataaaatctttggcaaattgatgcacaacagttaaatgctgataagttttctgagccagcaaatcgaaaacccagagacaagcaggctcctgcaattatgtagacatgtgcttgggacaaagtttccaaattcaaatcctctgagcacggcaattcgatttcactgagagagatactattttctcttataatttgaggaacattgctgtcaacccacttggaatttggtaaaatatcatcccacaaaatcaggcatcgagcaagtgtcctaagcaagagaaattctggcttccc

SEQ ID NO: 9707 - DNA, 426 bp, Homo Sapiens
  misc_feature (375)..(375): n is a, c, g, or t
cgtcataataagcgccctctacagactcagaaggacagagaaggttctgctggaagtgggctcctcagcaaaccagcagataggggttccttataccccaggttttctcactctcacgtgacatctatgtggggccaatgaagccaattcttcttttgtacatatgcagtcctgtaagaatgcattcaaacgggatccgctaattaggaattttctcctggaattctcaacagtctatggggccagaagccttccacaaaccagtgaaggtggcagcaaagaaagcctcttagacgaggagctgccagcagctgtctatctagatagaccagctaaaaaccaaccactaattcagcaaacacaacctcatacctnaccgcttccctttaaatggccttcggtgtgtgcgcacaatggcacgtggat

SEQ ID NO: 9708 - DNA, 1332 bp, Homo Sapiens
  misc_feature (395)..(440): n is a, c, g, or t
  misc_feature (750)..(750): n is a, c, g, or t
  misc_feature (1260)..(1260): n is a, c, g, or t
ggggacttccggttgtcagaatttacccctgacgcggcggcggccgacgggaagctgtgtgtgcttaggtcgtggtggccccggtggtggtgggctccgggcgcgctcgcgtcatcctgccccccctgccatgcatccgcggcgcccggacggatttaatggcttgggcctacccccctggtggccggataaaccaagcctccggcggagccttgcgtgcacagggctttaacaccggtgtccaacctgcgccactgtggttaagactcccgccgccacccccccgcgtcaaaatacccgcgcgtggagccaacaaaaacgcccctcgggcgagctgggccccacacattgcgggcccgacagcaaacagtccccaggatggggttcctcttccnnnnnnnnnnnnnnnnnnnnnnnnnnnnnnnnnnnnnnnnnnnnnntggtgcccgcccccgccaaccccgaggctggtgtttggtcgcctttttgttttccccgccctcgctgctttttcgctcttacccacccacatacccccccagtggcgccgcgcgcgtcctatttcctcgcccggtattgcgccccgcgccgcgccctcacttttgtttcacggtctcttcgcgctatttatactgtcacttacgcacgccctcatccaccgctcgcgcccgcggctgtgtcttctggtcgtccatatctcccgcgcccttcgctgcagtcgatcgtctccaccccccgccacgcagagangcagccggtgtgttattcacgtaactacgggcgctccctcgctcccgctctatgccataccggacctggtcgcgccccgccccgatactgagttcgtaactacactacatctaaactttctcacccctttatgtacgattccgcacagcgtatttctcgagcgtcacaccccaagcgagattgttaaagtcgttcgaacacaatcaatatattttggccacgctacacaccccaactgcggcgcgcggcccctgttgcactcctatcagtagcctctacccgcccgcgcacgcagatacccctcatcgacgcgcacgtttttagtgccgacgcggcgcgagatactctccgcctgccccgacccagagtcgcgagtgctctctgctatgccctcacgcaccgcgtagaaacgacagccacgggctggggtatgagttcgcgccgacgcgcgtagatctatgagatccgacccgacccattctacgacctccccctgctcgatctcttatncaacatgaagaatggaatggtcggcgccggcagggtcggtacgatagaaagtaactagttggatactcatcg

SEQ ID NO: 9709 - DNA, 714 bp, Homo Sapiens
gctcggtacccctcgtgttatcttctgcgtgcctttggccatatccaacaaagtcatctgcttcattttggttttaggagtcttcagtccttttttgggagatttggaattccctgtggatttctgtccattcaggatgcctttgcttctgccctttgccttcaaaggcttgtcactgtgcttccctggtttcttggcaggtgggccttttttaggaatgtgaaagttagtgtgcagcttattgggcgacatcatcttcatcatttcttctagatgttcttcaggagatttggaattctttgagttcttcactctgagtggcgagccactcaatgacttcttcaagtgtacgtgacaccataacttaggatttagtggtgaactaagagaagagttgtctgtcttggatttctttgagggcttcctgtctggggatccagtattcttcctcttagtagaagggttgagagtcatatacttgtatggatcaagtaaaaagtcactgaacttgctgggcagagagtatttcttcaccaattcatcttctacgacccaaggtgcattttcaccagtaccagctcgtaatgcattatgccgtataaagtatcgaactatctccttatttggtgggcgctctgtacgaatcaagctgtctgctggcacgttactgatgatcttatcttcattttgtagtttcacatcatatttgtgagg

SEQ ID NO: 9710 - DNA, 386 bp, Homo Sapiens
ggagaacgtcgcatttagggagggtcaggccctctggcctggggtagatctcgggactgcccgagggcctctgacaacttttcagcatcggccccagggctgccccagctggagtttttgggacgcttttgtgggggcaccgctgagtccggatagtgggacccaagtcgtcctgctcggcccctggggaataatcgtgtggggcgcaaggtctgtgggaagggacttggagaggagggaagatgtcgcgggagtctgcacagggtttccatgtgttccaattcttcgtcccataattcaaagctcgtggcattctgtggccgaccgctaccgagctagctcttccctttactatttcgcacttggtcttggaaaagatatgttgt

SEQ ID NO: 9711 - DNA, 473 bp, Homo Sapiens
cacccctgataggagttccccagcaaaagtagaggagacttcccctctaggaaatgcacggcttgataccccagatataaacattgttttgaagcaggatatggcaacggaacatcctcaagcagaggtagtaaaacaggaaagcagcatgtccgaaagtaaagtgttgggtgaagtggggaaacaggacagcagctctgctagcttggctagtgctggagaaagtaccgggaagaaggaggtggctgagaagagccagatcaacctcattgataagaaatggaagcccctgcaaggtgtggggaacctggcagcacctaatgctgccacatccagtgctgtggaagttaaggtgttgaccactgtgcctgaaatgaaaccacaaggcttgagaatagaaattaaaagcaaaaataaagttcggcctgggtctctctttgatgaagtaagaaagacagcacgcttatatgact

SEQ ID NO: 9712 - DNA, 300 bp, Homo Sapiens
acgctgttcttttatttttcagactttgttctttttgctttttagttctggggggttcaatcgatatatccacaagctcagagattctttcctcagtcatgtccagtccactaatacactgataaaaggcattcatttttacacagtgctttcgatttctaacttttttttgttctttcttagaatttccatctttttgcttacattgcccatctgttcttgcataatgtccatttatccattagagcccacaacatattaatcatggctgtttaaaattctcagtctggtaattctaag

SEQ ID NO: 9713 - DNA, 254 bp, Homo Sapiens
catgcacctccacccagcaccttcatttgcctgtttacagagataccaatttcccctgagtgactcagggtgaatactaagaattgagaatgctgtgttcagagggattactaggaacatattataaagaaattctgtaaatcttactctgcctcccaaaggctattagtaaacaattgtttatttaccgtgctcaatcgaattcatgcaaaattacaataatcctggtaagtcagagacgcttatatcgacgt

SEQ ID NO: 9714 - DNA, 255 bp, Homo Sapiens
aatataaaccttttataaactgttaaaattttctgttaaataaaagattaatattctaagaaaaccctgcagtgcttttatttcaatattcaatttatgtaaaaactgaatattacccctttaactttagccaatgtgtttacacacagaatttcctttacaagattagtctttcacaaacctttcacaatttgctcaaaccttcagctttatcatatctaacttaaaacaatcctttaaccttctaagagacgg

SEQ ID NO: 9715 - DNA, 753 bp, Homo Sapiens
aacgtcaataagcgtatgagtctcgtgaagggtgatagtgtcactttgtgcaggattcaagtggaacacttctggctccagaaggccagcccggagtgtcttcagaaaccggatggcagaaacaagtcatgtaggttgcccgggtgagctggtcatttatactcagattttgggtcaggattgaaagccataaatggattaaagttcagaacaacggagtctcagagcaagataggtacatatcaaaaccaggggtcccgaaatgtagcttgtatgttttattctgtttgtccagagcaaccagctgcttcatgcagttctgtttccaaatccccaatttgtcaaaactccttgcaaaaaattgttcatgttttccatgaactggccatcattcaagagaggcttcatgtgcactgaggtatcatcctaatggtgtcttcaagtttgggaataggcagcactgggcaggctgtccatggtagtgcatggtgggcacgatgtgcagctgcaggtactggccgggcccggagccggcagctgagggccgactgggggctcccggaccaaccgcagggggccccaggggccaggcgcgcagcagcaggcggggcaccatcagtcccgggagcctgcggcggcgagaacgcggcaagtggggagttctggagtctaaacacaacggccgccgccgccgttagcgcccaagacactgcgtcaggactcctgagatctaagactcgggccagtaccagc

SEQ ID NO: 9716 - DNA, 340 bp, Homo Sapiens
tgcaacgggtaccaagatcattcatctggagaatgtctcttaagcagcgggtaactggaggctggtaaagcttataaatggggtcttcgtcaattatatcaatttgtcccagatttggatgagctgtgagtgatgtaacacaaggctggagtgagtgcagatgagtttttatctcttcacagggctggtcgcggccaggtgttttcagagtgtatcgctgggggccacagggtgtcaatcaaactgaaaatccccgctgtccttcctctggtgactttctgtagaaccttcattcgcaccaggctgcaagacttcccttccaactgtcttgccttcgaca

SEQ ID NO: 9717 - DNA, 406 bp, Homo Sapiens
gtagcagaagatgcagatattggcttaaactctctgcagaagtataaactctctcttaacccaagtttctcattaataattaaggagaaacaggatggtagtaaatacccggaactggcactggagaaaaccttagaccgggaacaacagagttaccatcgtttagtcctgactgccttggacggtggacatccacccctaagcggcaccactgagctccggatccaggtaaccgacgccaatgataatcccccggtattcaaccgagacgtgtacagagtcagccttcgggaaaacgtgccaccaggcaccactgtgttgcaagtgtcagccactgaccaagacgagggcatcaactcagaaattacttattccttctacagaaccgggcaatctttagtctgaa

SEQ ID NO: 9718 - DNA, 328 bp, Homo Sapiens
ttcatatagcggagacgtagagaaagcattcttccacccagaccggtatagaatgatgtaagtgctgcataacagaagctgtgtggagaagtatggttaagtgatccagctggaagggaattaggtcctggagaagtgaacccagaatttcctgaagcagtacagccagtatgtagccccctaaatcctccaggagtgatatcaccatgggctacgatggacaccatagttccagacaggaaggatttttattcctccaatgtagttcctgataaaactcatgaagttggatcttattgagctgcccaaatgtctccatcagaccaga

SEQ ID NO: 9719 - DNA, 547 bp, Homo Sapiens
atggcatgtagtgaggacaccaggtggctaggacctgaagatagcctctaaggagctgaggatgtcaccctgctgacagccagcaaggaaatgggtacctcagtcctatagctgaaaggaattgaaacctgccgaacaacctgaatgaacttggcagaggactctgagcttgtgatgagaacacatccccagcttgaaatcaagtcgacatattgattttagcactgtgagatactgagctgagaacacagttcagctgttcctggacttcagaaccacagaactgagatgataaatgagtggtgtttcaagttgctaagtttgtggtcatttgcttacagtaagtgtaaactaatacacaagtgtaagtttgttttcttagagaagaaaaaaaacggggaaggaggtaagtgttaaaggatcaaaactctgacaaaaggctggttgcagaacatgacaggttgttgcactggaaactatttgtcatgcaagtttatgttaaaataagtagcttttgaggactttcatttttggtctgttaacatgc

SEQ ID NO: 9720 - DNA, 370 bp, Homo Sapiens
ccaggcatgtagtgaggacaagaatgactctctggaaataggtatgagttactcctgcaaatctcttgcccagttttttggaaatgcaaatgctgtctgtcaagatgaagttgataaagctttttggtattaacgcttcttaggtattaaagaaacaactacctttttttgtgactattttatagtgggagttgggttggcaaggaggactgaagtcaatatgtatttttatatgcgttgtgctccggggaggaaatttttgcctacgtgtgtaggtcttaaaatacagttatttgaaaagattcaggtaaagaatcaggaaaccaattttccaaactttgagtctaatgtacagtcatgagtcaaacag

SEQ ID NO: 9721 - DNA, 728 bp, Homo Sapiens
agtcgcgcaagcatcccgctggtgcctcccgggacgaaggacttcccgagcggtgtggggaccgggctctgacagccctgcggagaccctgagtccgggaggcaccgtccggcggcgagctctggctttgcaagggcccctccttctgggggcttcgcttccttagccttgctcaggtgcaagtgccccagggggcggggtgcagaagaatccgagtgtttgccaggcttaaggagaggagaaactgagaaatgaatgctgagacccccggagcaggggtctgagccacagccgtgctcgcccacaaactgatttctcacggcgtgtcaccccaccagggcgcaagcctcactattacttgaactttccaaaacctaaagaggaaaagtgcaatgcgtgttgtacatacagaggtaactatcaatatttaagtttgttgctgtcaagatttttttggtaacttcaaatatagagatatttttgtacgttatatattgtattaagggcattttaaaagcaattatattgtcctcccctattttaagacgtgaatgtctcagcgaggtgtaaagttgttcgccgcgtggaatgtgagtgtgtttgtgtgcatgaaagagaaagactgattacctcctgtgtggaagaaggaaacaccgagtctctgtataatctatttacataaaatgggtgatatgcgaacagcaaaccaataaactgtctcaatgctg

SEQ ID NO: 9722 - DNA, 877 bp, Homo Sapiens
  misc_feature (641)..(649): n is a, c, g, or t
accaccatggctgggtaaccaccgatcagcacagctgtccccttggtctcctgtatcccagtcactagtcctccctggtccaccccaccctcatcctcaggagccacagccatttcttagagggtttcaaaaggacagcctttggcgccttttccttctaacctttgagtccagccctttccagttttcattcactcgaagtaactgcactcaagctgtgctcaaaatcggcaacgcatttatttacaccaagcccttcccataaaacacaactgctgaagaaaatagcagacgtttcccctctctctaactctgggtatcccacagatgcaaaagggagaataaacctgaatattattacccccccgcgaaaaccgcggcgtcaagtgtccacgaaaaagacaaggcgtagcccccgcagaactgactgtgcaccgcggtgagacagatttttggtggggccggccctcggccccctcgaaaaaattttttctaaaccccatttcccttttggggcgcccgcgggcccccccggaggggggaagagtgggacaaaagggggcacctataaatttgtttttccccaaagggaaaaacccttgtgggcaccaatgaaatagagggggcttcgggagattttnnnnnnnnnaacataaaaaaagaacacgcccccccgcggggggcgaaaacgcccaagggcggctttttctcagtaaaacaaaactccccccaaaacgtgggaagttttctctctcgggagggcccttatttgacccgggggcgttctctatccccaaccacgtgggcggaggctcccctaaggagagcgcgcgtcctctcgataaatattgcgcgacgacgtgtttcagcgcccccc

SEQ ID NO: 9723 - DNA, 1117 bp, Homo Sapiens
  misc_feature (1100)..(1100): n is a, c, g, or t
gagcccaagcgcaaggctgagttggccaagatcaagcagaagaaccggcgcttcaaggagaagttggaggagacgctgaagcgacagaaggctggcagggctggccacaaggggcgtccacccaggacaccgtctgggtcccactcaggcccagtcccctcccagggcctggtctgagccccacacggccatctgcccagtccttgactcgtccatggagctgagggtcggaggaaccttccttgggggcagcagcccttcccgggggcctacccagtgccccacagcagaacccgtgggcgctcgtgttgtgcgggccctgctcctctgccccgaaaccactggctggccccttccctgagccctggccaagattcaggctgcaggggaagaaagaacatgaccgggaggttgtgaccccaacccaaggtcaccccccaggggtgccgcatacaggaggtgcttaataaacgggtcttttgaccttcctcgggcgggcgcgccggggaaaaacgatcgccgggggcgtggtcggggcccgcctcgggcccctgcgagaaaggcttttctacaacccatttcccttttgggcccgctccggccccccccgtatagggtaaaaattggaaaccagtgggccccactaagaaatgggctctttcccccaaccggaaagaacccccccctggggtctcccattgtgaccctcacacgggcttttgttgggaaatcctctctccgacccccacatgtagaaaccagacgtgtgctgcccggggggccggatccaaacacccgaaaggcgggttctcttgcacacacacaacattccccgtaagaggggggaaacttcccccctgaaggagtcgccatctaagcctgggggtacccgcattggcacccccggggggggtgtgcaaacaagagtgaagaggctctcgcgaacaaatccccagaaatttgtaggggacccgccggctctctctggggcaaacctttcatgtcgggatagggaagcgcggggaagagaacatatgttcattttcagaactatgtgtccctctgctgccaatatgtggggtgcggcatacccccccggnaagtgcgcgcgcccgct

SEQ ID NO: 9724 - DNA, 907 bp, Homo Sapiens
  misc_feature (252)..(320): n is a, c, g, or t
ggaacaacaagaccatttgtgacagcagcgtgtccacgcatgacctgaaggtgaaatacttggctaccttggaaactttgacaaaacattacggtgctgaaatatttgagacttccatgttactgatttcatcagaaaatgagatgaattggtttcattcgaatgacggtggaaacgttctctactacgaagtgatggtgactgggaatcttggaatccagtggaggcataaaccaaatgttgtttctgttnnnnnnnnnnnnnnnnnnnnnnnnnnnnnnnnnnnnnnnnnnnnnnnnnnnnnnnnnnnnnnnnnnnnnaagatccgggaagagtggaacaatttttcttacttccctgaaatcactcacattgtaataaaggagtctgtggtcagcattaacaagcaggacaacaagaaaatggaactgaagctctcttcccacgaggaggccttgtcctttgtgtccctggtagatggctacttccggctcacagcagatgcccatcattaccctctgcaccgacgtggccccccccgttgatcgtccacaacatacagaaatggctgtcatggtccaatctgtacagaatacgcccatcaataaattggcggcaaagaaggaaaccaaggaaggggatgtaacctggctgaggtgggaacctgcacccgacttttgacaaccatccctcatggccggtccacctgcctttgaagaagaccttgaacaaggtggcaggggtggccccacaaggcaagtttcaggaactttttcaaaatccaaggggcaaaaaggggccccttaacgttcctggccacggtttcgggaacggcaaaccttctcccacacttgggggagagacctcccttgaacgcccccgctctaaagaagacaaaatactcgtg

SEQ ID NO: 9725 - DNA, 483 bp, Homo Sapiens
ggagccagagaaatcggcaagccaagattaacccgaatctgaagtttagaatcttgagtttgcatctgcatcatatcatgctgttttgatgaggaaacatttgccactgaggagttggagggagggcaagacgacagtgttaagtcagatcatttaatggtttcccctaagccctggaaaaatatttgaaagaatggcagcaaaaaggttaagaaagcaagccagatttactgcacaatatgcagtacccagtactactttaaatcccaagagaacagtgtgatgtctaatatatacaggtctatgaaaatactgtggaataagcccaggaaggttagatgtgtttgcaaataagttgcccaaagggtccccctctaagtaaaacaaatattcagaccacaggctttaatgtaaactgtcaaaaagtgggatgtggaggatttttgttaagtgtcaatcgaagttaaaaagcaagggtttttg

SEQ ID NO: 9726 - DNA, 713 bp, Homo Sapiens
  misc_feature (461)..(461): n is a, c, g, or t
gcctgtttaatgcacaggtgtgagtggattgcttatggctatgagataggttgatctcgcccttaccccggggtctggtgtatgctatgctttcctcagcagtatggctctgacatctcttagatgtcccaacttcagctgttgggagatggtgatattttcaaccctacttcctaaacatctgtctggggttcctttaggcttgaatgtcttatgccccaattattttggtgtttgagccctcttctctccacaagagcttccctccatagtttgggaataccagttcgcaaaaaaggtgtcgtggcgctcgccccctcgccggggaaccttgagggcactggcccgtggtttccagacgggcccccagttttcacctccattgtttgaacgcatttgtttctaaaaaggtttgggtatctctttccgcaaccaataaggaggcgagaaatatgggtacnctataaaatggggcgcttgggtttgagacaaatgcccaacaaacccctggacttccaaggcctactggcaacatttggtgggtcccaacccccggggggccttacaactggcgctcctgtcttttaaacccacatagaacgcgggaattttcttatcgcgcccacatatatcattgatggataaccacaaaattcccccttgttcgcggctcggcttcgggccctactagaaagacggccccctaaaccctt

SEQ ID NO: 9727 - DNA, 344 bp, Homo Sapiens
acacccccgtgggttgcccaggctcggcccgtccaggagctgcctgggcgactcggctcgcctgtgcagcggctgctgggtgaggacaagttccaagtggtctggcgggctctggcgcctgctcctcgctcttcgcgcgcgccatgcaggtgctggtcaccgccatctctccaggccgcttccccgaggccctggacgagctgccgctgcccccattcctgcagccgttggacctcactggcaaaggctaggcccggagcaccctaggcgctggattttgggacaaaactatttttcagagcgttgtaccggcactttatatatattgatctctgtacggcaca

SEQ ID NO: 9728 - DNA, 442 bp, Homo Sapiens
taccgagctattcggtaagtgcatccccctccacccacctgcctcctctgcttctgagagttaaggtcacgccaccaccttggtccctattctcacacactagaagacgggttagcagtttggcactccatgttgaaaagttgccaacccctgcccttcaggaaaatgtcctcggcctccacctcccacggacagctctgcctccttcctgccctctccctccccactccctctcaccctagtcctagcccctttaactgtccggagaacggacccgaaagatgtggatggtcccgttactgagggacacgaccaggtacctgccatccaccatggtggtaacccggggcttttccaggccgtggtaggctgtcaggaagtctccaaggagggaccccttcgggtccaggatcaccaccttgttgacttcggatgcacaaaa

SEQ ID NO: 9729 - DNA, 325 bp, Homo Sapiens
acgcgagccctttcctaaactgttcagcgctctcttttcctttgggtggttgttgcaagggtgatgacatgactgtccccaggcctgtctccctgaagcgtctgtgctgtcaggacagccctgggcagagatgaggcaggggtgaggcgtgcgtgtgcttttcctccttgttggatgtcttccatatcatctgtttccatagctacaatccatcccttggccttaactttggaatttggagattatatgcaaacatgtgtaaaggctcatgaatatggatgacactggaattttataaattctaaaataaaacccgaaaccagaa

SEQ ID NO: 9730 - DNA, 593 bp, Homo Sapiens
tcacgatgtggtgggaggaagacagtgaaaatgatgataacatgtgctccctgtaactgaggatgaaatgagagaattaccaagttatgtagtgaacagttacagaagaatggtctgagaaaaaatggtattttgaaaaatggcttgatctgtgacttcaagtttggaccgtggaagaacagcactttcaaacccacaactgagaatgatgacacagagacaagtagcagtgatacatcagatgacgacgatgtgtgaaggatttcctaacagctttagaaatcttagtgtgatacatctctcatacagtttggggtgaatcgtaaaaatgaagaactataatttatgtagtgaaataccccattagaagaggatttttcgggggacttcaatatgaagaaaaccaagaatgttttgttgggctgtgttgaacattatttctttgtaaatgaatgtcgtaggaatgaggacttgggttggtccaacattgactttcttcatcactgcaacatttctctgactagcaatgtgacgatgtaccaaatgagatttctcatttaataataaaaattgtgtatgttaaaggcacattg

SEQ ID NO: 9731 - DNA, 1252 bp, Homo Sapiens
acggctgtgtggatatcggcttcgaaaggatctcaccactgagctgagttgggagctgaccattcccccagaagtacagcggatcgtcaaggtgaaggggaaacgcagcagtgagcacgttcattcccagggccgtgtgatgggggaccgcagtgtgctctacaagagcctgaaccccaacctgctggccgtggtgacagagagcacagacgcgcaccatgagcgcacctttattggcatcttcctcattgatggcgtcatctgggcgtatcattcactcctctgtgcagaagaaagccaaaggccctgtccatatcgtgcattcatgagaactgggtggtgtaccagtatctggaacaccaaggctcggcgcaacgagtttaccgtactggagctctatgagggcactgagcaatacaacgccaccgccttcagctccctggaccgcccccagctgccccaggtcctccagcagtcctatatcttcccgtcctccatcagtgccatggaggccaccatcaccgaacggggcatcaccagccgacacctgctaattggactaccttctggagcaattctttcccttcctaaggctttgctggatccccgccgccccgagatcccaacagaacaaagcagagaggagaacttaatcccgtattctccagatgtacagatacacgcagagcgattcatcaactataaccagacagtttctcgaatgcgaggtatctacacagctccctcgggtctggagtccacttgtttggttgtggcctatggtttggacatttaccaaactcgagtctacccatccaagcagtttgacgttctgaaggatgactatgactacgtgttaatcagcagcgtcctctttggcctggtttttgccaccatgatcactaagagactggcacaggtgaagctcctgaatcgggcctggcgataaagaacaaagactgtgcctaaaagtggagagccaggggagtgtgggtcagataaccagctacagctgcagtttggtggattggtggagtatgtgtgtgtgtcagtgctcagctaagaactgtagggaagatggatgaccttcacgcagaactccttttgggatatacatgatgcagaaaggatcctacatggagagagacagaactctctcagctgacactctcagagattcctgatgggctttctcttgaagtccaaaggcgtctgcattgtttcctttctttgcccatccatgaatgttctg

SEQ ID NO: 9732 - DNA, 1112 bp, Homo Sapiens
  misc_feature (204)..(204): n is a, c, g, or t
  misc_feature (232)..(232): n is a, c, g, or t
  misc_feature (1073)..(1073): n is a, c, g, or t
ccgtgtttctgccgccaccccccaagaaatgagagacacgggagggcgttgtagccacacatagttggcggtataagagcgcacaaccccagaggttgtgggatccagtgggcgtgtgggtgtaattgggggaggggaactatggggaagtagccccggttccaagtgtgaggccatctgcccccatgttgggaagagccggcntattctttgcccctctttaaaaataganccaaaatccttcagagttttccatgcgggggggaaactcggtgacatattgttaagcgaatttgagtgtaagcgggtgaatttctccaaacgagcgggttggggtaggcggggggtggccttcgccgaaaggtataaatttcccggagagggctggctcgaaaactttaatctcccggaaacaggggagaaccagatttcccccaagctaacttattccccttggtgccttccaaggttaggacccacccctaaagtccactgtgattccgtgggccttcgaagttggttagaaaacgccattgcaaataaaaggtgtaccaaaaaagggggagaagaaaaaaatgtgtcatgcaaagagggatgtgttattttatttttttgggtttgggttttagagtaggttgggttgccgtggttactaggcgatggatggcagcccttggtggcagagaggttcctagcctgggagggagaaacgcagggtgtgtgtgttcccgtgcatgagaagactggattgtatctcactgatgacaggccaacggctgctttagagatggtgagagattggatcttatataaacagtgttttaaccctcttcatcctgcatgcaaacagatccagctgcctgtagcactttaagtctcaagtactgagaggtggggtagagagagtgcctattgtaaacaaaagcaatggatccagcctggatctcagcgccaatttcttcacccagccccagcaggcttagctacacagtgtgctctcagggactatttctatctgacttcctctttctgaaggttgggcgtttggaccgttgaaacaaaatgagtgcccnctattcagggtactcatgagaaaacggctttgcaagtct

SEQ ID NO: 9733 - DNA, 970 bp, Homo Sapiens
gggacttcaacatggcggctgcggcactggcggtggctacggtgacggcctggcccggagcgggcagagttggaggtggtggcgttcgctctccctaggggctgtcgggagctcagcggggaccgagcctgggaggccggccggtgccagcacctttcggcttctgagacggcggcagcagcggcattcaggttctaaatggcttctaagaagttgggtgcagattttcatgggactttcagttaccttgatgatgtcccatttaagacaggagacaaattcaaaacaccagctaaagttggtctacctattggcttctccttgcctgattgtttgcaggttgtcagagaagtacagtatgacttctctttggaaaagaaaaccattgagtgggctgaagagattaagaaaatcgaagaagccgagcgggaagcagagtgcaaaattgcggaagcagaagctaaagtgaattctaagagtggcccagagggcgatagcaaaatgagcttctccaagactcacagtacagccacaatgccacctcctattaaccccatcctcgccagcttgcagcacaaccagcacatcctcgacaccaactcgggtcagcagtagtgccacgaagacagaaagttctcagcccaactcacataaaggcggattcaatcttgctgacttctgagtgtgaagaagacccattttgataatctgggagttaaaaactatcgatgagcaaggacacgagctgagacaatattctggtagcgaaccaatgggacccattatggctcagttatcggacaataacttgccaggggaaggatctgaggtctgtgttacaggaatgagggaggcctggcttcctggaacgggaatcctagaattccaggcctctccataaaccaaatggttataccttacccagtgggcacctgtgacacagaattcactggttccaaaggtgtctccc

SEQ ID NO: 9734 - DNA, 1627 bp, Homo Sapiens
gccaaaaactgacccctcgcagtgtgcgggagctcaatatatacaagggggcgactcgtagaatatacggggaggagatgtcctgaaagaagggatgtttatataatacgcagttcaacaatccccgctgggaggagaaatagcgcgtatatcgcagaaggggcttattacaatataaaatcggggaggggggtcaaatggctgtgtaagtgtgtactcggggatagggtgaaaatacggtacaacatggtggtatatacacgaggggcgagcgattaacatctagcagggagctctttagcgtcggtctggggaggtgttcatagacatgagcgatcggtcctatattgctaaggatatttcttgccggatggcggatatataaatttacccctggaggagggcgtctattgacagctagaagtgttcgggggtcatcgcgggtttagtatgggaggtgacctctttttttgaccggtggggcgtggattcttaaacatccccgaggggtgacgtggatcatgcaccgatacaaatatggcgtggagccccgcgcatctccttttacaataatgtcccgctcagcggcactggcgattctgcctgattggattggcgctctcctatatgtgggtctgaaccgcgcgctttatcggagaggctgtcctccgtttttgcgttgggtaccaaggaattagtggacggcaaagtgggcttactgggggcctggggccctaaagtgtcggcacgaaggaattgaaggacgtgcaccattgtaggcgcaatgcgaatggccatagaggtggggaataagggggtaacgggtaaaggcaagacgggtctttgtaagtggtccacgagcgaccggaagggccgtccataatttttatccagaagcggcaggggtagttttttcaccaaggataacgatgtcactccccgacgagggtcagcttgtttactcggctataagtcgaagtgcggatgctagaatccaagaggcagagatcaaagacaaacagtccaataaaatcatctgaatccagtaaagacccactctttgatggtggactaggggtagggaccacagcagttgaatttccaggagccagggttggtgcagttatgcgtgtaataaagctcatcaggtggggattgcaggaacgatcaggttcattggacatggctgaccaggtgaggtacatagtgtagagggtgatgagggaggactgcaagaggccggagcgaggctggtgttcctgaattttagggtggatcgatataatagaagccacaacgcaaaggatcaggttaatactgatgaagaacttgttttctgtgcagccatctggtttggtgtaatatgtatagagcagcccgacacagatgattgacaggatataaaaggcgcttgtgaaagacagtaaagcaggaccacaaccttgggtttccttcttccattcgatttacccatgattcattccaagaatgagcaaaatctaccagcagcaccagctgaatgaggatgaagagggcggcccctatcatgccaacaacaaaccagactgaactgaaatagcccccagggatggtgaaagagccaaccatgattccaatatgggcagca

SEQ ID NO: 9735 - DNA, 467 bp, Homo Sapiens
gtcaaatactgcaacaatgctcacctacaattgtttcaaatagtgtttctcttgctatttatgtctttggcgcttatatgacggtaacgtcagataagcgtatcgcatgccactctaatacccatagtaatatacgttgagactcaagaaaactcctaccaatattagggaagaacggttctgatcgctgacgaatcatggcttgcatctgtctttgctgctgctgttcttgcctttcttgatccaaaagatcctgtagaagtagaggctgttcttctagaagaaggggcctctctctattctgctgtgctaatgtttgaggaatcattagctgttggggtccagacatgctactggcaccacgacaagacttgtttgacggcccagctttgacgcttgccaggttattcccgtcccccgaccgtggttcgactcatacaacgttgggatccttcgctcacctgccg

SEQ ID NO: 9736 - DNA, 495 bp, Homo Sapiens
gcatgcgttataagcgctgtagatgagagctgtgctgtatacactgctggcattaaaatggcacccgagtattcaacacaatgggcactttcatacctatgttgaatccatcgtgcgccgatgcaagccctgtatttatgcttagtgttgtgggcaccaagtgtcgagcatcgtcgtgactggagaagccttgatggtcactgaagaatttcctttcagccaagaagcagtgaggtctgggaatattccaaagtcatgtctctgaatatgtgtccttgacgtgcaagctttgtaaaaccccatccccgcttaggtgcgaggcatcaccttctcacaagtgtttagtttcttttaaccacaagtatcattcttgggtgataatatagtttcattctacttagggattgtttagacaacagagaaagagccaattaaattttttagttcttgaaatttttatttatatgtatacctagatgagtattttaagctgtt

SEQ ID NO: 9737 - DNA, 438 bp, Homo Sapiens
gctcatgtctcccgctaggttagtgagacagcaaattgatgattcacgagcaaggattactgcggaaaggtagagactcctactgtccacgcgacatgagcagaacctggaaccagaggggcagggaccaggggtctttactcatatattattatgggtaagagacacgaagagacagcctctctcttactgtctcagaagctctgtgtttgggaaactttgagcccagtgagtagcagggtctgcagtgtgagtaccaggtttccctggacaatccaggtctcctctgaggaagcattctgacttcccactgaccacggaaggcatgtcagcttcatgcctcgggctagagttctgataatcggggctgaggggtgaaaagaaatccagtcagacagacagtggggagacaggtccctgccctttatttgcgggaga

SEQ ID NO: 9738 - DNA, 319 bp, Homo Sapiens
caatgagcaggatggctgcgaccaccacggccggaatgactgtgtgcagctagacatcatcctcactgctcttctcagggtccctgtcaggcacttctgtgggcggcgcctctgagggcactctcctgggtggtaccacagggataaactgtaggtgccagacaactgccagagcccgtcacagtgatgcttgtgcccttaaagtcaggctctagggcgttggagaaggcaggccgaggttgtcacatcatcctcagcgatccgtcggctcagcccagcaatctgctccttggggctggctccacggcatttggatcca

SEQ ID NO: 9739 - DNA, 285 bp, Homo Sapiens
gagagttgacattccgtcttaaaaacaaacgaacaaaaaaattccagtactttacacacaaaaagtcattggattttccaatttcctggcactaggatgttacattgacaaaagcagacgtaaagcctggatttgggacaatcaaggaatagttacaaacacattattcaaattccaaaacaaagaatctcaggttggaaattttccttaatctattgggaactactatgtagaaaacattagttaatactagtgaagtgtttcatattccagatcacctgcgga

SEQ ID NO: 9740 - DNA, 196 bp, Homo Sapiens
tcagacagagggctccaaatgccaaggaccaagtgtggtaacggagtgtgcggatgaagcaagagtttaaaggggaagttagggatgtcctggggcttgtggaagcccagtagaaggaggcaaagctccagcgagacgcattgcccaggcacagtacccagttaaggtccagaagagccgggatctctagagtagc

SEQ ID NO: 9741 - DNA, 527 bp, Homo Sapiens
cagcgaactccagctctgacacaccagctccagctcctgcttgcgggctgcagcctcccccggtctcctcggcctctgcacacagttctgcctctgctcgcaattgctctgccaggcgggcgcgctcctcttccagctgtgccactcggccctggagctccccaacttcgcgggcgctctgctgctgtagctcctgcactttctgcagctcctgggcccgtgcctgcagcacctcatcctgccgcgtcacctgcagcggtggcttcaccttggtaaacagccgccaccactgccagtgtctcagcttgtggtaggccgcgcagttccgctgcatcaccctcagggcgctctgctgctgctggcgcttctggaaggccctgcgagccaggtatccccgggcagctgcctggaaggagacgatgatgtcggtgaccttcaggtctcgctcctcttccagctgggccaggaccccagcccggaagaagatcttgctccgccccacgcggtgtgggtcagaacataagggg

SEQ ID NO: 9742 - DNA, 717 bp, Homo Sapiens
atgatccactttaatactgcttgtctggctggatgatccactttaagtctcctctgctctcaacttggacacatctaagtttgtctgggggccttcatttctcaggaccaaaggtggaaggaggtgtgaaatggaggtcagatgggactccaggctccggggctgagtgtgtctgggcctcaaggtcactgggaaagtggatctggaaaagtaacattccctaaaatgaagatccccaaatttaccttctctggccgtgagctggtgggcagagaaatgggggtggatgttcacttccctaaagcagaggccagcatccaagctggtgctggagacggcgagtgggaagagtctgaagtcaaactgaaaaagtccaagatccaaatgcccaagtttaatttttccaaacctaaagggaaaggtggtgtcactggctcaccagaagcatcaatttctgggtccaaaggtgacctgaaaagttcaaaggccagcctgggctctctggaaggagaggcatgaggccgaagcctcttcaccgaaaggcaaattctcctgatttaaaagtaagaagccacggcaccgctcaaattcattcagtgatgaaagagagttctctggaccttccaccccgacggggacgctggagtttgaaggtggggaagtgtctctggaaggtggtaaacgttaaagggaacacgagtatctctgcgaccggtc

SEQ ID NO: 9743 - DNA, 815 bp, Homo Sapiens
tagatattggggacggtacgtactgagtgcaggacagccgcctacgaggagggcgtgcatctaggtggaggtcctgtatgatgaggtcgctgtgcccaagagccccttccgagtgggcgtgaccgagggctgtgatcccacccgcgtccgagccttcgggccaggcctggagggtggcttggtcaacaaggccaaccgattcactgtggagaccaggggagcgggcaccgggggccttggcctagccatcgagggtccctcggaagccaagatgtcctgcaaggacaacaaggatggtagctgcaccgtggagtacatccccttcactcctggagactatgacgtcaacatcaccttcggggggcggcccatcccagggagcccgttccgcgtgccagtgaaggatgtggtggaccctgggaaggtgaagtgctcagggccagggctgggggctggtgtcagggcccgggttcctcagaccttcacagtggactgcagtcaagctggccaggcgcccctgcaggtggctgtgctgggccccacaggtgtggccgagcctgtggaggtgcgggacaatggagatggcacccacactgtccactacaccccagccactgacgggccctacacggtagccgtcaagtatgctgaccaggaggtgccacgcagccccttcaagatcaaggtcctcccagctcatgatgccagcaaggtgcgggccagcggcccaggcttcaacgcctctggcatccctgccagcctgcctgtggagttcaccatcgacgcacgggacgcgggcgaggggttgctcactg

SEQ ID NO: 9744 - DNA, 488 bp, Homo Sapiens
ctctggatgcaaagtgtccctggcctccatttcagtggagtggagagggtgagctggggctgccctctgactcctgcttggctagaatttcaggtatgaggtgtcctcaaggcaagctttcctggtctctaatcacacacacaggcggttctggagaagaggtgtgggcagcagtgggtggttggatgaggtaagaagtgaatccatggtggcaatgggaattgccaagaagcaaaaccttaggaatgggttcgacatcatccttaaagccaccagagaactagctggggtaatcatgagttaacaagagctacaacccatcttccgtaaactacatttcagtaatgcgactttgtacatgtgtttctttataatgtgctcgctttccttctaaattaatactgatgaaataaaaaaattattaagcaccgccttacttggcaagagcttataataccctgaactttaaagacactttgcatccagag

SEQ ID NO: 9745 - DNA, 530 bp, Homo Sapiens
  misc_feature (229)..(291): n is a, c, g, or t
agaggatcccgtctggatgcaagtgtcctctggatgcagtgtcagaactctaagacattgtgtgtgagagtgtgtgtctagatcccatgtgtgacgacaccatagacacgggtatgtgatactctgtgtatatgtgagtctgtgtgagagacactgatactccaagacattgtgtgtgtgtgacactgtgagacaccaagacagtatatgtgcgagacagcctatgtannnnnnnnnnnnnnnnnnnnnnnnnnnnnnnnnnnnnnnnnnnnnnnnnnnnnnnnnnnnnnnagacacgtgtgagacactgtgtatatgacactatgtatacgtgagactgtgagacactatgtgtatgtgacactgtatatgtgtgagaccgtatgagacagtgtatatgacactgtatatgtgtgagactgtgtgtgtgaaacactatatgacactgtatatgtgtgacactgtatatgacactatatgtggagactatgtgtgagacactatgtatatgtgacactttgcatccagag

SEQ ID NO: 9746 - DNA, 909 bp, Homo Sapiens
gtctgctgggtggctccatgcccgtgaacctcgggagggtaccttgcggacctcagtggagagatggcataattgtcctgaaatacgttgatggcgacttatgtccagatgggattcggaaaaagtcaaccaccatccgattcacctgcagcgagagccaagtgaactccaggcccatgttcatcagcgccgtggaggactgtgagtacacctttgcctggcccacagccacagcctgtcccatgaagagcaacgagcatgatgactgccaggtcaccaacccaagcacaggacacctgtttgatctgagctccttaagtggcagggcgggattcacagctgcttacagcgagaaggggttggtttacatgagcatctgtggggagaatgaaaactgccctcctggcgtgggggcctgctttggacagaccaggattagcgtgggcaaggccaacaagaggctgagatacgtggaccaggtcctgcagctggtgtacaaggatgggtccccttgtccctccaaatccggcctgagctataagagtgtgatcagtttcgtgtgcaggcctgaggccgggccaaccaataggcccatgctcatctccctggacaagcagacatgcactctcttcttctcctggcacacgccgctggcctgcgagcaagcgaccgaatgttccgtgaggaatggaagctctattgttgacttgtctccccttattcatcgcactggtggttatgaggcttatggtaagagtgaggatgatgcctccgataccaaccctgatttctacatcaatatttgtcagccactaaatcccatgcacggagtgccctgtcctgccggagccgctgtgtgcaaagttcacattgaatgtcccgccttaacttgcgtcccagacataactt

SEQ ID NO: 9747 - DNA, 528 bp, Homo Sapiens
  misc_feature (356)..(446): n is a, c, g, or t
tggagctcggtaccctctggatgcaagtgtcaggagaaagcagagatggtaggaaaacagaaagaaaacgcattaacaagaactgcacaggggttagggacatgtggcatagcagtaaatatccctaaagtctcaacggcctttcaggccatgatgatttcagttaatgccaatcttccaggccatcacagcagcacagcaatcaataggacagtttccatgacactggtaggacagtaggacagtacacagtagaacagtctaggacagttcagagtacacagtaggacagttcacagtaagacagttcacggtacccagtaggacagtacacagtagaacagttcacagtgcannnnnnnnnnnnnnnnnnnnnnnnnnnnnnnnnnnnnnnnnnnnnnnnnnnnnnnnnnnnnnnnnnnnnnnnnnnnnnnnnnnnnnnnnnnataggacagttcacagtaagacagttcacggtacccagtaggacagtacacagtagaacagttcacagtgcacagtaggata

SEQ ID NO: 9748 - DNA, 551 bp, Homo Sapiens
ctctggatgcaaagtgtcgataagcagagctgttcttggggagaaggagggaggtctcgggagtgtagcaccatgccaaccagccctgcgcgaagacagagtgagccacgcccggatggcagggcatgtttctgttttggtgtctcactttcctcccagcgtgacttatttggggattcctcagggcctactggaatgtgactgcccactgcccagctgcctcgggtacaagtcctggccctatgtcccagctgtcaggggctcagggaatcctacccagccacctgtcctgggatggagtgtcagcatccaccccttggttgtcatcgaggccgccctcccagtcctgggtgaagatatttgggccaccagggctcccttggccccttcacgtaggaaatagacacgtgctttttaatgcaggacactttgagtgttacaaaatctgtagacctggcagtagggtcatgatgttgggaagggtgtagtgccctaggttggtgacagaagggacagacacttgtgcacaggtgtctttggtgatcgtgggg

SEQ ID NO: 9749 - DNA, 1763 bp, Homo Sapiens
  misc_feature (1080)..(1095): n is a, c, g, or t
  misc_feature (1704)..(1704): n is a, c, g, or t
ggggtggtctatttctctgttagtgtttaaccaaccatctgttctaaaagaagggctgaactgatggaaggaatgctgttagcctgagactcaggaagacaacttctgcagggtcactccctggcttctggaggaaagagaaggagggcagtgctccagtggtacagaagtgagacataatggaatcaggcttcacctccaagggacacctatctaagccattttaaccctcgggattacctagaaaaatattacaagtttggggtctaggcactcctgcagaaagccagattctttaagcacctcctgaaaaaatcttttcaagatattctgcctagacggtgtgaagggagacctgctgattgacatcggctctggccccactatctatcagctcctctctgcttgtgaatcctttaaggagatcgtcgtcactgactactcagaccagaacctgcaggagctggagaagtggctgaagaaagagccagaggcctttgactggtccccagtggtgacctatgtgtgtgatcttgaagggaacagagtcaagggtccagagaaggaggagaagttgagacaggcggtcaagcaggtgctgaagtgtgatgtgactcagagccagccactgggggccgtccccttacccccggctgactgcgtgctcagcacactgtgtctggatgccgcctgcccagacctccccacctactgcagggcgctcaggaacctcggcagcctactgaagccagggggcttcctggtgatcatggatgcgctcaagagcagctactacatgattggtgagcagaagttctccagcctccccctgggccgggaggcagtagaggctgctgtgaaagaggctggctacacaatcgaatggtttgaggtgatctcgcaaagttattcttccaccatggccaacaacgaaggacttttctccctggtggcgaggaagctgagcagacccctgtgatgcctgtgacctcaattaaagcaattcctttgacctgaaacctcccaacttccccatcgccgcgccccccgccggcccggaaccagaaatatcttgtcggnnnnnnnnnnnnnnnngaagaaatctttccagaaccatttcctttgggccccgccggggccccactagggaaacgggaacacatgggcccctagccgtgtttccccataaaagagaatcccctggagcaaaaggaaaacaaggggcggcttgggggcatttccctccccccccaatattataatataaaaaaccctccccccgtggcggggggattacaaccccggataacgctcgcttcttcttgtgagaaaacaaaacaaactcccccaggatagtggggaaagtgttttccgttgaaagcggccccgactttacagccggggcgagatttcattatgcccacacccagggggaagtcgccccccaaaccgcccaagccccctgcgggataatctcccgaagaattgtgacgcgcgcccctcgcggctcctccgtggcggccaacctctcacttcccgcgagggaaaaaccggggcggtcggtgagcacttatcacatctataaaagggcctatttttcttgcgcccccgagaaaatgtgggaaaagacaccccgcttctccaccgaaagcccggggacgactggagatgagacaaaccccgggagaagacgccccgccgcgncgaggagaatacacagcgcccaccctttgggggcggccccccttgtgggcgcaagaaaa

SEQ ID NO: 9750 - DNA, 387 bp, Homo Sapiens
  misc_feature (49)..(50): n is a, c, g, or t
  misc_feature (88)..(89): n is a, c, g, or t
attgccttgattctcaagtcaggtaactcaaaacaaaaaagtgatcccnnattagagtatgagtttgcactcccaaaaatttgacatnnactgtaaattatctcatggaatttttgctaaaattcagagatacgggaagttcacaatctaccttattgtagacatgaaatgcgaacacttacttacatattaatgttaactcaaccttagggacctggaatggttgcattaatgctataatcgttggatcgccacatttcccaaaaataataaaaaaatcactaaccttttttaaggaaaatatttaaagttttacaaaattcaatattgcaattatcaatgtaaagtacatttgaatgcttattaaaactttcccaattaatttta

SEQ ID NO: 9751 - DNA, 472 bp, Homo Sapiens
  misc_feature (314)..(323): n is a, c, g, or t
gcccattaattctattggggaagaaattccatccaaaaaatgttgcctacagctatgagttaagagtgtctgtacagtgtgtagcttttattttctaaaatcacagatagggcatgtatatgacttataaatatataaatacgattttgtattaaaagttttgtagtttatggcaaaatctggtcctgtggtaggctaaataagtacagtccctgtgaaaggaatgtttgtggctcatgtcagtgtgtgaatgcatagacaatttgaagtttttgatatatttgtgatatttatcttgagcactgcaatctcannnnnnnnnngcccaccaagggaattcaatgggaatgtttattgtgactttgtcctctgttgcattttaaagttatttcctgtaatttattttcagtacataattaaaaatttgttgcatatatccttcccccatatttccgggttacgccatccttgt

SEQ ID NO: 9752 - DNA, 844 bp, Homo Sapiens
  misc_feature (168)..(168): n is a, c, g, or t
  misc_feature (813)..(813): n is a, c, g, or t
ggactttatccaatagccagagatacctgcaaggagattggaacatatgatgctggcatgcatattggggcaggcagataccctagtaatctacctgtaggatttgtcagtgtagtaggaactgtggaaatcgctacatgctcacatgtgggacatgtgtttcggaanagctacacctgacacgtctccaggaggcacagggcagattatcaataaaaataacagacgcacttgcagaagtgtggatggatgaagtcaagaatgtctgctatataatttctccaggtgttacaaaggtagattatgcagatatatcgtcaagagttggtctaagacacaaactacaatgcaaacctttttcctggtacctagagaatatatatcctgattctcaaattccacgtcactatttctcattgggagagatacgaaatgtggaaacgaatcagtgtctagataacatggctagaaaagagaatgaaaaagttggaatttttaattgccatggtatggggggtaatcaggttttctcttatactgccaacaaagaaattagaacagatgacctttgcttggatgtttccaaacttaatggcccagttacaatgctcaaatgccaccacctaaaaggcaaccaactctgggagtatgacccagtgaaattaaccctgcagcatgtgaacagtaatcagtgcctggataaagccacagaagaggatagccaggtgcccagcattagagactgcaatggaagtcggtcccagcagtggcttcttcgaaacgtcaccctgccagaaatattctgagaccacnacattttatatggaataaatccaaaacctgt

SEQ ID NO: 9753 - DNA, 739 bp, Homo Sapiens
gtgggggtgggggcaaaatatgttttcagttctttttcccttaggtctgtctagaatcctaaaggcaaatgactcaaggtgtaacagaaaacaagaaaatccaatatcaggataatcagaccaccacaggtttacagtttatagaaactagagcagttctcacgttgaggtctgtggaagagatgtccattggagaaatggctggtagttactcttttttccccccacccccttaatcagactttaaaagtgcttaaccccttaaacttgttattttttacttgaagcattttgggatggtcttaacagggaagagagagggtgggggagaaaatgtttttttctaagattttccacagatgctatagtactattgacaaactgggttagagaaggagtgtaccgctgtgctgttggcacgaacaccttcagggactggagctgcttttatccttggaagagtattcccagttgaagctgaaaagtacagcacagtgcagctttggttcatattcagtcatctcaggagaacttcagaagagcttgagtaggccaaatgttgaagttaagttttccaataatgtgacttcttaaaagttttattaaaggggaggggcaaatattggcaattagttggcagtggcctgttacggttgggattggtggggtgggtttaggtaattgtttagtttatgattgcagataaactcatgccagagaacttaaagtcttagaatgg

SEQ ID NO: 9754 - DNA, 1015 bp, Homo Sapiens
  misc_feature (50)..(200): n is a, c, g, or t
aaaaaaggttttaaaaaatttttttggggggggagggggggcccccaaannnnnnnnnnnnnnnnnnnnnnnnnnnnnnnnnnnnnnnnnnnnnnnnnnnnnnnnnnnnnnnnnnnnnnnnnnnnnnnnnnnnnnnnnnnnnnnnnnnnnnnnnnnnnnnnnnnnnnnnnnnnnnnnnnnnnnnnnnnnnnnnnnnnnnncatggaaccaccggggatcttttaatccatttaaatacaaacatagaagatcagactctgatctgacattatttctatatttttagaaacacttttcactcataaatccaaggtgacaatggcattaaatggcattaaaaatatctacaggaaaggactagccacgaaatacaatattatgataacagttattgcattaaagtggttactgtttctgtattcttcacatgtcccattgtatcactatacatgtgttataataaaaaatcgtaaattaagaaagaattcaagcaaagtattgttgactttataaaagtaattcttaaaacaaatgttcagaaagaaggcattcaactaagatagagaagatgctggatggagaggcttgcaaggtcccgggaggagctccagggtgaagctcatcactagcctttccagcagcactgtccctggagaccagaagcagtgggagccccttccctgtggcaccacggactcccaccaaggcacgatatcatgaacactgtacttgtacacgtttattacccttgggtgtatggggaatctcaagagcacctctgaaatccatacttgattcctttttacattgaggaaagtgagattcacacacaaataccaagatgaccaatgaatggtggcctcgctggcaaaagcagccattgcaggtaaccaaattgccgtccctgagcattctgtaacccgatgggcttagggaacagattaagtaacatttctttttcaaattcacttcacaatactcaagctgtgttcatttaaagaaacagcaactatat

SEQ ID NO: 9755 - DNA, 924 bp, Homo Sapiens
agcccaggataagattcctgcgaagcggtgtgtgtcaccgcgcgtgtaagagcgggctcaaatccccttgtagggggggtggtaattgaataggggaaccgaggcttcttttctttttaggtgcccctggccaaatcctcaaacttccggaggggaggaggggggaagttggttgcccctcctttcccccaggtagaggccgcaggaaggcgagagacgtccccggccccgcgatgtcgatggcgcatgatgggagtggggcatggcaaagccctgcatagatgggcacagcatgggtgactccatccccaggaatccagcaccaccccctgtggtcctgcctgtagcgtaaaggctgagtacagcttgcatggagatgaaaagagcgggcacattgaaggtctcgaagaaaacttcggcagctcgttcccggttttttcgtgggtttaaaggcgcctcagtcaggagcacaggatgctcctctgagaaagtctgcagctggtccttagaatagacatattgccaaatgcgttccatgtcgttccaatccttgacgatgccatgctccatgggatagcggattgaaagcagccctcggtgctcctcagctttggggccaatgaagatgtcgccttcaagggctcctgccatgacacgaacgtgcttgggtcggcccacatagtttggaaagcagtatttggggatctgatcaccagcaaaaccagctttaatcacaccggatccgttgtcgatcacgacaggctggttggcgatcacatcgtaggactccatggcagaggaatctctccttctggggaaggaactgcccagccgggtccgccgctagcgccactgacacgcatgccgcctcgtgccgaattcggccacccaggcctcgctaccaaaggccccttatagtactgc

SEQ ID NO: 9756 - DNA, 1560 bp, Homo Sapiens
gacgggggagtggtagtgggggctgcagctgccggacccaggcactgacccttgacctccggtggctcccccatctctcaggcgcgatggctacgggcgcggatgtacgggacattctagaactcgggggtccagaaggggatgcagcctctgggaccatcagcaagaaggacattatcaacccggacaagaaaaaatccaagaagtcctctgagacactgactttcaagaggcccgagggcatgcaccgggaagtctatgccttgctctactctgacaagaaggatgcacccccactgctacccagtgacactggccagggataccgtacagtgaaggccaagttgggctccaagaaggtgcggccttggaagtggatgccattcaccaacccggcccgcaaggacggagcaatgttcttccactggcgacgtgcagcggaggagggcaaggactacccctttgccaggttcaataagactgtgcaggtgcctgtgtactcggagcaggagtaccagctttatctccacgatgatgcttggactaaggcagaaactgaccacctctttgacctcagccgccgctttgacctgcgttaggtggttatccatgaccggtatgaccaccagcagttcaagaagcgttctgtggaagacctgaaggagcggtactaccacatctgtgctaagcttgccaacgtgcgggctgtgccaggcacagaccttaagataccagtatttgatgctgggcacgaacgacggcggaaggaacagcttgagcgtctctacaaccggaccccagagcaggtggcagaggaggagtacctgctacaggagctgcgcaagattgaggcccggaagaaaggagcgggagaaacgcagccaggacctgcagaagctggatcacagccggcagacaccactgcagagcagcggcgcacgggaaacgcaaggccccccaaaaagaagctaccccagaaaaaggaggcttgagaagccggctgttcctgagactgcaggcatcaagtttccagacttcaagtctgcaggtgtcacgctgcggagccaacggatgaagctgccaagctctgtgggacagaagaagatcaaggccctggaacagatgctgctggagcttggtgtggagctgagcccgacacctacggaggagctggtgcacatgttcaatgagctgcgaagcgacctggtgctgctctacgagctcaagcaggcctgtgccaactgcgagtatgagctgcagatgctgcggcaccgtcatgaggcactggcccgggctggtgtgctagggggccctgccacaccagcatcaggcccaggcccggcctctgctgagccggcagtgactgaacccggacttggtcctgaccccaaggacaccatcattgatgtggtgggcgcacccctcacgcccaattcgagaaagcgacgggagtcggcctccagctcatcttccgtgaagaaagccaagaagccgtgagaggccccacggggtgtgggcgacgctgttacgtaaatagagctgctgagttccgaaaaaacg

SEQ ID NO: 9757 - DNA, 804 bp, Homo Sapiens
  misc_feature (581)..(581): n is a, c, g, or t
  misc_feature (611)..(611): n is a, c, g, or t
  misc_feature (616)..(616): n is a, c, g, or t
gggggcagccagtgagaaggccgtcaagatggcggcctcctggaggctgggctgtgatccgcggctgctgcgttatcttgtgggcttccctggccgccgaagcgtagggctggtgaagggggctcttgggtggtctgtaagccgcggagctaattggagatggtttcacagcacgcagtggcttcggggtgatcccattaagatactaatgccatcactgtctcctacaatggaagaaggaaacattgtgaaatggctgaaaaaggaaggtgaagcggtgagtgctggagatgcattatgtgaaattgagactgacaaagctgtggttaccttagatgcaagtgatgatggaatcttggccaaaatcgtggttgaagaaggaagtaaaaatatacggctaggttcactaattggtttgatagtagaagaaggagaagattggaaacatgttgaaattcccaaagacgtaggtcctccaccaccagtttcaaaaccttcagagcctcgcccctcaccagaaccacagatttccatccctgtcaagaaggaaacacatacccggggacactaccggttccgtnttaagtccagctgcccgccatattctgganacacncaccaaaggaaaaaagaaggaaaatgtcgggccgccctcgggccctcgaagaaacctttcctaaaccattccttttgggcgcccgcggccccgttaggtaaagtggaacttggcccatagctggttttccaaggaagaaccctgggcactggactagggcgttgggaattcctccccaaatagaaaac

SEQ ID NO: 9758 - DNA, 992 bp, Homo Sapiens
gggttgtggcggaaggaggagctttctgggagaagccggtgctgagagaaccgtggctggcaaagatgattcaggcgattctggttttcaacaaccatgggaagccacggctagtccgcttctaccagcgtttcccagaagaaattcaacagcagattgttcgagagactttccatctagtcctcaagcgggatgacaacatctgtaacttcttggagggtggaagtttgattggtggctctgactacaaactgatctaccggcactatgctaccctctactttgtattttgtgtggattcctcagagagtgaacttggaatcttggacctcatccaggtttttgtggaaactctggataagtgtttcgaaaatgtgtgtgaaattggatttgatcttccatatggataaggtgcactacatcctccaggaggtggtgatgggtgggatggtgttggaaacaaacatgaatgaaatcgtggctcacgattgaggctcaaaacaggctggagaaatccgagggtggcctttcagcagcccctgcgcgggctgtgtctgctgtgaaaaacatcaacctgccagagattcctcggaacatcaacattggcgatctcaacatcaaaagttcccaacctgtcccagtttgtctgacgatcaagtatcggcctgaacatagagtccttaagacaagcaaagacaagcaaggcaagcacgtctggaaacagaacccattttgagccttagcaagagtcaaagcctcagggacctgggaaactcttgtagtctgggggaaagactgtttggcatggacatagggaaggcttcccttattgacaccagcatcggagtggcacccagaggctcaccatgggcagtcctgccggtacactgaagcatacgggcaccgtgacacacttgctgaaggggccagcctacgcactagggagtcaacaaggccaagacataggcagcataaccccacacaggaaggcc

SEQ ID NO: 9759 - DNA, 1272 bp, Homo Sapiens
  misc_feature (464)..(519): n is a, c, g, or t
  misc_feature (632)..(643): n is a, c, g, or t
  misc_feature (683)..(691): n is a, c, g, or t
  misc_feature (762)..(771): n is a, c, g, or t
  misc_feature (782)..(821): n is a, c, g, or t
caggagtggacttggttagggctaccttctcattggttgcagccagaggcacttctgcccgggctgcctctctccccgctagggcctggtgcctctggctggaggctccctcccttggccgtcccaatagagcccggggctacttccactggccaggctcccgggcatctggttgaccccagcctggggagaagggctggtctccgctcctcaggggcttagtccgtcccaccccttcccttccctggcgccccgggcccaggcccctcagctgtcagctggttttgatggcctcccactgccccacacgccgcgggacctccaggggcgactctagtggcctgaggagatgtatttataggcccccagcagggctgctcccccctcggccggtgccccaggatgggctcctcccggcgggggcttggccaaagctttcttaataaaatgcctttcccctcatnnnnnnnnnnnnnnnnnnnnnnnnnnnnnnnnnnnnnnnnnnnnnnnnnnnnnnnngacccgcacaaaaaatcccacaaacgccaacgcccaaacaccgataatatacggaccccgaaagaccccttttccaacccccccgatctgggcgccgcgtttttgtgtggggnnnnnnnnnnnntaagaaaatttccccgaaccttcttttttgggcgcccggnnnnnnnnnagaaccagacaaatggggatacctttccttccccccccaccccgtaccacgagaacaaggtccttagtttnnnnnnnnnnacaaaaacctnnnnnnnnnnnnnnnnnnnnnnnnnnnnnnnnnnnnnnnngaggggttcccggacccgttcctctttgtcgcccccctcttcacgcggggggcccgtttccgccgggccgcttaccccttctcatttccgcgcccccgcccggcctttccccgcttgcgcccgcaggggaagagaggtgtggcgcgtcccccatccaaatgccccccacgcggccccgggtatggcgcgccccttcctatacgcgcgggggcgcagagaaccgcaccagggccgcgggaacgcgcggtttttccatattgtggggaggccaccccgcgttaattaaattttcctccaccgccggtgggtaaaaaacacggcgccccctcaccgataacattccccctccacttttcccgccgcattaatatatcaaccccgaagtgcgccggccacaccctcccgcccgcccgtttgttttctgcgaaccaatatacccgcctttcttgcc

SEQ ID NO: 9760 - DNA, 281 bp, Homo Sapiens
atgcctggccttcattatctcttttttaaaaatgaaaaagtttataatttacattcagtaaaatcaccctttttagtgtctaatctgtgaattttgacaaatgcatggttttgtaaccaatcgataggacagttctgccacccaggacattcccctctgttcctctgttcctctcttctcctgccccctagcaaccactggtgttttctgtccctcttgttcattgacatttattttaaaataaaatattttaaaatctacttttttggtggaaaagttct

SEQ ID NO: 9761 - DNA, 776 bp, Homo Sapiens
ttgaaaatataaaaccccatgagatatttatataaagttactcagatttggcccgacatggcttatctgaagagtgcatgccgggtaaattcagggtggcttttttctcagggtctggaagtgtgagagtttctggggcagactttttccggggccgatctttgggaacggacagaaattcgggtgcgtctgtggagagaggggtggatggagcactagaaggcgcactgcggacggaagaaggcagcagggggatgctggagattaggaaattgcaggtgggaaaatgccgattttcttgttggtggcttcctgagtggctcgttcaaattctcggacttcatccattgtcatgtacttgtttgggcatgactctctatgtcatccacaggggaggaatgctgattgcaaacttttatgttggtttgttcatgcatgtttttctcgtattcccgaacatcatccattgtcatatcataccactcatcaacccatgcaaaagcctgtctatgtccaatcagcagaatgtctcggaccaccttgtgtacaaattgttccactctggtctgaagcccccagacctcaaacttcacagtcaccagcttgtaggagcacatgataggctgatgactatctctccagccttccctcaactgtccccgtcctgtcttctctgacttgaagtgcttaggatcctcagattctttgtagtagcgctctggaatttcatcgcaggcaatatcaataaagcaaacttctctctccacgtctttgcc

SEQ ID NO: 9762 - DNA, 229 bp, Homo Sapiens
gcgttggttctcaggctcacagatcggagaggtgggcgagcccgtcagacagctgctccacagtcatgttcttgaggctctccagagatcttgatggactctttcaactcccggaagctcttgaggtggcccgtgtggacgtcagcagcaaggtggaggtggtgtgggctgacaactcaaagaccatcatcctgccccagcacttgtacaacatagagcctgcgcattg

SEQ ID NO: 9763 - DNA, 633 bp, Homo Sapiens
gggggctgtgatagccagatctggttggcttttgtgggctgacccagacatttaatcaccatctcttatgttgttgccgtaagaaatgcattccaggttgggacttgggatcctgagagcacattcgccccctgtggtggccgcttgccaccttgcaagatggaagcccagtctccttactaccaaactgtagttgtaagcagagggaggggtgagatgtttataggacattccctaagctggggagtgatttttatcactattcatgtcaactgtactttggtatacactccctatcaatttaataatatgaaaagcctaaaaataaaactatgcatgctattctatgtgctattttatatcagtaaataagcttatgcttgccagctgtatacacagttatgaggtgtatagaactgactttgacagtatttttttgcactgtttcctatcttgtttttataaagccttatttagatattggaccttgttgatgttctcactgcccttgtgcttgctataaaatgtttcatatgtgcctttacaaatgtgagatctttattctaacctttttttgtaaaagatatctattgatttccatatgcaataaacctttttttcagagaaaaaaaa

SEQ ID NO: 9764 - DNA, 314 bp, Homo Sapiens
  misc_feature (260)..(260): n is a, c, g, or t
ccatggccgctgctccttggccttgattcagcactgcattcctgcttctttgtgtcccagcctcccagcttgcaaggccgtggggatgttcagagagttaacagctccaagaaattctcatctccatagacctgtctacccacctcccacctgggctgcagagaaacagccaacattccttcaggcccacagagaaagggtgtgactcgaattactcaatgaagcctcccagccagcctcttatgcccccaaacaatagnagttgtatttttcttggacttcattcattttatttgtagcggagcatgagtaag

SEQ ID NO: 9765 - DNA, 1169 bp, Homo Sapiens
  misc_feature (1132)..(1132): n is a, c, g, or t
taagcacacatgattggtactttaaactgactggggcgaccccctttgccaaaaaagaaaatggtttgtagaagaaggtttatttcgaagggccacagagaagtgcccgaccgaagtgtatttcgaggctcgttctaagtggtccatgtatgtgggtgggcaaaaaattgaacccagaggccaaggttgtttttttgggccgcgaggattaatggggaaaaacccttcaaaggagaggttattttccgaattagtcgtattttaccagccctttgataagttagaaaattaagggaaacctcccccggaaatttccgcccatgtttgggagatctttaataatgggggctggactgaatttcgttaagagatccagtgattttttacctcaggttttcagatcccttgtccaccactcccaacatcattcatgtggcttacagctgaaacaagcttcctcatgatgtagctgggcttcccgtctcactgaagtgcttctttttcttaatgcgctcaaacagttctcctccattcagaagttccatcattagaaattggggtgtccttcacagagtttcagagctgttatttccttttgagtattggcttccatccttttgctgattattttgactgcaaaagcttggttactttttttatgcacacactttcgacaaattgaaaaactaccttctcccaggggtttgtccttcaaatctaggtcatagtgttgatagaatggagagtccttcatcattgcactcctggcaacatttgtcactccaggacgttcaactcccatgtgaaactgaagagggtctatgacagctgcattacgcttgaataggatggaaggagcaacaaagaatagccctgaaacagcttcctcagaactctggggcagggctgcgggagaataagtgggatccatttctgtgaactcttctgcaaagttactcacatctaattcatctcgaatgactggcttaaatggtgcaggcacttttttggcggctaaatcatcccaatttattttctgaaagaagagatgttctttgatttcatctgcatcacgtggaccacatcccaatctcttcttgggatctttcatcaaaagacgctgaattaggtnctttcgctaaagcactcatttcttggggatatggagg

SEQ ID NO: 9766 - DNA, 292 bp, Homo Sapiens
cccgcaactctcccagtctcctgtctcaggtctgagcctttggcagctgaactttggagaccatgtctgttgagatggatttttaggataaagactctggggtgggcaggggacaggaagagttgtgggagaggtcatcacagtcagagaagattacctgctgccttggagctggtgtgggaagtctgggaccaaacacctcctgtcctctaagtctccacagaccttctgggggtttcaaagctgcaaatcactggtaactgcccagcacctggggtacacacgatcaatt

SEQ ID NO: 9767 - DNA, 842 bp, Homo Sapiens
ggggtggaggaagatggctgccgcctgggggtcgtccctaacggccgcgacgcagagagcggtcactccctggccgaggggcaggctcctcacggcctccctgggaccccaggcgcgtcgggaggcgtcgtcctccagccccgaggccggcgaagggcagatccgcctcacagacagttgcgtccagaggcttttggaaatcaccgaagggtcagaattcctcaggctgcaagtggagggaggtggatgctccggattccaatacaaattttcactggatacagttatcaaccccgacgacagggtatttgaacagggtggggcaagagtggtggttgactctgatagcttggccttcgtgaaaggggcccaggtggacttcagccaagaactgatccgaagctcatttcaagtgttgaacaatcctcaagcacagcaaggctgctcctgtgggtcatctttctctatcaaactttgatgtgatgactggtgactctgggattgtcaccagttgtaccaatttgaagaacctggaattagtagaattctagaagtttacttctaatcatgtccctctcaattttatttcccgcagtccaggagtgttatgttttgccactattattttcagaatgtgaagattttactcttggcttaatttttccctccactcagtgctaaggctgagcctccagatgctgttacctcagatttaatcactggttgaaactccgtataatctgtagagcctccatggctctaaaatttggaattaacttctcttgccttaagagctgcttgtacatatgtggatagctatgtataaaagcttcattttaaag

SEQ ID NO: 9768 - DNA, 281 bp, Homo Sapiens
ttggcaagtatatcctgagctgagttgtgaaggcacacattcatacctctctttatttttaatggggttagcacagtcttcaatcaatagcttaacttcatctctgcttttatttctgctcctagcataaattatttagcacaaatgcagacataatctcagaaattacttagtattagtgtcctgctgtgagcactcattttcttgagtgtgttgtgttctaaccgcacattagcaaagaccctccagagatctttcttcattcatttacgcgggcacat

SEQ ID NO: 9769 - DNA, 298 bp, Homo Sapiens
ctagtgcaacatgttatctaactttagcagtttctctggcacctagggtcacattagagtcttccactaattctctgaagcacatggccccagtacgtccgtagactccagaatatgtaacaggagtgaggccctggaataagtcaagtctgggctcccttggagcaggtaagccctgagaaacatttaggcacggtgttccctgaggtaccagaagagcctgtggcatttcctaagccagggtggcactggtgggaagggcagtgagtcgttgcagaggtgggcgggagacaatgag

SEQ ID NO: 9770 - DNA, 514 bp, Homo Sapiens
  misc_feature (244)..(311): n is a, c, g, or t
gtcgagtatacacaagtctcctggtctgtagaccacatcatcttcagtgatgtaggatgttatctcaccggtatctgtcctttcataacgagacttttttttcggtggtttcttcttattcttctttcgtggactcctctgcggtggcactattgttgtcattgtcctcgtcttcactgtgatcactctcaacataatttttggctcctccttccaaggtacagctccggcgtggccttgaatnnnnnnnnnnnnnnnnnnnnnnnnnnnnnnnnnnnnnnnnnnnnnnnnnnnnnnnnnnnnnnnnnnnnttgtctttgtctttgtctttgtccgctgtcatgattcgccacgtgccttcttctgtcctctcacggctaggcctccagtgaaaggtagacagtaagcctgggcattcagtcttctgaatttctcacatcaattccagggaaaatccaaccactccaacaaccccaacgtttcaaaaatgcttctggccgggcgcggtggctca

SEQ ID NO: 9771 - DNA, 245 bp, Homo Sapiens
ggaaccccggcgacccgtgggagcggcaagggtgttctgcggagagaaaagggaacgatgtgggactgggtgaggagagtctgggtactgcttctgtggcaaactgagatgcccagtggtagattgagacaagctattgtggttggagtcaggggtgaaaaatgaatcattcttacgtcggtgatggtgaaccggcagacccaggttcattccctcttacgctgaaggcatagtattacatagtg

SEQ ID NO: 9772 - DNA, 439 bp, Homo Sapiens
gcctgctgcaggggaaaaggaagatgaggaggatgaagagattgtgagtcccccacctgtagaaagtgaggctgcccagtcctgccaccccaaacctgtcagttctgatactgaggatgtgaccaagaggaagaatcacaacttcctggagcgcaagaggcggaatgacctgcgttcgcgattcttggcgctgagggaccaggtgcccaccctggccagctgctccaaggcccccaaagtagtgatcctaagcaaggccttggaatacttgcaagacctggtgggggctgagaagaggatggctacagagaaaagactagctccgatgccggcagcagcagttgcagaaaagaattgcatacctcagtggctactaactgaccaagaagcctgacagttctgtcttatgaagacacaagttattttatacctccctctg

SEQ ID NO: 9773 - DNA, 260 bp, Homo Sapiens
cgacctgtccgtggcagaagggctgctgcacctgaggtgcctaaggcgacaccaagggccacagccccagtagctccagcctccatgtgctcaatgccaagccctgtgcccaggaggacagggaaatggaggcagaggtggccttgatgtgcccaacggtgggcagtggctgcctctgccctggacggcactatgagggtcagggtctgagggtctgaggtgcactatgacccgggggcactgcctgccactggctaata

SEQ ID NO: 9774 - DNA, 658 bp, Homo Sapiens
  misc_feature (225)..(225): n is a, c, g, or t
tcacccctgcctgccctttgtgtcgtccccctccccctcttcgtgcttgcttcttggtgcgcccctcgcttcttttcctctctctctcttttccttctgcttctccgaggaggatactccacgcttttattgtgcgatctccttcgccggccagcggggatgtcctgcctggggcccggccccttgtggatacgggcctgccggaggggccgttgggcgcgcagntggagcgtgggagatgtcaggtgccaggggagtcctggccggattccatcgctccaggtgtttctaccgcctgcgggtggacagacggcggatggagctgcggaaagttccctcctcttcatcgggttccccagtcctctgctgctggttgaacttgcaccggcatcttctgctcagcacgatgaggatgcccaggatgaagaggatcccggcgatgacgaggcctccgatctgcagggactggtagtcgtaagtgaacgggtcgtgttcctttggactttctgccttggccatggtgaggagacccacacagaaaaccaagatgtggccaagagacgccattgtccccaatcgggctgtcccctgctgaaagaaggcccccaaacgtcctgctgtgccccgggggctgagcactttggaccccctggcccag

SEQ ID NO: 9775 - DNA, 680 bp, Homo Sapiens
ttgggagggtggattcccagagcctgattgctttctcctggtttatttaccaacgacaaggaaattcttacacctgaaggcagacgtgtgcccagatgtgaaagagaccttcagtatcacccctaactcttctctcccaagaaagaccttgctgggctctgtggccagctgtccagcccagccctgtgtgtgaatcgtttgtgacgtgtgcaaatgggaaaggaggggtttttacatctcctaaaggacctgatgccaacacaagtaggattgacttaaactcttaagcgcagcatattgctgtacacatttacagaatggttgctgagtgtctgtgtctgattttttcatgctggtcatgacctgaaggaaatttattagacgtataatgtatgtctggtgtttttaacttgatcatgatcagctctgaggtgcaacttcttcacatactgtacatacctgtgaccactcttgggagtgctgcagtctttaatcatgctgtttaaactgttgtggcacaagttctcttgtccaaataaaatttattaataagatctatagagagagatatatacacttttgattgttttctagatgtctaccaataaatgcaatttgtgacctgtattaatgatttaaagtggggaaactagattaaaatatttgtcttttaactaaaa

SEQ ID NO: 9776 - DNA, 269 bp, Homo Sapiens
agccacatcctcttcctcgtccccgcccctcagcctccctcctctggctcctggctggtgggtctgggggcaaggcagaggcgctccaggtggaggggggcgggccggggtgcccacgctggggtgacgcaaaaagaaaactcccgggcctcagagtcggcgccggaaacctaggtctgggtttccctcgtggtggttgtgtactgaggacctggaagtgatcatattttggatatattcggttaaataaaatcagcggttaggattca

SEQ ID NO: 9777 - DNA, 264 bp, Homo Sapiens
  misc_feature (110)..(148): n is a, c, g, or t
gggaaataacgaagagttattaaattattctgaatttgaaacaacatatttttatacttaatgaattgcatctcattaatctcttcccttacatcttcatgtattgttgnnnnnnnnnnnnnnnnnnnnnnnnnnnnnnnnnnnnnnngggataagaactaacatcaaaaggcctgtttaaagggaaaggttaatgggctacttaatattatgaacaaaacaaaaaaacaaggctgccacagtggaatattatcttacaaaaaa

SEQ ID NO: 9778 - DNA, 734 bp, Homo Sapiens
ggctggagctttctaaacgctgtctccgttcttctgtcttcacaccagccgtcgacaccaaggccctgaaaaggccagcatccaccggctgatggaggccttcatcctcaggctgcagacccagttcccctccactgtcagcactgtgtacagggacaagtgagaagctggtgaagggcccccgggatggccctgctgctggcgactccggcccccgctgcctcctctgcatgtgtgccctggacgtcgacgccgctgacagtgccacggcttttggggctcagacctcctcgcgtctctcccagatgcagtcacccatccccctgactgagacccggacacccccggggccctgctgttctccaggggtgggctgggcccagcgctgcggccagggggcctgcaggagggaggacccccaaccctgcattgaggagcagctgtgctacaactcccgcgtgaacataaaggacttgccctcactggaccccctccccccgtacatcctggctgaggcccagctccgcacacaaagggcctggggcttgcaggagatccgcgactgtctgattgaggacagtgacgacgaggcgggccagagctgagcgtgaggacgtgcttgccgggacagcaggcagtggccacctggtacaccacactggagccggaaggcaaggacgggggactggcctctgattgtccatttgtataaataaaacattttttaattaacc

SEQ ID NO: 9779 - DNA, 1011 bp, Homo Sapiens
gggctaagccataagattaaataaagtggaaaaactaaaacagaatgatttaaaatgtgcaaatacactttgcaacctccaccattcaatttagggattgatatgtatgtacagtgagatccatgtaggctaaagtgagtttcactttgtagttgatgctacttgtaccagttctatcattagtaagtcaccgtttaattctgccaaaatcagacaaggatctttctggttagtgcaaacaaggttttccatcctgggctgcagtctgacccgccagtgctcagtaggcatgcttgtgatgaattcgcacactttccagttccccacctccaatggcggccagggtctccagcctgtttaagcgctccaagcttcttccaagaactatcttctagccgactgcgtaacacctgagccccttccagttccacctgcagagttcaggtctctctcagagctctctggatgggcatggaacttcaccagactgctatagagctgtctctctgcttgtaaggcctcattgagccgactccgatcatctactagtccttctagcatcagcagcaactgtagtctgcggtttccctgaaatttcttgaccctgggatttctaactgaaagcaacttttacccagaagaagtaagactacctgggtcaggcgtaccatagactgggtatgtatatcaggatcacacagttggcatttgcacgggttcttatatgaagatacacttataatctggtatgttacctggtcaagaggaaattcaatatacaagacaggcatgaaccttggagcacttcttcctgacagtataagtgaacttaaaaggacgtcaagtgccaataggaacttacatacaagcagccagagtacagtcccatatgggagataacacgaaatcactaatccttcttcttttctttgcttttgctatcatagtctcgaaagaaaacaacagaaagataagataacaactaaacaaaaacagagagataataaacag

SEQ ID NO: 9780 - DNA, 840 bp, Homo Sapiens
  misc_feature (176)..(214): n is a, c, g, or t
gcacagctgaaagaattagtttcggatttatcttctcagtttgtcatctcacctcctgctttaaggagcagacaaaaaaacacatccaataagaacaagcttgaagatgaactgaaagatgatgcacaatcagtagaaactctgggaaagccaaaagcgaaacgaatcaggacgtnnnnnnnnnnnnnnnnnnnnnnnnnnnnnnnnnnnnnnngtgcttggtcacctcctcccatagaaattcggctgatttcccccttggctagcccagctgacggagtcaagagcaaaccaagaaaaactacagaagtaacaggaacaggtcttggaaggaacagaaagaaactgtcttcctatccaaagcaaattttacgcagaaaaatgctgtaatttcttgggaagatttttaatgtacaccctatttgtaaagtcatcagaatagtgtggattattaaatatctagtttggaagaaaataatttatataaattattgcaaatttttatgtaaaaagaaggtcttcaataagtaaaagtaactcccatatggagtggattgttttcagtccaggccaatttttctattttatattaagaacttcatacatttatatatgtaaaaatggcttaattatgggaaggtaaattaaaatgattacttccccaaaaagaaccgcattcaaaaagaaaaatgtggggccggcctcgggcccttgaaaaaatttttctaacacttttgttttggagcgcgggccccagtaaggtaaatgaaaaagtggctacagctgtcttcccaaggaaaatccggggcatgaacaaaggggtttggattctccaccaat

SEQ ID NO: 9781 - DNA, 883 bp, Homo Sapiens
  misc_feature (547)..(547): n is a, c, g, or t
ggtatctttaagagcaaatttctggtcagctgtgcttctgcaacctaaaatatttaaagggaggtaggtgtgggcaggaggaggaatgataaattgggccagggcaagaaaaatctagcttcatataatttgtctgggactatacaccctatataatgttagttttacagaagtaatatgacttttgattgctacataccacaaagagtttatgaactgagatcataaagggcaactgatgtgtgaagaaagtagtcagtacatcctggctcatgctctgaaagaatatccagagaggctctctcaaagatcagggagatgtattcccatgccatgcaccctgcttcccagcatttctgcatggtcaagtgagctttatgctcatgagctttaagtatataattatccaggattttaaatcctcaacttgttctagcttgtgatccctcaaagttgggtcatacgttagtgctagatactagaaattttcacttttccactgatcagagagacagacattaaaaacaaaaattagaagaaaggaaangctttcaccctgcagcttcttagccagggaacaaattgtccttgccaaaacttttttcccttttctctcccattttcttttacccaatcccttcttactccttgccagtgtgaccatgctttcttctctgtagatgttaacagttaaggcctattttcctcgggcacttaaccaaccaatcagaacaccacatctgttaggggaggtaacctggccaacagtgtatccatcacgttagccctgctggagggaagggacccacattcacctgccctctgacctgccccttgatcccatatctattaccgtgtccataggaataataggtaagggctc

SEQ ID NO: 9782 - DNA, 554 bp, Homo Sapiens
ggcgggggtgctccaacgctctttttggtgtggccccggggttttcttttggggaccgccggttttggcccgtgtgtccctttccctcgcgggggggcccgcccgccaccccggagaggttttgagagaacttttcttggggggcaagagggcccccacacaatttccgcttcccctctgtctgggcgctgcgccaaaagaccctcccgcgccggctctccccctccctgggccgcgcggtgggtgccggcgcggtcgcgccgtcgggttgctcggtgcggcgctggggggtgcgggtgggccttagtgatactcagctgataatcagtttaatgcgaaattgactaggctgagcacagtagaatcacaccgctctaaagcacttaaaattctctaattatatggatttgcccagtgattcataaccttagagtttaagaaaaattccttgcacatagtagatattccaaaatatatgttggataatcagtgttactgttgctaattcaccactcactgtaaaaagtgtgaaagtggccgggcgcagtggctca

SEQ ID NO: 9783 - DNA, 885 bp, Homo Sapiens
tgtcaggttgatagctggaatgggcaaagcctttaactgtgcctgtctcacagactggttcagggtactacaatggcccggcctttcccttgggatttaccgttcccaaatttggcttgggcttccggggttcctggcccctttttccacactccctccctccggacaagcaggctcctgggcagtgggccatggtctaccaccgagggcacccttgtggtttatgcttaaatgtacattttcctgctggtaaaaggagaaactgagaggtgtcctgcagaccggctgaccactccttttggagacggcaggaggcctgagcgatccgtactcagaacgtccaggagagacgcatggcccgaagtcaaagtgctggaattttccaaaacagcctgttctctcctctctcctccccagagcaccccctgccatcaggggggttgaaatccctctcccccaggagccctgctgctttgcttggtggtagggcaggagagcaaacaaacagtcatggtctaaaacccacatagcactttgctcttagttacatgtaaaattttagatttctaaaacaggtgggcaatcattttgaatactgttctgtgaccctgactgctagttctgaggacactggtggctgtgctatgtgtggccatcctccatgtcccgtccctgtagctgctctgtttagacagcggacagacgctcacgcccaggggatgtcctcacgctgtcgccgcgcggtttcccttcgcagatgtgtatactcatgataggtcagaaagtgtatccgctacaataaagttctggttctaactataaaaataaatacaaagggcggccgctctagagtatccctcgagggtaacagctaggcgtatccca

SEQ ID NO: 9784 - DNA, 356 bp, Homo Sapiens
aaccaagccccagtaggagttggggctgagatcaggaggaggggaaggatatgagttttccatccatctccctggagaaggccatgacgggctctccaagccctggggagatctggcgagggactagccaagtcagggtgacctcctgacctgactagtttttctaacccacatgaacaccagggggcctctctcttcctctagcccagggtagggggacctgagtgagagagagagtgagacagacagcaagattgagacacgcgggcccccactggtctctgagtgggaaaggcaagtgcgagagataaaggcctccaagagaaaaaagaaacaaaccaaagatttaaccattt

SEQ ID NO: 9785 - DNA, 844 bp, Homo Sapiens
ggggggaccggttggtttggttttgaagacgtggatggcgggaattctcgcttctggcctgggtgttttagctcacttggaaaggctagagacccaagtgagcagatcccgtaaacagtctgaagagctgcaaagcgtgcaggcccaggaaggtgctcttggaaccaagattcataaactaaggcgtctgcgaaatgagctgagggctgtggtgcggcaccggcgagccagccgtgaaagcatgtattgccaatgtagaacccaaccaaacagtggagatcaatgagcaagaagcattggaagagaaattggaaaatgtgaaagccattctgcaggcatatcattttacaggcctcagtggtaaactgaccagacccaggagtatgtgtctgcatcagcactgctttttgaggggaacctatagggattcctatttagtggaccttgtcatacagaaaccactccggatacatcaccattcagtcccagtcttcattcccctggaagaagataccttgcaaaatatttacagacccaacatccagcaccttccctgtttcagtctctggcgagtacctgaaatgctttacctcttggggaggaaagtacccggcagaaccgggtttccacaggggacttttgcagcccctcctgaaatgggccccttgccaaaaaaacccaccggtgttaacttgggctggccattttacttaccaaaccgggaattccaaggggggtccagttccttttcccggtttctgtgccctaaaatttggtgatataaagggaccctccaaagggaaccttctttcccacttgaacggtcacccgcgggaacattggt

SEQ ID NO: 9786 - DNA, 465 bp, Homo Sapiens
  misc_feature (423)..(423): n is a, c, g, or t
ggaagagaagccttgtgtgtgcagagagtgtgcccaaggctttctccaaaagtcacacctcaccttacatcaaatgacacatacgggggagaagccatatgtgtgcaagacgtgtggccgggcttcagcctcaagtctcacctcagcagacacaggaagaccacgtctgtccaccacagactgccagtgcagcccgaccctgagccgtgtgcagggcaaccttcggattccttatactctctctgaaggcaaagatggggacaaggactaagagtcagaatgttgacactttgatgaaatggagtagagaaatgcattctgtaagtggtcaaaggacatttgactgtttactttctccacactaagtcttctccatgttttgtggccttcggttgtaataaacttggcttctttatacaaaancacagggccttaacaaaaacacaaacgtggtgggccgccctc

SEQ ID NO: 9787 - DNA, 1149 bp, Homo Sapiens
ggggatccattaacccttaatagtcaatgtctatgattttaatgtattactagatccacactgtcattatttcccccagttcgttaaatctgcaaatactttatgttcagttttacatctgttaaagcaagatcctcaagggcagggatggaattctactcacttctgcatcccttgacattgcagtgtgtggaacagagatgacaaatacaggttcaaatttgtgccacctgaaagagtgccatctagaagcagttgcttcaaactgcacttcaacgggacccacacgccctgctaagcaactcaaactcatcatgaaataaatctgcagaagaaatgtgtactctctattcaaactctgaagtaaataaaatgtgtatgattgacacaatcacaaaatggcatttaagtggaagtctgcttcctgaagaaataaaagccagagcaaacagatttggggtcatatttttgttcactgaaaggaccaaccagtttcatcaaacaagctttagagaaagagaaactgagtaattcatcttgtcagttacagttcacatatatgcacacacatacaaactggctcagcatcagtgaaacataactattcaaatacaaaagtataaaaaacctctttaaaaaaccaatagcagccaaaacagaacatttgtaaacaaaaccacaactatcagccctgtgcttaaacacagaatctgcattcttttgaaacattaagtatatgcaataaagagaatatagaccatctttttccttaatatacaatacccaatatctaaaacaatgtcaccaataatagacacaaatcggtgttatcataaggcatgttgaacagtctttttcacagtactcaggggcatcatgttgctgcagaggccacactttccagaagttttctcctcgctgtgatcctcgcacaccgggggcactcggaggactggaagcactgtttgtgaaagcaagccctgcacgctgaacatcttctacatgttgctgtctgaaatgggaagatgacagtcgtattctggcaaaattcacaaataaagccctttccttgacacagctcacacgccatgccacatgtgcaagggaagctttcagaatgtccttgagtaagggtgccagcagccctcc

SEQ ID NO: 9788 - DNA, 650 bp, Homo Sapiens
  misc_feature (415)..(427): n is a, c, g, or t
ggggacgacacggtgggggcatctggcctggccagtgccctgatcccagagagcccgaggaggtgtctcaggctgcctgagtcgtgacctgctaggccagagcccactccatctggtagaagggaaagcccatatgctaccaccagctgtgtccaaaaccgccagctctgttcttcctcagccagcctcgcccatccccttgaggtctcagcccctttcccttgtagctcctcccctggagggggaatggcagcaggggttggggaaacagcatctccaagcagcttagagttggccatatttacctcagcctgggcgctggtcctttcttccggcccctcccctccaaaatgtgcctattgctagagctcctccctctcaacacccagtttccttgggagttgtcattaaaggnnnnnnnnnnnnngccagtgcccagggatgggcatctccagggagctggggattagtgccaggcagccctgccagccatgcctacatccccatgggcacagaacaagccaaagccttcgttgtatgttgacgatgcacttttatgaatgtagtttctatcgctgtttttagccttttcacatcatgtaatgtgaggccttgtacttgttaatttatatctcagatcataaaaaaaa

SEQ ID NO: 9789 - DNA, 1453 bp, Homo Sapiens
agccgggggtgaatcggcacgaggaatcggaaccgtaggaggggtacttaaccggacggcctaccaggcctgtggcgtgcgcgggaagagcactgcaggcccaagccagcccggagagaaaagacctgaggaggtggccctggggctgcaccaccgcctcccagcactgggaagagccctggggcacagcattcagcaacgagcgacctccacagccaagacttggtgggacagatatgaagagtttgttggactcaacgaggttcgagaggcccagggaaaggtgacagaggctgagaaagtgttcatggtggctcgagggcttgtccgagaggctcgggaggacttggaagttcaccaggccaagctgaaggaggtgagggaccgcttggaccgtgtctccagggaggacagtcagtacttggaactggctactctcgagcacaggatgctgcaggaggagaagaggcttcgcacagcctatctgcgtgcagaagactctgagcgagagaagttctccctcttctctgcagctgtgcgggaaagtcatgagaaggagcgcacaagggctgagaggaccaagaactggtccctcattggctcagtcctgggggccctgattggtgtggctggctccacctatgtgaaccgtgtgcgactacaggagctgaaggctttactcctggaggcgcagaaggggcctgtgagtctccaagaggccattcgagaacaggcgtctagctactcccgccagcagagggacctccacaatctcatggtggacttgaggggcctggtacatgctgctgggccagggcaggactctgggtcacaggcaggtagtcccccgaccagagacagagatgtagatgtcctttcagctgccttgaaagagcagcttagtcattccaggcaagtccattcatgtctagaaggcttacgagagcagcttgatggcctagaaaagacttgtagccaaatggctggggtggttcagcttgtaaagtctgcagcacacccaggcctggtggaaccagcagacggggctatgcccagcttcttgctggagcaggggagcatgatcttggcactgtcagacacggagcagagactagaagcccaagtcaacaggaacaccatctatagcaccctggtcacctgtgtgacatttgtggccacactgcctgtgctctacatgctattcaaagccagctaacccctggcccctcctccagagggtctgaggcaatagctgtgaatgtggatttaagtagagaatcgtagcaatgaagcgagcctttgggggcatgtacaacctcaatctgaaggagcagtatctgtgtggctcaccagcaggccatgcttcgctttgtagacaaggttcatttacattaattatcaaaactttgtgctaatgtccaattaaaatatcctgagttttattatttaaaaa

SEQ ID NO: 9790 - DNA, 305 bp, Homo Sapiens
  misc_feature (247)..(247): n is a, c, g, or t
gagagggagacagacagcctgacagctgcgagagcgacacccacacttatcgacggctacacacatagactgctactgatgactagtacctagcctggaacatcatttgcagggcagccccacaactataaacattgacgattccttctctgaacacaggcagctttctagaagtttcccttcctccatcctatccactgggcacaactgcaataacttctgaccttttggtgaaagctgagaactnctgactgtaacatattctgtatgaactttatctaaagaaaaataaatctgttctgggg

SEQ ID NO: 9791 - DNA, 987 bp, Homo Sapiens
gggattcggggggcaagcggcgggaggggaaacgtgcgcggccgaaggggaagcggagccggcgccggctgcgcagaggagccgctctcgccgccgccacctcggctgggagcccacgaggctgccgcatcctgccctcggaacaatgggactcggcgcgcgaggtgcttgggccgcgctgctcctggggacgctgcaggtgctagcgctgctgggggccgcccatgaaagcgcagccatggcggcatctgcaaacatagagaattctgggcttccacacaactccagtgctaactcaacagagactctccaacatgtgccttctgaccatacaaatgaaacttccaacagtactgtgaaaccaccaacttcagttgcctcagactccagtaatacaacggtcacccaccatgaaaacctacagcggcatctaatacaacaacaccacgggatggtctcaacaaataatgacctttctaccacctttaaagtctacacccaaaacaacaagtgtttcacagaacacatctcagatatcaacatccacaatgaccgtaacccacaatagttcagtgacatctgctgcttcatcagtaacaatcacaacaactatgcattctgaagcaaagaaaggatcaaaatttgatactgggagctatgttggtggtatagtattaacgctgggagttttatctattctttacatcggatgcaaaatgtattactcaagaagaggcattcggtatcgaaccatagatgaacatgatgccatcatttaaggaaatccatggaccaaggatggaatacagattgatgctgccctatcaattaattctccaaaattaatagtttaaaacaaaaaactcgttttgaaaatagtataaacaggccatgcatataatgtacagtgtattacgtaaatatgtaaagattcttcaaggtaacaagggtttgggttcccaaataaacatctggatcttatagacc

SEQ ID NO: 9792 - DNA, 635 bp, Homo Sapiens
  misc_feature (202)..(202): n is a, c, g, or t
cagagcattaaacatggggtattgttaagaagcaaaatgttcttgtttgccatcatgtgtttcacaccacaattctgtgccacagttaagagggtctggtacccttgcaggacctttgtaggttgtgggaaaaagtcgcagaaagatactcaaagtggagcagggaatggagacagacatcagtgatgataacaaaaaaaantggaccttaagaaactatttactctgtaatctctaataaaatatggaattccatattagggcaatgagactgaaactactggtgtttttctgccttgagaaaacaaacagttaaaacaagcctcaaatgtattttagtgccacccactggccataggtacaattcagttgttggcttgttttgacttaattctaaaataggtctcaagcctgtatttttatgagtttatttttttaaaaccctgcatatatatgattgtttttcttataactttactatatgaaagcagcataagagtagtcacaaacatgttttgcaacaaagttttaattagaatgtaagttgctcagttatactgttcttcttatgtatgtaaaattttcgtattttgtaaaaacccttagaataaattatcatttgatttaaattgtaa

SEQ ID NO: 9793 - DNA, 606 bp, Homo Sapiens
gggctcgacaccccagcaggcaccccccgggcagccccagcagggcacatttgtggcccacaaggagatcaagttgacactgttgaataaggcggctgataaaggaagcaggaagcgctatgaaccatcagacaaggacaggcagagccctcctccagccaagcggcccaacacatccccagaccgaggttctcgggaccggaagtcaggtgggagactgggctccccgaagccagagcggcagagaggccagaactccaaagcccctgcagccccggctgacaggaagcgccagctgtcaccccagtccaagagctccagcaaggtcacgagcgtgcccggcaaagcctcggatcccggcgccgccagcaccaaatcagggaaggccagcacgctgtctcggcgggaggagctgctgaaacagctgaaaggccgtggaggatgctattgcacgcaagcgggccaagatccccgggaaagcataggccgtgcccccgaccggactggacgcatttttatacatagggtaagccgcaacccattttgggattttgcaggtaatgtcttattttggctgtggatttcttttttaaaagccccgcaaga

SEQ ID NO: 9794 - DNA, 334 bp, Homo Sapiens
  misc_feature (94)..(94): n is a, c, g, or t
atacaacaaaacacccactcctctttcaaaatctcagctcaaagacccgcccaggaagaactcccactccctctcttgttgtatcaacaatctnacatgcaggcgtccaccctggcactcagaatacatgtgtatttctaccttcctgcctccctactatcctatctcagctccctaagaggaagggtctatggctttctcccggaatacagcaccagaagaacagatattctgtatttgctgacttatatcactctcaaatgataaaccatattcctgctcctccaagatggaagtcctggagaagaggaaggaaacgggaagatgaaaaaat

SEQ ID NO: 9795 - DNA, 870 bp, Homo Sapiens
  misc_feature (31)..(31): n is a, c, g, or t
  misc_feature (33)..(33): n is a, c, g, or t
  misc_feature (43)..(43): n is a, c, g, or t
gaaccatgtaattagaagatggaatgaaacngnttctcccaangaagattgtttgttgctgaattatgcctactgccctgatcatcaggtataaactttgcatcttccaacctaatgcttggcagcaccaagacgtttcagtaatggttcatcataaacccagcattctccatcttcatgaaataaccttgtctcccactgaatttccttctccttcctttctcgggcttctgctctttgtctttcttcaagcctgtgctttgcttcagttgctgcatcaatgtctctgatttttaagttgaaagtgacatccttccaaaggctgcgggattcatactcgttctgatcttccaacttcctcactttcttcttgattataggcaacttcttggtatctacaaagactgtattttcccctgttgcatattttgcatacatcacaccattccattccccttcaattgagcaaaaagacttcttgtcatttggagaaaaaatctcggcagtaattctgtgcttcttgcccccatagaagggtttagtgtggaagatgatatttgcactatagcctgttttggaacaattaatattgcattctcctcctaattccacccagggcactgtgaggatagacctgcaaaatcaaaagtttttaggtaagcttgacagttaggaggaagagggggaaggggcatgtctcaaggaacagcagagtctactgctgatcagaggaaatggacacacttgccttccatagccattggggaatgtgagaatgtaatgttcatcatagtctagacatgagacacagcctgtggagagaagggacagaatctctgatgagtagtgccaagtggccacaaggctttc

SEQ ID NO: 9796 - DNA, 205 bp, Homo Sapiens
ctcatgagaaagaagtgtcagagacaggtttgcatgatagttgtaaaaacagctgtgcagagaactgtgaggagctggaaggacagtagggacagacaaacagtcagcatagacccaaaggcacagaataggacagggaacaatgtaggctggttttggggtctcttattgaggcagggtctcactgtgtgggcccagctggagt

SEQ ID NO: 9797 - DNA, 1066 bp, Homo Sapiens
  misc_feature (714)..(828): n is a, c, g, or t
  misc_feature (864)..(887): n is a, c, g, or t
  misc_feature (1005)..(1005): n is a, c, g, or t
atttacgtatgttacatttttaagtatgagttaaattgatataaagtgttcctcaatatttaataatgtaagctgttgtcatgacagtattttttaaaaataataacgtatattatagttacgaaacacttgtgccagattagaacatcaagcacagaagcagctgtatgatttacctgtttttttgaaactttaatgtttaccttccccgatgtttaatttttctgtggtgaacacttttgttagaacatggcttttttatttttcttggaaaaatatgctattagtatttacaaaataattaattacctgaataagcagtatatactaaaagtcttcaaacattactttattgattacttatgttttgtggtgcgctttcaacatccctaagagttaaatgtcttagtcatctaatacatggaacagggtcaaacttcaatgaaattaatacttattgcacaatcataatatagcaacctaattttcttttatttataggcatatctttaaagctttcttctcttttttgaacaaatgaagagaatccagttagtttttgcctttcagaggtgatttgccacgtgcacaaaaggtctgtaggtgaaaagacaggcttttgggtttcttgaaacatcaaaaactgaatttagagaatggttatctaacactcaagtcaatgttagtttttgaaattactagctattggtatannnnnnnnnnnnnnnnnnnnnnnnnnnnnnnnnnnnnnnnnnnnnnnnnnnnnnnnnnnnnnnnnnnnnnnnnnnnnnnnnnnnnnnnnnnnnnnnnnnnnnnnnnnnnnnnnnntttttgcctatagctagcaattatttcattcagatnnnnnnnnnnnnnnnnnnnnnnnngggttacttaaaatagagagtgacttggagatataccaaaaacagggaggaaaagcccctgcaaggtcatatagctaaatgtaatacctggacagccaaggcaggctatggtctaaangcctaccccattaaaaagaacaaatgtggggaggttggtgccaaattaagtttttaatttc

SEQ ID NO: 9798 - DNA, 528 bp, Homo Sapiens
ggtacctgctggccttacgcgcggatcgagcgacatggtggccgggtgtggtcgctgatgaggttcctcatcaagggaagtgtggctgggggcgccgtctacctggtgtacgaccaggagctgctggggcccagcgacaagagccaggcagccctacagaaggctggggaggtggtcccccccgccatgtaccagttcagccagtacgtgtgtcagcagacaggcctgcagataccccagctcccagcccctccaaagatttactttcccatccgtgactcctggaatgcaggcatcatgacggtgatgtcagctctgtcggtggccccctccaaggcccgcgagtactccaaggagggctgggagtatgtgaaggcgcgcaccaagtagcgagtcagcaggggccgcctgccccggccagaacgggcagggctgccactgacctgaagactccggactgggaccccactccgagggcagctccccgccttgccggcccaataaaggacttcagaagtgttccctgaa

SEQ ID NO: 9799 - DNA, 281 bp, Homo Sapiens
  misc_feature (76)..(76): n is a, c, g, or t
aaacagttaactcaaaatctagtcatctgtgtaggagctaaagcaggtctccagggagagagggtggtcgtctgtncattccaggttactgcacttgtctgatgtgacgtagcaacacccaggtcttcttaaaacaaagtcatcagctttgccaggttacatactttatttaaaagtatagtgaggtcgaagttcattccagtgtttcattttaataatgtgggcattattaaatttttgtggaagctaatagtaaaaaataaaagctgttttcaccacct

SEQ ID NO: 9800 - DNA, 318 bp, Homo Sapiens
  misc_feature (203)..(203): n is a, c, g, or t
  misc_feature (249)..(249): n is a, c, g, or t
  misc_feature (271)..(271): n is a, c, g, or t
tacaaattaagatgtgcccatggcttagcctgcgctccatcctgggccctgcagcccactcccagggtaaccctctgcagacccaagactaatgggacaagggatctgctggggcagtgtaggccaaagctgcggctgggtccaccagaggccaagatggagactgacctggacatgcttcctgggcagctttggtggcagtntcccttctctatgcctcacttttctggcagaattttcaggcatttnccaagcggaagggagggagagnactcaggcatcactttgaatgttctgccagtgaccagctttaaacaa

SEQ ID NO: 9801 - DNA, 610 bp, Homo Sapiens
gacggattggacaggttggaaaattcaaaaatggaacactgattctgagcccagttgatatcaagaaaataaattcttccagagtggccaaatgaagtactttgtcaaataaaacgaggatgggaacaactgagtcaactgcagcggccctggacactgtgcgactctagatagatcgttcttaacacgcatttcacagactgctttttcattttagaaaaaaagtcaaacagaagtaacatttctagttgccgaagtgtctgcttcatggtgctgaacgtgtcaggcccagtgcagcatgaatgtgaagtgaacccactgaaaagtgatttttaatgttctccagcaaacttcactcctgtttcatgttcactggtatttggtgcatttgcttgtaatacagttttttataactttactgttttgtaaatgctagtagtttacattaaattgccttatatttttaatgatttaatgttatgatatcatgaaagaaccaagaatctagtaatttatcagttttgtggaaaagcagttttaatttttagcctaccatgtgtacaaaatctacttcataagaagttatataaataaaataggtttgtagtat

SEQ ID NO: 9802 - DNA, 896 bp, Homo Sapiens
  misc_feature (49)..(49): n is a, c, g, or t
  misc_feature (525)..(585): n is a, c, g, or t
  misc_feature (628)..(762): n is a, c, g, or t
  misc_feature (772)..(787): n is a, c, g, or t
ccagagtttgagattgttggttttacaaccacattaatgtgatggtganatttccatctattgttgaggaagaattacagtttgatttatctctcgtcattgaagaacagtcagagggaattgttaagaagcataaacccgaaataaaaggaaacatgagtggaaatttcacctatatcattgacaagttaattccaaacacgaactactgtgtatctgtttattcagagcacagtgatgagcaagcagtaataaagtctcccttaaaatgcaccctccttccacctggccaggaatcagaatcagcagaatctgccaaaataggaggaataattactgtgttcttgatagcattggtcttgacaagcaccatagtgacactgaaatggattggttatatatgcttaagaaatagcctccccaaagtcttgaggcaaggtctcgctaagggctggaatgcagtggctattcacaggtgcagtcataatgcactacagtctgaaactcctgagctcaaacagtcgnnnnnnnnnnnnnnnnnnnnnnnnnnnnnnnnnnnnnnnnnnnnnnnnnnnnnnnnnnnnnaagttttattatgtagaaaataaagagcaaacagtacagctgnnnnnnnnnnnnnnnnnnnnnnnnnnnnnnnnnnnnnnnnnnnnnnnnnnnnnnnnnnnnnnnnnnnnnnnnnnnnnnnnnnnnnnnnnnnnnnnnnnnnnnnnnnnnnnnnnnnnnnnnnnnnnnnnnnnnnnncccttggcgnnnnnnnnnnnnnnnnaaaaattttttaaaacctttttttgggggcccggcccccaaaggaaaagaaaaatggccaaatttttttccaaaaaaacccggggcaggaaaagggtttggatcccccc

SEQ ID NO: 9803 - DNA, 665 bp, Homo Sapiens
  misc_feature (493)..(515): n is a, c, g, or t
ttttagctccccatctggctgtgaaattcaggaaacctcccgttgcctagtaatcaccccatgtaggtgtacattgtgacaaagtgcatctgaccactaaggggcccccttggtgaccccagcacattcacagcagtgttaaaatggcctgcattttggagatgctggctggcctttcagtgcctcccaggaagacacatggcctttccctcttcagatgcctgaagggagtgctttgaggcaggtgatgtgctgggagtgtgggcggcctccctctggccccggggccctctgtggaccttggctccctccgtggacctgggcttcgtggtgagcactgcagcctccctgggcattccctccagcgccagcaccactgcaacatatagacctgagtgctattgtattttggcttggtgtgtatgctcttcattgtgtaaaattgctgttcttttgacaatttaagtgattgttttgtttactgtaagtttgnnnnnnnnnnnnnnnnnnnnnnntccaatgactgtgctgtggttggagactttatttaccaagatgtttactcttcctttccccttctattttgaggagctgtgtcactcctcctccccaccagtgctttgtagtctctcctatgtcataataaagctacattttctctgaga

SEQ ID NO: 9804 - DNA, 373 bp, Homo Sapiens
tttaaatttgtggggtccctttccatgtcacagagtctgcttttggctcagagtctgtatctagcctgtgtcaggatattgcctgttcttcccaccttgacttccagagcagccatcgctggtgagctttagttctccttagggttccaaggcattagaagtaagagtgtagcttggaaaccaacttctgtgatttaggaaagctgtctctttcctaaggtaatagggggtttatttcatttaggccccagttggtaggttttaaaataatttataaagtgttttaataatttggttgtcttttttaccttgctaaaccaagcctctaaaaactcaaattattcccttgataaatttttataatggaaaaccc

SEQ ID NO: 9805 - DNA, 682 bp, Homo Sapiens
  misc_feature (161)..(304): n is a, c, g, or t
  misc_feature (354)..(368): n is a, c, g, or t
  misc_feature (394)..(402): n is a, c, g, or t
  misc_feature (568)..(576): n is a, c, g, or t
ggtgttttattgtatatgtaatttaatacacaataaagggtaaagttgcttccccaaaccacagttttaatcaaaacctagaatcatctgcagtccttgttaaaaatgcaggtttctagaaccctctgaagttctgattaaataaatttattgcaaaccannnnnnnnnnnnnnnnnnnnnnnnnnnnnnnnnnnnnnnnnnnnnnnnnnnnnnnnnnnnnnnnnnnnnnnnnnnnnnnnnnnnnnnnnnnnnnnnnnnnnnnnnnnnnnnnnnnnnnnnnnnnnnnnnnnnnnnnnnnnnnnngaagagggagccacgcggcgtcggaaccaccaccccacaataaaacaggnnnnnnnnnnnnnnngtgcgctgcggcgccgcgcgggcgcnnnnnnnnnttaataaaaagccgtcggaggcgggggggccccccaagaaagaagaagagaccagcgcgacagtagtgaccccaacggaaacgacgaagaagaaaaaacgctaggtagatccccaaaaaaaagcgccgcgcgggcgaacccgcgggctttttaacaaaacacaacnnnnnnnnnctggcggcgcactaagaagaaactctaaccagagaggaaagaccgagggcgcaacgaaaaaaagaatataagcccccgccgcccggggcacctgaaataagtagga

SEQ ID NO: 9806 - DNA, 621 bp, Homo Sapiens
ttggatagaatttctttataatctgatagagataatattatttttattctattttgagtgggaagaattttaaaacctttttatgtcaattaccatcttgtttctttcacctttgaaacaatggtttgtagcagagatgacattgtagcaacccagaattatgcttttggaatgtggtcctcactgtacaggagaatgtgtaatcttttgttaaaattcccagtgtgcatacattttctggttcctcggtccagttgctaaagttcttagtattttagcctaacatatttatcaccaacttttctttaaaagtgttccttttgtcacttagttactgattttcctgggtttgacataagtattctatgagatgatatatatgctttttttgaaagctgattctcatgaattcaagtagctgagttcctttatgtttcgtttattcactaaagtagctgacacaaaacacaccaaaacctagagcggtagttttatgtaaatgctcatgagtttgtatcaataatataattgttgatccacttataattcgtgcaatactgtatgtatgtagagattgagttgtcaattaaaaaaaatgtggcctctttgtgatcataaaaa

SEQ ID NO: 9807 - DNA, 1225 bp, Homo Sapiens
  misc_feature (1093)..(1118): n is a, c, g, or t
  misc_feature (1120)..(1120): n is a, c, g, or t
acacagcagtccctgtaagaaataagtaaaatctgcataaagtgttgaaataggaatatacatttcattatgaaaaatgaatagattatgcctatctgaatcaatattgcattcaaataagtattacttaaatcatatatcatagtttacactccttaaaaaaaggtacataaattcagtgaggtttttttcttaacatacagaagtactaaatactgcttgcagtataatattgatattggaagctgcagtttccagaataagtggagtaataactaaacagacatttaattttatttcaatatctatggaaaaaacacttattaaatctccctgtattttatgttgtctttattacagaatcacttgtctgtttgttgtgtgccacttactgacaaaactttaaacagtacttgatgccagctctctactctgtggctgtgggacctgtttcttttaggtacttgtgcttattaatctacttactaaattttcacattgacatttttggggatgatactaccatatacgaaatggaaaatgtaatatgctcagtgcttctgtaaaatgcagcaatactggtattactttacatcagtaggcatctttgacatgagcatataaatattttgttgactcagcaaaggtgacactttgtgactaaagtatcccattatatataatggtttttgaaatgttggaaattttggggaattatcaaatgtatagaagttgcatgaagggtatagagaggtgtaactgtttgttaactattacatggatttcatactaggcagtgacaactaacatgttacttcaactaaaagtgtataatgggttgtctttttatttatgaaaataaaagtaattttacttcccccacaaaagccgcccaccgcgagcccgccccacacaagcacacaacgcgcgaccaagcccaaataaatttggtgggcccctcccggcccctccaaaaactttttcaaaaccattttcttttggggcccgcggcgcccattatggtaacggaaacctgggccacaagtgtgcttcccaaaaaaactccgggaccctggactaggggctcgggatnnnnnnnnnnnnnnnnnnnnnnnnnngnggggcaaaaccgagagtgtttttaaaacaaaattccaaaagaggggtttctcggaggcacttacccgtggcttacatcaacccgggatctccaagcgcggctcct

SEQ ID NO: 9808 - DNA, 965 bp, Homo Sapiens
  misc_feature (904)..(912): n is a, c, g, or t
gggacaccacgaaagatccatcccggaagtgcttactcgtcgtctccatgcgccggttcctgggcgtcttagagccaaggcgcgaggctcggagtgagaggtagagctggaggggaccctaagcgccctccgcccgggacgtgagccgctgcgcccaccgggctagacccggcgccatcatgctgcttctgccaagcgccgcggacggccggggcaccgccatcacccacgctctgacctctgcctctacactctgtcaagttgaacctgtgggaagatggtttgaagcttttgttaagaggagaaacagaaatgcttctgcctcttttcaggaactggaggataagaaagagttatccgaggaatcagaagatgaagaattgcagttggaagagtttcccatgctgaaaacacttgatcccaaagactggaagaaccaagatcattatgcaggccttggacttggccatgtgagatacaaggctacacagagacagatcaaagcagctcataaagcaatgggttttaaaacattcccccaggacaaaccggaaaagcccgctggggggaacccattaaaaagaaggggaataatgggcgtaactttcaacttggccttaaacctaaaagccttatgcacaatggttatcctgaaccccgcgggagaaagacccaggccattttaaaccggggggaagaatccctaacctttttgagtaaactgcgacggttccctttctaaaaaatgggaaagcccaaggggatataattttccctccccaaaggtggtttaacccccccaccgggttttcgcacaggggaattttcccagaaaaggggtcccgctccggcggacccgccctccccacaccctcccgctaaaacacatttggtccgaggcggnnnnnnnnnggcgcccttctctaaaaaaacttctctcccaagacacaccttttcgctcctac

SEQ ID NO: 9809 - DNA, 339 bp, Homo Sapiens
  misc_feature (39)..(39): n is a, c, g, or t
tttacagcttcaattctggaagatacaaacttaacaagnaggttaaagatacagggattgaaatgcatggcctgcagtgcaggggattatttctttggcacactttacaggccctgactatctgcttgatagttttgaaaaggcctggtccagtaaataatgatttggccatctgatgggtgctatcaatgcctaagtgaaaggtttggtgaagggttttaagtaatttccattggttagctgcaggcaaaagtatttttccttcttcggtggctagccatcctgaggggaggaaactatgtcctcatgaggtgccgatgaatagcgaggatctctaga

SEQ ID NO: 9810 - DNA, 433 bp, Homo Sapiens
  misc_feature (347)..(347): n is a, c, g, or t
  misc_feature (355)..(355): n is a, c, g, or t
  misc_feature (390)..(390): n is a, c, g, or t
  misc_feature (409)..(409): n is a, c, g, or t
aagaattgagtggagacctgctatgatacgcagagataaaatgagaaaactttagcaggaggagatagagagatagacgcacaatagaggtagaaggctacatagaaggtaaagtgaagattgttttggctttggaagacagaaaagttggactataacatgaataaagagaatttggaaactgacccataacattatttgggaaaactaacctggagtttaatattaatgtaacattaattgttgttaaatatcttagttgctgcctttcttaaaataaatttgatttttcagtataccagcacccttctatacaatacataaggaaatcagatttttaataattntacatccntaggtaagcttaattagggctcagttctcatcttnggggaccagttctctgagnttgaggactgatgagttccggggg

SEQ ID NO: 9811 - DNA, 415 bp, Homo Sapiens
actctcatgagggaacttgtcacagcccaggtagaaggagagctccaggcagttggtatgcaggtaactgaagtcattgatagtcacggtccgggggttccacttggccccgttgacgatgcccatgccgccggtgtagtcctgggcttggcagcctccgcggtagggctcggtcaaggtgaggtgtgcggaggcgaaggagatggcaagccaccggaagatggcgtggtctggagtctcctgggcctcggagacctcgtcctcatcctccccccgggctgctgccatggctgcggccagcagctgctcctgggtaggcgtgcgggccatatcgtaggggtagcatactagccgctccccgccgttcagatttgctggcagcaccaaggggttcttcagcgtgcaggctatagtg

SEQ ID NO: 9812 - DNA, 335 bp, Homo Sapiens
  misc_feature (301)..(301): n is a, c, g, or t
atctcggtgctgcagaacggcgagacctcctgcacagggttgtacagcaagctgtgattcctgggaaaactaaaaaaagctctctggacaaacggggcccagagctgatggcagacaatgtcagccactaacaacatagcccaggcccggaagctggtggaaccactacgcatagaagccgggattgagcgcatcaaggtctccaaagcggcgtctgacctcatgagctactgtgagcaacatgcccggaacgaccccctgctggtcggagtccctgcctcggagaacccctttaaggacnagaaaccttgtattattttataactgtgttctca

SEQ ID NO: 9813 - DNA, 445 bp, Homo Sapiens
aaagaaccctggatatccacagaggctcccgttccagtgtgcagcggactacgactactggtgagcacaggcgtgtgaggaagctacccaagaccagggaaggccatcaccccagcaggagaggatgaacggtaactccagtgtgcaagcaggacagggactagcagctgtccccacccaccaggatagagaagctcatgttcacctaggcagcactggccagggtgcccagaatggtgtttgttgcctccatagagggaaacaagcctacagttaagagctgctctggtcccacacagcacatcttcaaagcaagactcaaaaggatcaaaccatttccttgttttctgagaataaaagcagttgtacctcttccttttcactctcagaaaatctgatagaatctataaaagagccctaaggctggagacactttgcatccaga

SEQ ID NO: 9814 - DNA, 555 bp, Homo Sapiens
tgtggcccaacaaccgtctacagaacagctgctggtgcttcagggaggcgccgtgccctccgctttcttttatagctgcttcagtgagaattccctcgtcgactccacagggacctttcagacaaaaatgcaagaagcagcggcctcccctgtcccctgcagcttccgtggtgcctttgctgccggcagcccttggggaccacaggcctgaccagggcctgcacaggttaaccgtcagacttccggggcattcaggtggggatgctggtggtttgacatggaaagaaccttgactgtgttttattatttcatggcttgtatgagtgtgactgggtgtgtttctttagggttctgattgccagttattttcatcaataagtcttgcaaagaatgggattgtcattcttcacttcagcacagttctagtcctgcttctctggagtagggttgttgagtaaggttgcttgggttgtgcattgcacaagggcacatggctgtaaggtgtatcctggcggggggctgtctacctgcagtgaggggcaccttttctgtttt

SEQ ID NO: 9815 - DNA, 362 bp, Homo Sapiens
tcgcgaacgtgttacctagcttactttctccatgtgcagatgatagctagggaaagagtaacccaaaaactttctgtatagtctgtcccttcggaggcagcatcacttattggcagtaaagactcagtataaaagcaccagcatccctacttgggtgatggggattaattttatagcattccattttcctagtgccacatgtgaaatgggattttgatgatcttaatctatattctacccttataataaaagatcaaaagatatatctcctatgaacagatgggagataggagatgaaaagtggggaggatgtctttattctaatgtgagggtagggaaaatgtggataacacgttcgcgag

SEQ ID NO: 9816 - DNA, 216 bp, Homo Sapiens
  misc_feature (69)..(69): n is a, c, g, or t
gaactggaacaaatataagaacttatgggatttcctacacggagacaaaaaaagatattcctttatgtngtttaaaagtggcagctgctctttctttattccattttaatcaatgagtattgattcaagttttcctttctatttttccttatgataagtttcttacagtagcttatacaacaacaaatagcatagaaaaactactggattcaattc

SEQ ID NO: 9817 - DNA, 487 bp, Homo Sapiens
ggatagtaaatgctgtctgtcttacacatttataaggaccctgcaagacgacgacaaaggcctttggcctgtgctactaaacaagaagcctatgaaaaatttcttctttaaacttgttttttctctttccagtaagttcacatttggataattttaaaaagaaaagtaattacctttgtgtttccagaacactataattggggtgtatcttaattcagttaaatattattattagacctggattttcccccttgaccccatcagtctataaaggttaaactgcaacttttatgaaatggtctttaatatttccacaataatcctgtgctatatttgttttaagaaacaaagtaactctatacacttcaagactttacaggatttttttaaatcctgtattgttggatcaattaataaagatgcaaaaaaactttatagagatgtaaaaacaaaactataatggatctcctatttttctttaaatacc

SEQ ID NO: 9818 - DNA, 1479 bp, Homo Sapiens
  misc_feature (1028)..(1116): n is a, c, g, or t
cttgcgcggccgcgtacgcggggcgagtgtagtagaagaagaatcgtggaggacctaggtgtggtattctcacgtcggaaacgaaggtgtggcgtataagggcggggaatgagaagagaaagggtatctttgtattgtggtaaaaatgggaggtaagcagatttagggcgcctagcggagcgagtgagatcattgtggtctcgacactaccgtgccgtatggtgcgacgttcgtaacatgcctcactgggctctcgcccatgcgcaatagtctgggcgcgagaagatgaatatattcggtttgtatgtgcgcccccgctcgatacgttgtctctggccccccgcggtcaggcggggggtggtgaatttcttgtttgtataacatttttcatccctaagttagcggtcgtgtctcaccgcaagagagggtggagggaaagagagacgcgggctcggttttgttattaagaggggtgtctgtgtggaaggcgggggtggtgttcgatcttacatgattcgttcgtgcgcgtccattttataggggcggcgggcgtggcgcttttgggcactcggcgtgttttagtgtcgagcgcgagtaagaaactgctggcgtgtgcgtgagcggcggaatttattttctagcgagcacctatgcgatgggtggacgtgaaggtgagaagtaggggtgaagcagggagcggggcgtgggcgcgggaagacaattacgatacaagcgaggaccgagcggctaattgcgcggtccaccccgcgtgggaggagggagtcccccgatcagagagggcgctcgtgcgcgcggctccccattgggaaggacgggtttgagagacgcggagtcggtggtggcgccgccggcgggggttttgtttttctcgcggggaaaatcacaaacccctatgttgtgtacccctggtttttcgtgggaaagcggagggagaggggcaaggtgttccgcgttcttcggggtgggcggaggtgcccaaaggaagtggtggggaagaattttctagnnnnnnnnnnnnnnnnnnnnnnnnnnnnnnnnnnnnnnnnnnnnnnnnnnnnnnnnnnnnnnnnnnnnnnnnnnnnnnnnnnnnnnnnngtctctctgctcctgcttgtattcagcgcgttctttgggtttgttttctaaatgttaaaaatttattctttctcttttgttgctgttgatttgttcttgagatggctacaacaccagacagaacagtgccctcatatctgatggctgtgaagggctgcactcctttgaaacattaagatctgctttgggcttccctcttcggcctcaccctccccttaaaatcaagtcatttccacactttttagtaacatactaaatgacacatcatcccttgttagccctgtaaacattttttctccacacaccctccctctttttttctctcatgtctgtgggtgaataattcactaagaaaaaaacctt

SEQ ID NO: 9819 - DNA, 374 bp, Homo Sapiens
cgactggtaagattacttcattgtgttgaggcaggctgcagggcattccacacaatggcacagcagaggacagcacagggaggcaacagagtgttcccagcaatggcccagctactgaaagcaggcagccaggctgggaggagtcaggtggcaagagagttggtcaggagcagaacatggaaagccagagaaagtgtgcaaagcccagaaatggcatctgcaatttactggtacatgtgtgtgttggatggaaggtgaaggaaggctcaaaaggcataaaaaggacctttcacttatgttaaactgacatgccaaaggtcttattggagttcatcttaatataatattaataaatttattggcctacactagtg

SEQ ID NO: 9820 - DNA, 263 bp, Homo Sapiens
ccccaaataaatttgaccacaggcagaaaaggtggggtgaactcttcagaacttttggtgggtggatattcatctgaccagtgagctctgaaatggtttccctacacagagtgggttttggcaagggttggaatgaggggaggtagcagtcttgtcatttagaaaatcaaagctagttttgatgtagctcaacatggaaagaaggtacagaaagtgatgtgttcaaaacattagcaaattaaggctgaatgtggttggctcat

SEQ ID NO: 9821 - DNA, 281 bp, Homo Sapiens
caaaatctgagactgtcattgcttttataaggattccagctttccctcctggccagaaatgttcagcctggactcattcagaaaagcatccctggatgtgaatgaggaccctccttaaacaggaatggagaggttgagctggtcatttccaaccttagcttcaaggcagaactggaattagtttcaaaataaaccttgatcctaggcacttagttctagaagatcctacaagcacgtctgctgtaactctatgtatgttttctgtaaaatcacatacctat

SEQ ID NO: 9822 - DNA, 662 bp, Homo Sapiens
  misc_feature (29)..(29): n is a, c, g, or t
tcttgagggatgccacaaacagccttccntactccctgccagagcagttccctccctgatgagctggagaagggccctctggcctcctgacagtacagggagggcaccagctagatcctcccttgtggtgtgagatgttcctggaactcagccaggccctcctcctcctgggcttgcccagagcccccaccctattcccagcattgcccgaaggaccaaccagtttgggtgaacagtggcctcctcagcttcctccccatctgggtgccccaccggcggcggagggagctgtggcgatggtggggtgtggggagggacgaggagggaagcctctgtgctgctcacctgcccaaagcccagctcagcgggtacgcagtggaggcgacaaggaaccaatcacaactacagaggtttctctgatcctcctccactcccgctgcttccacttgactaagcttaaaaaaactgcttttgccatggctcatcggagtttatacttatttcttacaaaatgtttcctgttatttgctggacaagtcccaaagaacaggcagatgttcttattaaaagatcagcctataagattggtcaggaccaggcgcctctggccacgtgcctctcccctccagcacctgcggtctgcggtggcacctggcagctgg

SEQ ID NO: 9823 - DNA, 781 bp, Homo Sapiens
gggtcctgggcagttaccgctctataccggcagcagccgcggagagcatgccccgcccccgtggagcccaccccgggcggttaacctcgggtctcagtcccgggctgtgaccctccccgaggccccgcccccacggcgaaggcccggggcagttaacccttctcttgctgcggcagagtccgcacccgggcaggcccatctcagaattaacgctttgatggcatcaccgcgtcgggaatccctggggatggtgttctccaccgtcaagacctttgagccgcctgagcgactaactcctgcgcccctgaggggacattttattcagaaacttaaatccattcagagttccagcactgtcgggggtcatccggctctgtccaccggcatacgcctagcattgtcaccaaccggagccatagagggacctcggcccaagctggggcctcttcattgtcgaaagaatgcctcttgccagaccatggatctgtgggcgccggccaggctgggaggactatggccggcgggcactggacaagaagcccttgagcccccatgaagggaaaacaggttctggctgacgaaatcctaactggcatactcagctgacaagggaccagcaaatgcccattccggcaatgtcctaccaagggacaaagccccgaatcatcccctgccctacggaggaaaaactcccccgggctttgataagtcctttgtttggccccacgccaaaccccccagttttttccgccatattaaggcgcaacgcagcccaaggaaa

SEQ ID NO: 9824 - DNA, 441 bp, Homo Sapiens
accatatctccacgccaccccgacacaagagacttatggagaatatgactatgatgatggatatggcactgcttatgatgaacagagttatgattcctatgataacagctatagcaccccagcccaaagtggggctgattactatgattacggacatggactcagtgaggagacttatgattcctacgggcaagaagagtggactaactcaagacacaaggcaccttcagcgaggacagcaaagggcgtctacagagaccagccatatggcagatactgattgtactgtctgatgttgtgaaatagccaatctccaccagtcctgtatactgttcaaagtaatttttttctatgaacaatccctttttaaataaatcaaaatgcttaaaatctgaatggatggaacttaaaactattttgttgaaacatcaacctgggcag

SEQ ID NO: 9825 - DNA, 588 bp, Homo Sapiens
ctgacgatggcccctggtttaatcacttggaaatagttccctttcgagttgcagcttacaacaagaaaaagaagcgtatggactactatgactctgaacaccatgaagactttgaatttatttcaggaacacgaatgcgcaaacttgctcgagaaggccagaaaccacttgaaggtttcatggctcccaaggcttggaccgtgctgacagaatactacaaatccttggagaaagcttaggctgttaacccagtcactccacctttgacacattactagtaacaagaggggaccacatagtctctgttgacatttctttgtggtgtctgtctggacatgcttcctaaaaacagaccattttccttaacttgcatcagttttggtctgccttatgagttctgttttgaacaagtgtaacacactgatggttttaatgtatcttttccacttattatagttatattcctacaatacaattttaaaattgtctttttatattatatttatgcttctgtgtcatgattttttcaagctgttatattagttgtaaccagtagtattcacattaaatcttgctttttttcccctt

SEQ ID NO: 9826 - DNA, 290 bp, Homo Sapiens
catctttatcattattttattttagtaataagaaactggggctcagaaagtttaggtaacacagtaggaaatgatgaaactgaaacaagaaatcatgtctatttgaatgctttttttcctgtaaagacagtcattaatgctcttcaccaaatgttttcatttcttctgacacatgccaagatcgcaattccccatccttttgaagttaccttgcagccatgataattgccctggcccacttttaaagtgaagcagaagaaaattccccagtccaaaaaaaacaatttctt

SEQ ID NO: 9827 - DNA, 124 bp, Homo Sapiens
gttgggatttcagatagagtttggtttataaaaatgcaaacagggcccacgtccacaccaattcttgatcaggaccaccatgtcatagggtgcatattacattaggcagttcctcatcttggga

SEQ ID NO: 9828 - DNA, 174 bp, Homo Sapiens
aaactggatgaggtctctcaggcaaaattccatacaagcaaattactgtgtctacaaaggcattcctgccacacttaattcaccattccctgaacaataatatgccatcttatgtggttcagtgtctgtacagatgctgtgtttccctatcccggtgcagttggctgctatccc

SEQ ID NO: 9829 - DNA, 166 bp, Homo Sapiens
tcccacgaatgagaaactgatgggatgatgaacaatgaagcagctcaggaaagcacaaggagaagacagaaatatcaagagtctcaagaacctttgaatgaagtaaacagtttcccacaaaaaatcagctatacacagattcctcatcctgtgggagcaatttctc

SEQ ID NO: 9830 - DNA, 270 bp, Homo Sapiens
gaattgaataatgctatccttggatatgagaggtttactagaaaccaacaaaggattttggagccaaataagaaccagaaggaagccaccaatactaccagtgagccttctgccccatctcaagatctcctcgacctaagtcccagtccccggatgcctagggccactctgggagaactcaacaccatgaataatcaactttcaggcttaaatttcagccttccaagttctgatgtaacaaacaacttaaacaatttctcatgcttggga

SEQ ID NO: 9831 - DNA, 208 bp, Homo Sapiens
  misc_feature (81)..(81): n is a, c, g, or t
gaactggtaaagattgccacattctatatgtttcaaaggtttttttacagtacgtcttctgtctgtttgaatttgaaaatngatgaaagactttcacatatttatcacattgaaatatttggcaatgggtagttgtcaagcatgtggttaagcccattataacctcttttttgcaccttacactcatccacaatttctcatccttgga

SEQ ID NO: 9832 - DNA, 714 bp, Homo Sapiens
gaattgatactggtggagttataggaggtgtgggtccaggaggcagaaaacctggtggtatatgcattgggttgaatcctgggcgcaaaaatggtggaggaggagggggaggaggaacaccaggacacaagcctggaggcggtattcccagaggaggcgtgaaagcaggcggctggagagcaccaacatacaggtggacccggttgatgtggtgggacctgtggaggtggcactgttataggtgcaggaacaggaataggagggacaggcacaggtaatggtttaggtatgggtgatactggttctgtgtgtgaggtttcagcacctccattttgagcaacttcattttcaggcttcttaggaattcctttccaatctgggttaagtgtgtcactgtccaacattcctccttcacaaaaactctccagttcctcaggcttgactttgtcccatggaatataagtaacaccaagttctacatcccaatactgcttataatctgcctttattcctttgtttaaggcccaggcaatctttatggatttctggttcactttatagtttcctcggctcagtttctgcagggcacgataggcatcttgcctatgaaccataacaatataggcacaacccctgggaggaatcatattaacttgattcaattggaccaaactcttccaagagactggcaacatcctgctgagtagttctttg

SEQ ID NO: 9833 - DNA, 154 bp, Homo Sapiens
  misc_feature (115)..(115): n is a, c, g, or t
  misc_feature (139)..(139): n is a, c, g, or t
gaattggccacaggtatcctatctacaacattagaagagaaaatggaattccagtgatttggtaaagtcctattttagtctttcctgtcaacagtcttactagacctgctcatcngtgactaaactcacgtttctcatnccttgggacggggta

SEQ ID NO: 9834 - DNA, 527 bp, Homo Sapiens
tggtaataagatttaattttccagtagcctgcatgaattgttccccacataaaactgtacagttagtgactgaattgtatacttaagtcccagtattttacattagtgagactgaaattagaggtaaatttctttaacaagtgtaaggcttacctatttataaagaattattctgttagtgtttaagaaaaacagatctagagacaatccagtaggctgcattgtaaacattatgattataaatctcttagtactgccattattattgtacagttttgtaaagaccttgtaaaaagtccaatttctcaggaatatgaaaattatcttcagaaacctggttggggcctttctccaattcctccagccagctgaaatactgccaagctcacttcatgtgcaaggtgatctgcactttcttgtgagtctgcttctgcatatactcggacgacatcttctgtaccagagggccggacaaaagctcgagaaagcttggtacttctcaccaggtcattgattgcctctgtaat

SEQ ID NO: 9835 - DNA, 142 bp, Homo Sapiens
  misc_feature (18)..(18): n is a, c, g, or t
ctgcccaaggatgagganattgtgtatgttgattaaatcttcacactagtgttaggaaacatttattccatggaaaagagcactctggttagaaacacatgggctcaaacacaaaacttctttcttactcattctctcatcc

SEQ ID NO: 9836 - DNA, 1299 bp, Homo Sapiens
  misc_feature (435)..(504): n is a, c, g, or t
atttaaacttttaattttacttattcttggtcataaagttggcattctctccacatccccacatgaaatagagggctacgttttggaattttccttttcttaatcgcccagagttatcagacagattataaaaatggcttttaatggcttaaaccatttctaaacctctatcttagcagatcaatgcaggatctaattcttttgataagttctagctctaaaagtgatagtgggactgtatgttttctgatactggtggcttatgttattaaaccttttttaaaaaaggttcactctaaaagctgaactacatccttagttttcagtctacttgactctatcaggagctttttaaggaaagtaagtataacatgcaaaggaagctttttttgtattcattttggactcctgtcaataaaaatagaagtttgttgnnnnnnnnnnnnnnnnnnnnnnnnnnnnnnnnnnnnnnnnnnnnnnnnnnnnnnnnnnnnnnnnnnnnnnggcactaacacatacggagaaagaaaggagaacgaggacgcaaacacggcgcagagggtaccgatcagtggcgccggggcgcacccccggagtacgcgcggccgctcgccgcggaaggagagtggttctgggtgcgcggccccccccggcgcccgcccaggaaagttcttccccgccaccgccttctggttcgcggcgggcgcggccccgccctcgtgcgggcggtgaggagagaggaagcgggggacggtgaagcgcgtgtgcgccagaggaggagacagcacgtggcgccggagctcccaaacacagacaacggcgcctcgtgctctctccgccgccgcccacgaacaaaaagaggcgcgcgtcgcccgcggcaggagaaacaaacaccacgcacatatgcgcggcgtgcgccagcagaacacactctgaatgtcggggcttcgccgcgtctccgaaggccccactgataatgagcgccggccgccacctgaggaggcgtgtgaatgctgccgcgggcccggcccacgcagccaggtatatttaggacaggcggggttgggcgacgcgcaccgcggtgtgtggtcatgtgagtggcgcggcgcgcgaggggcgggcatggtcttatgtctcacagacagaaatttgggttgcgcgccgcgagaggggggagatggcgcaccatcgtgttgagagcgtcgcggtcggaagcaatgagcacggtggtggcacgcgcgggccgacagggttacagtgcgcagcgcggctgtaggacacacctgagaacacatagaa

SEQ ID NO: 9837 - DNA, 522 bp, Homo Sapiens
ggaactcttaataaagttattttggtaactaatgttttatggcacttaagaataattagcagcgttaaattttgtttgtattaagcacttttaattttatccttcctaaaaatagtttattgtatctgacaagaaacttccttaaccattgtgtccttcccatcttttttgtcatctttgttttcttcaaatgccctcctcccatctgccttgagattcccttgtcttcacttaaaagccagagtgcaagtcatgatttgcgggagggctcttgaaccacttctggctgcaccacaattctgtacttgagtatcacagtcattgtttttgagacaaacatttttataattctaatttgggttaataaagattttaaatatttcttggtttacttttgtaattatatacacaacaaatgtattaataactaccttgttaaacaccttttaatagcacaaggtttttatatttgcaagctgttgatatctttctaaaactgtttaggttatagtctattgatac

SEQ ID NO: 9838 - DNA, 894 bp, Homo Sapiens
gcaagcgagggtgtgggggcatgctgtgccaatctacctcacaggcccaccccctgacgggcatgccgtgggatcatgggcagggaaggctctgggggtcggagacaccgctgcttagcacccccagccagaacaccctgagggtctcgggactctggagagagtggggcgggaggaagaatgggcaccttcctagggaaggaaacgagcgctacgccttgactactccgagaagcctccgagaagtgctttaagtgtgtttgcatgcgccaggcggtgggcagcgggggcctgtccagccctctcccgccatccttccccaagtgacgtccactgccttgtcaccagcggacctgcctgtcatgcccaacctccctgaggaagcatggggaccctaactaccctggtgccctgcaccagacaggccgtggtcaggcccaggccaccggccgggttctgccacagcttcccacgtgcttgctgacatgcgtgtgcctgtgtgtggtgtctgttgctgtgtcgtgaaactgtgaccatcactcagtccaaacaagtgagtggccctcgaggccacagttatgcaactttcagtgtgtgtcataacgacgtcactgctttttaaactcgataactctttattttagtaaaatgcccaggagtcctggaagctacgcggacttgcagaggttttattttttggccttagaatctgcagaaattaggaggcaccgagcccagcgcagcagcctcggacccggattgcgtttgcacttagacggatatgtttatacagatgaatataaaatgttttatatacataatggagacttttgacattcttttattcccccccttctacacttccacttactacccgaacccaattaccccagg

SEQ ID NO: 9839 - DNA, 590 bp, Homo Sapiens
tagctgactcttgaggataaaccttatgccctgacccaccgactagtattaaaagtctagtcttttacgtgagaaaccacacaacgagaagatgcaatggcaatggttgaccattgtgggaaaggagccctttggtttcaggggagatgtgtcaaggttgacctgtctgagaaatataaaaaactggttctgaggattccaaacagaggcattgatttactgaaaaaagataaatcccgaaaaagatcttactctccagatggcaaagaatctccaagtgataagaaatccaaaactgatggttcccagaagactgagagttcaaccgaaggtaaagaacacgaagagaagtccggtgaagatggtgagaaagacacaaaggatgaccagacagagcaggaacctaatatgcttcttgaatctgaagatgagctacttgtagatgaagaagaagcagcagcactgctagaaagtggcagttcagtgggagacgagaccgatcttgctaatttaggtgatgtggcttctgatgggaaaaaggaaccatcagataaagctgtgaaaaaagatggaagtgcttcagcagcagc

SEQ ID NO: 9840 - DNA, 619 bp, Homo Sapiens
gggctgttggccaggactttggcctagacaaaggatgggggttgtggctgtggagcggaagtgggtctcaaccactataaatcctctctgtgcccgtccggagctggtgaggacagcctgccagagtctggtctctggacactatgggcacacgactcctcccagctctgtttcttgtcctcctggtattgggatttgaggtccaggggacccaacagccccagcaagatgagatgcctagcccgaccttcctcacccaggtgaaggaatctctctccagttactgggagtcagcaaagacagccgcccagaacctgtacgagaagacatacctgcccgctgtagatgagaaactcagggacttgtacagcaaaagcacagcagccatgagcacttacacaggcatttttactgaccaagttctttctgtgctgaagggagaggagtaacagccagaccccccatcagtggacaaggggagagtcccctactcccctgatcccccaggttcagactgagctcccccttcccagtagctcttgcatcctcctcccaactctagcctgaattcttttcaataaaaaatacaattcaagttgccttcaaccaaaacacaacc

SEQ ID NO: 9841 - DNA, 538 bp, Homo Sapiens
cattccccagtgctgagacttcacaatgggtggcccatatagtagcttcagtcattcccggagacaccctggaggggctattctctccccactgaaacattcaaagctgagtacttgctggagcctcatccctccgaagccgtctgactccagagtctgaccccccggctagtaccctatagagaggggctctccaaaggggctgctgggacatgtcgtcctgtggcagaaaagaggagaccctggaattcacgaccctgggtgccattcccagcgtttagtttctagaggcctcagtttctccatcagcttatgggatccttgtctttactgacaagaatggaatagaaatgtaaaagtactctgaaaagcaattgccctgtaacttatctagaaagaaaagaccctgagactccagaatctgctgttgccatagccccatatgtgtgaattctgcaactagccaaggctagttcctttcaattccatttaaaaaacaaaaaccagcaggtgtggtggctcatggcgtaatggcctg

SEQ ID NO: 9842 - DNA, 280 bp, Homo Sapiens
  misc_feature (83)..(83): n is a, c, g, or t
aaattgagagcattccatttccaggaatacaagcgccttgcaagaattcgtcaagtccctttggcccacggctgaaatgtttnaggggagtgatccaactgattaagtctccctcggcaagacttatcccaaaccttacttatgtacctttgcctccaacataggataagaatgtgaatgagaacaccactaggaaatacatattaatgtgcaggtttatccaagctcagacatcatgagtgacttagacaatcagacatcagtgacaattcctcatccg

SEQ ID NO: 9843 - DNA, 174 bp, Homo Sapiens
  misc_feature (43)..(43): n is a, c, g, or t
  misc_feature (124)..(124): n is a, c, g, or t
  misc_feature (144)..(144): n is a, c, g, or t
ctcccctggatataaattgcaactactggatctgatattcaangtatacacacacagccaggacccatagtgcccatttcccacagaagaagaaaaaagaaggcgtgtaacgtgttcattccanaagctatcatctacttttangctcacatttccatgtgggaaattcagttt

SEQ ID NO: 9844 - DNA, 490 bp, Homo Sapiens
gagtaacctggcagccttgaatggccaggcctaaagagctgagggcttcatttctgtaggcaacatgtctgctcctcagcacccagcgatgcaatcactcatgtgctggtgctcaataactagtgatgtgaatggtggcatgtccttaaataaggcaggatctggattgtgaagaaataaatccatatcccactcacagtcctctcattgcagacatcagcaatgatgcttgttgaatggaactggttgtagaaccaagtggttgggcccttgacatcacagtttatgtcatggcacacgtcaatccatcgtttatgaacagtcatggactgtcatccccccaggcaacccctccaattctcccatcaccaatcctcagccctctctttccatgccactgacaccagagctcaaggcctcatcttactttttgttggagctccttaatggtctcaaagtgtgagcagtaattggcaatatgtcagggcac

SEQ ID NO: 9845 - DNA, 244 bp, Homo Sapiens
gggatgcagttgtggaagcgagcgtgattggtgtcacaggctgtatcagctctccaaagctgggaagctctgtgttccggccaatgaacgtccaatgattctgttaccaaacagaagtttgataacttgtactgctgccgagaatccatttggattggctgaagaggacaaagatgtgcatgtacggtggggaaaacatggtggtgtgtgctataatgaggtaggcagggctgtgtctgtctca

SEQ ID NO: 9846 - DNA, 195 bp, Homo Sapiens
tcccacaggatgagaaactgagtcctagagtctcttagtgaccggctgccacatcccacttaccatgcctttgtttgtatggtaatttagtttccagtgaccaaagatgcacaaaccgaatacattttcataatgtggcgatctaaggtgtcactggaatttcctgtcattcgtcaatgtcctcatgcttgggag

SEQ ID NO: 9847 - DNA, 389 bp, Homo Sapiens
cgtgagcccaacgtatgagaataaccatctccataggtattggtaacatccaggatgtgggatttagaatggagagaaaacagtactgctgaagtcctagagatgggagacaccaaaggattaggagatgaaaacaaccatatgaggaagaggacaatatgttatagaaaataaattccctgcataaaatcccaaagaaggcataaatcatacaggatggagggctacagagtcaaatccagcggccacttcttaggaaggtaactgccctttcttgtatagaaattcagggcaaaatgtttgattaatagagttatctttccttctctttagaagatctaaaaaaaggtatcttctcatatttaactgtagaaaaaactccatgtttt

SEQ ID NO: 9848 - DNA, 478 bp, Homo Sapiens
gacagtccccattatatgacctacaacctctcccagggtcatgcaagaaacccaacagtctctcatcatcactggcagcaggaaggctgagggcctggctggggaaaagctggtctttggagaggtatgaatgtgcagatataaaaagcaagaagagcatccttatctccttgccttggctaaggcactgacaggaaaaatgcaaggtaggaatggcaaagaggggaaaggaagaagacaaaaatataggaactggaggggtatggggactaccacatgggccccatacttgtgcaaagaaatgggtagagccatgcctgcattgtctgttacccataacattcccctcaccctgctccagagtggaaggaaaatgagttgcaggaatccagggagcacaataacatagggtatttccctgagccttagggttaagggctaaagaataaagctttatacacatggcaatttctcatcc

SEQ ID NO: 9849 - DNA, 319 bp, Homo Sapiens
ccgtcttagcacgtggtatgactagcattgcaaccaaatagtgtgcccccggttagcagtgcagcacctaaaccaacctcctgggctgccattgccagaaagcctgccaaacctcaaccgaaacttaaacccaagggcaatgtgggaattgggggttctgctgtaccaccacctcctataaaacacaacatgaatattggaacttgggatgaaaaagggtcagtggtaaaggctccaccaacccaaccagttctgcctcctcaaactataatccagcagcctcagccattaattcaaccactaccacggtgctataacg

SEQ ID NO: 9850 - DNA, 202 bp, Homo Sapiens
aaattgactcctaagagggacaactcagttttcttctgaaatgccctcaaatcacatgtaatatgaaccacatggtaatcaccattgtggagtgcagtcagagaaaagagcatggtcaccagtaaccaggcagatggaggggccaatcctgtctctgccacttcttaaaaagtgacaatctttcctagcctcagttcctcat

SEQ ID NO: 9851 - DNA, 211 bp, Homo Sapiens
tcccaagggatgagaaactggcaagggcagggggaaacaaaatatgtatgatagccaaattatacagacagaaaagttatggacaactgattaatttcaataattctaggatatgttgtaggtgtattcagagggttaaagctcattaagataccagatgaaacttgcaagtacatctccattaccgcagtataattatacaacttccata

SEQ ID NO: 9852 - DNA, 795 bp, Homo Sapiens
atctggggtgtgctgaggacggcaggcttgggggattaggggcggctttgccaacccccatagattcctccaaatcctctcgtcttcagttcctcatcccggatgatggttgggatgatccccagctcctttccaactttgttaatctcctcgaggaaggtgtcggtgttcatctcattgcagggtgtgtccacgatgcgggctgctagccgcacgccgtctgtggcattcgctaagcactgcaatgtggacacctccaccggcccgttgtcttgtcccaccaggaaaaactccacggtgaccgtcttcttctccaagcgccgagaggcacctgagcggtgggtgaacagcgggaaggcccgggccagggcacaggcggaagcaaagacctccggctgctcgcagaccatcacaatgcagcgatgcgctccgggcggcaggcaggtccgcaccagccgcgtgatgaagtgggcggccgaggggctgttgtgccggctcaccctgcagggcagggcagccacggtggcgtagttcaggtagaggggacagctgtccgtggggttggggttgagcgtgctcagggcagcctgccagagctcctcggtgacccggggctgcagcttcccgcggacgtggctccagggcacgcggtgcaggtggtgcagctgcccgagcagcagcaggggccggctctgtgggtccgagtcccccgcgctcgcctggaactgcagcccacgttcgcatcttcctgccggccaacgccccaggccatgcccggcccggcccggcccgccg

SEQ ID NO: 9853 - DNA, 483 bp, Homo Sapiens
ggaatatttcacttgcttgtattagaaaggcaaaatgtaagactttggtatgtgtgacatatgctttatttggctttattttacaagtacagtatctgcaaaaaacaaagtaaccttttttcatacctgccagttttgaatttatatatgttattgaacaaatagtaatagaggattcgctgttgaaacaagttgtccaagcaatgttatattcatttttatacttattgggaaagtgtgagttaatattggacacattttatcctgatccacagtggagttttagtaattatattttgttgatttcttcattttgttttctggtataaaagtagagataatgtgtagtcacttctgatttagtgaaaccaattgtaataattgtggaaatgttttgtctttaagtgtaaatattttaaaatttgacataccctaatgttaataataaaaagaactatttgcatattccaaaaaaggccgggg

SEQ ID NO: 9854 - DNA, 804 bp, Homo Sapiens
  misc_feature (666)..(666): n is a, c, g, or t
  misc_feature (757)..(757): n is a, c, g, or t
  misc_feature (759)..(759): n is a, c, g, or t
gggccgcttggcccaagatggcggcctccgtgtgcagcgggttgctggggccacgggtgctgtcctggagccgagagctgccttgcgcttggcgcgccctgcacacctccccggtctgcgccaagaaccgggcggcccgagtacgcgtaagcaagggggacaagccggtgacctacgaggaggcacacgcgccgcactacatcgcccaccgtaaaggctggctgtcgctgcacacaggtaacctggatggagaggaccatgccgcagagcgaacggtggaggatgttttccttcgcaagttcatgtggggtaccttcccaggctgcctggctgaccagctggttttaaagcgccggggtaaccagttggagatctgtgccgtggtcctgaggcagttgtctccacacaagtactacttcctcgtgggctacagtgaaactttgctgtcctacttttacaaatgtcctgtgcgactccacctccaaactgtgccctcaaaggttgtgtataagtacctctagaacaatccccttttttccatcaagctgtagcctgcagagaatggaaacgtgggaaaggaatggtatgtgggggaaatgcatcccctcagaggactgaggcatagtctctcatctgctattgaataaagaccttctatcttgtaanggaaaccgaacggtcctgaccaaatccgacgggcgccccggggcccatacggggactaatcccccgggagcccaggccgcctccaataatnanttttttggggccccctttggcccctggaaaaattttcttaaacct

SEQ ID NO: 9855 - DNA, 939 bp, Homo Sapiens
  misc_feature (71)..(123): n is a, c, g, or t
  misc_feature (173)..(224): n is a, c, g, or t
  misc_feature (359)..(416): n is a, c, g, or t
gcctgggtggcgcggcggcggcggctgggctgtttgttctggtctcccgcagccgaggagccgaagcagtnnnnnnnnnnnnnnnnnnnnnnnnnnnnnnnnnnnnnnnnnnnnnnnnnnnnnctgtgagctcggcagagcggcgggcgggccccggcgccgcgcaggcagcnnnnnnnnnnnnnnnnnnnnnnnnnnnnnnnnnnnnnnnnnnnnnnnnnnnncctagcgtctcagagtgcctggtgaagaatgtgatgggatcactagcatgtctgcggagagcggccctgggacgagattgagaaatctgccagtaatgggggatggactagaaacttcccaaatgtctacaacannnnnnnnnnnnnnnnnnnnnnnnnnnnnnnnnnnnnnnnnnnnnnnnnnnnnnnnnnagacctccaaccctaacaagcccaagaggcagaccaaccaactgcaatacctgctcagagtggtgctcaagacactatggaaacaccagtttgcatggcctttccagcagcctgtggatgccgtcaagctgaacctccctgattactataagatcattaaaacgcctatggatatgggaacaataaagaagcgcttggaaaacaactattactggaatgctcaggaatgtatccaggacttcaacactatgtttacaaattgttacatctacaacaagcctggagatgacatagtcttaatggcagaagctctggaaaagctcttcttgcaaaaaataaatgagctacccacagaagaaacccgagatcatgatagtccaggcaaaaaggaagaggacgtgggaggaaagaaacagggacagcaaacctggcgtttccacggtacctaacactactcaagcatcgactcctccgcagacccagacccctcagccgaatcctcctcctgtgcatgccacgcctc

SEQ ID NO: 9856 - DNA, 564 bp, Homo Sapiens
ggggcaggtgtgaagcgtgtgctttagtttcgtgggaggcctggcatccccgagagggaggggaaaggtaaccactcctttgtggaggtcgccagggtcattgtcgtggatttgcacagtcggctgggcggtgcaatggcggaaagaaaaggaacagccaaagtggactttttgaagaagattgagaaagaaatccaacagaaatgggatactgagagagtgtttgaggtcaatgcatctaatttagagaaacagaccagcaagggcaagtattttgtaaccttcccatatccatatatgaatggacgccttcatttgggacacacgttttctttatccaaatgtgagtttgctgtagggtaccagcgattgaaaggaaaatgttgtctgtttccctttggcctgcactgtactggaatgcctattaaggcatgtgctgataagttgaaaagagaaatagagctgtatggttgcccccctgattttccggatgaagaagaggaagaggaagaaaccagtgttaaaacagaagatataataattaaggataaagctaaaggaaaa

SEQ ID NO: 9857 - DNA, 678 bp, Homo Sapiens
gtcagcctcagtttcccctcctggctgcaggtgggctcagcgcctgtgcccagggcagcctctgccggccagcagtgtggctctgccggggaacttgtgggggccatcttcacctgcggactgtgccgtggctcctgaggcgggaagctggtgccctctgccactctcgccagctcttctccctctgggcccagagaggccatgctgggggtagcttcaggcctgtgtggccggggaggcccagggtccttggactggtccagggtggaagctgatgctgacggagggcaggtgataatagttgtggcggcagctagtgcagggcgaggcttggtgtgagcatcactgggccgctggacagagtcagctggcacagggtcaggggctgtgggcaccactgtcacaggaaagaagttctctcggctgtctttggggtgctttggagtggtgggggtgtcccccgaggcctgtctctgggcggcagccccaagatggacctggcagaacttcacagcctgctccagcgcagcctcctcatccacctgcttgatgagcatgtaggtctccgacatgatcctctccacacggcccaggtcataggccacacccttctggccctgctgccacacacggtaggcatccaacagaagtgcctcgtgccgaattcgccacccaggc

SEQ ID NO: 9858 - DNA, 189 bp, Homo Sapiens
tcccaagatgagaaattggaataaaggagtttcgtgtggacatgtactgaaaattaacacatgtagtagccttaaaattttagacttctcgaacatgaggctgttacagtaatttttttaacactgtgcatggtacttttctacccttaaaaaaatcagtgaggatatttatctaatgaacatcaattc

SEQ ID NO: 9859 - DNA, 172 bp, Homo Sapiens
aaactgggtatctgcaaaaagtgtgatgctcaggtcataccagacacaaacattaaacttgaatatcgatcatagatctaatataaaaagccaaacatataaatattttctaaatagatttctgctcttcaaagactagaaatttaaagggaaaccacactgggagcaattc

SEQ ID NO: 9860 - DNA, 170 bp, Homo Sapiens
gaattgacaaatgaaagatgacacaagcagagggaaatattgtttacagaatcttggcaatcagtgtacaagtactcactataaaattatttccacttttctgtatgaaatttttcataatgaaatgttgtaaaacaatagtttagtggcaaaacattctttaacagttt

SEQ ID NO: 9861 - DNA, 437 bp, Homo Sapiens
ggcacgaggagacctcaaaggtaccctctgtccagaataaacattggaacaatctctcaattggcttttgtcactacacataatgtaatctcccttctttcagctccccccaacagtgagcatgcttcccaaaaaattacaacatcaaaaccaggaatgtccccgcatctactattaccaggcttgcaattggttcaattttcccataaaaacatgtttgtccaaaagaagggaaactgtgaatttattccatgcatgtaataaactctgcaagaagtttaacccacataggtttgcggcactgcaaaattgttcatgggtctatgtagcaaatgattctctgccttgacaatcatgtatacatatcaagatttctatcataatgataatgagattgatgacttcctgttttcctccaataaagacaattaatcacc

SEQ ID NO: 9862 - DNA, 289 bp, Homo Sapiens
gaatggaacaggcaccgaagatcttacactggaggacagaggaatggaacaggcaccgaagatcttacactggaggacagaggaatggaacagtgcactgaagagcttacactggaggacagagaaatggaacaggcactgaagatcttacactggaggacagaggaatggaacacgcactgaagatcttacactgaaggacagaggaatggaacaggcactgaagatcgtacactggaggacagagaaatggaacaggcaacccagtgctttaacaaacacacaattt

SEQ ID NO: 9863 - DNA, 647 bp, Homo Sapiens
  misc_feature (466)..(466): n is a, c, g, or t
gactttctgatacacacattacctatataattataaatgtactttgcatgattatatgtcactgtatagatatagagtttttgaaatcttgaattcgctcttctctgttcatagcatttcctcagccttgggagggtgaatgggtgactggatggatggagatggatgaataaatgaaggaatgagtggatggatggatgaccgagtgcatggatagttgaatgaatgagtgggtggatgggtgaatgaatgaatcagtgggcaagtgcaagggcctgcagttttcactcccacagagcactgaatgctcagtttcacttaaatcatagataagtacttggaagaaaagtcaaaatcaatgctcccagtctgtttcttttaataatatggaagtgtttgtgctgtaattcctcaagtttacaaacccccacgtgatttctaaaacttacatccttgttattaactngacatctggccaaacccactcttctaggtggcaagcgtggtgcccactgcacggaggatgcagccattaggtctctcggaggtttgtgtgctttgctgttcccggcagggacgacttggagggcaacagcctcctggtcaggcagggccccgtcctgtatgacgcagggcagtgctcgcct

SEQ ID NO: 9864 - DNA, 130 bp, Homo Sapiens
ctcccaagaatgaggaattgcgtgatgtatggtaggtgtatatttaactttataaaacactgccaaactgtttttcagaatgcatgtactgtttggcattcccaacagcaatttatgagaattccagttt

SEQ ID NO: 9865 - DNA, 253 bp, Homo Sapiens
tcccaagaatgaggaattggagcaggggaaagtcaggaagtaaggctttttaaaggagagtctagggctgggatatagtagcagagccacctggtttcagtccttgtatcccaaagatcttcggggcacacgaacctgggccatcccatgggaaatacattagtccttcccattacatgtggctagtgtgagttaatagaagagtgttgtacatcgagaggactcactttctcatccttgggacgcgttcctc

SEQ ID NO: 9866 - DNA, 205 bp, Homo Sapiens
aaattgggatgaggaatgtccctatcaggaagcccacaactatctgaatatgagtagattccagatcaccaaggcagaaaacagaataaggacgagggaggatggggagaaacaatgagagacatagcagtaaaatccttaagcagtgaggttggagattcctgttttcaattatataacccctccctgaataaattcacagttt

SEQ ID NO: 9867 - DNA, 1065 bp, Homo Sapiens
  misc_feature (765)..(797): n is a, c, g, or t
  misc_feature (843)..(843): n is a, c, g, or t
agcgccaggagaagaggagcggaggcggagaagaatagaacaacaggatcacagcggggcaaatacaccgccgcaataataagggggcgtggcgttggggcgacgcagtcccgtaattagagggcgccggataaaatgacgcggccaacaaacggcaggaacgcgcgggcaaccccggggcggaccaggaaacgtaacaacaaacagggaaggggcggcagaaaaggaaaaaggggcgacgggggcacacaacgaaaaaaggaaaggcacgggcgcctattcgaacggaaggaaaagagggggccgaagacaaaaaaggggcgtaaacgggaaagggaggggggccgaatacaagacggcagggggaaaaagcaggcggagcacggtaaccgccaaaaaccgaacgcagtcctatgtatcacgggcccggacggcgcgaggtctatacgggggccggggtatgaataaacgccgtgaacacttcacagtagtagaccccgtaggggcggccggaactatgtcgccgcagcttgcacataacgattggccagcaccagacacacctaaaggggatggacagtgcaggccccggacccctaagactggtggtatcacatcttcaggggggccagacccacccccagggagtgacactgttgagttaatctgggggctgctgacaggcccggagaatcctgggggagctggagggggcagaccaggggaccccatggaagaactgatgactggaaagggagagcccannnnnnnnnnnnnnnnnnnnnnnnnnnnnnnnnccccagagcctccaagggatggagctgttgaagggggtaggggtgncccaggaggagaagggggagggactccctggggaaggggatttggggaggagcatgtctgggcattcgggagtcccgcccgctgtcgcccatcccgtcccgtccagcctcccctggctccggctccggggtttgttgttatccgcctgccaccgccagcccagccgcaacaccagctagcgggatccagccagggccgtcagccgccgcaaccggacgcgac

SEQ ID NO: 9868 - DNA, 380 bp, Homo Sapiens
gggatctgtctagattgtagcaaatgatggtacatattcacaacaaagttgtgccactacatttaataaacagccacaaacaacaaaaggacaactggtccccgatataaatggactagctacctggacataatatccttgtgaggcatccttaaaggacaaattgcagctggtatttgggtgaatgttgttgctctgtgcctgttgaatgtccatgctacaagaagttatgagccttgttctaagtacagatgaaccttgtatttgtgtaatctcccaagggagagctatggtttacattcaattttttggtctttctgctatgaaacgtgtttattttgcctctgtcaatgtgtttgcaaccttaagtaaggaaaaaa

SEQ ID NO: 9869 - DNA, 906 bp, Homo Sapiens
gatgtgtttaaaaaagtgtattggatttccaatactaaataaaaacatgaaatcgtttttaaaaagccatagagtttacagcatcaactacagaaaaggccaaacaagtgtgtacagacgccagtcccagcagccctctgggcccctcccacaggcagtgcggcgacagacacaggtgttccaaatccccccgaggaagctgctgagcggcagctcaaccaggacactacaggacacacaatggtttagtttcgaaaatcacaggaaaatgtaagaaaatgtattaaattgtgaaaaggtgcaatacagaatagctttcctttttcttaattttttaaaaaacccccaactttgaacagttattttatttaaaaataggcccctcccccacccgccccaattctgtggcagtatccaggtaccaaggccctgaggtaacagaagcagtcagggtttgtgggaggaaatgccccaaatactgagcatgttctttgggcaaaaggtagtttctggggaatctggccctcctggtggccagagtgctgggacagctctcttcaggatcagtttaagtgcactggttttccagaatcccgcctggcacccccatgtgaccagcgagctcggcagcagcagttcctgcattgcacctttcattgccccccaaatcataaatacaaagagttcatcttgtaaaaaagcaagtatgtgacaagatcaaacatggcaaatccccaagttcaaaggcaggtggcctggggtacccactggtggtttcagcagctgatctcttcttggctatagaactgaagcccgatttactgtctacactgccttccacgctgtcttctggggatctgttggggagtaggggaagatgcctgagcgtcagtcgtggaaagtcag

SEQ ID NO: 9870 - DNA, 321 bp, Homo Sapiens
aagcaggacatatttggattctatttatttaaaattaaattctttgcaaaattgaacttctcaactaaaacgtgtccatgtcagaattttaactgttagcaggtagtttgtggcaaagatggctaaataatgaagcaaattagaatctgtgtgtatactaatgagctgctttttttctgttgagactatcattatttgtcttattacccaagaggcaattacctgaatttggatgtctgaattataacttatgcaggaatagttctgtaaatacatttaaataaacctgtaaagatatttaataaatatagtatttatact

SEQ ID NO: 9871 - DNA, 972 bp, Homo Sapiens
  misc_feature (45)..(45): n is a, c, g, or t
gcctgggtggcgaattcggcacgaggcccaagtctgcgggtgtgngccaccttcgtcatacaggaagagttcgaccgcttcactgggtactggtggtgccccacagcctcctgggaaggttcagagggcctcaagacgctgcgaatcctgtatgaggaagtcgatgagtccgaggtggaggtcattcacgtcccctctcctgcgctagaagaaaggaagacggactcgtatcggtaccccaggacaggcagcaagaatcccaagattgccttgaaactggctgagttccagactgacagccagggcaagatcgtctcgacccaggagaaggagctggtgcagcccttcagctcgctgttcccgaaggtggagtacatcgccagggccgggtggacccgggatggcaaatacgcctgggccatgttcctggaccggccccagcagtggctccagctcgtcctcctccccccggccctgttcatcccgagcacagagaatgaggagcagcggctagcctctgccagagctgtccccaggaatgtccagccgtatgtggtgtacgaggaggtcaccaacgtctggatcaatgttcatgacatcttctatcccttcccccaatcagagggagaggacgagctctgctttctccgcgccaatgaatgcaagaccggcttctgccatttgtacaaagtcaccgccgttttaaaatcccaggggctacgatttggagtgagcccttcagccccgggggaaggtgagcagagcctgacgaatgctgtcgactcatcgcgttagtcacgtgtggttcaatatgctggttggttcattggtcggcccccccactcagcagcacaccctggggggaagaaggaacagggatccggcaggaaagccagcccttcccccagtgactggcatgtatctggggcggggcctttaaagccccccaacttgtttggctctatttccggg

SEQ ID NO: 9872 - DNA, 577 bp, Homo Sapiens
gtggaggggacaaagaagcagagaaggatgatcagaaggggacccccagcccttggaggagagacggcagcctcaggccgccacaaaggattttgtggagtcgccccaggcctgacggcgttaattatccctggctttcatctttatgctcttgcaggggaggctcaagatgccttgtggctcgacccctgcacggagcccccagcccagcctccccgtgggttgaaaccttgatctgggcctgactgtggctgctctggggacatgccctcgtcctttgctgaagctgaggctccagagggggagtcactgccacgaaggttgcccagaactttccttgctgcaaaaagccccaagacttctccctgccacacacacagcttttgccatcgcgttctaaaagctgacagctttctctccaacactgttctccctgagtagggtaaagctacacttggcttccccagtttcctgtttcctgcctagaaacaaatttttgtcagtctgcttttcaaatgggatatatgattcacataccataaaattcaccactttatatggagaaagacgacaaacg

SEQ ID NO: 9873 - DNA, 1929 bp, Homo Sapiens
ccaccacctccggcgcaaggccggggatccattgtgccttaggcccagggggggccagatttagcgcgttggggactcccaggcggcggaggatgagcacagtccctcccccagggggggtttacccctgggcaccctgggaagtccagccggaggctggccaggtctagcaggttacggatgacccggggcgccaggcactcagccaacagcacccaggggccgcagggcagacaccagttagccggccgcaccaaaactgtagggtctgaggctccgctccggctctgcacagggctccagcagcagctgatccggggagtcccctgcaggcgcccccacgggcttgggcctcaccagccgcagctggtccagggctctcttcttcagattactgcgggggcctcggtgccggctggagggcaggcatttctcctgaacttctaggagctgctgggctctctgataattgggcacggtgccccggaccaggtcccgcaaagtgagggggtcaacccgggtgcagaaccattcctgcctccgcttgtatgccgagtccaccagtcgaaggatctcttgggctttcacgcaaagggcatggggatctgccctctcaggcaaggtgaggttggcacgaatgtaaaagggctcggcacctggtccctttgcccaggcttctagggcctcgtggaaggactggcaggccttcgagtccatcagggaggggagtgtggacccctgattccagagcaaggttctctgctgggcctcggcttccaggcacgccccctccagaccagcagcttccaccctttgctctcttggttccatcctggcggacccaggcccagacagcaccctgcgcaccacagcccccagaccatctgtccccataaaacgacagtccatctggtcccttgtcctgcggctctggcccctggggggctccggccagacacccgaatagccagagacctgttgaggaagtccaggccacagccccgagccaggaggccttccggctttcccaaaggccacacgctgtcagaggatgaggacgaagagaggccaggggaccagggcttaagtgtcacacttccctgtgatgtctgacatcctgctgaaggatctcttagggggtccggggtcttcctcacgctgccggcggaggatggagccggcactgggggggaaagggcacggatggagagccgattgatctccttgttcactgtctgtggcttcctccgagttgtgaggctcaggtccccccatgacagctgcctccccagttgcttctgggcctcccagaggggaggggaactcgctcaggctccaagtgctgctgaggttggagcacagggaatgggaggaggcacaggccttgaggcaggtgccaccctgggcccgctgcagctgaacctccagcagagccttggtgccctccaggctggtgagcgttgtcagcagctcatcccgctccgcctccaggccccgcacctgcttgcggtactggtccttctcgatgaggctctgtgagtactgcaactggatccggtcacggctctggatggcctggtctcgctccttctcaatctcctccagttgggccaggacagtggccatgcggtgcttgtacaggtcacagtccttctgcagcgtgcggtgcttgagccgcaggtcttccatctcctgcaggtactgggcgcgcagctcctcggcccactgcagctccccctgcacggcatgcagcttctggcacagctcctgcctgctgtcctgcgcctcccgccagtcatgctctaggatgtccagcaggatgcgctcggagcccggggcccccggccggctcgcctcctgctgcaggccctcctgcaactcccgcagtgacgccgtcagccgctggttctcagcacgcagctcagagac

SEQ ID NO: 9874 - DNA, 532 bp, Homo Sapiens
  misc_feature (39)..(39): n is a, c, g, or t
aaggtgtggatgtgaaggcccagaagctggccatggacntgcccggccacgcgggaataggtatatgctgttgactggaggcaagatggccagagagtggcaagtggtgggaaggacaaattgcctccggatatggagaagatgagacggcccgaagttctctctgacccccacctcgactcggcctctgccagctgccttccctgccagagaacaaaggctgagatggcagtgcacacaccccccccaccagtggggacctgagaatgcgtgtggcctgctgtcctcgatagaccggaatggggttttcccacagatccccgcctgtggcacaccccagagccagaaatcgaaggtcacaggaagttgtcactgaacttggcccgtgtctgctactctgtaccttgctggtacagacaggggtggtgggcagccaggctctatgagtgggcccctagtgtcagctctgtacagggtcagatcccaggttctatgaccaaataagtaacttaagttttgtgtgttgggttct

SEQ ID NO: 9875 - DNA, 979 bp, Homo Sapiens
tgctgggattacaagcatgagcccagcgcctggctgtatctttcattttacccaagtcactttacccaagtaagtaattaggggaaagcctgagtcttgtaccacctgttcatttggggaactgtgggaaacggagccaacggacctaagtgccctttgacagtgagtttcataccatttcagtagcgtatttctttcttaatctgaataaaccagaatgatactctcagcacagaagaataaagggagcgagtcattaacgttttctttttaaacctttatgatgacttccttatgaattactgaacgaacactggaatgggactcaggtatcctgaggacatctctcaactctggccttagttccccctctgtaaaattagggtgccaactaaatgatctacaaggtcccttccagcgccgccattctgtaattacatcatgtgtaactgtattaaacatacacaagtgactgccaggcatgggaatgtaacttccgagtaaatgctttggtttgttcagaatacactatgaacttctttccaaagacgggttgtggtaaatagtggatattttgattataagaaatagagtttccttgaagctttagctggagatacagcaatagtgtggtgttcctacaaatatcacagtgtattcaaacatatttttctatcaaaaatcatttttgtaaaagctgtgtgtttttatccaacttgtgataataaatgttctttattttagaataaaaactggcctttttgtatgtattgaatacagttaatagaatttataattttaattaacaatttgctctttcatgtgtgaatatgtgatagtctagtcctttcaaaagattgagacggactggctttcattgtttgaaggctggtgagagaaggggttacctgctgcacaccagttgggagtgacatactcctaacacatggccagaaacaaaaagtttgggtcataaaac

SEQ ID NO: 9876 - DNA, 1429 bp, Homo Sapiens
gcctgggtggcgaattcggcacgaggctgtgcccgggtcctagtggcggccgcagtgtcgcaggccggagggaagatggcggcgccctggtggcgagccgcgctgtgcgagtgtcggagatggcggggcttcagcacctcggccgtcctgggccgccggacacccccgctggggccgatgcccaacagtgacatcgacttgagcaacctggagcggctggagaagtaccggagcttcgaccgctaccggcgccgagcagagcaggaggcgcaggccccgcactggtggcggacctaccgagagtatttcggggagaagacagatcccaaagagaagattgatattgggctgcctccacccaaagtctcccggacccaacagctactggaacggaaacaggccatccaggagcttcgggccaatgtggaagaggagcgggctgcccgcctccgcacagccagtgtcccgctggatgccgtgcgggccgagtgggagaggacctgtggcccctaccacaagcagcgtctggctgagtattacggcctctaccgagacctgttccacggtgccacctttgtgccccgagtccccctgcacgtggcctacgctgtgggtgaggatgacctgatgcctgtgtactgtggcaatgaggtgactccaaccgaggctgcccaagcgccagaggtgacctatgaggcagaagagggctcctttgtggacgttgctactcactagcttggatgggcacctgctggagccagatgctgagtacctccactggctgctaaccaacatcccgggtaaccgggtggctgaaggacaggtgacgtgtccctacctcccccccttccctgcccgaggctccggcatccaccgtcttgccttcctgctcttcaagcaggaccagccgattgacttctctgaggacgcacgcccctcaccctgctatcagctggcccagcggaccttccgcacttttgatttctacaagaaacaccaagaaaccatgactccagccggcttgtccttcttccagtgccgctgggatatccgtcacctacatcttccaccagcttctggacatgcgggagccggtgtttgagttcgtgcggccgcccccttaccaccccaagcagaagcgcttcccccaccggcagcccctgcgctacctggaccggtacagggacagtcatgagcccacctatggcatctactaaggagccagagtgtgcgcatttcagagcatgggattgatcggcagcaagagtaaagacacagctccagaggcccacactgtggggttctgggccctgccttaagcagcccccctctttggccccctcccgtcagagcccagggcttggagtgaaagtgactctcaggtggtggggtggggaatgtgaataaacatgaattctttcccggaaaa

SEQ ID NO: 9877 - DNA, 267 bp, Homo Sapiens
  misc_feature (63)..(82): n is a, c, g, or t
gaacctttggtgtgtggtgggaagctatcagaacaagaaatgtaggcatttcccgtttttttnnnnnnnnnnnnnnnnnnnncagggctctgccctcttgaaaggcatttacttgtttaacacttgtccagctacagtggggtacagtagctggctattcacaggcatcatcatagcccactagtctcatattattttccttttgagaaattggaaactctttctgttgctattatattaataaagttggtgtttattttctttcac

SEQ ID NO: 9878 - DNA, 521 bp, Homo Sapiens
cgaagtgtgtcatactggaatgtgagcagcctgcatgcagaccccaagaatgaagctggctgttcagttcacaaacaggaaccagtattgctatggctccagggatctccttggactgcacaatatgaagaggcggcagctggctcggcttggctaccgtgtggtagagttatcctactgggaatggctcccactactgaaacgaactcgcttagaaaagttggcgtttcttcatgagaaagtattcacctctgctctctgaagggcatttaggggcatttctatggcaaagctataggtgtatactgtaccaggtgttgcaaaatgattataaaagccagaatgtaagtttggcgataaaatagtgtgttgaggagacttaattgtatccaaggcaggttagagctagtgtatgttactgtgaattgtaatgtagttggattgtacaaattactgcaaatgtatacatgttactcttagtaaataataaacatcttaatatgtcctacggtcaagtaaaa

SEQ ID NO: 9879 - DNA, 1677 bp, Homo Sapiens
  misc_feature (409)..(409): n is a, c, g, or t
  misc_feature (665)..(674): n is a, c, g, or t
cgcggaagagggggccggttgcaggacgcgaagcgcgggcgccggataacggcaccacctcagtcggcagggggtgcggcggccaccgtagaggaacgaagggagggaggcgatgcatattaacgggcggtgtcgcggaaagtggcgtaagtgtgaggcgaaaggcaggcgggttaaggcgagagactagaggccccgtcgtggcgggaaacaggagggaggaagataggtgtgatcagtcggtccgccgggggtaaagttcgcgacgcgcagacgatcaaccgccccgcccggctagaggcacgaccgggcgggacgacgagccggcggccggggcgagacaccgagaaatctcggcgcggacaaacgagaagacagagaggaggcgcgcgcgggggacgcgagagangagaaaatgctgggtgaaaaaccgatcgccgagggcggtaggacacgaatggcgcgagccgcgactcgactatgacggcggaggtggggggaggaaggcgcaacaaaaacactgaagttgggcgccccccccgcccaacaccaacgtgctgtagaagagcagggccaggggagagttgtggcttgtcacttatggctccgaggcgggggggcttgtgtaatagagggggggcggtgtaggataggtgtggcgcgcnnnnnnnnnncgcaggaccgtgtcgaacatttcaagcgcgcggtccattaggggggcgggatgcaccggagaggctgggcgtgggttcgtcacatcagaggcggagcgcccggtgaacaggaaggggtttacgtgcaaccttggggcgcgccaaagaggcgcccggtggcccgccgggcggcggtcggaggggcgcctgcaggagctggagttagcagggggggccttagggtttcatcggggacggtgggggatgtcagttttaggcgagaagggcccgtactcgaagcaggcgctgagctcgaagaccagggcggagcgcaccaggcccacgccgcccgcacgctctggcgccgggtggtacaggcgcccgttggcggccaggggcagcaggcgcgccggctcgaagggcacggccagggcctcgccaccgccgcagtaggagaggcgcggaggcccgtggtccgcggtcagcaggtgcgtgaagaccaccggccggtcctcgcagcgcaggaagttgcgctctctgccgcagggcgagaggaaggggaaagcggcctcgtagcgcccgctgcggttgggtctcaggcgggagaagaaggtgaccaggaactgcgggtctttgaagcaggtgatgaaattcttcattttggaatcatccaggaaaagctggccctggtggtccacgtagtagaaatactcgcgggtccgcggctccggactctggccctgcgtgtaggaaacgcccccatccccgctgcaggcccgggctccccgcgaccgcgccaaggccagggtccggagcgtcccgcaaggcggccacattctcctcccgcgccggaagcgaccagcaggtcacgccgggggcggtgctgcgcgaactcgcgcctgcccgcagtagccccgcgcttcgcgttccggcggcgcccgcctccgcgacccgggcccggcgctcttccctctccctcgggcctcgggggctcgatcccgggaattccggaccgggtaccagc

SEQ ID NO: 9880 - DNA, 376 bp, Homo Sapiens
ttcaccagtgttaaaaaataccctccatacgttattgccattttgaatccttccacagaaagtgcattttaaccagtactctgggtgcaataaataatatgtagaaatttaagtcctccaattccagcatatccagtgagttttgacagtgtgtttatgtggaatgtttaaggatatacaattgtactttatataaattggttcttgttcttcttaaatgtgacatgaaataattgtgctgctacattatactggaaattaacaggggaaaagggaagagctcttggctcccttgaggttctgctagtggtgttaggagtggttacaactgagcttttagtaaccatttaaccgtatgtaaacttggtttctaatt

SEQ ID NO: 9881 - DNA, 1096 bp, Homo Sapiens
gggcagtaggatgggctctttgagcccacacttgtatctgctctgcagtgcccctccttctcgagcttcagggcaggcccaggccggacccagccctgtctttggaagcccacacttgctggcaaagaaggacggcggcccctggccaaccaggaaggcacaggcagggctgagtttgcatgacaggaggagctcgggctcggaggaaagcattttagacctgaggtatcgacgtatggtcaacagggatgaccaggagcaggacgccttgggcagtgacgccagtgacttcagcgacacctccacggaggacagtggcggcagctcagtagtgaaggtctaagccctcgagctgtgggttcgcgtcctgggttgcgtgcattcgtggaaagcggcgtagccgtgcgtgtgtgtgatggttccgtggctgcaaggaagggaaacagtctattatacatagccctgtatatatgtacaccaacatgatacttttatttaacagacgtgtcctggtaaatatgatttttgtagctttttgtaaattatttaaagtgatgtaaaagatatttttggaaaatactgttgttcaattttgtagggtgttcctaactgcagttttctgtgttctgcatacaagtcttagcttaggaaacatttggttcttaccatcacagccaggttcacagaggctctgatgctttttggttgattgctggtgagaatggccggcggtggctgcagtggtagcctgaggaaggccaagctgccctccctgggaatcactcagatgccccaagatgtccgttgggaagctcccaggacagcactttttatacagaggacaccgcctcggccgccacgtccttagaggccagagcacatctgaaaactgcaatcacagccgtccgctggaaaaacgtttcgaagcacagtggccagcgagcgagcacgtggctactccctgttgcatgtcaaatccacacagatgtcagcggcagctgctcggcagcccagccctgggcctgggtgggttcatgtccaatcttgttcgatcactagatgattctaacatcgaaataaacctctttttatatgg

SEQ ID NO: 9882 - DNA, 429 bp, Homo Sapiens
  misc_feature (364)..(379): n is a, c, g, or t
ctctctccggccccaaagaagaaaggaggagggcgcccttttgtttgtcccacagcttattgcccactggctctcactcctaagtgggcccagggtgggagggaggcacaagggggaggaaaggggcgagcacccacgtgagagaatctgcctgtggccttgcccgccagcctcagtgccacttgacattccttgtcaccagcaacatctcgagccccctggatgtcccctgtcccaccaactctgcactccatggccaccccgtgccacccgtaggcagcctctctgctataagaaaagcagacgcagcagctgggacccctcccaacctcaatgccctgccattaaatccgcaaacagcccnnnnnnnnnnnnnnnngggcgccgctcttagagtatccctcgaggggtaacaagcttgcgcgtacc

SEQ ID NO: 9883 - DNA, 408 bp, Homo Sapiens
catcagctcggtaccctctggatgcaaagtgtcgggggtttcgcagagcagaaaggcccagggcagacgttgaattcgctgcacttcctggacagaaacactattgggatgggcaaggcaggattcaaggcagaggtgtgaaggctcgccatagaggagggcttgttgagtgtcactcctggagcctacggagtcgcagggaggcctggcatggtcaggtagacttggtaaggcctgactgctggggaatgtatcctgccaatagattcctgggcctggaacagctcttctttggacacatgccatccatctttggaataagacaatctggcatttatgtacctggtgggttaccctctgggcctttttccaagaaactaaaagtttggagacactttgcatccagag

SEQ ID NO: 9884 - DNA, 755 bp, Homo Sapiens
ttcagaggatcccctcggatgcaagtgtcggtagctgatatggcctgtagctgtatgacctatgagtggaaggactgtattgaagaatatccaaataccatagtgtaatgtgatcgctctgtggctggggatggtggagggttcaaaattgcagggaagtaagtgcctttggtgcttgaagaactacttgatgatgctcctgtaacatgggctcggtcataggggggtccactgcttccccccatgatactgagggagctgatcattgatttacctcgagacattcctggaagagatcctgacaaagaacttgggtgtggcacataaccaagaggcacagaagctggtccatgaactacatagtcattagtcatagtttccccatctcccttcatacgtggacacaacatcctctggcagataaagtatacagttccagacacaaaaatggtgacaattacgccaataacagaaccaactgtattggtggcctgtggtgctggttcttcagtcggataacaatccagttcatctgacttgtcactgcaatccacattatgatcacacttcttgtgctttccaatgcactgaccattggcacagcggaactgatcaattaaaccaagcacttcacagttcttctcatctgatttgtcctggcagtttgcatctccattgcatcggagggcaccatcaatacactgcccactggcacactggaactgggacacttgcatccgaggggactcctcgac

SEQ ID NO: 9885 - DNA, 350 bp, Homo Sapiens
ggagctcggtaccctctggatgcaaagtgtctgtgtatttaacttaaccagcaggatcttgctgcaggaatgcctgtccgactcctggctgatgtgacccatttgctgctcaaagccatggaacattttcccaatcaccagcagttacagaagaattgcctcctttcactttgcagtgaccggatccttcaagatgttccatttaacaggtttgaagcagccaagccttgtcatgcagtggcatttgcaaccatgaggatcaaaacatgcaaaggatggcagttgctatcatttctatcactggctgccaagctttctacagaacaaactgcacagcatgatactgagct

SEQ ID NO: 9886 - DNA, 1165 bp, Homo Sapiens
  misc_feature (193)..(209): n is a, c, g, or t
  misc_feature (334)..(373): n is a, c, g, or t
  misc_feature (975)..(1038): n is a, c, g, or t
taggtcccccatttccccaaggggggggaggaccccccctttgggagggggccaatagaaaaaccccctcttgttgcaggggttgcgcggccaaaagggctcccgggtgcccctacttggatttcctccacaaaaaccccccccgggggagggggtaaaccccacccagatggcccctggttgccaaggtagnnnnnnnnnnnnnnnnngcttagggaggggcctaaaaagggcgcgccccccccggggaggggaagccgccccctttcccccttgaatcaaacccatgggtttggaaccttctttggggctcccctggggagggtaaaaagannnnnnnnnnnnnnnnnnnnnnnnnnnnnnnnnnnnnnnnagagggaaaaccatgcccaccgcccacccgttatattcagggggccgaggcggaaggatccgtgtactggctggtccaagctgccgaacctgctctagctcagtgccctcgaacggtgagtagtagttgttcccaaagccaccgccgctggaaaagctggcactgaatccggcaaggacaaagtaggaggccacgatgcatatgagaaccatcccattcaagaccacctccactatctgcaccacacctctcccagtgcacaagtatttgcatttgtggcattccaggagtccttccgcctctgactggtaatattccacctcctctcgtccaggcctgggggtcgagggcagatatctctccgaagggggttcactttcgggtctgcggcgcccggggtctcccttcctctgcggctgcggcggctccggggcttcccagggcgcgggcccaggaggcgcggctgcgtcccaggtcagtccccgggctccgtcccgcgtccggctttggcgcggtttttcccaaactccgtgttcacctgcgcgagggcccgcgtccctgtgtgtgtcccggcgggggcctcggtccgggtctctttcccnnnnnnnnnnnnnnnnnnnnnnnnnnnnnnnnnnnnnnnnnnnnnnnnnnnnnnnnnnnnnnnncgggtcccggtccccgtcccttcgccggttcccgtcgctgcttcgcttcctgcgcgggtccccgggtcggtcccgcggtcgatcccgggaattccggaccggtaccatcctggtttgtggggttggt

SEQ ID NO: 9887 - DNA, 392 bp, Homo Sapiens
gagtcggtcctctggatgcaagtgtcccaggagtgcatctccctgacagtctctgtccacaacaaggtccagctcacccctactgggggccttggtctgaacttggccctgaatccgttcgagtattacatattcttctttgccttgagcctcatcactcagaagccacttcctagcggccctccacgtccgtactgcagactgtgcctactgcatcctggtggacaggtacctgtcatggttcctgcccaccgaaggcagtgtgcccccaccactctcctccagcccaggggggaccagcccctcaccacctcccaggacaccagccataccctttgcttcctatggcctccaccacactagcctcctaaagcgacactttgcatccagag

SEQ ID NO: 9888 - DNA, 792 bp, Homo Sapiens
ctcaagatgcaagtgtcgaaatctccgtgtgaaaagctgatcagcaaagggagtctgtccctaggcagttctgcttcccttccgccccagccgggaagccgggacggcctgcctgcgctcaacaccaagatcctgtacccaaatgtccgggctggaatgtctggttccttacccggtggctcagtcatcagtcgcctgttaattaatgctgatcccttcaactctgaaccagaaaccctagagtattacacggagaaatgtgtcatgaacaactattttggcattggcctggatgcgaagatatccctggactttaacaacaagcgcgatgagcacccagagaagtgcaggagccgaaccaagaacatgatgtggtatggagttcttggaaccaaagagttgctgcacagaacctacaagaacctggagcaaaaggtcttgctggagtgtgacgggcgacccatcccactccccagtcttcagggaattgctgtccttaacattcccagctatgccggaggaaccaacttctgggggggtaccaaggaagatgatactttcgcagctccatcattcgatgacaagattctggaggtggtcgccgtgttcggcagcatgcagatggccgtctctcgagtcatcaggctacagcatcatcggatcgcccagtgtcgcacggtgaagatctccatccttggggatgagggcgtgcctgtgcaggtggacggagaggcctgggtccagccgccagggacattcggatgtccacagaaccggcacagaccttgctgg

SEQ ID NO: 9889 - DNA, 421 bp, Homo Sapiens
cgtccctctttatgcatagatgtcagaatatactcaggactccagaggttcacacgtggaactgacaggagacccgccaccgtggaggcagggggcaagaaactcaagaacgcatcaagagcaccagccctgggccagggaagacaggctcttcctgcagtttctcgtggacactgctggcttgcgggcagtcggtctccagggtacctgttgtctcttttccgatgtaataactactttgaccttacactatatgttgctagtagtttatggagctttgtatatttggacagtttcatatagggcttagagattttaaggacatgataaatgaacttttctgtcccatgtgaagtggtagtgcggtgcctttcccccagatcatgctttaattctttcttttctgtagaaaccaacagtt

SEQ ID NO: 9890 - DNA, 436 bp, Homo Sapiens
  misc_feature (103)..(103): n is a, c, g, or t
tgcacagcatggtgactatagttaatgataatgtattgtctgtttcaaaattgctaaaacagcaggttttaaatgttgtcatcacaaaaagattacaagtagngggagatgatagatatgtcagttagcttgatgtaatcattccacaatgcaaacatatatcaaaacatcacattatgcctcataaatatatactctcctcttttgtcaattaaaaatacatattaaaaaaacaaggaaaaggcataccacaggattgaagaaagacttggctcttgggtgtaatcaattgctgatataataagtcacttcaaaaattttagaaagagaaaaagagtgcagctaaggagtacggttaaaattaattgaaatacgcaaaggacccatcaatttgaaagtgctacctacacattttcatacactttgcatccagacg

SEQ ID NO: 9891 - DNA, 514 bp, Homo Sapiens
  misc_feature (407)..(407): n is a, c, g, or t
gagtcggtcctctggatgcaagtgtcattacccacttaactcatcaaacattcattgtaagagctgggccataaacagcagcgaccgctatgcagagatatgagagcatggtggcttttctccagcatcagtttctagtccagagaagttctgtcagattgccctgctcccttggaaggagggtctgaagcataccttattactaagaattaaaaattgcagagtttgtgaacacctttgacttttgttttctaagcatagatttggtatcttctgctgttctttcttgatggcaagaaaagaggggtgcaggtagaattagctgagtacagtccagagcttggctctcccttcagacagtccttagtttgaatgccagctttgccactagtcagctttgggacctncagacaggtgactttaattctgcaagcctcagatgccttgtgaagtacccagcatgatgcctggaacctcggaagtgcataataatccagacactttgcatccagag

SEQ ID NO: 9892 - DNA, 418 bp, Homo Sapiens
  misc_feature (304)..(304): n is a, c, g, or t
  misc_feature (324)..(324): n is a, c, g, or t
tagctcggacctctgatgcaaggtcgggatacaggtgtgatccactggtgcccagcctgagagttaagttttaccttttcactaaagggtggtcacaggactggtcctatttggatttgatggggacagagcagtgtggcccatatttccattactgtattagaaattgcagagaagagcacctgaggacaggaaaggagaaacttgtattattatttccatagagcagcttattgttctgagtctcttctgttataaagcgaaagaaatgaagtgaactcttttcctgtagcgtcttgcttcntttggccaagtgtgactgtnggtggtagcaggtaaacaggtggtgctgacacctttaaaggcataaactgaagatgcaggtgtaatttgtccagaggacactttgcatccagag

SEQ ID NO: 9893 - DNA, 287 bp, Homo Sapiens
  misc_feature (156)..(199): n is a, c, g, or t
tattaatgcatagatgtgataatttcacgtaagaccaacttgaacgattccacttttgaaatctctgaccttatttcatttccattgtctgtctcctcagggtcaagatcttgtggctgggactatcttgcagctctcctataaaaactattcttnnnnnnnnnnnnnnnnnnnnnnnnnnnnnnnnnnnnnnnnnnnngcaggcccgaggcagcgtgcgatcacgacggtcaggcacatcgagcaccatcctggaccaacatggttgaagccccgatctctactaa

SEQ ID NO: 9894 - DNA, 427 bp, Homo Sapiens
atcagctcggtcctcttgatgcaagtgtcgtagtacaccgtgacttaacacagtgggacactgagagctagagcatctcgatgtaatacaccatgacttaacacagtgggacacggagagctagagcatctcgatgtagtacaccatgacttaacacagggggacacggaaagctagagcatctcgatgtagtacaccgtgacttaacacagcgggacactgaaagctagagcatctcgatgtagtacaccgtgacttaacacagcgggacactgagagctagagcatctcgatgtagtacaccgtgacttaacacagtgggacactgagagctagagcatctcgatgtagtacaccgtgacttaacacagtgggacactgagagctagagcatctcgatgtaggacaccgtgacttaacacagtgg

SEQ ID NO: 9895 - DNA, 481 bp, Homo Sapiens
tccaaaataacggggctcctgctctgccagtcagtaccctcaagtcactcctgatcctcaacctccatgcctaaggctggttcaagagaccacataatatctgccttttatgacatacatgatgggtgcatgggattctgcgtgccctttgcttgatatagactgctaaggtgagatggggaatatcagagtcagctgctgcttgaggaagcagaacacacagctggaggcttggaacatgtgggtccctatgagtgtagagcccatatccccatagagtctaccagagcaggggtcgccaaatgttttcttaaagagcctgatagtgtatatgttaggctttgtgagccaggtatttacagcaactcaattctaccactgtggtatgaaaacagctatagacaatcataaatgaatgatcatggctatgttttaataaaactttacagacacttgcacaggaggacactttgcatccaga

SEQ ID NO: 9896 - DNA, 364 bp, Homo Sapiens
tgctggatgcaaagtgtctataaattccccaaacatctctctgaacgagtgtcaagtattagagtcttcagactgcgggggaaaccacggctaggggagggtttagaggtttgggcaaaatcccacactagtttaaaggcacaatcagaatgctggagtgatgacagtgatgataacgtatgctgcacactcgactctgacacaggtacagttctagctagcttcgacatcattagactcgtttcagccccaagaagcccatatgcggtaggcttcatctatagcctcacttctcatagatgaggctcagcaggcccaagaaccacttaagcaagtttcttcagtgccttgcggcccagccacg

SEQ ID NO: 9897 - DNA, 370 bp, Homo Sapiens
cgtcgctcaggaatataaccgagtgccgagacaccctttagacagtacgttcctgacaacgtccttgactgtcaagtctctgtcgacgggggttaaggggagaaaagaggagagtgtgcttgagataaaggggtgtgatactgaagggctgaaaggtttcttctcacacatagacatcgtgaggtcttccttgagctctttagagccttccctcgggataggatgaaatactgagatcctagaaaggattcacaagacgagtcactcatcagtgcagattcacctgattcacccctagatgtgtgtgggattaggatcgcaaagagacacaggcactgaagatttttgtgccaggagaggggctctcaaa

SEQ ID NO: 9898 - DNA, 535 bp, Homo Sapiens
  misc_feature (92)..(141): n is a, c, g, or t
  misc_feature (149)..(149): n is a, c, g, or t
cgcgtgaaccactgcgcccggccccattttccttttaccactgcccagtgtgcaccctggagtgggaacactccatcttcatttcgtatgcnnnnnnnnnnnnnnnnnnnnnnnnnnnnnnnnnnnnnnnnnnnnnnnnnngaacacanaagagtgaagggctggtggtgtgtgcagaacaaacctggcatcatgaagagagcagcgaggaggctcttacaagaagtccaggcaggatgtgatggaacccaaaaccagccaccagcagtgctgaagtaaaggaaggcacaaaggacatagatgctgcagaaggactctacaagacagggagaattactgtatatggggtcaaaggaggaagagaaaccgataagtggccccaaggtcacccccaagttcctaggacaattgtgtgcttcaagggagctgagaagtcaaaggaaagagctggctagagcgggagaagcgcatccaattggagaggagagtgtgaatatagctacctggacgcactagggtcacagacaaacctggg

SEQ ID NO: 9899 - DNA, 709 bp, Homo Sapiens
cacctcggtgatgcaaaggtctggggtactatgatgacgctaggtgagtgcacactggggcactatgatgaggccaggtgagcgcacactggggcactatgatgaggctaggtgagtgcacactgagacactatgatgaggctgggtgagcggacactggggcactatgatgaggctaggtgagtgcacactgggacactatgatgaggctaggtgagtgcacactgggacactatgatgaggctgggtgagcgcacactgggacactatgatgaggctaggtgagtgcacactgggacactatgatgaggctaggtgagcgcacactgggacactatgatgaggctaggtgagcgcacactgggacactatgatgaggctaggtgagcgcacactgggacactatgatgaggccgggtgagcgcacactgggacactatgatgaggccaggtgagtgcacactgggacactatgatgaggctaggtgagcgcacactgggacactatgatgaggctaggtgagcgcacactgggacactatgatgaggctcggtgtgcactcaaccggcctcatcatagtgccctagtgtgcgctcacctagcctcatcatagtgtcccagtgtgcactcgtccggcctcatcatattgtcccagtgtgcgctcaccttgcctcatcttagtgtcccagtgtgcacacattctggcgc

SEQ ID NO: 9900 - DNA, 353 bp, Homo Sapiens
ccttacgcaatagatacggattgctccacagttctggggtctggggagatcaaggccctggcagatgaggcatctggtgagggcccactttctggttcatagacagcaccttcttgctgtgtcttcacttggtggaagggtgaggggtctctcccaggcctcttttaaaagggcactaatcccactcacaggggtgtgtggcccccaagacctaatcacctcccaaaggtaccttggtagttagttaggatttcaacagatgaatatggggaggacatgaagattcagaccacagcagatctctattttccctttatagagaaagtaattcaagacaaggagatgcttacaag

SEQ ID NO: 9901 - DNA, 530 bp, Homo Sapiens
  misc_feature (493)..(494): n is a, c, g, or t
tctggatgcaagtgtctatggatagtctcacctggaggtggccaaataaaatgactctcaagagggcactacctgcccatggcttcacaggtccagccagcccagcaagcagaagtgctggtgtctttaacccaggtttcttaaagactggcttcaatagaaccaactgtagtgacttggggcagaggaaggggaggatgaaggtcttctagtgcatctctgccctctccgtgttggcaaggttggcatgaatgggccattattcaactgggggtgggatgtctccatttctggactgtgctcaaattcacaccttgtatgacatgtgggcagaggagctggcctggagaggcctctaattctgcctctacgcttttgctgggtctgaggacatgggagggaggagccataaaatgctggagaacaattttaaaaaacacttatgaaaaaatgctggacacttgactcactgcccagaacaaagaagagccannattcaacatcccaaactttacgtggcacgttaagaa

SEQ ID NO: 9902 - DNA, 557 bp, Homo Sapiens
  misc_feature (81)..(81): n is a, c, g, or t
gggtggtcagccggctgcatctttgcagagctggccaatgctgggcggcctctttttcccggcaatgatgtcgatgaccangttgaagaggatcttccgactgctggggacgcccaccgaggagcagtggccctctatgaccaagctgccagactataagccctatccgatgtacccggccacaacatccctggtgaacgtcgtgcccaaactcaatgccacagggagggatctgctgcagaaccttctgaagtgtaaccctgtccagcgtatctcagcagaagaggccctgcagcacccctacttctccgacttctgtccgccctaggccccgggacccccggcctccaggctggggcctggcctatttaagccccctcttgagaggggtgagacagtgggggtgcctggtgcgctgtgctccagcagtgctgggcccagccagggtggggtgcctgagccccgaatttctcactccctttgtggactttatttaatttcataaattggctcctttccccgggaacccaaaccactcacaatgatttcccttgttg

SEQ ID NO: 9903 - DNA, 775 bp, Homo Sapiens
  misc_feature (516)..(516): n is a, c, g, or t
  misc_feature (614)..(614): n is a, c, g, or t
cggcactgtaggtgagcgcgagaggacggaggaaggaagcctgcagacagacgccttctccatcccaaggcgcgggcaggtgccgggacgctgggcctggcggtgttttcgtcgtgctcagcggtgggaggaggcggaagaaaccagagcctgggagattaacaggaaacttccaagatggaaactttgtctttccccagatataatgtagctgagattgtgattcatattcgcaataagatcttaacaggagctgatggtaaaaacctcaccaagaatgatctttatccaaatccaaagcctgaagtcttgcacatgatctacatgagagccttacaaatagtatatggaattcgacttggaacatttttacatgatgccagtgaactctgaagtcatgtatccacatttaatggaaggcttcttaccattcagcaatttagttactcatctggactcatttttgcctatctgccgggtgaatgactttgagactgctgatattctatgtccaanagcaaaacggacaagtcggtttttaagtggcattatcaactttattcacttcagagaagcatgccgtgaaacgtatatggaattttctttggcaatantaatcctctgcggacaaatgcaacagttaaacgccgcacaccagaggcattaatgaaactggagagacttgattctgttccagttgaagagcaagaagagtcaagcagctttcagatggtattcaggagctacaacaatccctaaatcagggattttcatc

SEQ ID NO: 9904 - DNA, 873 bp, Homo Sapiens
ggggcggttgtgtctgggaaggagagaaaatggcggcggagccgaacaagaccgaaatccagactctttttaagaggcttcgcgcagttccaaccaacaaggcctgtttcgactgcggcgccaagaatccgagttgggccagcatcacgtacggtgttttcttgtgcattgactgttccggggtgcaccgctccctgggcgtccatctgagcttcatcaggtccacagagttggattccaactggaactggttccagctgaggtgtatgcaggtcggcgggaatgccaatgcgacggctttttttcgccaacatggatgcacagccaatgatgccaacaccaaatataatagccgagctgcccagatgtaccgggagaagatccggcagctggggagtgcggccctggctaggcatggcactgatctttggatagacaacatgagtagtgccgttcctaatcactccccagagaagaaggactctgatttcttcacagaacacactcaaccccctgcctgggatgcgccagccactgagccttcagggacccagcagccagccccgtctacagagagcagtggcctggcacagccggagcatggccccaacacagacctgcttggcacctcacccaaagcctcactggaactgaaaagctccatcattggcaagaagaagccagcagcagctaagaaagggctgggtgccaagaaaggcctaggggcccagaagggtgagcagccagagcttcagtgagatcgagcggccggctcaggtggccagagcaagccccgtgagcaagcaggcaggcgatcgccaagaaagcaggccggaaggagtccatgggcgcctccaatgcgtttggcctaaa

SEQ ID NO: 9905 - DNA, 490 bp, Homo Sapiens
ctgcggggtgggccctctgtatagctgctctctgtcactggcccctggagtgggagcagcgtccttagtcactgcaggcccaggcgggcaggtggtcccaggacagaggtggggaagttgtcctgaggaagcaggaagtaggccttgctacccgcccaacccaagggcctccagtggaccagcattcaagatgtgagtgcccgtggtgtgcaaggcactcccatggcaccgtatttattgactgatctgtgaaggcttccctgacccctgcccaggaagagttcactggtcgctctgttgtgccccacagcactttgttatacctctgccacacacttcacgcagcgcgttgtaactcatgtgtttacatgtctgtccccccagactgtgagctccttgagggcagggactgtacattctccagctctgtgtccccagggcctggcacattgtagacgcttaataaatgtctgttaaatgaatgagtgca

SEQ ID NO: 9906 - DNA, 632 bp, Homo Sapiens
ggggcaggcagagaagccgggagcgggcgaggcggcggcggcagcagcgatggcaggaatagagttggagcggtgccagcagcaggcgaacgaggtgacggaaattatgcgtaacaacttcggcaaggtcctggagcgtggtgtgaagctggccgaactgcagcagcgttcagaccaactcctggatatgagctcaaccttcaacaagactacacagaacctggcccagaagaagtgctgggagaacatccgttaccggatctgcgtggggctggtggtggttggtgtcctgctcatcatcctgattgtgctgctggtcgtctttctccctcagagcagtgacagcagtagtgccccacggacccaggatgcaggcattgcctcagggcctgggaactgacccagctggtcctgaaggagaagccaaatggctgcactggccgattctggtctccagaggaccttggtgtttgctctcccttgacccaccccagtgagtgccaaagggcagccccaacatgtgcacccctgcatttcctgtcatgccacagactggcccttgagggcagcctgctgtactggccatgctgggccagccccacctggagctcagtaaaaactgctgtttgatt

SEQ ID NO: 9907 - DNA, 1002 bp, Homo Sapiens
  misc_feature (121)..(121): n is a, c, g, or t
  misc_feature (876)..(884): n is a, c, g, or t
gtgcgactagcatcccatctctccaaggcttgcatctaccgccagcctgcggcttccaaatgcgcagcccctcacgggccgctatctagctgcctttccagatggcatctgacacatccgncggccaagactcagttttcctccaagcctgtggtcccacagccctttcccatctccacaggagggagactccactcgtgctcagactaaagccctggaggcatcctggcctctctcccggcacagcccacacccaggtcctccaggaactcccatgctcattctctgaaatgggtccgcagctccctctggaccctctgcccttggcctggtttaccgtggtggcctcctcactcccgtcccaactcactccaccgctcagtctgttctctgaccaccagtgtcttgagtttccggggcaggcggggccgtttctcccgcttgggcctcaggggactgggctcgggcagctgcagggccaggtagtcagaagggaatggggggtagcgggaggaggccagcgagctcaggtatggggaggggaccccggaggcctgaaggggaaaccctgttgaaggaggcagggagaggctggagggagagggggcgccccccagcggagggcttctcttcctcttaggggccggtgtgtcagacaacttgggtgtcccctccgtctcgctgttatctgatgatgcagtggcatctgagtccgaagagtcttcatccacgttctcgtactgcagaagtcggtctaggaggaaactcttgtcccgggacaccttcagtaatttcctttgcgctttcctcagctcctcctggaagcactcgtgctcgtagatgaggaacttgagcttccgcttcagattccggtannnnnnnnngtagtccacttcgccgtccgccggcccgttcatgaccggcccgggagtggcgcccagagtctgccctcccgctaccccaagcagtggctgccgatcccgggaattccggaccggtcca

SEQ ID NO: 9908 - DNA, 1064 bp, Homo Sapiens
  misc_feature (878)..(878): n is a, c, g, or t
  misc_feature (976)..(976): n is a, c, g, or t
ggaattctcgggatcccgccgggggctccttgctcggccgggccgcggacatgggagaggccgaggtgggcggcgggggcgccgcaggcgacaagggcccgggggaggcggccaccagcccggcggaggagacagtggtgtggagccccgaggtggaggtgtgcctcttccacgccatgctgggccacaagcccgtcggtgtgaaccgacacttccacatgatttgtattcgggacaagttcagccagaacatcgggcggcaggtcccatccaaggtcatctgggaccatctgagcaccatgtacgacatgcaggcgctgcatgagtctgagattcttccattcccgaatccagagaggaacttcgtccttccagaagagatcattcaggaggtccgagaaggaaaagtgatggatagaagaggagatgaaagaggaaaatgaaggaagacgtggaccccccacaatggggggcttgacaatgtttttttccatcttcagggaggtttgggggaaaagcatccaaaaaaatcccgcccaaggaccaaggagcaagaaccttccctcccaactttggggggtggccaaacagaaaggcggccaagaaccaaaatcccggaaaaggcgctagacccgcggggtccaactccgacccaagaggtcccatgtgaacccggtaaaaaccagagcaataccccctttcccacaggtcccccaaaggggccttgggccaaagaacggggcgcccccacaaaccattaaaataccccctccaggaccccttgggagggggcgggcccacaaaaaaatcgcggggctggaaggccacctttggggggtcccacctctaaagaggggggtttgggactctggggatcnttaaaattggccccccacccctcccagggacccccacgggggaaaacacctactccgccaggtgccccgatagaaactcaccactcttgcccccgccnctgttagagctctcatcttaggtggaacgagtggcgcgcgctcccataacgagggcacaacggtggggggtcggtcatacacatggga

SEQ ID NO: 9909 - DNA, 798 bp, Homo Sapiens
ctctggatgcaagtcacgtgcggttagatgccgtcagatgtttgcacagtttatccagatctgtgcagcagcttcgaaccagtttccaggatcatgctgtttggaaacctttaatgaaggttttacaaaatgcaccagatgaaatcctagtggtagcatcttccatgctgtgtaatcttcttcttgaattttctccaagcaaagagccaattttggaatcaggagccgtagagctactttgtggattaactcagagtgaaaatcctgctttacgagtgaatggaatttgggctttaatgaatatggcatttcaggctgaacaaaaaataaaagcagatattttacgaagcttgagtactgaacagctattccggttattatcagattcagatttgaatgtgctgatgaagacattgggacttcttagaaatctcctctccactcgtcctcatatagataaaataatgagtactcatggaaagcaaattatgcaagccgtcactcttattctagaaggggaacataacattgaggtcaaagagcagacactgtgcatcttagccaacatagcggatgggacaacagcaaaagatcttattatgaccaatgatgatatcctacagaaaatcaagtattacatgggccattcacatgttaaactgcagcttgcagccatgtttgtatatcaaacctcatatggaatgaagaggaagggcaaagatggcactgcagcagtacctggcatgatgggagtgcccctgggcacctgcgagcatcccacctccttgtttaaggaac

SEQ ID NO: 9910 - DNA, 367 bp, Homo Sapiens
caaaatagatgacggtcctaattatgaaactaaaacttctagaagaacaccaaagagaagatctctgtgacctggggttaggcgaagatttcttagaaatggcaacaaaacatggcctatagtggaaaaaatggatgaactagacttcatcaaaacgttcgaaactctgctctcagaagacaccgttaagggaatgagaagacaagccacagatctaggagacatcgcctgagaaacggacttgctctctgagatacacaaaggaatccttaaaactcagcagtaagaaaaaaaatccactgtgaaaagacgggcagaatattctgagcacgacacttgcatccgacgggatcctctagaacagcta

SEQ ID NO: 9911 - DNA, 914 bp, Homo Sapiens
tctgccttccacctgggggtacaagaggtcaccccaaggggggcaggcgtccagggcctcttggatcttctgccggcaataggagtactttctgcaggatctgccggagggtgctcctcctcctcccgctgcaggatacgtaggaagttatgtagttcaggcatgctgaaggcgtcccagttcacctccccagagtcattttccttcaggacaaagctcagggccttgtcactgggccctgccaggagccgcagccgcaggggctgctcatcatccaacagcttccgcaagtacacttggccgtgacgctcagcgcgctcaaagagtgcaaacttgcgggggtcatccaccaccaagaactttcgcagcagggcctcaatgacttcacgtgcccttgtgcgtgacagcacatgcaggtgcttgacagcatccttgggcaggtaaaaggaagtgcggcgcctgacacttgtgccccgtcctgggccccgccgggcatcctgcaaggagggtggcttcttgctggagggcacagagacagggcgcaccagcttcagctgaaccttgatgaagcctgtgtaagaaccgtccttgttcaagctcatgaagaggttgctgttgatctgggcattgtactccttgatcttctgctcaatctcagcttgagaaaggtcaggtgtctcccactccacaggctcgtcctggtcccggcgcggcctgcgagctagcgaggttcgcgcaggtgaagtactgctcagagctccgagtccgagtcctcttggctgcagtagccactgctcgtcgtgctgctccaggtcatttcgaaagaaggcgcctccgcctcgcccatagccgtacccgcccgtcccccagtcctgcgcgtccgtagccgccaaccaccgccccggtcgcgtgcg

SEQ ID NO: 9912 - DNA, 444 bp, Homo Sapiens
ttctgacccatcgccgggggtaaggtaaagggtctctggggccatggactggggcacgtggctagcagctggcgtggaaggcaggggcctaagggctggtagtgggttcccccagccgcggaaatagctggaacttggcccccgactcaggctcctgggaaggacaagtgcccggggcccctgtccctggagaggatcttgaccaggcaggtgtttgtcccgccattaggcaaggttctgaaatccctgggtgcctggcccagtacgtgtgttgaggactggaaggactcagtagatgaggtcccctcctccgaggaaagagctagtaaatagacaaacaggcagaaacagaggctagaaaaatacaaattaagaccctgcatgtgggctggaagggttagggcgtgatgcatgactggagttctttgtgttttcattcatcca

SEQ ID NO: 9913 - DNA, 457 bp, Homo Sapiens
agatagaagctttggagaaaatgaatgaagatcacgttcagaagaatggaaggaaagctgcttcatttttgaaagatgatggagacccaccactactatatgatgaatagcactaatacccactgcttcagtgttaacacagcagtgattgtcagctgccaatagtcaaatgaagttatgggtgacttgaaataccaataacctgaggagtgggcaatggtgcttctgtgcttttcccccttgtaacccatgtgccagatgtgtggaatttttagctcaacattgagagaataaaatgtcactacctctcatcttatgaacaggataatataattctttaacagctataggttatctggctgaagtagacctaattttatgtgacttgtggtgtaaaatgtcttgatgatcatttttaaaacttgggtcacacttccaaatatgggaggaaaggaca

SEQ ID NO: 9914 - DNA, 593 bp, Homo Sapiens
tacgtgttcttgtggttgatcttgaggatcccccaccagtcatgagcgcttcggtgagcaggatgggggtggacgtgatgtctcatgtgatagggtgacctgtgctgacacatgagtcatacatcactgtgttccagccagtattgcccctctgtgggcttgtcccttgttcgggaatagttcatagattgcagcttgagtatttcaaattaactttacatcgcatttgtcactagaaccaaatccaagaatgattgcatagatcaggtaagacacagaagaggcaactcaacaaagcccatgacatacagtgcatggctcacaatcccaggagatgagggcagcacagctgcagagcaacacagagtggggagaacatccaggatgcacattcaaccagcaggtggggagcaagacagacagggacctgtgggccaaagcgtttcttggggtctagggaattgaccaaggaggtgtctcttggggagttgtttctggtggatttagagcaagcaggcactagttctgtgaagtcgcactgtgattaagaggtggtctgtaccatccatgtggggtgtttgggaacagtgggc

SEQ ID NO: 9915 - DNA, 678 bp, Homo Sapiens
ttatgttctgacccacccccgccaggttgctgatgcccgggtagaatatcagcttgaagaggagttcccctgtctgccttcataaatccacccgattgggactagtgagccctgctctgaagctcaccaaaagcatccaggttccacagcacaaaggcatggcaccacttcatccccatcctgccggaatgagaatcaatgttgtcaataaccaccaggccaaacagaatttatatgacctggatgaagatgatgatggtatagcttccgttcctactaaacagatgaagtttgcagcctcaggcggctttctccaccacatggctgggctaagcagtcccaagctttccatgtcccaaggccctccctctcaccaagtggttcagaatgatgcatacacagctcctgctctcccttcctctattcgaacaaagccttgaccaacatgtcccggacactgtgaacaaggaagacccccccaaagagctgccagctgctgagcctgttctaagcccattggaaggcaacaagatgactgtgaataatctgcaccatccacttaccatgaatatatgtatacccatatgtgtaacatatgcagaaggaaaggaaggaacattaagagatgaagggtaaaaaagtattacttaaccattaaaaaataaacatttgatattc

SEQ ID NO: 9916 - DNA, 564 bp, Homo Sapiens
tgagctcatgtcatggcattggtagtttctctgttgcctgaaagagcaattaaagtcagtcgtgcgtgaagcatctctcttctaaaggatgtgtatttccatatatgctttctgaggatccggtacaaaatgatttcccaaagttctgaagtgccttgagaacatgtgggtccgagtgttataacagactcctcccccgggtcaccttttgcctggtcatcctgttagagtacatctttggaaatccagggtaatattctctttcagagatgctcattgtgtaactctgtgtagggagatagtcactttaaacagctcaaagtagctagctaaaggagtagccttaaatacctaaaagatgacagaagcatagcccttaacaaatcttcagcttgtctctcagtatttcccaatcatgaaaatcccttgctatgtctttcctactagaaatgttctagaatcgctggacggtggggtcagagggcagtcggtatttaggccgtgagcttcccatactactgcaggtccaactcctggcaaccgcgggcacaatggcacgtggat

SEQ ID NO: 9917 - DNA, 710 bp, Homo Sapiens
aacagagactccagagacaaaacaagtcctcgtccggcgtttcccaaaccagttgcccataacagtaaccacacagggccaaccaggtggactgcagcaggcctgttcacaatccacaggcgagcagttcgagcacattggttgtggaaacgcagccattctgtgagcgcaccaaagacaaacaccactaatgcagaagagcacatgccaaaagacagaacccatcgcaaattcaaccgatccccaacgatgccactgatgaataggcccacagcataggagaagaggaaaatggtatccagtgtgccgaggaaaagagtcgctttctctgcactggggaacaaatggttgctgctccagatctccacaggcagctcaagctgacgtgttaaaagcacttggggtccactgctcagagatactgactttgacattgctaaatgtgtttcgtgaagcatggagcaacgaataactgaagaaagtgagcaggaacactacaacatgatgatggctgaactgggacagcagagaccctctttgaaaaacatttggccaggccatgttcttcctgaccttccttctcacctttgaccttaaagtttggatgagtgatttacatcatttcttccttccgagatccgcagtggtcgccgctctccagccccggctccgctcgccgggtcagcttggctccgctgcccgcctccccc

SEQ ID NO: 9918 - DNA, 1029 bp, Homo Sapiens
ggccacaccattgaaaccctcatgaggattaatgctcattccagaggcaatgctccagaaggattgccccagctgatggaagtagtgcgatccaactatgaagcaatgattgatcgtgctcatggaggcccaaactttatgatgcattctgggatctctcaagcctcagagtatgatgaccctccaggcctgagggagaaggcagagtatcttctgagggaatgggtgaatctctaccattcagcagcagctggccgcgacagtaccaaagctttctctgcatttgttggacagatgcaccagcaaggaatactgaagaccgatgatctcataacaaggttctttcgtctgtgtactgaaatgtgtgttgaaatcagttaccgtgctcaggctgagcagcagcacaatcctgctgccaatcccaccatgatccgagccaagtgctatcacaacctggatgcctttgttcgactcattgcactgctcgtgaaacactcaggggaggccaccaacactgtcacaaagattaatctgctgaacaaggtccttggtatagtagtgggagttctccttcaggatcatgatgttcgtcagagtgaatttcagcaacttccctaccatcgaatttttatcatgcttctcttggaactcaatgcacctgagcatgtgttggaaaccattaatttccagacacttacagctttctgcaatacattccacatcttgaggcctaccaaagctcctggctttgtatatgcctggcttgaactgatttcccatcggatatttattgcaagaatgctggcacatacgccacagcagaaggggtggcctatgtatgcacagctactgattgatcttattcaaatatttagcgcctttccttagaaatgtggaactcaccaaacctatgcaaatcctctacaagggcacttcaagagtgctgctggttcttttgcatgatttcccagagttcctttgtgattaccattatgggtctgtgatgtgatccactattgtatccagtta

SEQ ID NO: 9919 - DNA, 863 bp, Homo Sapiens
gggacaaggggcccctacaagcggccacaaggatggcaggcttcgcggagctcgggctgtcatcgtggctcgtggaacaatgtcggcagctgggttggaagcagcccacgcccgtgcagctcggctgcatccccgccatcctggagggtcgagactgcttgggctgtgctaagacaggcagtgggaagacagcagcgtttgtccttcccatcttgcagaagctgtctgaggatccctatggcatcttctgcctcgtcctgacacccaccagggagctggcctaccagatcgcagagcagttccgggtcctggggaagcctctagggctgaaagactgcatcatcgtcggtggcatggacatggtggcccaggcgctggagctctctcggaaaccacacgtggtcatcgccacgccggggcgcctggcagatcacctgcgcagctccaacacttttaatataaagaagatccgcttcctggtgatggatgaggcaaacccggctgctggaaacaggcctgcactgacttcaccgtggacctggaggccatcctggcggctgtgccggcccgcaggcagacactgctgttcagcgccacgctgaccgacacactccgggagctgcagggtctggccaccaaccagcccttcttctgggaagcacaggccccggtgagcaccgtggagcagctggaccagcgctacctgctggtgcctgagaaggtcaaggacgcctacctggtccacctgatccagcgcttccaggatgagcacgaggactggtccattatcatcttcaccaacacgtgcaagacctgccagattctgtgcatgatgctgcgcaaattcagcttccccaccgtgg

SEQ ID NO: 9920 - DNA, 758 bp, Homo Sapiens
ttcagcacatttagacaaccatcgttcagtccagtttttccgtctgtggccctttttcatcatgtaaccctgctttaacaccatctaacataagttcattaaagactccattaattgcccatagacacaatctgccggtccatgcctttgctaaactgtccatttccaataagctcaataagttcccatgcagaaaagcccatttttactgtcatcaaagttgattttataatgttcaaatggttcttgctgccaacctcctcccatagcttctgtaagcttcttaagcaggtattcaatctcttctgacacaataattaatggatacttgtcctcagataaaaagtggaaaataacccatattttaaatgcatcttcttctgtaatgagcaggggattctttgtgaggttttttttgacacagagggtccaacacatcctattgaattcaatcttgtcaaagttgtcttggacctcttccaaaatgaacctgtttaaataaggcatgtagccctggttggacactggaccctcatcatcatccgtgaagtgctcttcaagggcaactgggtcatgaggagccttcagctccgtgcacaggttatgggaaaggaccttgagctgggacttggagaccttgccgctgtggtcctggtcgagtgcggtgaaggcgtgccagatggctttgagcagctcctccttcaagctccccatggccgcggccatgctgccccgccaacccctcctgcccagccccc

SEQ ID NO: 9921 - DNA, 670 bp, Homo Sapiens
tttttttgtttcaaattcagaataatttaataactcttcgttatttcatatgtatctggaaatgggacagatacgtgtcctgatcctgtcacaagaggtagaattccagcatttggtacgacgttccaagacagggtcaaagtgacattcctgtttcccttgagaccatttccatcgtcaaagaaaaaatattttgttttcatatctttcagcagcagcttcggattatcacctctcaaaacaatcttgtcccataggacaacttggttcagagcattattttttgttgaatattctgctgataaataaagaaacaactgcttaacattccaatcaaatatattctctagatcagcagttatatcaaatgtgataaatcccagatcacttctttctctaggtccagtgaaatcttctacattttttagcatgatccgcgagacgtgcagccgcaccgggacgctcctgtctttgaaggcggtggtgatgaagcagccgaaggtgagcgccgccatcacgctcagcgagaaggcgaacagtgagttcgcccgcgacagcaccgtgttcatcgcgatcgtctcccacgagtccggactccacacgcacacccaggctcccgttccggcggcggaccggctccctgcgatccgcgccgtctgcggtgcgcccc

SEQ ID NO: 9922 - DNA, 1025 bp, Homo Sapiens
  misc_feature (26)..(26): n is a, c, g, or t
gtggccttagttagaatttatggagncgaaaagaaccccaagtcagaatttagaactgaagtacctgcttcttataggcctgtagagaaaaagcgagatcatctttctggccaggactaggggagacccaagccctgttctttctagggggctgagtttgacagacctggatcgcacctgatgccccccaaagtcctctagatgggccctgcaggactcgctgggaggcctggtgccccctcccggcgtgctgggacaccctgggttcctgcagttagatgcagtccatggagttctcagggaggaggccagggatgcagccagggagccccaagcccttgataggagtgcagttgagtgggaggccgcagcccagggaggggtcctgggtctctatggcctccagcctgtccatgttgttgtcccagttgatatggaagcgggtcacccgggggttcgaggccaagatgttccgctggagctgggagaaatctggcttcatgggcgggttctcacgcagctcagggttgaggtactcgttgttgacgtagtagcccactcggatgaactcctgtccatggtaggtgcaggtgatgaggaccacagtcacacccacggcatcagtctctgggatgagggatgggttgggggcgtcggcctgaaagacaaacatgtgtctccctgctggcacagggcccaccagcaccgagtctaggatctgatcaaattcctcactctcagccgagccaacataaatgatcttccactccaggtcgtccgccagggcttcactgcactcgaagctgatctcgaaccggaaggggctgtggaaagggctcgggttctccaggaccgccacgttcagcaccgacaccttggccatcgcctcgcctcgccgcgccgcagcaggggcaggggctgtggctgtggcggaggccgcgcctgggtccggtggggtcagtggggtagggctgaccaggtccactcccgcctcttctctccgagatcccgggaattccggaccg

SEQ ID NO: 9923 - DNA, 1447 bp, Homo Sapiens
  misc_feature (1152)..(1160): n is a, c, g, or t
ccccccatttttatcctcccccctcacgtaccgcgcaaaccgcggctggtaccggtccggaattcccgggatagccggcccggggggcggggagaggcgggggcggcccccgcgcaggcaaaggcttggggggccggggcgcggctgtgcagctctcgccggagccgagcccagccgagcgtccgccgctgcccgtgcgcctctgcgcctccgcgccatggccggcctcaactccctggaggcggtgaaacgcaagatccaggccctgcagcagcaggcggacgaggcggaagaccgcgcgcagggcctgcagcgggagctggacggcgagcgcgagcggcgcgagaaagctgaaggtgatgtggccgccctcaaccgacgcatccagctcgttgaggaggagttggacagggctcaggaacgactggccacggccctgcagaagctggaggaggcagaaaaagctgcagatgagagtgagagaggaatgaaggtgatagaaaaccgggccatgaaggatgaggagaagatggagattcaggagatgcagctcaaagaggccaagcacattgcggaagaggctgaccgcaaatacgaggaggtagctcgtaagctggtcatcctggagggtgagctggagagggcagaggagcgtgcggaggtgtctgaactaaaatgtggtgacctggaagaagaactcaagaatgttactaacaatctgaaatctctggaggctgcatctgaaaagtattctgaaaaggaggacaaatatgaagaagaaattaaacttctgtctgacaaactgaaagaggctgagacccgtgctgaatttgcagagagaacggttgcaaaactggaaaagacaattgatgacctggaagagaaacttgcccaggccaaagaagagaacgtgggcttacatcagacactggatcagacactaaacgaacttaactgtatataagcaaaacagaagagtcttgttccaacagaaactctggagctccgtgggtctttctcttctcttgtaagaagttccttttgttattgccatcttcgctttgctggaaatgtcaagcaaattatgaatacatgaccaaatattttgtatcggagaagctttgagcaccagttaaatctcattccttcccnnnnnnnnncaaatggcaccagctttttcagctctcttattttttccttaagtagcatttattcctaaggtaggcagggtatttcctagtaagcatactttcttaagacggaggccatttggttcctgggagaataggcagccccacactttgaagaatacagaccccagtatctagtcgtggatataattaaaacgctgaagaccataaccttttgggtcaactgttggtcaaactataggagagaccagggaccatcacatgggtagggatttccatccagaccccatgatgcg

SEQ ID NO: 9924 - DNA, 792 bp, Homo Sapiens
  misc_feature (655)..(669): n is a, c, g, or t
ggggaaataggaggagcaattccctagggaaaaaggggggccctagggggaaacaatggttgcagtgcactgcagaatgaccaatggccgcttatttccagagttttcttcaacttaaaaagagatggcattttcttatgattcagtaaccgcattacttacatcaacattagggttgctatagacaagcctaggtagctagcctctatttacatcatcccactaagggtatccaaacccaagtaaccaaattttagaacactatcagatagtttcctgcattcaagacttcaactcataactctttgaactcttattagatataaggaatctaagatgtattataggcattcctataattagccatatttacaagatacaaaatatttggataaaaagcaaatttcatcacatcgtataatgtacagataaggtttataaagtaaattaatttatttttagcaccatatatacaatccaaacactgcaaattaatttcttttcaaactcaaaagatagttttcattaatcatgatggcacatcctctctctcaataaacgcaaatgctgttttatgggcagtgtggtaatagtttaacatttagtaattgattatataaaattaagttctcaagactaggctgcatttcctttnnnnnnnnnnnnnnncctcaggttaaaaattagccaaaaatttgtgattactatcacaaataatccaagatttaaataaccaagggcctccagaggcccctatcttccttttgccctgtctaaaatccaatgaaatcc

SEQ ID NO: 9925 - DNA, 588 bp, Homo Sapiens
  misc_feature (535)..(535): n is a, c, g, or t
aatgtcctgattaatatgtgattcagattagtaagactaaaatctatgatcatatcccatcattttgaagcttttaaaaatagataataatgatttgttacatgcagcttccatctagatgcataacgttatttctggaaatgcgggccacctacaatgtaaagcaggctaaacaaggcagcttgtgatttcattttaatcagaaacacaccaaataggcatcatggcagcagatctggctgctagtgttttaaatacagatggattgttaacatctttattattcataattgtctgtcaatgttctctggatgatcaagaaactctttgtgcctcaccctaatcactgaagtaatgaaaggagatacccgcagcaaggactgcaactgtaaatgctgcaatcacacctatgttttgctgaattttcaataacattgtagttttaattggttgttttggttgttcatcatctgtgttgtccaatgaagcttgactattcatagaagaactcattacaagctgtgtttgtttcccnctgcaatttccaaatcctctatttgaattgtgtgatccaacatctccataaaa

SEQ ID NO: 9926 - DNA, 599 bp, Homo Sapiens
ctagtactctatttcccttcccaggaactcggatggactctactggtctggatctggctcccctgacatcctcctatctggatgcacttgtgataacccaatggtttctatagtgggcccccgttttcttcttgtgctatcagtgcaagtctaacgcatggaggaggatgacgcgggtttctatgctgtgtagtgctcttcttgttgcttgctgatcagtggctggtcaagctgggttggtgttgaggtttgagagactgacaccatcacttggaagtgcccttgctgggagccttggccaaaatgcttatcatcttgagtggcttactgtgagagcgtttttaatgcatattacttaaattcaatctgtcgacgtggtggaaatgtgttggaggccaggactttctccacgcctgacgtgggtgggtgacccgtgggagcggcaagggtgttcttttaagaagttgtgaatcttcatttccaggcttggcgaggtgcactcttgactccagctttggcttggagacctctgaagattggcagatggtaacttcagtaggtgggtcagaacataggggatctctagagtagactgcagc

SEQ ID NO: 9927 - DNA, 804 bp, Homo Sapiens
gctcggtcctcacccacaaagcccctctccacactgcgcacctaggcctgagctcacacacacccaggcccatgctcacggccctgtcacctatgcactcagacctggcaccacactccacgacacacggtgagcaggctctcaaccatgacagcagcacaggatccttgccctgggcttgctggagccctggccctgaaagggagtatggtgaggcctcctgggaacctggctagggcaatggtcagggtgaaactccttcccaatcccagcagcttggtccctcaagatcccatggggagaatcgccgtgaaccttggctggccaaagaacaagcatccagcaccacctagtggtgtcctggagggggttgggggttggtaacagaaggggaccccctgtatccctaaggcctgtggtccctggtctcccaggtagacagagggcttcaggacccagccaggcagctggggatgtggggaggaggctgatggggaggaaacaggcagctgtcctcccggtagagctaagagcacactcagttccaccccagttcagctccaggaggtagatggggctgcccactctcgagtcccagatgctgggaggccttccctagtacagactccaaggctggtgaggttcaacagggggtgggctggccacatgattctgggcccacatccttcatgtccaagttcaagaagttgaaaagagaaaatcatctcaaagttgagggagaagggagccaacaggcggggcaggatcccactggggtaaagcagcctgagttgggggatgagc

SEQ ID NO: 9928 - DNA, 682 bp, Homo Sapiens
cagctatgagcgggagtcgggaatgagtggggtgcgtgctatttgtgtgatctgggtgtagagtgccatgaggtactgcgggggcagggagtctccatgtggtgagcctatctgccgtggggcacctgcttcggccagatcagtcaccctccaggaagcctggcccctcttgaaaagcccccacaacttgctcctaagagctgagctgactccccgcaatccgggacacccagcgtggcatgtgcattcctcccccgttcagcctgtggtgtttcctcagcagcctgaccgactcctcccccattctctcctgaccctctggctatctcgatagcaggtcacctgtgagtctttacactcaaaggaaatagaacagcagggaagggaactgaaaagcagtagaagaaacagtcagagatgcctcactgatagacaggaggccgaacaggtaaaccccagaagtggagattcccaaacggaaaattccagaaatgggcgctccagctctgtgctaagctggggacgagtgtgagtgtgtctgcttgtccaacatttgcacaggcagcaaggcaaagcaggtgtgctcccaaaggcggagtctgaggagggccggcacgcaacggcagcctcaacagaccactcctcccgcaacccaggcctcttcagacttcaagcgatgaca

SEQ ID NO: 9929 - DNA, 490 bp, Homo Sapiens
agcccggtcctcacccacaaacccctcgacgcggtggtttcttggtcggtgggtgactctgagccgtcggggcagacgggacagcactcgccctcggggacttcggcgccggggcagttcttggtctcgtcacagatcacgtcatcgcacaacaccttgccgttgtcgcagacgcagatccggcagggctcgggtttccacacgtctcggtcatggtacctgaggccgttctgtacgcaggtgattggtgggatgtcttcgtcttggccctcgacttggccttcctcttggccgtgcgtcaggagggcggtggccgctaagaggagcaggagccggaggtccacaaagctgaacatgtctagaccctagacatgtagactctttgtggctggggagggggttagcgtccgctcatgcgtggcctcacactccgcgtgcctcctgctccgaccccgaggagaaactcccgtctgccgcgatgagagtccat

SEQ ID NO: 9930 - DNA, 373 bp, Homo Sapiens
cctcctctagtgtaagcctacacattacattgtgatactgcagctcaaattcagaatggcaatgatacatgatatcatggcctagatccttgagagggacctggctttccttttaaaagatattttactgaagagctaaaaactggccagtgtggggttagcagatcgaataacttgaaatagaccgtgcagtattcctagcactcaatgtaatcaccctatttgtgacagagaaagggaaaaaaatataataagatcatctacctataatttgaataattttgagctatcaaaatgtctttgtaattttcacaaccgctgtccattgtttgaggatgttacctactaaactgaaaacattcattccatatct

SEQ ID NO: 9931 - DNA, 652 bp, Homo Sapiens
ctagagtatgcacatggtgatgatgtgttgggttgataaagcactggctcagtcctacaggcactaaacttcaatggatactttgttaactatagttacactaactttaaagaaagttcttgatacctgttctttattcttaggaactgaagaggagggaactccgatgtttgcataatcatcgccttcccatgttaagaggactcaccctagtaggcttaatgggttttgtatttaagttggcttgtttacccaagagacactaaagttgttcttgcattaattccccttaaaattgccaagagataagaggtgggaagacaaaaagggcgcctgattctattcagtagatgagaaaatagatttacagaaggtaactgtgaaattggaggagtaatgtcaggaaggccttgtcaggacaggcaatgtcaaggaagcctatcccttctttgtcagactccagaaaggattgagtacatctgttcttcacagatccactttcctaggcagatgccagtgccttccaggtttgtatgaaagcaaatagctgctgacgatgggcagagggccccccgcaaaccactagggcgcaggagatggcaggaatcctgtgtgatattgttagtcgctacgtgtaggctatccgcgcgtt

SEQ ID NO: 9932 - DNA, 531 bp, Homo Sapiens
  misc_feature (388)..(412): n is a, c, g, or t
acatttataaactgaaaacagacatgttttctttacaacaaataatgcacagaaaaatgcagcctataatgtgctagttgggtagtcaaagaagtaagatggctgaaatttacataagtaatatttcataatcttagaattctctcaaagcatgtgaaataggaagaaggaagttcttgcccagaatcttaggaaatcaccactgttcggttataatcactgcctcctgaatcgttgaggagtcttttaaattagatttttgttttgttgtctcccaagttaatattatatttagatatcagagagtcaggcaaaaaggaaaacttttatctctagggaaaaaacatttagaaaaatgtattcagtgtatctaatactgaaatgcggnnnnnnnnnnnnnnnnnnnnnnnnnctatagacattgacatggaaaagagatttaatgttttgaaaaaaaactttatattaactgagtaacatcctcctgataagaagtactatattaaatataaacccattatgttataagtt

SEQ ID NO: 9933 - DNA, 488 bp, Homo Sapiens
atccccccagttacaacagctaggggaagggttttgtgtggaaaaacgccttggagtgtgacatttctgcgagaatgcttaaataccgatttcccgcaggaacaatggcgctgtcttaagtggcacagtggagcagctctgaagatgcaaagatacacgaaaaaacttccagaacatctgggagaatatttaatggaaaatcgcttggttaaaacctgacacttttaacagtgaacagcgttctgagtgtggacgagtagccagtgaagataatgaatgtcgaatgtgactgactagcagcttcattttgaatgagggtcgctgtctgcccattgatagaggccagattgtcttggaagttccaaagttgcaacgatttctggctagtgccacgaggtttacttgactgttgtgtgaaaagctgataagaaaaccatccagaaaaaagctcttcgttttacaaacatgaaaataaaacatgtaatttt

SEQ ID NO: 9934 - DNA, 796 bp, Homo Sapiens
  misc_feature (569)..(623): n is a, c, g, or t
gggaacattccagcactttctatctggcctccttgtccccacactacgcccccccaccctcgccagggcttcctctagtgacactgttagagctaatctctgagacagggaaggcattactcacttaaaacccaggctgagtcctggccacctgctggattgtgacataggaggtggaatccactgaactgctacttctgcacaggctccttctcctggggctgtacccaggcccagccctgatggctcaccctgtcaggcaccagctgctccctcctgggctctcacccacatgcacatcctccttcatagcatcacattacctgcgtgtttccccagacaaaagcacttccccattcttgaaccttgcctaccctgggctgagctgacggcaatagatttaatgacagtgactcccaggaagggggtcctgtgacctttgcgcccttaataagaacaaaaaggtggaattggtgacctaggaaaactgttgaattctaaaaagaatgaagttagtttctaacccctagtaatgttccctttttattttttgagtcttgccctgtcannnnnnnnnnnnnnnnnnnnnnnnnnnnnnnnnnnnnnnnnnnnnnnnnnnnnnngtttagccgattctcctgggtagctgggattacgggtgtggtcccaccccaccttagcccctggggcataatttgtactcacaaacaaggtttttgcctagtttggcccaggcctgggtcctcaaattcctgggctttcagtggatcaacccaacctcgggctttccacaagg

SEQ ID NO: 9935 - DNA, 881 bp, Homo Sapiens
  misc_feature (733)..(733): n is a, c, g, or t
catacctggaccttctcgacctgggctgccccgactgggtctgggggacctggggcccagctgcagctgcagcagccttggtctttctccagaaggatgtcaggcttgcccaggaaaggggctgtgctgtcgtcctggtgtcagaagaagtgaggatgcctgcaggctgggactgctgctggggacgtttgggttggaaggaaggcggcagtcagacttgtcctgtgccggcactgctggggaggcccctccttcctgcagagccgtcccctcatcactgggttgattactccttagagagctccccactgctcagctgctccattccctaatggtttgccctccaaacccttccaaagcctcccagggagagaacgggaccctggacagagtcttgagctggaagcgtagggctgagctgtgtgtgactatccttttgctatggatgtgttcaagcagatctgatgtcctcgcctgtctcagcagcgggacccctgtttcctctttgtcttgcccctggattgcctggaagcaaatttcacgcctttctttatgtcacctaaaaatattttcaaacccatctcctaaaaaaatcagtggtttttttaacctgaccgaagtaccctaatgtaataccccgcatggtaaaactcaccagcaaggttttttccttgggagaaattaagcccccaattacccaaatttgaaaaaaatcacaaattcccccagttcnacaaataaaaccccccaatacccatatacccccttggccgggcccgccctttggggcctctcagagaaaacttttcctaacacccttttctttttggggcgcgcgggggccccaacaagggtaaaagtgaaccttgggtcctataccg

SEQ ID NO: 9936 - DNA, 759 bp, Homo Sapiens
  misc_feature (359)..(395): n is a, c, g, or t
  misc_feature (584)..(595): n is a, c, g, or t
  misc_feature (624)..(634): n is a, c, g, or t
  misc_feature (699)..(707): n is a, c, g, or t
ccgactagataaccgtgtgagcttggactgagcgttggtggttcttcccaaaggaaaggaatttctcccggcctgccaggtctctgggccttcagcgcgggtcctggtgctgcggccacaccaccctggggtgctcattgacagagctgccataatgaacttgaaaggacgggaatcacgagggaagctggggctcccctgcccacaggagaggatccccgttcttcaagcttctctgctcagtgtctactaacgaccgacatttgctaatgtaaataatagtaaattattgagaattctaattcttttacacagtctgtttttaatctattttaattaaataaaatctatgactctannnnnnnnnnnnnnnnnnnnnnnnnnnnnnnnnnnnngaaccaacgagacgcggactagtccatcacagacccaaacacacagaaccactctatcagaagcgtggattaaagggtccattcctcgggggtggcctgtggcaggatcccggaatgggtagctggctgtgtggggcggccgcctcccggcccccctgaaaaaaattttttgtaaaaacccattttgtnnnnnnnnnnnncggcgcccccctaggggggaacaacgcannnnnnnnnnnaaaaactcgtgtctccccagagggaaacaccgcgcgcgcaaagagacaaaggggcgctgcggagnnnnnnnnnacccaacataaaaaaccgccccgcggggcgacaacccccgattcgttttctt

SEQ ID NO: 9937 - DNA, 1011 bp, Homo Sapiens
  misc_feature (945)..(945): n is a, c, g, or t
gggagactcacgccgattctctctcagcgtagggctgtgagggcgcagtccaccgccaggagccttccggtttctgcgcggtgcgcgacctcgtcccgaagcctggggatacaccctctcgagagcccgctgtcgccctccgttaaggtcgaacccctcacagttgctgtgggcaactccagcccaacattccctcgctctggttctcgccccattgggaaactcggccccacgcttcccacttttctggatgaggtgtcccctttctccccactaaaatgtcaaataacctacggagggtcttcctgaaacccgcagaggaaaattcaggcaacgcctcgcgttgatccataatgagatggcatcaacatcagataaaggtgcccaaggaagaaatgacaagaaagattctcaaggaagaagtaataaggcattacatctgaagagtgatgctgaatttaaaaagatatttggccttactaaggatttgagagtgtgccttactcgaattcctgaccatttgacctctggagaaggtttcgattcctttagcagtttggtaaagagtggtacttacaaagagacagagtttatggtgaaggaaggagagagaaaacagcagaattttgataagaaaagaaaagcaaaaactaataagaagatggatcacacaaagaagagaaaaacagagaatgcttataacgcaatcataaatggggaagctaatgtcaccggttcccaactcctaagcagtattttaccaacttcagatgtgtcacaacataacattctcacgagtcacagcaaaaccagacaagaaaagagaactgagatggaatactatacccatgagaagcaagagaaaggcactttgaaattcaaatgcagcttatgaacaaagtcatttcttcaataaaaattataccgaaagatattttcccaggnacaccacccggatttagagaaaacatttccagatggaaaaataagaagactttagccaggtgcttg

SEQ ID NO: 9938 - DNA, 966 bp, Homo Sapiens
  misc_feature (639)..(639): n is a, c, g, or t
  misc_feature (849)..(849): n is a, c, g, or t
  misc_feature (934)..(934): n is a, c, g, or t
  misc_feature (936)..(936): n is a, c, g, or t
  misc_feature (939)..(939): n is a, c, g, or t
aatactatcgcatacagtgtgatttgccaatttggggagtaagtcgttgtgaggaaggctcttagaatagacaaaattagggcgggtggcaccaggggaattgggtccggttggattttagagggggtgggatatgaaggttgttcagtttcaaagaggggtagttagtagggtaatgtaacccatctcgcggggaagggtaaagaaagggtcgggggaagtgggggcattctccaacgtttgcgggttcttgagggtttccatttttaggcataaaccgcgtcattcagttcctctttctgtcgctttttcacaagcacactgtctgccacaataagcacttgggggtggtgtttcgggaattagaggtcacaatgggcaggggtcagattgtagtttgtgggcccttaagcaaggaggggctggaaagagtttgtaatcgtggcaggcttctggtgcacgcagatgtgcaaagcgtttgctgtagtattgtggagagtgacgtttcaggtctaatcctgcagatgtgagtcagtcgggacttgccaagagccacacggtttctatcaagtactgcgagtccaatcaccactgctcgcacaccacccaggaagctgggcttcctcatgctccacggangagggacaccagggtacacattcctttgggcaaatcaagttttccaggtcctgagaaccacaaagtctctggaaggatggggagccatgcttgttcagcacatactggtagatctctgtttgcctgtctagagtttccacaaccttccactgcacaaagtcctcgtcccacaggtggcgctctctcagcacgcggttcaggaccactganggggggtgcttccacctccacagaagccttccacagcttcagcgggttcccgtcgcccacctttttgaaagcaagatctgtattngntcngctggagcacgtgacccatcctttgaa

SEQ ID NO: 9939 - DNA, 513 bp, Homo Sapiens
agcgtcatcgtatgcgtagagaggtttggggaatatgagggcatgtgcggttttgtcttctaggcgtaggatgagggttagccgcgcaggtgcggtgaagggaggatggcggagttggtaccttttgcggttcccatcgagagtgacaaaaccttgctagtgtgggagctgagctccggacccacggacgaggctttgcatgtgagccggggccaggatggagggagggatggagaaagctgcccacccgctgacggggagttccggagtcctgcctcagaccctcacctgcctgagcctccgctgaaggactcttaattataaaggggatcccaactgacaactgacgacccccaacagatttgtagagtcccggagaggtatctctccaccttcagaacgttgtaccttccagtgcttcttaaagtttaggattttaagaggtaaacctgttgattaagtgggaagtgttttgaatcgcatccttcgcgaagagaggtttagggatatgag

SEQ ID NO: 9940 - DNA, 952 bp, Homo Sapiens
  misc_feature (176)..(176): n is a, c, g, or t
  misc_feature (867)..(867): n is a, c, g, or t
  misc_feature (885)..(885): n is a, c, g, or t
  misc_feature (887)..(887): n is a, c, g, or t
  misc_feature (889)..(889): n is a, c, g, or t
  misc_feature (929)..(929): n is a, c, g, or t
attcgtgttcctcaacatactctaccagcaattcaaagagttggagggtcttcacattttccgtggaagaaggttctccagaggggcagcggccagcccatgatcatctggaaaggatccctcattcatatcccaagatcgctgcatagaaatgatttgtcatgaggatcatgtcnttcttcaggatatagggatttaacccccatggactctgccgcgctgctgaacatcctcccacataaaatgaactatgatacgacacatgtacttaccactccggccttcctgcttcattcggactagacacatccagacgtggagtagggttataagaaaccatgaattgaatgtatcaggcatctgacaccttagaaagaattcctcgaagtcagttttctccacacagctagtatacatgcgcagggccgcaatcttaatcttccatttactgtatttcaaaggtcccgtgaatcccatggcttctattatctttgtgaaagcaccaaccttctcctcaacaggctgtggggaatctttggtagtagaaagcttacgtgtggtgtgatacttcctattcagctgtatgtctattccaggaatctgttctgatccaccacatgcttgggactggctcatctggagccactgggaagtgcgagacagagccctgtccccctgtccttgggtaggagacacaggtatcaatcggctgcatactggaacccactgagaaatgctagtctggttcctaaggactcgcaccagcaacgccatgttcctcaataaccatttcctgggtgaagagtgagtttccggtgtccccttttctacgtcctccttttgccggcgaaagactggcaagggggngcaggcgcaaagatggtncntnacgcacgcgctgttgttttctcggctgtgcaccaggctgntctgcccgggcacgctctccctg

SEQ ID NO: 9941 - DNA, 1003 bp, Homo Sapiens
agtttagtttttgttgccggagatcggctatttggtccttactgtggtcatggattccctgggcctctaaatattgaaacccagagtaatgctcttgatatcatcttccaaactgatctaacagggccaaaaaaaagggctggaaacttcgctatcatggagatccgatgccctgccctaaggaagacactcccaattctgtttgggagcctgcgaaggcaaaatatgtctttagagatgtggtgcagataacctgtctggatgggtttgaagttgtggagggacgtgttggtgcaacatctttctattcgacttgtcaaagcaatggaaagtggagtaattccaaactgaaatgtcaacctgtggactgtggcattcctgaatccattgagaatggtaaagttgaagacccagagagcactttgtttggttctgtcatccgctacacttgtgaggagccatattactacatggaaaatggaggaggtggggagtatcactgtgctggtaacggcagctgggtgaatgaggtgctgggcccggagctgccgagatgtgttccagtctgtggagtccccatagaaacctttgaagaaaaacagaggatacttgggaggatccgaatgcagatattaaaaacttccccctggcaagtctttctttgacaaccccttgggctgggtggcagccccttcattaatggagtacttggggtggctgaccgggttgctccatgtttggggggagggaaaaacagggacacccacaccattggtatggttgggggtccaccccttcagggggaagaagggccccgggggttgggtcaaaattccccaaaaattgcttctcctcccctggagccctggtggtttaaatctccctcccgcgggaagggggaaaccttggcttgtgaaaatttcccctatggaagggccgtgaacccccaatgtttttgcaaaaaacgggacaactatggcaactgtgggggcgcgagacttag

SEQ ID NO: 9942 - DNA, 831 bp, Homo Sapiens
gggttgccaccttccttcaacagtcaggagatccaggttcttagagtagtaaaaaatttcgagcatctgaactctgactttgacaggtatcttctcttaatggatctccaagatagaaatgaaaaactcttttatagagtgctgacatctgacattgagaaattcatgcctattgtttatactcccactgtgggtctggcttgccaacaatatagtttggtgtttcggaagccaagaggtctctttattactatccacgatcgagggcatattgcttcagttctcaatgcatggccagaagatgtcatcaaggccattgtggtgacttgatggagagcgtattcgtggcttgggagaccttggctgtaatggaatgggcatccctgtgggtaaattggctctatatacagcttgcggagggatgaatcctcaagaatgtctgcctgtcattctggatgtgggaaccgaaaatgaggagttacttaaagatccactctacattggactacggcagagaagagtaagaggttctgaatatgatgattttttggacgaattcatggaggcagtttcttccaagtatggcatgaattgccttattcagtttgaagattttgccaatgtgaatgcatttcgtctcctggacaagtatcgaaaccagtattgcacattcaatgaagatattccaggaaacagcatctgttgccattgcaaggctccttgcagcttcttcgaaataaccagaaaccaactggtttgatcaaaaatactatttccagggggcctggggaggctggccctagggattgcccccctgattggggagggccc

SEQ ID NO: 9943 - DNA, 1153 bp, Homo Sapiens
ggggcgcgactacgctcataaaaggaaaaaaagcgtgtgcggttctcgacgtgccgccaatcttcgaacgcaggtctgtgatcatccgcagactccgaaaaagggttcgaggaacgcgcctgctcccctcgtcgcagtttccagcccgacgagcttgttttgtcccggactcggtgcccctgtagacaatggccctcgtgtctgccgattcccgcattgcagaacttctcacagagctccatcagctgatcaaacaaacccaggaagagcgttcgcggagcgaacacaacttagtgaacatccagaagacccatgagcggatgcagacagagaacaagatttctccctattaccggacaaagctgcgtggcctctacacaaccgccaaggccgatgcagaggctgagtgcaacatccttcggaaagctctggacaagatcgcggaaatcaagtctctgttggaagagaagcggattgcggccaagattgccggtctctacaatgactcggagccaccccggaagaccatgcgcagaggggtgctgatgaccctgctgcagcagtcggccatgaccctgcccctgtggatcgggaagcctggtgacaagcccccacccctctgtggggccatccctgcctcaggagactacgtggccagacctggagacaaggtggctgcccgggtgaaggccgtggatggggacgagcagtggatcctggccgaggtggtcagttacagccatgccaccaacaagtatgaggtagatgacatcgatgaagaaggcaaagagagacacaccctgagccggcgccgtgtcatcccgctgccccagtggaaggccaacccggagacggaccctgaggccttgttccagaaggagcagctcgtgctggccctgtatccccagactacctgcttctaccgcgccctgatccatgcgcccccacagcggccccaggatgactactcggtcctgtttgaagacacctcctatgcagatggctattcccctcccctcaatgtggctcagagatacgtggtggcttgtaaggaacccaagaaaaagtgatgccgcctggcagactcgccatcccccaacgacacagggcaggacagcagaggacgtgctgggattaaacacattccccctct

SEQ ID NO: 9944 - DNA, 934 bp, Homo Sapiens
  misc_feature (894)..(894): n is a, c, g, or t
ccagtgggttactacttttggaatttcggacatcgatgaagagttcatcttgaaacagtttgacattgactatgagaccaaaccaagccatgatgcgctccacacgatgaagctaaatcaggttcctctggagctaaagcgtagtgtggggctcagtaaactgcaggagacagagttcttccagaaactaggctatgagaggaaactccagaaaccacagaatccttataagccaaagtgggtgaagatgaggtatggagcatggtatttgaaccccaagttgtggaaaaagcaaagagtagacgagcctctggttgaccctgaggtctcacataaggctcaagaggagaattttaaaaaggagctgcaggaacagagcatcttcaagaaagcaatggacatttgatttctaagaccaaagaccttggtaaactgcaagcagcatcatggagattgcagaatccttccagggaagtctgtgacaattcaagagaacatgttccttctggacagtttccagacacagaagctccagctacctctgagaccagtaactctaggagttactctgaagtttcaagaaatgaaagccttgaatctcctatgggagaatggggattccaaaaaggacaagagatatctgctaaagcagctacatgttttgcagagaagttgccttctagcaacctgctcaagaacagagctaaagaagaaatgagcctctctgatttgaacagtcaggaccgggttgaccacgaggagtgggaaatggtgcctaggcactcatcttggggggatgttggtgtgggtggctgtcttaaggctccagtgttaaacctaaaccagggaatggacaatggaagaagcactttggtggaagcaagaggtcagcangtgcatgggaaaatggaaagggtagcagtgatgcctgcag

SEQ ID NO: 9945 - DNA, 487 bp, Homo Sapiens
ttcttagtggggaagggatcctggaggccgtccatcacgcccttccactttacgaagaccagcttatcgggacaatcagtggaacccaaggcagtcagaagttcctaaaccagaagatggagagccgccaagaagacatgagcagtttattcctatagcagcagataaacgacctccaaaatttgagcgaaaatttgacccagctagagaaaggcctcgaaggcagcgtcctactcgaccaccaaggcaagacaagccacctcgatttagacgcctaagagagagggaggctgcttcaaaatcaaatgaggtggtagcacgtgcccacaaatggcacagttaataatgtggctcaagaacctagttaatacccttggggatatttcggggaataagacaccagatttatctaatcagaactcttcagatcaggctaatgaagaatgtgaacgcttctgatacagtgatttcaatgagagtacagatt

SEQ ID NO: 9946 - DNA, 437 bp, Homo Sapiens
cccgtgtatactcacttagaatcaccacaccaaagtttcaggctcgtggtaaaaattaataaggtattggacgtaaactaaagcataaggaacgacttagctgaatatcagagaacttgtgaagatcttaaagagcaactaaagcataaagaatttcttctggctgctaatacttgtaaccgcgttggtggtctttgtttgaaatgtgctcagcatgaagctgttctttcccaaacccatactaatgttcatatgcagaccatcgaaagactggttaaagaaagagatgacttgatgtctgcactagtttccgtaagggagcagcttggcagatacgcagcaaagagaagcaagtgcttatgaacaggtgaaacaagttttgcaaatatctgaggaagccaattttgaaaaaaccaaggctttaatccagtgtgacc

SEQ ID NO: 9947 - DNA, 812 bp, Homo Sapiens
atcatttctcaaatacatgtgtccccacctccattcctgtcttcttcaatctattacccacagtatagtagagtgatggagctacaaatctgacatttctgcccaatttgaaatccttcaatggctccctgctgtcttcaaactaaaatccaaactcctcaatacagtataatagtctgtccctctccagccacatctggacacaacagaatcctgatcttccactttccaaattaaaggaccatgctctttaacctgtctttgggtgtgataatcggctggcctgaaatgttatgtcctcccttagccacctggtgaactcatcccactggattctgctcaactgtactcttctctgacctctctactcagagttaatctgtgtcattatatgctcagaggcccttctccgtacctctgttatattaatattgttgtagtcatttatatgtctactccaatagaccgaattatatttaatttgtattaccagtatttggcacataagaatactgacacttaacaaaacttaattaaaagattaaatgaattagtatatttacccacttaatggaagaggactttcttgaggtcccttccagctcagttactctaagatctcatacaaagttcccctctggttactactttctcttcttctacatattcttctattttatcctttaacaacagctagtttctttcagatgagcccttcgaaagaatgaaacaaagcactttaaaaagaatttttagcgtgggcctggtggctcacacctgtaatcccagtacattgggcggccaacgttgta

SEQ ID NO: 9948 - DNA, 666 bp, Homo Sapiens
tgatcaagcttcggcaactgctggcccttacgccctcgggcccggtggaggcctttgactttgacgagtaccagccagagatgctcgagaagttccggaacatgcgcagccagcacccctacgtcctcacggaggacaccctgaaggtctacctgaacaagttcagacagtcctcgccggacagcgtgaaggtggtcattcattttactgatggagcagacggagatctggctgatttacacagagcatctgagaacctccgccaagaaggagtccgtgccttgatcctggtgggccttgaacgagtggtcaacttggagcggctaatgcatctggagtttgggcgagggtttatgtatgacaggcccctgaggcttaacttgctggacttggattatgaactagcggagcagcttgacaacattgccgagaaagcttgctgtggggttccctgcaagtgctctgggcagaggggagaccgcgggcccatcggcagcatcgggccaaagggtattcctggagaagacggcgtaccgaggctatcctggtgatgagggtggacccggtgagcgtggtccgcctggtgtgaacggcactcaaggtttccagggctgcccgggccagagaggagaaagctctcgcgagtcccacaaacacagcgcaatt

SEQ ID NO: 9949 - DNA, 541 bp, Homo Sapiens
cacctctgaccgagttccccactgtgcaatggaagtcatgggtatgacacggtgtgattcacaagaagtgccaggatcagggcctggcgccgggtgtgcactcaagcacatggtggggggtgggggaggcactcgacacctccagctaagatggctgctctgtggacaccagtatgcgagaggtgtaaccctgtaagctcctggccagcccagcacctctacacagtataaccaagccccaccaccttctgagggaccaaccggaagaatcgcaccaccctgtaaccaagtttccctgtcacaaagcccaggcctctcaggcccctctcatcccagcgtgaatgtcctataggcagtcttccgtcgctgccctgctctatctacccaggatcacggactgacacgctaccaacttcacttatttaactagtcctgcgaggggcatcatccgctccatgtccacggccagtccccagagcccaggagggctcgcacacaggcgctcggcagatactgagaaacaggaaagtcagtgcgtatt

SEQ ID NO: 9950 - DNA, 676 bp, Homo Sapiens
tgcaaaagggctatgtcttagccctgtcataatccccacttttaaaggacaaataaaagatcttccctgacggagttaaccttcccaatcccactacagctacactttcccatgcaccttggcaaatgtgtaacaacttccatttctcagaagattgtggaaaagaaagaacgcactttcaaaataccacaccttttattcctgaccataagaacagttgagagaaacacgattcctccatcagttaagagtattttaacaggatcttacctttattttcatctgtctttacaacttggacaaaatctcttctaatgaccatatttgaatgcgggagcccgtttctctcggttttcatcaaagatccagaggttgacccgagcccgtgtgatggcggtgtacagctgcttcagctctccgttgaggagcttgtacatttctggattcaccatgagagatcgaccctgagaagagcctggtttgtccaggggtacttcaaccaatggccggttttcctctctggagtcagttgaggtaggtgtgaatgaggaaatgatcttccattccttataagcctcacgaatcagtaaaaaagttgtaaaggaggacatcatcaaattctaagccttttgctcataaattgttagcacaagtgctaacccccctagttgctgtt

SEQ ID NO: 9951 - DNA, 440 bp, Homo Sapiens
aatacgcactgactttccccatatcttagcatcacaccaacaggggttcagtataacgacagtgtattacaatggaaagaactgtaaaatgcagagtctctgaagaagagtcttaaggaagcccaaagtcaacaatgaagataaaaacaaggacactagagaaatttgagtcctgtggcacctacagttacagcaaacattcatacaacatgtctggggtttaaaaaattataaagcatgccagaagtcaagaaaaacacaatctgaagggggaaagtaagaatcagactcagaccttgatataacacagatgttggaattatcagacaggaaacttaagatgactatgattaacatgttaaaggtcctaatggaaagaataggcaacatacaaaaacagatgggtaatgtaatctgagagataaaaacaacaaaaataa

SEQ ID NO: 9952 - DNA, 473 bp, Homo Sapiens
acaatagcactgactttccggaccaagtgagtgggcctgatcagggaaggtttgccatgccactcccttgcctctgtcccctgcctttgggagctggtgatgtgggaataaggctggatgggaaaatgtggcatgagccctggacctcaggggaaaggagtgtcatgctcctgatcccgtcagccactgcagctggacagtagggcaggggtccctgctggtgtgtggtctcctttgctgcagacttggcagggttctgtgtgtgcaggtatgagacagagctgtctctgcgccagctagtggaggccgacatcaacggcctgcgtaggatcctggatgagctgaccctgtgcaaggctgacctggaggctcaggtggagtccctgaaggaggagcatgatgtgccatcaagaagaatcacgaggaggtgaggctggtgccatgtgacttcccagggaaagtcagtgcgtatt

SEQ ID NO: 9953 - DNA, 813 bp, Homo Sapiens
tattgaaaaccttccctttgaattacagagaaactttcagctcatgagggacctagaccaaagaacagagggtggacaaacacattcggcggctggacacagacctggcccgttttgaggctgatctcaaggagaaacagattgagtcaagtgactatgacagctcttccagcaaaggcaaaaagagccggactcaaaaggagaagaaagctgctcgtgctcgttccaaagggaaaaactcggatgaagaagcccccaagactgcccagaagaagttaaagctcgtgcgcacaagtcctgagtatgggatgccctcagtgacctttggcagtgtccacccctctgatgtgttggatatgcctgtggatcccaacgaacccacctattgcctttgtcaccaggtctcctatggagagatgattggctgtgacaaccctgattgttccattgagtggttccattttgcctgtgtggggctgacaaccaagcctcgggggaaatggttttgcccacgctgctcccaagaacggaagaagaaatagataagggccttggattccaacacagtttcgtccacatcccctgacttgggctagtgggcagaggaatgcctgtgctggggccaggggttcagggaggagtggatggcacagtgctgtcatcccttctcctcccggctccccactcccggtgctgaggctgcatcagaccctctgtgccaagaggattcatcctgggagagggggcaaggtggaatgcagataactcacatgtaaaaggaacttgggtaggtaaataaaagctatacatgtt

SEQ ID NO: 9954 - DNA, 1048 bp, Homo Sapiens
ccccgtccaggggttccggtctttggttccggttagggaaaccagaaggacccccggaccccccggcaccctagcagcatggaaacacctgttgccccagatacagacaaaggctctgctttgtctcccttgtgctggtttttggcagagacgttaaagggctgaaggcctgtgggacagaaatggggagaaggagtgggatacccaagatgcccctcatacgcagcgtggtcaacagtgctgagctgaggggcaagcctggtaggttgggctcaggcagaacctgaggctgtagggggcctgctgtgtccgcagccccctctgcaactcagaagtccaggcctccgctccaacgccagcgacccctgtgaggcacaggggtggaggcctgtgtggctcaggttgccaaggcacccgccaggccttcagtcagagtccgagtcggaattctcttcttctgtcttgtgggctgtggtctcatctgcagagtccccttgtttgaggaatttggccacgtcgttaaagatcaggtagaaatcagttgcaaacacgatggtagcaaagaagccaaacaccccagcggctttggaagccccatccgagtacttggcgatggccgtgatggagatagcaaagtagatgagggccgcggtgacacagcgcaggaagtccatcatgggccagcacaagccctgccacttgtcattcagctgcatggcatcagcaaagaggaagtacaaggccagcaggaactccagcagaggcgctgtgaggaaggcagatgctgaggacgccacatagcagataaaagtgatgaatgagagacccgactcaggccagcaggaggcggcctttgagagacgcagaggaaagcccgcgccggcagcagggccgcggagcccggggaccgcggggccgggacgggagccgccaggcatggctcggcctccgggtcggggtcggggtcatgggggccacatggccggcggcggcggtagggccggggctcaggcctggcatcccctcttctcgcgcccggagggaagcg

SEQ ID NO: 9955 - DNA, 671 bp, Homo Sapiens
ggggagcaaaatggcgcgggagaaggagatgcaggagttcacccgtagcttcttccgaggccgcccggacctcagcacgcttacgcattccatcgtgcggcggaggtacttagctcactcgggccgcagccacctggagcccgaggagaagcaggcactgaagcggctggtggaggaggagctgctgaacatgcaggtggatgaagccgcttccagggaagacaaactggaccttaccaagaaggggcaagaggcctcccaccccttgtagcgacccggagagaaaaaggttccgcttcaattcagagtctggagtccggctctgaagccctccagcccagactactttggacccccagcatatagaatggggtggcagcagaagtcagcccagccaaagaggagaatccaaggcgagcctcaaaggcagttgacgacagcagtgatgacgaacggcagagggacctgccctgcacagagggggagtaggagagcagtgagggaggaggaaaaggggtacaaggggaagactaagaagaaacctgtgggtaaagaagcaggcaaccagcaaagccctcagtcagtaggaagcaggccagggaagaaagtgaggaaagcgaaggcacaaacccgttccgaggacagccaactatactataccaaaaacataa

SEQ ID NO: 9956 - DNA, 701 bp, Homo Sapiens
ggggcagtcgctgcgccccgagcccctctccggctcctcaacagagggctcgccgccgccatgtctaccgcccagtcactcaaatccgtggactacgaggtgttcggaagagtgcagggtgtttgcttcagaatgtatacagaagatgaagctaggaaaataggagtggttggctgggtgaagaataccagcaaaggcaccgtgacaggccaagtgcaggggccagaagacaaagtcaattccatgaagtcctggctgagcaaggttggaagccctagttctcgcattgaccgcacaaacttttctaatgaaaaaaccatctctaagcttgaatactctaattttagtattagatactaatagaagagaaaaattgtaacacactgaacaatagatactgtatgttcttaagactatgtatactagaataatagtagcagagtagggtgaaaaggaactttctgttctgaaagctaagcgactgtacgtgctactaaaaatgtctgacactgaaataattttactcaactatgttttcaacaagcaaaaatatagtattctaagattaaaatgtcattacaaaatatttagtgtgaacatttaatttaaacttgtctcatggaatctttaatttcaatgaacattacagcatatatatgttatttggccagacatcaaataaagttaaccatttaaaaatt

SEQ ID NO: 9957 - DNA, 938 bp, Homo Sapiens
ccttccccgttcgtgggtcacccagaggacagggcacatccccagcggcttgaaaacagagccgctcccaaaagtgggctagagggtccactcggcaaaagggatcatcttcccccctggcttgctggactcttggaaatgcgtctgaaagcccttgccatcccgtcttgtgctgatgacagcatgagccccggttgcaccttgctcagcaacaagctgcgagatcctcagcttctcactcataccccaccttgagctgctgacggcggcctggagaaccgtgtgtggctgttcctggatgacatctgctgtcactagccttcccagaacacccgctgcccagggttcctgctgccttccccggtggacagattttgcagggaagactgaggaaatgggagggggagctctgctctaaagcagaaggcacagaaggtggggtttttgttttatagggagactgcccagtgtgctgcaaaaggaaaaccaacaacagggagtgcccaactcaccccctctgcatgagcaaatgcagatggacactggactgtgccgactgacaccgggactcacacttgctggtcagtggacgagaggtaaaagcaggcaggattattacaggaataaatctgcacttccaaagaggcagctcccatgactgagttacaatgcttggagcccccgagggcagagtggcaccagctgggaggttgacactgcatcactgcttcggatgccctcacaggctctgactcgctgccaggtgctaggtgaggctggaagaacttccttccttcctatgtacaatgcaaacagctgccgcttccagtgctacccacacgggtgcagcctcacgggcacagcttgcggagcacgcagcggacactgcgtctcaccttcacgccacccgcgcacgcgccacgcggcctaacgcgcgc

SEQ ID NO: 9958 - DNA, 751 bp, Homo Sapiens
gggaggaggagccgccgagcagccgccggaggaccacggctcgccagggctgcggaggaccgaccgtccccacgcctgccgccccgcgaccccgaccgccagcatgatcgccgcgcagctcctggcctattacttcacggagctgaaggatgaccaggtcaaaaagattgacaagtatctctatgccatgcggctctccgatgaaactctcatagatatcatgactcgcttcaggaaggagatgaagaatggcctctcccgggattttaatccaacagccacagtcaagatgttgccaacattcgtaaggtccattcctgatggctctgaaaagggagatttcattgccctggatcttggtgggtcttcctttcgaattctgcgggtgcaagtgaatcatgagaaaaaccagaatgttcacatggagtccgaggtttatgacaccccagagaacatcgtgcacggcagtggaagccagctttttgatcatgttgctgagtgcctgggagatttcatggagaaaaggaagatcaaggacaagaagttacctgtgggattcacgttttcttttccttgccaacaatccaaaatagatgaggccatcctgatcacctggacaaagcgatttaaagcgagcggagtggaaggagcagatgtggtcaaactgcttaacaaagccatcaaaagcgaggggactatgatgccaacatcgtagctgtggtgaatgacacagtgggaaatctacctgggc

SEQ ID NO: 9959 - DNA, 1032 bp, Homo Sapiens
  misc_feature (908)..(923): n is a, c, g, or t
agaggagaacttaggctaggtacgaggcctggtttgaattcggcacgaggtactgggctccatcctgagctccatggagaagccacccagcctcggtgaccaggagactcggcgcaaggcccgagaacaggccgcccgcctgaagaaactacaagagcaagagaaacaacagaaagtggagtttcgtaaaaggatggagaaggaggtgtcagatttcattcaagacagtgggcagatcaagaaaaagtttcagccaatgaacaagatcgagaggagcatactacatgatgtggtggaagtggctggcctgacatccttctcctttggggaagatgatgactgtcgctatgtcatgatcttcaaaaaggagtttgcaccctcagatgaagagctagactcttaccgtcgtggagaggaatgggacccccagaaggctgaggagaagcggaagctgaaggagctggcccagaggcaagaggaggaggcagcccagcaggggcctgtggtggtgagccctgccagcgactacaaggacaagtacagccacctcatcggcaagggagcagccaaagacgcagcccacatgctacaggccaataagacctacggctgtgtgcccgtgggccaataagagggacacacgctccattgaagaggctatgaatgagatcagagccaagaagcgtctgcggcagagtggggaagagttgccgccaacctcctaggcgccccgcccagctccctttgacccctggggcagggcagggggcagggagagacaaggctgctgctattagagcccatcctggagccccacctctgaaccacctcctaccagctgtccctcaggctgggggaaaacaggtgtttgatttgtcaccgttggagcttggatatgtgcgtggcannnnnnnnnnnnnnnnagagtgtgaatgcacaggtgggtatttaatctgtattattccccgttcttggaattttcttccccatggggctggggtactttacattcaataaatactgtttaaccca

SEQ ID NO: 9960 - DNA, 784 bp, Homo Sapiens
gggcaacacacgaaggacccacagaaaacgtctgttacagctagaacggctgcacgaccaaaagaggaagatagtcttgggacccttgcatggtgtttcaaagggtggtgaagaactaaggtagaagaatacatgttcacttccagtgaacaagagcatgttcccaaactcaattttgggtcgcccacccttcactccaaatcatcaacaacataataacttctttaccctgtcacctactgtttattcacaccagcagcttatagatgcacaattcaactttcagaatgcagacttgtctagagctgtgtcattacagcagctgacatatggaaatgtcagtccaatacagacctcagcttccccattatttcgaggaaggaagagattaagcgatgaaaaaaaccttcctcttgacggtaaacggcaacgtttccattcaccccaccaagagccaactgtagttaaccagatagtgcctttatcaggtgaacgaagatactcaatgccaccattgtttcatacacattatgtaccagatatagtcagatgtgttccaccttttcgagaaattgcatttttagaacctagagaaatcacactgcctgaggcccaagataggtaataataatgtagattttagttttgccttttggggaatttagtataaataatggattaatcaaaaatattttatatcctgggattagtaaaacgggccctttttttggtgcaatggttaaaggactaattcagcctaattttcctgtcccaacatttattt

SEQ ID NO: 9961 - DNA, 593 bp, Homo Sapiens
cctcacaaagccaacttcagcttgtagagttcctcctgcctggtcctcagagcaataccacatctattgtctgaactcttcaggaaggattcaggactgctggccaagacttccaatggcatatgactgttcttccactgttatggccttgaagagagaaatcccctcctcctctgaatgatagtctcatggccaacattcttctgagaggactcttccatgctcacaggcacatcatgctgattttaaaaaaggaaagttggagagaaagaaagcagagcttctcctctgtggggaacagcttcttcatcacagtgcagttatgatatgttccctccttatccccctgaagccaaggcaatagatctgaaggatggtgtcagacatcataatcgggagccttgccctgggcttgccttagccagatctgtagtgtaacaaatgctcccacagtcacatgaaagaaaagctgccagaggttgcgcagttcatagagatacatgttgcatagacagattaagccaaaagtcaaaaaagatttgacattccgccacgccgtgtcacccgaaaggatccgtagagtcgcccaggcg

SEQ ID NO: 9962 - DNA, 414 bp, Homo Sapiens
  misc_feature (28)..(28): n is a, c, g, or t
  misc_feature (87)..(87): n is a, c, g, or t
acctatcccctgagcaagtaataggaanagaatgggcaaactggttgcacgagagaaaagagaatggagttgggagcaacacatganacttgcgttataacattctgctgtccagatctgccctactgtgctggtggtcggtctgtccctcttctcattagccactcacaggagaggtgcttgtgcactctgattcacaggggatgaactcaggatctcaaaagacatacaaaaactagaggtatgtatcacttaaatagctacgaaactcacaccgtgatctcccttctgacacacatctgcgccatctcttccaacataaaataaactgtttcaatggtttgtcagttatttttcaaatcactaaaatgtacaggtcatccaccaacaatttaagaaagacctaagaggcaa

SEQ ID NO: 9963 - DNA, 456 bp, Homo Sapiens
  misc_feature (348)..(401): n is a, c, g, or t
ccatccctactcctatgtgcttttgcattttacaaattttgcaataaaaaaacctatagagtccttattagccagacgcaacatgtcttctcttctggcctctctaagagagtccatgtcagtgtccggtaatggcacagccgatggatcaaatcgctgcagctgtttcaactgttcacatgagagcccagctcccctcattccttctcctccaatctgcggttcctggggctgaagctgaaggcaaggaaattttgtcagggcccaggcaacctgttcttcattttcggccagtgttatagtgcacgtgctataaaccagcacaccctctggcttcagcagctgaannnnnnnnnnnnnnnnnnnnnnnnnnnnnnnnnnnnnnnnnnnnnnnnnnnnnnaaacatcaaagtagcaaagttaacctttttttcacaaaaacagccaccacaaacg

SEQ ID NO: 9964 - DNA, 170 bp, Homo Sapiens
ttcaggtaggcaaacctgtagggcaggttggaacctgcagagaagcctgcagtgagggtggggtctgcactgagccttctcaaagggatgtgttttacaggcttctctcatatacacaatcagggaataccttctggattcttgggtgttttgttgttgttgagacagag

SEQ ID NO: 9965 - DNA, 685 bp, Homo Sapiens
  misc_feature (83)..(83): n is a, c, g, or t
aaacgacaggagcatcccaggaaggggttcccagaagtcagaatccaagatggatgggaagcacaaaatgcaagaggaaaatnttaaactaaaaaagcccctggaagaaagccacaggctgcaaccccaccctatggatgaacaggatcagctgctgctctctgaaaagccacagttgtgtcagctatgccaggaagacggcagcctaacaaagaatgtgtgtaagaactgcagcggaaccttctgtgatgcctgttcaacaaatgaactgcctcttccttcaagtatcaagcttgagcgagtttgcaatccctgtcacaagcatctgatgaagcaatattctaccagccccatcataagactggaggcccaagacctggaccaaaacgttttatgcaggctcctctgtacctgtgttttagctgtcaggatcctcatagagcccagttcttagagtcaaactaaagagttgataggaatttactaggtccagggagaaaaggcagtggttggggttactggaaattttgctcattttctctaatgactgtatgaataaaagtgaactttacttgagcctttctcttctaaatctaacaacctgatattgaagttctgctttatagcatatctttggaaggcaactcatttttatgattagtgatactggggtgggataccagga

SEQ ID NO: 9966 - DNA, 607 bp, Homo Sapiens
  misc_feature (70)..(70): n is a, c, g, or t
  misc_feature (99)..(99): n is a, c, g, or t
aagatattccatctccttgagcactgcagcagtttaagattttgtagagctactactgggttttagtganaaatttacgtaaatgaaggccctcatganccagatgctcatgctgctcacctcaatcgcatatgatctgcgaatgggacattcgggaatttaaatctttgagataagaatggcttgttgttaaataatgaggcaattatttcattctaggtccaatacgcaataaccatgtgtttcggttttccactcagcaccttcaaaactgttgcaaatgaatgtttactaacaagacaaaagagacaattataaaccaaactctcaacaaaattcggaatggccacatcacaacctgaaaaagaaacaagttcttaaaggacttgatcacttcctaacaagtccatcttcaacctgaaccacttctcttgtttaatcaaattttaaactttgccgaactgagttgttctacaccaagaaaaatcaatctctataccacctacattctctaatacatttaacatataatttcactcaatacaaggaggtttcttcttaacctggacatcgaaaagaatctttaacagatttcatcttttcaagc

SEQ ID NO: 9967 - DNA, 365 bp, Homo Sapiens
cccactctcctttagtaaatgttgagaaaatgcctttgttgtcatgctccaaatcccacactgggctgccacctgggagttctggataccgaaaggtctcctttcccagaggttctgctgttgccatcagaggaggatgaccgtgcttgaggaggaagaatgggttcaagatcatcatattcatcagaaggggacactaaatagaacccttaacctgttgtacttgccaaaattgagaatcagagatgtgtaaaatgcagcaaattaattataatgtaagttaagatttgctttttgccaagttgcaaagttgtatccacatcaggtcactgtaaaaatgtattatcttgtaaaacttatgtaaa

SEQ ID NO: 9968 - DNA, 1033 bp, Homo Sapiens
  misc_feature (42)..(46): n is a, c, g, or t
  misc_feature (48)..(48): n is a, c, g, or t
  misc_feature (63)..(63): n is a, c, g, or t
ttagaaaagtttctcgaagggcggaggcggccggacaggggnnnnntnctctccctccttctnccgtttggaaaacaaatcaatgtgaagagactttaatggcaaagtgcactggagagttaaaatggttacatgggtaatttaagaaaaaatttagtgggaaaaagggaaagggctgaactgccaaaataattttcttatccagttttacatttgctttctccatgtgctacaattatagacacctgatagttcctagccttagacataacttgcagcatcagccactctgctgcactttagatcacattagtcagggctagagcccagccccatttacacggcatctgatgaatggttagctgtggcagttctaccataatgccattttgctccaaagaaatccagttaagtggctgtccatggcccagtagtttcacctctgttgcccccagaatagctttgggatggccaaggaacagctgtcctgatgtgggccatttaagaaaaatggcatagactaatttttctttaggcttggatgtgtaccacacatctggggtgacagtgtcattctgggatcgccaggtatgggtttcataaatagcttctccattgacttttagccaggaccccatttgcctcagtcgctcctcaaaaactacagaaatggtgccatctagtgtgggcccaatattcatcaaaagatttcctccacatgaaactgtctctacaagttgcttcaccaattcttcaattgtaagatagtcagagattccagcttccctcctatagccccaggacagtttgtctattgtcatgcagttttcccatttatgtggcaaaagatgtcctgggttataacgatcactgcaggtatagaagccaccatgcttacagatgctaccagctccccaacgatcattggtgactactgtgccccgaactgggctttcataatataaccgggccaagaagcctgtacatgttccagtatagatccggttctcattagtacagctacagggatcat

SEQ ID NO: 9969 - DNA, 853 bp, Homo Sapiens
  misc_feature (639)..(639): n is a, c, g, or t
ggggaggccagtgccctgggccacctcagcttcctggagcagcagcagagcgaggccagcctagaggtggcttctggcagccacagcggcagtgaggagcagctggaggccacagcccgggaggacggggacggggacgaggacggcccggcccagcagctctcaggattcaacaccaaccagtccaacaacgtgctgcaggccccactgccccccatgaggctccgtggcgggcggatgacactgggctcctgcagggaaaggcagccggaattcgtgtgagctggggtggggctgggaccacaggtggcttctctctcgcctgctcctgtccctccagcacgtcccctgcaccacggcatagcttaggtgcgccgtcctggggtcgctgccgagagcgcctggacttcgacgtcccaccagcgggcgcctcctcccagaggcttccaggagcacgagggccttgcggcacaggactgtgccctgtactgtcccctgcaccccggctcagctgagctggggaacactgctgtcgtgtgaagtcacagtggccttgttggtgcccacagggctgtgtggattggaggaactgtccctggccagggcatcccccaggtcatcccgggggaaccaggaggnagggcctggcctggccctctccctacagggtcctgcgccagggaactcccgaaaagccttctggggccctcgcgggtgggggccggacacccgggggtcggccggccggttctcgcagtgccgggagggcccggggccggtggaacggcgccctgcgagatcatccgaccgcccctcccggccggttgccccccttgcctccgcgcccgcgccc

SEQ ID NO: 9970 - DNA, 500 bp, Homo Sapiens
agattctaatctgagtgagttactgagctttggtccactaaaacaagctgagctttggtccactaaaacaagatgaaaaatacaagagtgactctataactctggtctttaagaaagctgccttttcatttttagacaaaatcttttcaacgctgaaatgtacctaatctggttctactaccataatgtatatgcagcttcccgaggatgaatgctgtgtttaaatttcataaagtaaatttgtcactctagcattttgaatgaatagtcttcactttttaaattattcatcttctctataataatgacatcccagttcatggaggcaaaaaacaagtttcttgttatcctgaaactttctatgctcagtggaaagtatctgccagccacagcatgaggcctgtgaaggctgactgagaaatcctctgctgaagacccctggttctgttctgcctccaacatgcataattttatttgaaatacataatctattaactatg

SEQ ID NO: 9971 - DNA, 860 bp, Homo Sapiens
  misc_feature (672)..(672): n is a, c, g, or t
  misc_feature (764)..(764): n is a, c, g, or t
  misc_feature (771)..(771): n is a, c, g, or t
gggacactggtgggggagagtccgacgcgcctggctaggagcgccgaccgcagggcctctacggaccttactagaaaaatgaaacctgatgaaactcctatgtttgacccaagtctactcaaagaagtggactggagtcagaatacagctacattttctccagccatttccccaacacatcctggagaaggcttggttttgaggcctctttgtactgctgacttaaatagaggtttttttaaggtattgggtcagctaacagagactggagttgtcagccctgaacaatttatgaaatcttttgagcatatgaagaaatctggggattattatgttacagttgtagaagatgtgactctaggacagattgttgctacggcaactctgattatagaacataaattcatccattcctgtgctaagagaggaagagtagaagatgttgttgttagtgatgaatgcagaggaaagcagcttggcaaattgttattatcaacccttactttgctaagcaagaaactgaactgttacaagattacccttgaatgtctaccacaaaatgttggtttctataaaaagtttggatatactgtatctgaagaaactacatggtgtcggaggtttctaaagtaaaaatcttgtaagaaaattgtcaaaggggctaatgctacnaggctacactcttccctagagttgaaatattttgttgctgcagccgagtgaccctcataaatactggactgaaaaaacattgttatactacnagtatantggaccatttagaagattacctttgaagctgagaatcccaccactgcacctcccagcctggcgaacagaagaaagactcccatcccaaa

SEQ ID NO: 9972 - DNA, 1274 bp, Homo Sapiens
  misc_feature (70)..(78): n is a, c, g, or t
  misc_feature (381)..(405): n is a, c, g, or t
  misc_feature (694)..(714): n is a, c, g, or t
atattcattgccaggttggtgcttgatgggggtccgctgaaagtttaagggaccggttcccggacccggnnnnnnnnnccaggcggcgaagggggacagcagccccagtggaccctgggttaagatgtgtggtgagactgggatctggaaaggaggccagagccctggtatgcatgatctgcccggaatgttcccagaagaccccaggagcggacttgctgagagcccctgaggggcagggaggactcccggcccagaatgtctgggccggaggactgggctttgtgcagaggtggtgaagagcagacagaggcaggccagtcatgctgggggtgggagctggctcggaggtgggagtcccagggactggggtgcctgcgnnnnnnnnnnnnnnnnnnnnnnnnnattcctctttcagctgcacctctgtgtagtagaaatcctcctcccgcttgaactgatcagagtccactgtgtcccccagatggagggctttgacgtgtcgtttgatgcccacaatggagcgcagaactttgccacagtttggccacaggcacttgtacatcaccttcacagagttctttctttttcgtggagctggttcgtccagcaggaaagggtcaggatcggtctcaaagccatgatcagtttggggagaaccaaaagcatcccccaaatacttggggctggcctnnnnnnnnnnnnnnnnnnnnntggagacaccactgctcccactccagtgaccgctggtagtgctgctgccgctgtccgagatggcaccactctccttccatgggtcgcagcccgcacgggaagcagagaagttgccatcggtcccgggaggactctgtacaacagggctgcaggacagggacgtcagcaccatggccgccatcatctcatccatttccactgcgtccgacgtcctctttgggacatcgatgttcctggagacgggcctgtaggccagggcctgggctccgggctccaggggtggtgcactggggacaggggccactgcagctctgccagccacacctcctccaccctgcagcagacctgcagcttctgctccagcagccagacggtcacctgaccctccatccagctgtgctgctccaccagtcctgtgcactcttgacccccgtaccacacataaaccttctgctccagcagccagacggtcacctgaccctccatccagctgtgctgctccaccagtcctgtgcactcgtgatcccccgatacagcgacagaggatcctgctagagtta

SEQ ID NO: 9973 - DNA, 1204 bp, Homo Sapiens
tagtaagtgaaaagagtttaatgaagcctcaagggtttaagggaaattaaatggaaacttttaatcctaattgcttttcatctgacatgcttaaaggaatccttttaaactgataagaaacaatgaataggaaagaaaacctgctaaaatctcttagaatttacacgattcttattctactacaagaaagcattatttggtacaaggtgtatttgtggatgtacatgaacagtatatatattatccggatcatgttgtgctatgtacaggtctttacaattcttcctgaaggttaaaacagttcattagaattcaaaatgcgtaatcatctgtaagttggcacttgttaggctctggtcagcagtgataactggcatgttgtattgcagcccagttccagccagtgtgggccaacttgtacaacagaagtccagcaataggtgggtagagtgcaggaaaaacagtgccatgtttctcaattggagaccctgaaataagtgaagttactagctgctaaatatatgtcactcaaaagcagtctcttggctttgtcttacacagcgggcaactgttcttttaaattctccatttctatcttccctccattctttcgcagcatcaacattagcaggggagtctccattagggtctgccagcatagaaaatgacactaatcatgatgctttccacagtgtggatagggagccagcgttcctctggcttttcataaccatacttatcttccccaggctcatgaagaatagaaatgcacacatcaccaattttatcaacatttgggtgccagatttctgtaatgaatttcattttaggaggtcggaggggataatcttttgggaaagtaagatgagccttaaaaacaccaccttcataaagtgtatctggagggccaataataaggacttcccatcggtagagatcattgtcatctattaaacctgcagaaaagccttccactggatttttgttgagttctgccagctgtcttcgcagtagcagtgccgactgcagctccgtcatcctccctgccgagggcccgggctggcgccggggcttccgaagggctggggacaggctctgggggcggctggagcggggtgtgccgaggaacccgggccccgcgaccggagcgccggagccgaggaaggccgggctgaggcggcgggagcggcgcctcgctgccccc

SEQ ID NO: 9974 - DNA, 505 bp, Homo Sapiens
ttgagctgctcaacagcaactaggtaggtaggggctgggtggacatgcagcctccgaggggtcctctagggcaactcctgccctctacagcattcccacagagtcaccttctcactattccaaggaacgcttccctcccactccgggacacagaccccagtcttctcagggacctgacaggagtggccaagggctcaaaatggcactggggtgggggcccactaaagaactctctaggtttctgggaacatgtaattcaaggacagcggccagactaactccttccacctatttttcacaacaaccctgcagagcaggaatttgtatctctgttaatcggatgagaaaactgaggctcagagaggtaaagtgacttgctcaaggttaccccaatagtaaacagtgtcgtgggatttgaagtcaggtctccctgatcgacaagtggtgtctcttgggtgtctggaagtagaaaagaagggcatccggccaagcctagctgcaattc

SEQ ID NO: 9975 - DNA, 934 bp, Homo Sapiens
  misc_feature (686)..(747): n is a, c, g, or t
cccgggggcagtcgcgcctgtgaacggtggggcaggagaccctgtaggaggaccccgggccgcaggcccctgaggagcgatgacggaatataagctggtggtggtgggcgccggcggtgtgggcaagagtgcgctgaccatccagctgatccagaaccattttgtggacgaatacgaccccactatagaggattcctaccggaagcaggtggtcattgatggggagacgtgcctgttggacatcctggataccgccggccaggaggagtacagcgccatgcgggaccagtacatgcgcaccggggagggcttcctgtgtgtgtttgccatcaacaacaccaagtcttttgaggacatccaccagtacagggagcagatcaaacgggtgaaggactcggatgacgtgcccatggtgctggtggggaacaagtgtgacctggctgcacgcactgtggaatctcggcaggctcaggacctcgcccgaaactacggcatcccctacatcgagacctcggccaagacccggcagggagtggaggatgccttctacacgttggtgcgtgagatccggcagcacaagctgcggaagctgaaccctcctgatgagagtggccccggctgcatgagctgcaagtgtgtgctctcctgacgcagcacaagctcaggacatggaggtgccggatgcnnnnnnnnnnnnnnnnnnnnnnnnnnnnnnnnnnnnnnnnnnnnnnnnnnnnnnnnnnnnnnctgctggagcccagtcaccccgggaccgtgggccgaggtgactgcagaccctcccagggaggctgtgcacagactgtcttgaacatcccaaatgccaccggaaccccagcccttagctcccctcccaggcctctgtgggcccttgtcgggcacagatgggatcccagtaaattattggaaggtcttg

SEQ ID NO: 9976 - DNA, 375 bp, Homo Sapiens
tatcgctcccaaggatagaaattgactggtgcactcaagtcctgctgtgtggcgcctggatgaccagtcctgctgaggttcagggcggactctccgggagactgtcctggaaaggttcgccgcatcctcagacctgctcaacgagagctttatcagcacctggtccctggtgcaggagctggaggaactgcagaacaaacaggagaactcgtcccaccagaagctggctggactgcacctagagaagtacagcttccccgtggagatgatgatctgcctgcccaatggcaccgtggtccatcacatcaatgccaactacttcttggacatcacctccgtgaagcccgaggaaatcgagagccatctcttcaattt

SEQ ID NO: 9977 - DNA, 769 bp, Homo Sapiens
ggggcacggacgccgggaagaagggggtggggccacgtttgcgtccgcgccatcaggcccgagatagcggcgaggtccgctttcagtgtatggttttccctgccaaacggttctgcttggtgccatccatggagggcgtgcgctgggccttttcctgcggcacttggctgccgagccgagccgaatggctgctggcagtgcgatcgattcagcccgaggagaaggagcgcattggccagttcgtctttgcccgggacgctaaggcagccatggctggtcgtctgatgataaggaaattagttgcagagaaattgaatatcccttggaatcatattcgtttgcaaagaactgcaaaaggaaaaccagttcttgcaaaggactcatcgaatccttacccgaatttcaactttaacatctctcatcaaggagactatgcagtgcttgctgctgaacctgagctgcaagttggaattgatataatgaagactagttttccaagtcgtggttcaattccagaattctttcatattatgaaaagaaagtttaccaacaaagaatggggaaacaatcagaaagctttaaggatgagtggactcagctggatatgttttataggaattggggcacttaaagaaagcttcataaaagccattggtggttggactaagatttgaattgccacggcctggaatttggatctatcccccttaaacttgggatatagggccagtttataaaagaaacccgtttattccctgcatggggcggg

SEQ ID NO: 9978 - DNA, 431 bp, Homo Sapiens
aaagtgaatggatatctcgaagtaacacgtcttgatacagacagttcaaggaaaacacacaaatgctttttctttaagaggttttcagtgctccttccactgggaagtaaacatgatctactcaaatgaatttacaagatggtacacatactggagcaaatccaacacctgcattataaaacaatgtttaaaaggtgacagaatgaggaatttgtacattgtaagaagtgagctattcagagatcaacaagtacattttaattcggttagcatagaagtcttcatagtcttcagataacagacagtgaacatccttgactcgatgaaagttaaaaagcaccatgcacaacagtttagtggtaagcactgaaaaaaatagcacctgtaatactgtgatattgacaatttaaaactggtctaataactgccgg

SEQ ID NO: 9979 - DNA, 848 bp, Homo Sapiens
agcaggctgtaccggtctggagttttaggataagtgaacaccttgggggccactaaggcagccctgctaggggagacgctccaacctgtcttctctctgtctcctggcagctctcttggcctcctagtctctacctaatcatgtccctggtggaggccatcagcctctggaatgaaggggtgctggcagcggacaagaaggactggaagggagccctggatgccttcagtgccgtccaggacccccactcccggatttgcttcaacattggctgcatgtacactatcctgaagaacatgactgaagcagagaaggcctttaccagaagcattaaccgagacaagcacttggcagtggcttacttccaacgagggatgctctactaccagacagagaaatatgatttggctatcaaagaccttaaagaagccttgattcagcttcgagggaaccagctgatagactataagatcctggggctccagttcaagctgtttgcctgtgaggtgttatataacattgctttcatgtatgccaagaaggaggaatggaaaaaagctgaagatacagttagcactgggccacgagcatgaagtctgagcccagacattccataaatcgacaaggcgatggagtgtctctggaagcagaagctatatgagccagtggtggatacctgtgggccaggcttgtttcgaccaacatgagagacaagtggctcagctgcccaagaaggattacctacgcaaggcgacggtcgtgggcatctgtggtggatcacgacagtttctctgggtttgcccctctgaaccaacggcagctgagctccacccagaacgaaacccaaa

SEQ ID NO: 9980 - DNA, 527 bp, Homo Sapiens
gatgattgtgcaacagcgtgactaaaatttttatgtttagtatagctattaaaaataacagctatttttaataacactatcagatgaaacgtaggaaatgttttacagtattaaccgtgggggtgaggcagaaatcagaattgtgttctataactgcagcatgtgtaaataatatgattgtttgtcagaactaacatttgcaactgaaagatacataattctctgtgtgtttttccttccaaaataatctgcaattaataatagctatccactccctatatccaaaacactgctgagcaattgctcataatactggggtacatttcatgcaatttttacagcacacacaaaaggcagggcttatcctccattttgtgggcttgaagagcgtcaggtggcatacttctccagggtcacattattgcaggttcaaccaggtccggatgtccccaaatctcttacgatttgtcctggctgctgttcacagggggagaaaagttggacacggcaatcagattatgccactg

SEQ ID NO: 9981 - DNA, 114 bp, Homo Sapiens
ccaccggcaggttgtactagtggatgcggcagaaagacagaggtgttggagttgagggtgttggaccaagagtgcaaatccaggccacagtgtgacagtacaacctgccggtgg

SEQ ID NO: 9982 - DNA, 360 bp, Homo Sapiens
cccaattaggacttaaggaatgtgctgggacaaagttggcttcagtgatcaggttgtttcaagtcttagaattcaaacttcaattctaaaaaaattttatcaacaaaacactgtgaccaaaaaatcactttaaatcttaaatattgaaacgcaatagcatataaagatggtataacctaagatgcttttatttcattatattttcaatatctttacgcattataacaacagaaatgtaacctactcacattgccatttgttccattatgcaatttgaagaaacatgttttccttttatttttatgaacagatatttagacatttcacattttgtaaaaccacgtctacaatctccaattc

SEQ ID NO: 9983 - DNA, 462 bp, Homo Sapiens
ctccctacaggggctcaattcctacagtcactagtttaagctagtcacacttcaggctgagactgtgagtagagtctaataatgggagggctgtccctcaagcatggtgggagctaaccccgctatctggaggaagctgaatctgaatctggggttttttacaccgtgctcaggacctcactgtgattgctcactcagcccacttgctattttcatgcactgtttagaacaactcagcagtttctggtataggaagaggcatttgacataaggcacctgttgaaacaactttgaaatgtgatttcatcatgactctggaaacatggagatggctttcttttgttgacaggtacatacattcagaaccagaaggagtagccatctctgactctctatgactttcagttttatttatgaagactgactagctataatggtatttggagtacaacctgccggtgg

SEQ ID NO: 9984 - DNA, 696 bp, Homo Sapiens
  misc_feature (571)..(571): n is a, c, g, or t
ctgcttgtcctgcctctggcagaacaccatctccagcctcagctttgacctgtctcatttcccatattccttcacacccagcttctggaatgcatggggtggctgggatttaaggacttctgggggaccaagacatcctcaagaaaacaggggcatacagggctccctggatgaatagaatgcaattcattcagaagctcagaagctaagaataagcctttgaaatacctcattgcatttccctttgggcttcggcttggggagatggatcaatgctcagagactggcagtgagagcccagaaggacctgtataaaatgaatctggagctttacattttctgcctctgccttcctcccagctcagcaaggaagtatttgggcaccctaccctttacctggggtctaaccaaaaatggatgggatgaggatgagaggctggagataatcgttttatgggcatttgggtgtgggactagggtacaactgaaggccaagagcatctcagacatagagttaaaactcaaaacctcttatgtgcactttaaagatagactttaggggctggcacanaatctgatcagagacacatatccatacacaggtgaaacacatacagactcaacagcaatccatgcagtccccagagccacttgaacgtgacaaatctctcttatcctgaggcacagttggaggag

SEQ ID NO: 9985 - DNA, 453 bp, Homo Sapiens
attttctaaagaatgtcttttttattcaaaaaggaaaaaacaataaagaccgtgtacaaactattaggaaaaatgtggcgccattaaacccagaaaatatgtccttctgtaacagacagctgtctcctctgtagtttaagtgtgctttctgcttagctcatgctccgtgagtcatggaatcaatacaggaagcacacagagccagccacactgcagattccgaggagggtcaagccacacagctcctctgttcctctcctctgcttgctgcatggctcttccaagtatgtacatctggggagaacgcacaaccccatttctacttcatgtttaaacatgaagtataaagcgttgagtgctgcttgttagtctagaatcctcaggcaagtcactttattgcctggtgcctcagtctcttctgtaaagtgggcatagagaagtataggcgttgag

SEQ ID NO: 9986 - DNA, 887 bp, Homo Sapiens
ggactcgcccggcaaagcaccgtggtagaagtcaggagtttgcttggtgcaacagcagtagttgggatgcctggtgtgacagtgctctctatgactagtgaggtctccagtgagacagaggcatgctgagctccagatgagctgtgttcactgaacagagaccgcagcttttcttctagagtctttatgtcatcaattccaggagctttgggttgtgtatcagaatctacttcaggacaatgagtatggggctggttgggaagcaaagctggttgaggctgactatgaattagtgtctgctgtacagcaggcacattggcaacaggctgtaccaagggtgggatactaggtacttggggtaataaaggtgtagaagtaggtcctgctgcttggggaagaataggagtagaagctatcactgatggaatgaccaaaggatgcagcccaccaggctgagaaatataactagacactcctgctccaggagaggaagaggaagatggtgcagagagggagaaagccaatccagttgtactgctatgagatgtcttatctagtgagtgtgcgctaactaccacgctttcacgctaaagtaggagtacaagtactgctgctaagctgacatggacagctgtgaagctgtgcttgggaatgaagtggtggtagaaactgatgttaatgtggctcccacagtagtgctgcctgctgcctgctgagatactacagctggaggcttaggacctggggtagcagtactgccctcgatacagcgaccagcctaattattagcatcatccctctactattttttaaccatatcactacaacctatttagctgtaccccaccgtttcctccgatacgcgacacagatccgctaattctctg

SEQ ID NO: 9987 - DNA, 349 bp, Homo Sapiens
  misc_feature (331)..(331): n is a, c, g, or t
attgaacaatgtctaaggcagaagtataaagcgttgagatgtatattaaaagaatattggggccgactgtggtggctcacacctgtaatcccagcactatggaaggcaggccgattgcttgagcccaggagttcaagagtactctgggcgacatagggagaccacgtctctaataaaaagaaattattcattttgaatagtattacagattcacagaaagttttattttcaaggaattgcagatttgcagacagttgcagtatttttaattaagccgtaatacctgaatcgttttacaagaaaatcaaaattgctttacatgcaatagctnattatggtctaccacaga

SEQ ID NO: 9988 - DNA, 484 bp, Homo Sapiens
accccggcgaccttgcacggttcgtgcttgggatacccctgggcggccttctcatggacttccatgtacttggcccattctcgcctcacctctgccagctcagccttggaggtgatggagatggcccctgcctggcccaccgcctcctgaaacttctgctctagcagctcatcctcctccaacagatctctgatgtccttcagggaagcctcgattatccaggtcctttacctgcaacataaagatgtcagtttaatatttacaatcagatcaactttggagaaattttctactaaaatggattcacccagagtgggcaggattatgttgggttctgcagcctggtttagggctgtgaatacacaagcactgatctagagactagattctctctgcttagccttttggaatacctctgtgaggaccaatattactgatctaccctccacatagatcaagggtttacagtcttgtctcatatgag

SEQ ID NO: 9989 - DNA, 358 bp, Homo Sapiens
taggtcgcgtagagggccacgtcagtctttgcgatcaccaaatctggttctgagaaataggcactggcaatttacacatgccttgctgtgtaatctcactatatttgctcaggcaaagtgggagaagcagccttaggttttcattctagagatgccggctttcccacctgatcggcttagagttcacgattgactgttttgggcttcatttcaccctctacataacaagcgggtggactagatgccttagcaagggtccgtgttgtgtggtgtctccagccacgcactcagctcaatcttagcacagttaaaaaatgcctttctagcaagttatctacgcgtgcctggggatcctcta

SEQ ID NO: 9990 - DNA, 254 bp, Homo Sapiens
cttatccgacatctccttctgccccgccctgccggccgtggtggccctgctgctcgcactacagcatcgacgaggccgagatgcttcgagaaggcctgccgcgatcctggcctgcaatgaccccggcaggaggctgatcgaccagagcttcctggcctttgagtcgtcctgcatgacgtttggggacctggtgaacaagtactgccaggcggcccacaagctgatggtggccgtgtcggaggatgtcctgcagg

SEQ ID NO: 9991 - DNA, 1213 bp, Homo Sapiens
  misc_feature (507)..(557): n is a, c, g, or t
  misc_feature (691)..(786): n is a, c, g, or t
  misc_feature (1106)..(1114): n is a, c, g, or t
ggcttgtactataccagtgtaaaaaagcagctgtacggtcggaattcccgggatatcgtcgaacccacgcgtcgcttcccggtgcatggcggtgacgtagttggagccgctggggtcgtccaggcgcatccgcagcaggggcaggaagcgctcggtggtgaagtagcgcagggtcggcttcggggcgcgcaaagcggtgaggaagacctgcggcggcgggaggagagctgtggccaccgctgcgcgccggaggacgcaccgcccccactcctggagtccagcccggcgctcacctccgccacctcctcagggttctgcgccgcctcgcgaaagacttgcttgctgtgggcgaggtattggtagaagcggtggaaggtgtggatgtccgtgcggtccagcacctcctctgggctgcccaacaccttctccatgaaggcggtgtgcactgggccgcactcgatcaggctcaagctgctggccggagagcaacgagtgggagggggcggnnnnnnnnnnnnnnnnnnnnnnnnnnnnnnnnnnnnnnnnnnnnnnnnnnncgtcccggcccccgaccgcgagcagcaccgctgcgctgggaagtgaggcggaaagggcgctggggataaccagaacatttgaaacgcgggttcctgccggagcagccctcccaaatccatctgaggctacaagnnnnnnnnnnnnnnnnnnnnnnnnnnnnnnnnnnnnnnnnnnnnnnnnnnnnnnnnnnnnnnnnnnnnnnnnnnnnnnnnnnnnnnnnnnnnnnnnaacaataccaacacttcagcagctaggtcagcaggtggcacaatgcgtgccatgcgcccagccccagtgcctggcacacagctaatgtgagccgggcaaagaaggccaggggagatcgcccccaaaacggctcccgcaggacagggggctcggcgtctctagggcaaaattaagaggggttcggggaaacggggtggttgatcccctggacccccaagggggagcattaaaaccgtccagactctccccataagccccttgagggcccaaattttgctggggccaactacaccggtcattgcacagggcaccccctatannnnnnnnnaaacgaaaggttgcctgaagagcctcaatgtcccaaagggggagcatatccggggggacaaaccgctgcgtccagatcagggctcgacgcgttcctcca

SEQ ID NO: 9992 - DNA, 789 bp, Homo Sapiens
ggcaaacatcagtgtccttctagctttagccgagaaagaaaccagtcccagggaatgaatggtggtctccccactcccggcagcactttaggcagcccataagctatgcgagaatgtgaacgctcaccttgctccgtcacggttctgacctaccacataaacaggaagaagccagtgaccggaacagctctaggaataacaagtcagaatagaagtgtcctttatattaccagaaaatatgggcttggcctaagtcgctgtctcctaacctgccggggtcattccccaccaaacaccccatactaaggagccatgagccacctggacattcaccttttctttgaccatctggagtctggggcaacttaaggaggcaccacacagtggtgcaggcacatttccaagcgtaggtgtccctggcttttgtggccaaagctagtgttatggtcaacaacaggccagggtctgtggggcactgaccttgaaagtggcaaaatggaggtttcacaggctgtgcgggagcaggacggcttgcttcatctaacaatctcagtttcctttaaaaaaagaaagaaaggaaaagatttcataagcaggtgtcagtgggacagtttaagtacttaaccatttctctttcttcttatggatgtgaactgtgctggggataaatcatttgtatttcttgaatgttctctatgactaacagtttattaagtcgggtgtggatatgtgtaactaatggaactgcccttttaaaatttcattaacaataaaaatgactttgctctg

SEQ ID NO: 9993 - DNA, 787 bp, Homo Sapiens
ggggcctccctcgctccacgcgcgcccggacgcggcggccaggcttgcgcgcggttcccctcccggtgggcggattcctgggcaagatgaagtgggtgtgggcgctcttgctgttggcggcgctgggcagcggccgcgcggagcgcgactgccgagtgagcagcttccgagtcaaggagaacttcgacaaggctcgcttctctgggacctggtacgccatggccaagaaggaccccgagggcctctttctgcaggacaacatcgtcgcggagttctccgtggacgagaccggccagatgagcgccacagccaagggccgagtccgtcttttgaataactgggacgtgtgcgcagacatggtgggcaccttcacagacaccgaggaccctgccaagttcaagatgaagtactggggcgtagcctcctttctccagaaaggaaatgatgaccactggatcgtcgacacagactacgacacgtatgccgtgcagtactcctgccgcctcctgaacctcgatggcacctgtgctgacagctactccttcgtgttttcccgggaccccaacggcctgcccccagaagcgcaaaagattgtaaggcagcggcaggaggagctgtgcctggccaggcagaacaggctgatcgtccaccagcgttactgggatggcagatcagaaagaaaccctttggaccattatcccgaatcctagtttcaccggagaacttctggattagctccccggctctcaccttctattaatcttaagggagtttaattttgcccctt

SEQ ID NO: 9994 - DNA, 781 bp, Homo Sapiens
ttccctcctgctagctgtggcaggagccacttctctggtgaccttgttgctggcggtgcctatcactgtcctggctgtgctggccttagtgccccaggatcagggaggactgggtttcagaagctgccagaggaggagccagaaacagatctcagccccgggctcccagctgcccacctcataggcgctccgctgaaggggcaggggctaggctgggagacgacgaaggaacaggcgtttctgacgagcgggacgcagttctcggacgccgaggggctggcgctcccgcaggacggcctctattacctctactgtctcgtcggctaccggggccgggcgccccctggcggcggggacccccagggccgctcggtcacgctgcgcagctctctgtaccgggcggggggcgcctacgggccgggcactccccagctgctgctcgagggcgccgagacggtgactccagtgctggacccggccaggagacaagggtacgggcctctctggtacacgagcgtggggttcggcggcctggtgcagctccggaggggcgagagggtgtacgtcaacatcagtcaccccgatatggtggacttcgcgagagggaagaccttctttggggccgtgatggtggggtgagggaatatgagtgcgtggtgcgagtgcgtgaatattgggggcccggacgcccaggaccccatggcagtgggaaaaatgtaggacactgtttggaaattgattttgaacctgatgaaaataaagaatggaaagcttcagtgct

SEQ ID NO: 9995 - DNA, 930 bp, Homo Sapiens
  misc_feature (878)..(878): n is a, c, g, or t
atctgtagacacgtttcccccaccccacgtgtacgtgagtggacacacacaggcaacccaggcttaaatcagcagggatggcagaaccacctgcatggaaccaccatgaagtctccttaaagctcccataagctttcacatcttgacacccagtccagtgggggccccaacctcccctgaagggagatggagtatcagaaaggagggcatcgacctgaagaaagcaggctgacccaaatgcagtgaccgtatgggtggggcgtggggagggcctgtacagtaaattagctcctgaagacaagttagtccaacctcaaagcacaggaagttgcacagcaggtgggggaaaacccagctactcacagttgtccacaaggggttagtggcctgaggtggtccttaggcagccacctgtcccacccattcacttgtcctgcctggccctagccctgaacaactgcaatgcagcacctctggaagtggcacattttatttcttttctaaacgctgagttgtcagggataaattttcaatagaaaaatctttcccacctgctgataatactttggtttttttgttttcctaaagataaagcctggagtcagcaaaatttgcttgcatgataagctagttgctttggaacaaacagaaggttgctgggtatttcttggagtagaattttgtagcctgccagactgagtttctcactggcatcaaacacacacttcatcataagggcggcaaagcccaagaattgaaacccacttgactggaaataccaggacccgaaggtggagagccaccctggaggaccacgtggtctgcaatgagctctccagtcacccccgacaactctcaggagttaacttcatgggacnggcaggggagtgggagacagggatgttaatacttttcagaaattaagacatt

SEQ ID NO: 9996 - DNA, 857 bp, Homo Sapiens
gggagacggctctcagatccgggggctgcggataaatccccgtaggccgcgggcagggagatgttgcgttccggtgtgggtgtgggtgtgcctccgacggcgtctcggtgccagtgtcgaggttctttctgcttagctacccggagccgactacggaggaggacacctgagtttacgtctcttccatctgctgctcacctcagctgcctgggtccccgacgagagccaggtgacacttaactccgccatctgcgttttgagcactgttctcataatggagtttcctgatttggggaagcattgttcagaaaagacttgcaagcagctagattttcttccagtaaaatgtgatgcatgtaaacaagatttctgtaaagatcattttccatacgctgcacataagtgtccgtttgcattccagaaggatgttcacgtcccagtatgcccactctgtaatacccccatcccagtaaaaaagggccagataccagacgtggtggttggtgatcacattgacagagactgtgactctcaccctgggaagaagaaagagaagatttttacataccgttgctcaaaagagggctgcaagaagaaagagatgctgcagatggtatgtgcccaatgtcacggccaacttctgtatccagcacagacacccctttggaccacagctgcagacacgggaagtcgccccaccatcaaagctgggtggagaagagactccgcctgcgatggctcggagcaccccagtagcatgcgtggaagccagcttacactctagtgggaagtggagccccattgagcaccatcccacactggctgctgatcttgtttgttgagggagatgggactat

SEQ ID NO: 9997 - DNA, 637 bp, Homo Sapiens
  misc_feature (464)..(464): n is a, c, g, or t
agccggcgcaagtcccaggcttggtagcttcattttaagagtaacagaaaatgtcttttttgagggggagggagaagctgggtaactttggtgaacaaatcttctctcttggtgctgtgcagggtagagaaggaagtgggtgggatggagatggctcacgaagggatgatctggagtctggcttggcatcctcttgggcatattctctgctcaggctcaaatgaccatactagcaaattctggactcgaaaccgaccaggtgataaaatgcgagatcgatataatctaaaccttatacctggaatgtctagaagatggagtagaatatgatgacctcgaacctaatagcctggcagtaattccaggaatgggaataccagaacaactaaaattagctatggaacaagaacagatggggaaagatgaatcaaatgaaattgaaatgacaattccaggtttagatnggggaatggaggaggtgatgcaaaaggatcagaaaaaagtacctcagaagaaagttccttatgcaaaacccattcctgctcagttccagcaggcttggatgcaaaataaagtccaattcctgctcaaatgaggtgtgaatgacgaaaagagaccttaattggagagagacaaa

SEQ ID NO: 9998 - DNA, 1205 bp, Homo Sapiens
  misc_feature (343)..(354): n is a, c, g, or t
  misc_feature (356)..(451): n is a, c, g, or t
  misc_feature (457)..(478): n is a, c, g, or t
  misc_feature (618)..(626): n is a, c, g, or t
gggtctttgctcttcaaattattttcagcctccttgtcatataatcatttcaggcaaactgaggcaacactaacagctaatgacccagatggctctatttgggtaatttacctacaacttattccaccagcctttactcctctgcccttttgtcaattttaccttataatcctttattaaatgatgggaggtggtgatcaggacaaaagtgttaggttcccatgatttctcatttcatttattaatagttaatgctgaattttttttaagtttcctctggctctatttatgttactttttgcgataagaacacttaacataagtattctctcctcttggcaannnnnnnnnnnncnnnnnnnnnnnnnnnnnnnnnnnnnnnnnnnnnnnnnnnnnnnnnnnnnnnnnnnnnnnnnnnnnnnnnnnnnnnnnnnnnnnnnnnnnnnnnnnncaaagnnnnnnnnnnnnnnnnnnnnnnaagttggtactcacaaatcactacctctgttatattgacaagctctatttcctattctttgtatctgttaagtcacatctgtgtaaacattgagctcaccttttatatattaacctctagaattaatgggcctatgtggnnnnnnnnncagtcttatagctggtgttctgtaaaagatttgtcccaataaacgacttaatggaatgatacatcagtcagattttaggaaggcagtcaattatggatattttaatgttggaagaggccttaatgatcaaatctcaccctttctgcttctgaagtatgaaaatctagtctttttaggactggacacaaggaaaataatctctaaactattgactaaattccagtgagagtatgaatgaagaacaactagatattaatgtcaatcatttaagattaatgggcatgcaattaagtctccatttaagattaatgggcatgcaatgaaagtctccagcagacaatcagatgttgttggatgtctagattataataggtttaggttgaagttataaaataaaataaaattcattttccactgaaactctatgacattcagtgggagtggtggaaaattaaccctcttataccttatagataattctaagaacagcacacaaacttattaataaagcccatcctccttgtggggccttaaccatctttcctcagattttagaccctttaaaaaacaaggttaatt

SEQ ID NO: 9999 - DNA, 801 bp, Homo Sapiens
gggaatgatgtggcatctctggaacataccaagcagtggctggccgatgccctgaaggagaatgacccttccagtgtgcttctcttccttgtaggttccaagaaggatctgagtacccctgctcagtatgcgctgatggagaaagacgccctccaggtggcccaggagatgaaggctgagtactgggcagtctcatctctcactggtgagaatgtccgagaattcttcttccgtgtggcagcactgacctttgacgccaatgtgctggctgagctggcagaaatccggcggctccacgcattggggatgttgtccgcatcaacagtgatgacagcaacctctacctaactgccagcaagaagaagcccacatgttgcccatgagggctgaggagactgttcagagactgcccagccctagggcactgtgccaccctcattcctccagagcttgacccctggacatttgcactgactttatccagaccaaagagctgcctcttggtggcagtattcccacagaggggtagctgggatcatgctagtcacttcctgcccccaggcaccgtgccaaagactggatgccccctactcctcaggggactgtccagggcgcccagtggtagtgagggagagtgtctctgttcttttgctcagcctgctgggccctttgtgtttgaggatgcttaatgattccagcctctcactgtgccttatgcattaaaatttctttgttacgagcactttggggctggagttctttgttggggatgatgtatgtggaatgtgcatgactgtgtgg

SEQ ID NO: 10000 - DNA, 483 bp, Homo Sapiens
gctgactagaggatcccctcccaagaatgagaaatggtcttctggatcctctcttctgcggcctgtcaaagcttaagtcagacagtgtcacttcactcgtctgtttaaaacctttcaatggcccccatttcacgtagaccaaagtccaacgtattgacctggcctactgatcttgctcctagctacctctgacctcatctccggtcaatttccccctcattctgttccaccatcctgactgccttgacttcctcaacagaacaagcctgctactgcctcagggcctctgtcattattcttcctcttcccaggggtgtgctggtaaaatatttaacaaatagttctccgggacgggggagaaaaccctcatttgtagcatttgcaggtatctatgtgtaaatactctcatcaaggctatttttgagccactaatttgccttcactgaatacagagtttgggaagagatgcatgccatcagacct

SEQ ID NO: 10001 - DNA, 389 bp, Homo Sapiens
tcggccctgtctaatacacagtaaccttagacaggcttgggttttaaacacaacacttctctgtccctgtctttcgcttcttacttaatccactgtattaattttcctactgactcaactaaaaagatcggttcatgaatgatgcttcctcctccaataaaaataatctccatggttttcagtcttcttatagatacaaaggttttacatagttgcctggaaaagtaccaaactgctttgtccttcttgaagtaccaacaaaccatccatcgtcacatttttccatgacatcaacgatatctccatcgcggagttccaactcatcatcattctgtggtatatagctatataatgcttgatagctaaataaatcttgtgaggtttgactc

SEQ ID NO: 10002 - DNA, 658 bp, Homo Sapiens
ttccagaggccaagaagagccacatccttggcagtttgattttcagagatccacactggatagcatggtggtatcacatggtaatgagacccagttgactcctcattttggcacaccaaatgtttgctccatgactggttcaagctatcacgtcaaatctagtgagttggtaagtcaacaggacagctctcctgtagaagtacatataaacaaagaagcttcctcatttggaattgctcagactctagcatcctcattcaaaactgccttttcccagatttctgatgatagaaggaatcctcagagtcccaactggcagaatcccacagtcactttgcagaaaatttttcctaataagcctgcctctcatccaatgagtagccatacagaagtcactgtgaccaacagcaattcagttgactctctgcctcttgccataagccagcccaatatcttggtcacagaagtaaataatgagaaagacttaaatgaatctatttcagaagtaagacaaacagctaagcaagatggaccagacaaacaaggcaggtgaaataccccaacctgtttcacagacagggatctcaaactctttacctgattttcaaaatcccttatcccagactcagccaagagcaacgggtttggttttaatgca

SEQ ID NO: 10003 - DNA, 539 bp, Homo Sapiens
ctagaggagtcccgttcggacagttagtgaaagctttgagataaagcaactagaatctcaaaatgatcgagccaactctgtgaattagtattaagcataactatcacatatgtaaacgcgagttatcctctccaatataggggaggcatataggaaacatgggaaagtagcagtatgaacaagagtaaaacaggtagtagaaaacaacagcatagggatgaaaaccttgcaaacaaagaattactaatttaaagtgtaaaaattttgcaaagggaagataactcaatttctacattttcagctctttgtattaaacattttttcatctgtaactagatattggtttttcttctccatagtaagatcacctgatatttgataatttatgcttttattactacttgttttatgataccaacatttatgttcacatcctcaaggctttattttcaagaaaaaataaagtcgtagtagcacaatgtgataagctccatcttccaaccaatttttaattgtctcattggtatgtatatttacct

SEQ ID NO: 10004 - DNA, 492 bp, Homo Sapiens
tcaagcaaatcaatgtgatatgccacttgaacagaatgaaagatgaaaaccacatcatctcaatagatggagaaaaagtatttcacaaaattcaaaatccactcatcatagaaattctgaacaaaatagacagaaaaggaaatttacctcaacaatagaaaggccatccatgaaatgaccaacgagtagataacgaagcagggaacatggaatgattttcctgtaggatctcacatgatggaagaatgctctcaccccttctattcaataaatactggctgtcctagccagagcaatgaaatagcaaaagaaatcaaacccatccaaatcagaaagaaagaagtaaaattatatgtgtttgtagatgacatgatcttctgtgtagaaaatcacaaagactcaaccaaaatactatctggaagtaataaacagattcagtgtatctgcacgtacaatatcagcaccaaaattagctctacgcgtgccgggacc

SEQ ID NO: 10005 - DNA, 822 bp, Homo Sapiens
ccttgtcttcctaatgagggaggtgtcaaatgacttgacagtgactaactctaccactgcattcccaccataaagactgtacatgtcatctgcaaacttttgcagagcgtcaacaaggatcttagaagcatctctgaattgttcagagtcttccccataacgcttcccaatttcatccaaacctgccagctccagtgaatataaatcaggagaatgatccttggctagatgcttatgacgagacagcaagcttgaaatatcatgtagcacttgcagttcagaaagaaagagcaggtcaacttcattgttcctactcagagaattgagggggagtgaactgagaacagagttttcttgaaacaggcgattacggagctggcgcaaggtgactgaaaggtcttcaaacactgagtttgccttccctaccatatacactctttcctcactgggagccaactgcaaaacaacaggagtttcctcagaaaataaggagtgaatggaatttgcaacactgtcaagactaaaaggaactgcattctccaaagggtacgaaatgacactgcctgggggtagagccagtttgttcactcccttcaccatcaccatgacggtagcccgaggacgatgaaacaggttacccactgcgagtcctggccaagaaaggtcttctttcacagagaagcccatggacaatgcagccacgtctgggatccgctctcctggtataggccaatttccatttcggaaaacaacagaccctggtgattttaatatactaaactcgttcccctaaacacccgccaccaacgccaggagcacgac

SEQ ID NO: 10006 - DNA, 369 bp, Homo Sapiens
tgcacgcgtagacgtgtgccttactgtagcacgaggggttgggaggcccatatgacataatgtgcatgaaaatgctatgaaaactttcaggccatttaaagtcactaattgaacttcgacaacttcttgctgctggaatattcctttcattccctttcttaataaattctgcccgtcattcaaaggcttctcttagctcttttttgatctcaaaggtttcttaggagcccccagaggtccctctcagaaagaggaagtgagcgaattttgccacccgtgtccctcctgccccacccaccagatgacttcactattacactccatgttttcacacctccacgctctgcccagttctgtccctgtgctctg

SEQ ID NO: 10007 - DNA, 301 bp, Homo Sapiens
aggcgacctagaggaccccttcagcacattaggtcaccttttcaacttctgaaacactgttcattgttaactttttctcatttataaatcactgtatttattttagtagtatgcatagcatatctgtgctcttgaattaatttttatctttaacatatttgtctcatcaatctttaatacactgtgtctaatttgctaccaaatgtaattatcagggtatttataaaaccatagctaacaaaactgagctacaaaatgaaaatttactaaatagtttttaaaatcatggacttcagcctgg

SEQ ID NO: 10008 - DNA, 409 bp, Homo Sapiens
cacgcgtagactaggagagcatgcgtcttcttgccttttccagctcctggaggcacctgcatccctggacttgtgactctctcctcacatcctcctgcttccacgattccatctcctgcttcctcctttgacctttctgcttccctcttataaggctactactcatcaaattgggcccacctggatgatccaacgtaatctccccatctcaagattcttaacttaatcatgtccaaaaaggcactttttccatataggctagaagttacaaattttgattaggacccggatatctttgaagaccacgattcagcctcccatgtgcctgttcccaaattccaagaaacacagggtggtgagcagcaaagaaccctgtgcaggaccccgcttcttctctacgcgtgcctca

SEQ ID NO: 10009 - DNA, 260 bp, Homo Sapiens
ttcagcacattagttcagcacattatctaaaacattattatcaaagagtgcaaagttagatcaaacaacatcaagaaaattctgtcctaaaattttaacgtcttttaagaaagtctaaaaacctccttttttcccactgacttcaaaactttgagttttatatcagaatatcaatttgtcattttaactttaccatacatgaaaaattatcaaaaatatatcgatgggtctatactaatatgtgctgaagggatcctcta

SEQ ID NO: 10010 - DNA, 383 bp, Homo Sapiens
tcgcaacgcgtagaatggaatggaggtgccctgtgagctaggagaggctcagggaactagaaggagatggaggaagtggaagttgaggaataattggtgtttaagggcctggcatttggagcttagactagtctggatgtaggagaactgagcctagactggaaaggaaccagaccaggccctcggtcttggcagggagggcccttgggcaggaggagctccagggtgtcagaatttgattggagttgagttccagaagtaagagggatgtaggggcagggagttcctaggcctcactgaggaatagagaatggggaagaatcgctgagaccgcattctgggaaacgtccactgcctgcagtctgggactcaggatcctagat

SEQ ID NO: 10011 - DNA, 382 bp, Homo Sapiens
ttccagcacattagtatacacaatgcaacttgattctgctgtggcataaaacactatatttttttggaaatgttactgtccaaaagcctcctgaaagaagatacttttaaaattgtggatgaatgtagtgctcctccctttttttgcctaaataatctcatttcttgcccagtctaacttgaatgggggctatgaaaaacctacacagagatttttatctgaaacatgtcattaatatttcatgctcttacattggtttgaaatccttttgcttacattccctgaaccaccatcagtaaaactttctgtggattcagcccactcccaatgtaggtattttcaatcatttttaacacgtagacatgtattattatatttatac

SEQ ID NO: 10012 - DNA, 220 bp, Homo Sapiens
ctctgaggtattaaaaagaaaacaaaactttttaaagtatattctatgatggcaaggggatttggatttgaatcttagctttgccatatggagaacttagggttaatgaggcttaaagaggtagcatatataaagcacccaagaagaaaggttaacttcctttggcagaaacataaatacaaaaggatgttaaaatcattatggagttatgtttctgcca

SEQ ID NO: 10013 - DNA, 500 bp, Homo Sapiens
  misc_feature (46)..(156): n is a, c, g, or t
tcgggcctcctgtctcagcctcctgagtagctgggactacaggaannnnnnnnnnnnnnnnnnnnnnnnnnnnnnnnnnnnnnnnnnnnnnnnnnnnnnnnnnnnnnnnnnnnnnnnnnnnnnnnnnnnnnnnnnnnnnnnnnnnnnnnnnnnnnngtgttagccactgcgcattttacctagaggcagattctggctcagaaacccggatagaggaaaatgacaggaatttaattggcagacggaagacagccttgaagttgagagaattcttttaacataattctttttctctgaccacctcccctcccagaagatcgcaaatgccatgactttaaatgccatctattagccaaggtctctgcaatttatatatgtagccccgtccctcccctagactcctggaactctccgccctgtatctttgcccaagtttgtcatcctcaaggtctcagcacagatttcccctccttcaagagggctttcctgagccctcaggc

SEQ ID NO: 10014 - DNA, 598 bp, Homo Sapiens
ataggcacgcgtagacagttgtgtaggggggaagagaggcaagagggacagagaatagtcaggaaggcttcacagagggagatgacagttttgatggatgaaaaagcgtatcccagatggagaagggcagagcttccagataaaggctgcattcaggaaatcctgaccagtccagaaccacaaattatgttgcaggacatactggcttcttcctaccactgtcctaataccaaagctgattactaaacagaagactaatagcagaacaaggcaggattccatcatagcagtttacactttatcttggtttgatttttttacattagatactcacatttgtacatgcatacaaaatatctgaaaagttaccctagtaactgttaacaacagtttcccaaggtcagggggtttatggaggggaaggacagtaacttcactttacacccttttgtactgcttgacttttttataaaagtctcttattttcataatttaaaaatgttaacagagtcgctttcattagagatactaaacacctatagtattcaactttctcccaatttcctccatgtttgctcttttactatttctctctacg

SEQ ID NO: 10015 - DNA, 439 bp, Homo Sapiens
gagataactaaacaagaagattgtgaggaattcctaagaaagtgaccgagggagaggaggaaggggagagttggaaaagttaaatgattcacttgtaagctactagaactttgttaagtttggggacatcatggttttgtgaaatctactttcgctgaaatttatgtccatttctttgcctccttctctctgcacaccgcctctactcagaaatttaaccatttacacacaacagaaagaattttcctcaagatcgctacttttgtccagtatttctgattgtctttctgcttcaaatctccagaaaatgtattccctttaacaacttaacttggagaaggaggaaagagacctaagcagatatgactccacctaagttttatgaggaaccttcgaaggaaactctgagaaaaatgagtcagtatctttttctccctct

SEQ ID NO: 10016 - DNA, 712 bp, Homo Sapiens
  misc_feature (17)..(17): n is a, c, g, or t
agtagttcagttaagcnacaagaggactggttgagagcaaagttcttggcaacagcttttgaatgctcaaggcattttgcttgttgactttctgtagggccaaagaatggtaacgtgcttatcatgggagtgttttgagaaacttagccaaagcttcagcagaaaaatccccgagaaagaccagagagttcttcaccacaacaatgttcctgctcatccctctcatcaaacaaggccattttgcaagagttttgatgggaaatcactaggcatccaccctacagtcctggtttggcaccttctgactttttgtttcctaatcttaaaaaaatttttcagggcagtacatttttctcaagttaatgtataaagaaactgcattgatgtagataaattcccagaactctcagttctttagggatggactaaatagctggtatcatcacttacaaaagtgtcttgaatgctatagagctaatgttcaaaaatatagtttatattttttatcttttaaccatttttccacaaactttttgaagtctccttgaatatgtaccatttataaaggggaaaaattctgtgactgctcatgttgacttaatgctgacttaattttctgttttgtaaatatatacaaacaagttgatacaaattttgtttatagcccttaaacaaatttgtgaaataaatgcattcagaaacaaactaaaaa

SEQ ID NO: 10017 - DNA, 958 bp, Homo Sapiens
  misc_feature (643)..(651): n is a, c, g, or t
  misc_feature (859)..(867): n is a, c, g, or t
ggagaacacagtggcacagtgctgggtcccagttgctagcagagtctctctcatcatgggaagctagaaagaagcttccaggaggagataaccacggcctcagggatgccacatccagagccgccctgtcaggctgaggagatcaagtaaccaccccgcacctgcagctgccaagctgggcacacagggcggcacccttctgggctgtccacctctacctcgaggctgatgctagtatgggcacagaagttgctatgtcttttctctcacacttgattttgtaagacggctagcagttacaaattaattcaaaaaatcattctgaaggctccacaattatttgccaaaaattgcttaagtataaaactcagaaaaaagctacgacttcaagaccagctgccgcactcagggagacccctgcccacgaagatagattggcccgatgatagaccccatagatagatacgatatatagatagatcgagtgcatggaacccctaggaccgggtgggagcccgtctcgtccttggccggccccgcctttgttccctccgcgaaagtttttccgcgaacccattcccctcgtggcggcgccggcgccccccggagggtaaggcgggcaccgggggttcaatatcctcgnnnnnnnnngccgagaatacccccgccctttgagcctcggggccccgggcatttttcccgtcaattaaaaaacaggcctttcgtgggggcaaatggcgagcgggccttttgaaccattttttcccggcggggcgggcccggggggtcctcttccctgggttactatcttcccccccgcgcggttctatggccaggcctcccccgcttatacatcgtnnnnnnnnngtgtgcgggtcatatcttatcccccgggtacgctggggggcccgcccgtttgacaacgttccccgcccccagatggggcagagccctctcc

SEQ ID NO: 10018 - DNA, 389 bp, Homo Sapiens
gtggtcccgacaacctccctgtcccttgcccgcccacaggaagggggaaatggggcatttggggcccagacctacacttggagcccaggtccagcgtttcacccgaccgctttcccctacctcacgggcccccgctcccgccccagcacttttggctctgttgcgcgtggggatgcggggagatttgagaggggaaaaccccgccaggagggagagagaggcacccctctgggatgcgggtgagggaaggttggctgaagttcctagtctcaggccgtaggtgcctggccagtttcctgtttgtggggcagctggggcctgaggaggaggggttcacttcctcctcccaccccctgggagcggccctgcgctgtcactgacatctcatt

SEQ ID NO: 10019 - DNA, 362 bp, Homo Sapiens
tatttggaatctggaatcagtatttacagcttggctgtgttcccatttcatgcatgatagtcaatgagcagttagttgcattcaaagcacattgctcattttggttatatttaccttcaaaatcaggaaaatacggaataaatatttgcgtttatgtggttaatactcactaaacttttgaatagatttgtttttcactatccctttcttttgtaaaattattcataaaatcatttaaaaatacaaaaataaacagagttcactgaacccagatggtaaatggtggtgatgactattttttcttgtataccgaaagttattaatagaatattccagctgccctcctccagaatcttttaaaa

SEQ ID NO: 10020 - DNA, 997 bp, Homo Sapiens
ccacgcgtccgggtacctcctgaggcggcccccggatgaagagatctgggaacccgggagccgaggtaacgaacagctcggtggcagggcctgactgctgcggaggcctcggcaatattgattttagacaggcagacttctgcgttatgacccggctgctgggctacgtggaccccctggatcccagctttgtggctgccgtcatcaccatcaccttcaatccgctctactggaatgtggttgcacgatgggaacacaagacccgcaagctgagcagggccttcggatccccctacctggcctgctactctctaagcgtcaccatcctgctcctgaacttcctgcgctcgcactgcttcacgcaggccatgctgagccagcccaggatggagagcctggacacccccgcggcctacagcctgggcctcgcgctcctgggactgggcgtcgtgctcgtgctctccagcttctttgcactggggttcgctggaactttcctaggtgattacttcgggatcctcaaggaggcgagagtgaccgtgttccccttcaacatcctggacaaccccatgtactggggaagcacagccaactacctgggctgggccatcatgcacgccagccccacgggcctgctcctgacggtgctggtggccctcacctacatagtggctctcctatacgaagagcccttcaccgctgagatctaccggcagaaagcctccgggtcccacaagaggagctgattgagctgcaacagctttgctgaaggcctggccagccctacacgctgcccaagtggcaggccctgcgcagggcgagaatggtgcctgctgctcagagctcgcccccggcgtgggctgccccagtgccttggaacctgctgccttgtgggaccctggacgtgccgacatatggccattgagctccaacccaaattcccattcacataaggcacctgacccaaaaatagataatattagctaaaaaataacaa

SEQ ID NO: 10021 - DNA, 797 bp, Homo Sapiens
  misc_feature (625)..(625): n is a, c, g, or t
gggggcggtgcgacagcagctggagggcagaggaggcggcgcggggtgtcctgtcctcgccatgaggccgcagcaggcgccggtgtccggaaaggtgttcattcagcgagactacagcagtggcacacgctgccagttccagaccaagttccctgcggagctggagaaccggattgataggcagcagtttgaagaaacagttcgaactctaaataacctttatgcagaagcagagaagctcggcggccagtcatatctcgaaggttgtttggcttgtttaacagcatataccatcttcctatgcatggaaactcattatgagaaggttctgaagaaagtctccaaatacattcaagagcagaatgagaagatctatgctccacaaggcctcctcctgacagaccctattgagcgaggactgcgagttattgaaattaccatttatgaagacagaggcatgagcagtggaagataaaccgaagaattaaagatcccacttccagccgggcccctcatgtatccactggccgaccgcagagtgtccctacctcctctccagagcatcattcctttctatctgctgccagagccacggtgccatttactccaaggactcactttctanaattccacacctggagtgacctctagtcgctcagcatccactttgtgtctccaaattgtgtaggactctgtaatcttttgattagtttctgagaaaaacccatgaagcactttcacttttttttattcaaagcccatttaataaaacaacgttggtcagccccaatgccaag

SEQ ID NO: 10022 - DNA, 555 bp, Homo Sapiens
ttttttagacaaatgctcactttaatcacaattctaaattaattattttcacattaatatagatatttccataaaccaagaaaaactgagttattatacattttttaacagctaacatgatttgaaaattttttattaaaaattgatcagaagctagttgaaattctcaatgtaaatataaaatattcattacaattgtttttcaaagtaaattcagatctaagcttcctgaaaagctgtactatctcatatcataatagggatgactaagtacttgacaactactttctaaagaacttaacaaaaagtgactacttgaagattacatttacaacagaaaggctaacattctctgcagagctctcattttatcatgaaatgtggacaatcaggaacacgtggatgagtggtatcaagaaaaagggcatttcaaaatatttccacttttattaaaggttttgacaatgaagatttcataaaatgtctttaaatactattttctagagaataaccatctaaatcggagacatatgccataaaactgcaaccatttta

SEQ ID NO: 10023 - DNA, 855 bp, Homo Sapiens
tcttgggatcctctgtcaccatgtggttcctggttctgtgcctcgccctgtccctgggggggactggtgctgcgcccccgattcagtcccggattgtgggaggctgggagtgtgagcagcattcccagccctggcaggcggctctgtaccatttcagcactttccagtgtgggggcatcctggtgcaccgccagtgggtgctcacagctgctcattgcatcagcgacaattaccagctctggctgggtcgccacaacttgtttgacgacgaaaacacagcccagtttgttcatgtcagtgagagcttcccacaccctggcttcaacatgagcctcctggagaaccacacccgccaagcagacgaggactacagccacgacctcatgctgctccgcctgacagagcctgctgataccatcacagacgctgtgaaggtcgtggagttgcccacccaggaacccgaagtggggagcacctgtttggcttccggctggggcagcatcgaaccagagaatttctcatttccagatgatctccagtgtgtggacctcaaaatcctgcctaatgatgagtgcgaaaaagcccacgtccagaaggtgacagacttcatgctgtgtgtcggacacctggaaggtggcaaagacacctgtgtgggtgattcagggggcccgctgatgtgtgatggtgtgctccaaggtgtcacatcatggggctacgtcccttgtggcacccccaataagccttctgtcgccgtcagagtgctgtcttatgtgaagtggatcgaggacaccatagcggagaactcctgaacgcccagccctgtcccctacccccagtaaaatcaaatgtgcatcc

SEQ ID NO: 10024 - DNA, 586 bp, Homo Sapiens
  misc_feature (488)..(496): n is a, c, g, or t
tggtacgcttcccggaatttccgggatatcgtcgaccacgcgtcgttaaacaaaccttcaagaataaattactaaccagtcttaaccatcttttataaacatatgctcttataaatgttgtgactagatgcaattaaaaataatagggaatgtggtaggtttttaatttgtacatcctcttatttagtgttaccacataaatgatgagtttgtgtggttctgttttccatttttgttctaactgaaaactttttggctgagccactgcatctggcttacttattttgtcaattgtctgttccactagtatgtaaagtcttagagagcaagaatttttgtttatttctttctcttcctcctttcctttcttcctgttttacttcgttcactactgtattccacataaaatatatttggcatatagtaggtgttcaatatgttgaaggaatgaaagaatttatagacttgagttgcaatataaaatgtannnnnnnnnactgtgagttatggcaaaaaaagttttgaaagccgcttctaaataatgcagatgtcagtgctttgaccctggaataaaaactgaaatgac

SEQ ID NO: 10025 - DNA, 768 bp, Homo Sapiens
gggagttccgacgaaaaatggcggggtttcctgagttggtggtccttgaccctccatgggacaaggagctcgcggctggcacagagagccaggccttggtctccgccactccccgagaagactttcgggtgcgctgcacctcgaagcgggctgtgaccgaaatgctacaactgtgcggccgcttcgtgcaaaagctcggggacgctctgccggaggagattcgggagcccgctctgcgagatgcgcagtggacttttgaatcagctgtgcaagagaatatcaacattaatgggcaagcatggcaggaagcttcagataattgttttatggattctgacatcaaagtactggaagatcagtttgatgaaatcatagtagatatagccacaaaacgtaagcagtatcccagaaagatcctggaatgtgtcatcaaaaccataaaagcaaaacaagaaattctgcccctcatatggaaaatttgaaatgcagaggggaaacagtagcaaaggagatcagtggagccatgaaatccttgcctgcattaattgaacaaagagagggattttcccaagttctcaggaagcagcctgttatcccccctcagaggattcaccaaggaagtcttttcccgttgtcctaggaaaccagaggcttaacctgagaacttttttacccggattggaaccccccccaaccggaaactggcttccaggaaaaccccctggccggggaactggaaaagaaaagccaaccttaagactgcccccc

SEQ ID NO: 10026 - DNA, 786 bp, Homo Sapiens
ggtactggtctgatcctcagtgaagtccagcggaacctcaatagctgggatcgggcccgggttcagcgacaccttgagctcctactgcgggatctggaagatagccggggtgccacccttaatccttggcgcaaggcccagctgctgcgagtggagggcgaggtcagggccctcctggagcagctgggaagctctggaagctgagacactggcggcaggcacctagctatgtgaccactggccctaaaccttttccctctgtggcctcctggcttgcactgctccctctagaaagattccttcaggtctggaggcagaggaatgggcatagctgagccagttgccctcctagggcatgtttgaccaggactgagtctggaatctccaagttaaagatggtgaatcaatgcttcgggcttggagatggaacatgcctcctctccattcagctagaaggaccaaagcatgtggcatttggatggccagagtgccctgaagcaccactaccaaccttgcctccccctcctctcaaagagcctctgactgtgtcaccaaggggctcacatcttatgtctgccatgccaggggtgtcgccatccagatgtgttggaagcttcccctcctgccttatgctcacctgtggacaccgaggatgccctcacattggtgctttctcctcatcctcatgccccctttgccacaatggtatgatggcttggtagcccctcgaagcagatgcacctgaacttgctgctattaaaaagccgtgtgcctttctaccaaaaa

SEQ ID NO: 10027 - DNA, 320 bp, Homo Sapiens
atttattaaagaaaaaaatgtattttatgttatatataaatatattattacttgtaaatataaagacgttttataagcatcattatttatgtattgtgcaatgtgtataaacaagaaaaataaagaaaagatgcactttgctttaatataaatgcaaataacaaatgccaaattaaaaaagataaacacaagattggcgtttttttctatgggtgttatcacctagctgaatgtttttctaaaggagtttatgttccattaaacgatttttaaaatgtacactcgagcacgccgacgaaccccaaaaccctaaaacttgt

SEQ ID NO: 10028 - DNA, 932 bp, Homo Sapiens
gggagaggatccggcgccgaatcactgactggcacaggtgttgggaaaatgatccacagtctatttctcataaactgttccggtgacatatttctagagaagcactggaagagcgttgtgagccagtctgtctgtgattatttctttgaagctcaagagaaagctgctgatgttgaaaatgtaccacctgtcatttcaacacctcaccactacctcatcagtatctaccgggataagctcttctttgtatctgtcatacagaccgaagtgccacctctctttgtaattgagttcctacatcgagttgctgacacttttcaggactactttggtgagtgttcagaggctgcaattaaggataatctgctcatagcatatgaactcttagaagaaatgttagacaatggatttccactggctaccgaatctaacattttgaaagaattgattaaaccaccaacaattctacgctctgttgtcaactctattacaggcagtagtaatgttggggacacactccccaccggggcagctgtcccaacataccatggcgtccggcaggggtaaagtacacaaaccaatgaagcctattttggatgttgttgaagaaatagacccaattatagaataaatcaggatctacaggtctttgcagaaattcagggggtcattgatgcttgcattaaactatctgggatgcctgatctctccctttctttcatgaaccctaggcttctggatgatgtcagctttcacccctgcatccggttcaagcgcttgggaatctgaaagagttttgtcatttattcctccagatggaaatttccgactcatatcataccgtgtcagctcaccaaatctagtggcaataccagtgtatgtgatacatagtatcagctttaaggagaacagttctcgcggcagatttgata

SEQ ID NO: 10029 - DNA, 1333 bp, Homo Sapiens
  misc_feature (251)..(361): n is a, c, g, or t
  misc_feature (544)..(605): n is a, c, g, or t
  misc_feature (721)..(742): n is a, c, g, or t
  misc_feature (747)..(747): n is a, c, g, or t
  misc_feature (750)..(750): n is a, c, g, or t
  misc_feature (752)..(752): n is a, c, g, or t
  misc_feature (755)..(755): n is a, c, g, or t
ggggcgggagtacggggcgcgatatcaaccagcgcgaggagcgcagcaggggctgaacggggaggggcggtaggcgtacacaggcggaatgggacgcggtgttgcccaccgcggagtcgccaaggaggtgccgtcgcccgccccggcgggaccgacgctggaggggaggaatattaggcgggtgcgggaaagcggggagggggaaatacgggcggccggcgcccgggtttaacagggggcaggaaaaaaannnnnnnnnnnnnnnnnnnnnnnnnnnnnnnnnnnnnnnnnnnnnnnnnnnnnnnnnnnnnnnnnnnnnnnnnnnnnnnnnnnnnnnnnnnnnnnnnnnnnnnnnnnnnnncgcagcccgaaggcgtgggcgacacgctgaggggggattaatgcatgggggaagcggcgaggcagggagggacggggcgcccgcgtgaaaacacgagggggaagtaggtgggggacaaacagggagcgggggtgggggaaagttcgccgtaagagcgcgaggggggattgcggtacccggccnnnnnnnnnnnnnnnnnnnnnnnnnnnnnnnnnnnnnnnnnnnnnnnnnnnnnnnnnnnnnntagcgggccgggttgggcgccggggttgaacatgggggttgtgggcgacggggccgccaagcacggcgtgtttgtctaaattttcttttgactcggggggttccgggccgcgctgnnnnnnnnnnnnnnnnnnnnnncttgnttngntcncactgaaaaatacattttttattcgtaaaataaaagaataaaaccaatctgattgtgttattaggaaatttgttctggaaacttattcataaattattgatggaaattcttaatgtccattgtgctgtcacctaaaacagattcaatcattttcttgtaaagaaatgactgagtaaatgagtaaaagaataataagtaaatttataagctacaggttaaccatcacatattacaaccaagtatgactatgtgataacaacaagaatggtcacacagtacttaagatttggctgtgtccttaaggtcttactcggaaactatcacaccaacctacctttgggataattttatcagtagacacaggcaatgggtatctttttatcctgttttcttaaagtttgtatcactagtctataacagatagcaatgagatagttctagcaatagatgaagcaagggggtaactgtgttctagaagaaacatttatctgtcttttgatccaagtttctctattaattcttgaagaggtgccagctcacgcctatcaatcagattaaactcctgtaatcacagctat

SEQ ID NO: 10030 - DNA, 795 bp, Homo Sapiens
  misc_feature (769)..(769): n is a, c, g, or t
ggtattcccggcatcttccgctgcaatgggcaggacaactgcggagatggggaggatgagagggactgccccacgggcttcacgggccccaaatgcacccagcaggtgtgtgcgggctactgtgccaacaacagcacctgcactgtcaaccagggcaaccagccccagtgccgatgcctacccggcttcctgggcgaccgctgccagtaccggcagtgctctggctactgtgagaactttggcacatgccagatggctgctgatggctcccgacaatgccgctgcactgcctactttgagggatcgaggtgtgaggtgaacaagtgcagccgctgtctcgaaggggcctgtgtggtcaacaagcagagtggggatgtcacctgcaactgcacggatggccgggtggcccccagctgtctgacctgcgtcggccactgcagcaatggcggctcctgtaccatgaacagcaaaatgatgcctgagtgccagtgcccaccccacatgacagggccccggtgtgaggagcacgtcttcagccagcagcagccaggacatatagcctccatcctaatccctctgctgttgctgctgctgctggttctggtggccggagtggtattctggtataagcggcgagtccaggggctaagggcttccagcaccaacggatgaccaacgggggccatgaaaacgtggagattggaaaccccacctacaagatgtacgaaaggccggagagccctgatgatgtggggaaggcctactgggnacgctgactttggccctgggaccctg

SEQ ID NO: 10031 - DNA, 793 bp, Homo Sapiens
ggtacgtgtcaataccctctcaatgaaacttttggcatatgcactggattactggtcaaaaggtcaactaaaagcattgtttctagaacatgagggttactttggagcagttggtgcacttcttgggctgccaaatttcagctaaagcatcaggtctctctctctgctaataaatgtcatccaagaggaactaaaaccagaggcattattactgcattgtttgtcactgggaaccaaaggataaaagagtagcataagctgctgaatgttgccatattaaaggagagaacttggtaacgtgaagtatttctcattgaaatgctttcccttttgtatatagccagtgttaaatccttaaatgcaatacagcctctgattattgagcttcctcttaaaaagatttttttattttatgtagccaacattgcagtactgtatgctcaaacacaaatcttaaagtatcggaactgtttagcttatgaaaataatcgactctgaatatttgttacaagtctgttttatgtgttttgattactagtgagcagaaaataacataccctgtattcaaaattactgaaatggcaatcaaagatgatcatttttatgtgattttagaaatgttaaggcaatactactaattattgtaggtttttttaacgtatcacccaaagcatgtatgtgatctttccccattagtatcttttttctcaaatgccataattaactgaaatactattattaaattttcatgagaaattcttaaaatgaatcctgggaaaatgcacgttttggt

SEQ ID NO: 10032 - DNA, 449 bp, Homo Sapiens
cggggatttagtgtacttggattggtcagtaaattgactcccttgacatattagctcatgacaagctatgctcacggccttaaaatagagagtaaaatggaatggctgaatagccctcaaaaccaacgtatgtctagggatcatctacctaaggtagattctacagctgggcactagtaatgtcatagaaaaaaatattttttagaattcatagaaatctttgtgattactgaaaactaaatggtaataatcaaattgtcatccccatgacttattaacaataattttacaagaatatacaacaaagctaccataagactttgtgagtttacatatagaacacattggtcagcgtgtacgtgggtctaaaggagaatacaggaaaattaagatattctatacgaatgatgtgttagactttattaacatgacgatgtgccttcgtgacc

SEQ ID NO: 10033 - DNA, 1047 bp, Homo Sapiens
gggggagtccgggcgtgcgccggccgagggagggggcgcggcggctttggagtccggcgctccctcaagccgcggacgcgatgctggttgctgcggctcgggcggcggggctggcggggatgtgacgggcggcccttcgtctcaccttccgtcctcgggcccgcaggtcgcagggcggcctgcagctgggccgcggccgaggaggcagcgcgacctccgcacgattctttcaacttttaagaacaaatgcaccttatagctcatggaagaaaaaacacaaatcaagacatttttgggttccaagttgccaaagtatggaacaaaatctgtaagaagtacattgcagccaatgccaaatgggacacctgttaatttattaggaacttccaagaatagtaatgtcaaaagttacatcaaaaataatggctctgattgtccatcatctcattcatttaattggaggaaagcaaataaatatcagctttgtgcacaaggtgtcgaagagcctaacaatactcaaaattcacatgataaaataattgatcctgaaaaacgtgttcctactcaaggaatgtttgataaaaatgggataaagggaggtttgaaaagtgtttctttattcacatcaaagttagcaaagccatccactatgtttggtgtcatctacagaggaggttaaaccaaaagtctttttctggaccatctaatttgggtaaatttcaccaaaggcacattattaggaaggacttcatattctttcgatcaatactccaaaatcacagttgaatgggattttatggaaaccgatcagctggtagcatgcaaaggcctagagcgaactcctgtgccaccagaagcagttctggagaaagcttagctcaatccccagacagtagtaaatctattaattgtgaaaaaatggtaaggtcacaaagtttttcacattccattcagaattcattcttccaccttcatctataaccagtcacattcctttatagagctgtggatcttacaaggcttatcaggaccacagctatccattag

SEQ ID NO: 10034 - DNA, 416 bp, Homo Sapiens
catacaaaaggctgttcagaagattatgtctcacagatcctttcaaccgaaaaacagagtctgtaagaagcttaggtctcataaagaagatatttatgagtgtggcttttgtctaatggagtaaatcccaaggagaatcacaggaggcccacaaaatcttctgtatcagtagaaacactgccatcttggatcagaaaaggacagaaacagtacaaaatagagaccactagttcccctaaaattctactggaaagaagcagcctgagaaaagaactcaggtaaaaacacactctagctttgatgaaaaaggaagactcagaagacaaaaccaagagtctagagggtagagccaagaaccacggagaattattcttctgctttgaggcctgataaaagaaactccaacagggtaccga

SEQ ID NO: 10035 - DNA, 693 bp, Homo Sapiens
ggcagagcttcttggatccagactatgaagctcatccattgcaccttccctgggcctcccggatggcggcgtgtgattcagcaggcaagagttattggaagctagatttactggagttgcaagtgggagcactggaagtacgggcagttgcagtgttggagctaaagcctcaacaaataacgaaagctctaatcacagttttggaagcttgggatctttaagtgacaaagaatcagagacaccggagaagaaacaatcggaatcatccaggggaagaaagagaaaagcagaaaaccagaatgaaagtagtcagggaaaaagtattgggggacgtggccacaaaattagcgactattttgaataccagggtggaaatggctcaagtccagtaagaggcatacctcctgcaatccgttctcctcaaaattcacattcacattccactccttcctcatctgttcgaccgaatagcccttctcctactgcattagcatttggggaccaccctattgtacaaccaaagcaattatcctttaaaattattcagactgatctcacaatgctgaaattagcagcattagaaagtaataaaatccaggacctggaaaagaaggagggacgtatagatgatttgctcagggctaactgtgatctcagacggcaaatagatgaacaacaaaaattacttgaaaa

SEQ ID NO: 10036 - DNA, 504 bp, Homo Sapiens
ctagtaatattactagtgaattcactagtaatcactagtaatattactagtgaattcactagtaatgccaactacgtggagtgtgtgggcgcctgagtgtcctgacagcccttctgcaacgtttacccaccctggttcagagcccagcttctcctggagagccggaccctcagggccctgaaccgtcgctctctggctgctcctctgtcccttgagggaggaagtcctgggacccagggaggggaggggcctttgtctagggaagggactggtagggaagggacgagtctaggctgagggcaagatgggaggtcagaggtgacagaagcgttcaggggtgcctgggcctccccaggagctgtggactcagttcctgacctctgctttggggttcctggggtgggcttggggtgagtgtagttctggcctagcagcaccctcttgtggcttgttctagcgtgtattaaaacttgacacacacccacacacaaaaacaaaaacccc

SEQ ID NO: 10037 - DNA, 549 bp, Homo Sapiens
caatgatggcgatggtaaggatgatgacggtggtgatgaaggattatttactaaatggcatggcaatgatggtgatggtaaggatggtgacggtgatgatgaagtgattacttactaaatggcatggcatggaaatgtctttagtttgatgcataaatttgaagatgcaccactgtatatggtagagctctaatagccacctaccgaggctacatcggcagctgcagcggtgctgcagagttaaagcaggtcgcactgagctgacacataaagccctttgtgggatactgtagtggtagtgttggcaatcaacagatttaggcactcaagtttaaggcagcatttgaatggaagcagctgacttttgacaatagtcctttgtcttgaggtggtgaatatcttctgtgtttattatgccaggatttcagtgctgactagattcctcccagactgaggtgctgaagatgtatcacgtttcgaagagttctttccactgggctgtaggctaccgcagagatgttttctttttcgttatcatagactacttca

SEQ ID NO: 10038 - DNA, 378 bp, Homo Sapiens
tcccttgagcttattctgttgctgattcatatcttgtgttcaattattttggaagcttttcagtcgacattctgtagagtgtgttctgaggaggaactgtgataagaaagtttattataaatattatgtaaaatatatggctctctctgcaccagttatatcttattggttggtcatatcactggaaactggaacctttgattagcaaaatcaatattgaaataagaaatagttcttttatattgtgtcatttggacactttcaagtacaaaatggtaataataacttggattgaggcggaaacacctattttatggctatctatctaaacatcttaaaatggccttctctgtaatacactttcttttaaaagacttc

SEQ ID NO: 10039 - DNA, 619 bp, Homo Sapiens
ggatattgtaaggtcaaagaagcaacgccaacaatcccaccgttgtcacacccctgctgcagccccctttaggacaccatagaaattctacacagtaacacggagatgacaagaggccacatactccatgctggggcataaagtgggcacgacaatttttcactccttggtctgagtaagtgagctttgtggcatcaaatcattatgtttgtatgtttggaaggccacgccatctatcctcccacccagggcaggaatttctgctcccacttttgctttcctggaggtgaaataggaagaacaagggcccatgctcaagtccccaaagaatggcaggatgccctcagtggaggcagactgtatttaaatgcaagttcacctctttggggtctaggaaaagccacccgtaggttcatttgctgggaaacacggtctgcgtgcctgaggcagtggacaccagggttgtggccttggcaagagctgactttctccggaggtctgtctgctgtccggagtggcagccacttcggtgggcaaataggacggtcatctctgggcccaaggacgctgcttcaggctgggacgccttgagggtggctggctgttcaggctttccgga

SEQ ID NO: 10040 - DNA, 300 bp, Homo Sapiens
ttcagcactcacaggaaatgacagtatctgtacagctctctgggtacgcaggccttaggatttagaggcagctcctgccctgtgggtatcagtatcatgacaacccacctgaaatccatgtgagtcccttactgaggcccataagctggggagttctgtctagtccagctctaaagaagagcaaggaagagccattatcagaatattcttggctaggagtcacttttaagctccaagaagtaactcatctgtctgcccactatctctatttcattaggattccaaggtagcacccactct

SEQ ID NO: 10041 - DNA, 355 bp, Homo Sapiens
cttgaacgtatgctaccggttgatttagggaaaatgcctcagtgagtctagtcttgaaggaagactgggcaaggtgagggcactcactgaccccagtgcaaccagcctcaatctcctaactcgggccttcagaatcatctccccatgctggctccatggccagagggagacccaccggtgacagggccacagcttggacaagaagtacaggaggcaagcgtggaacagggattgcaggggagtctgcagggagagaaagaagagttacattaaaaagatgtctcagtgattgatgacaagggtaagatcagggtgaagctgggtcccacaagcacacagaacagagaatctatac

SEQ ID NO: 10042 - DNA, 181 bp, Homo Sapiens
ttcagcacatctagtctgggaccttaattgcgtcctgtttcacacctttacaagcagctggaatgtgaaaatatttacctcacttgggatatttcataggagtggagaagaacccgtggctactgttgctctgtctaggatgaatttggcttagaatagcgaagagtggaattgtgcctaa

SEQ ID NO: 10043 - DNA, 337 bp, Homo Sapiens
cctaatcagctagagaggcctacttcctccttggacggtaaatagatgacattcataggtcaacgggaaatcctgcatttatggcaataactgaccttgcaggtgtttcaaaattcaggccgtttcagaccatgagtgcacacagggatgactgtgggaccccccagcaaggcaggcagctccccgtcagcacatatgctagcacttctgcgaagatttctgcagcaaatatatctgctgctgttgatactaagagggagatctaaggacagccattgcagttccgctttgccccacaatgagccaggaaaaaagaaaaggatgctttagagattag

SEQ ID NO: 10044 - DNA, 446 bp, Homo Sapiens
ttcagcacattagtcgggggaggtgaggaggaggagtgaaaaggataggttgtgtgactcttgtctacctggagacctggtttactgggacaggagaatgtgggagatcttctgacacccagtttattgatctcttaaaatcttggtggttctgtctccattatttcccagccaccattttggtgagagcttggtctgaagtggtagtgtattatctgttggttctctctcggtttcagccagctgttagagtgtttggtgcctgtgggggcagaaacaggtgccaggaggaaatgagaagggattagggctgagcatgtgtttcttgcatttagtccttctataggtttgcagaagggggctgagtgaatgcttattctgttaagcagcagacttttgtgctttgtgtatatgccttattactgctactaaatgtgctgagggaa

SEQ ID NO: 10045 - DNA, 567 bp, Homo Sapiens
ctgcctgccaaattgcctgcaggtgtccagaactttctccagttcagtgcactgcgcttccttgtggtaactcagaaagcagcctttacttgcatcaaaaacttatggaaccgtgaaacccctgaaggtatatggtggacgaatggctgaatcgatgctggccattctatgccacatcctccgaggagaacctgtgattcgagagagactaagcaaggagaaggaggggtctcgaggagaagaggatacagggcaagaggaaggtggctcccgccgggaacctcaagtcaaccagcaacaactgcaacagctcatggacatgggcttcacaagggaacatgcaatggaggcactgttgaacaccagcaccatggagcaggccacagagtaccttttaacccaccctcctccaatcatgggaggagttgttcgggatctcagcatgtctgaagaggaccagatgatgagagcaattgctatgtctctgggacaggatattccaatggatcaaagggcagagtcacctgaggaagttgcttgccgaggaggcagtaggcaggacagcag

SEQ ID NO: 10046 - DNA, 357 bp, Homo Sapiens
ttcagcacatttaggagctagaaacacagagaacaagaagaacaaaggccaaaataaagtagataaagattctgcgtttaagaggtgtaaactatgagctgctgtaggaaggaagaccagaattccttttaattagcatatctgtcatccaatgaccattctaaatttaaatgagcttggatcagctgaaagataagatttagaaccaagacaactacaaaacaaaagattaaagaaagtactgtcaactgctactagggtgggacataagaacagcatctggttttctaaactctggtaacaataatagaatgatgaaatgtatttcaggaagataggaaaagcccagtctccttg

SEQ ID NO: 10047 - DNA, 354 bp, Homo Sapiens
  misc_feature (245)..(259): n is a, c, g, or t
ttcggcacatttagtcagagggggctatgagaagggctcagtgggacccaggctccctggggttgtacagttgcattaggtgaggtcttcctgggagagacagtctgcctgttccaaggtgttgggggaggaaacggaggcatttatattgtaacatgatgtttctcaatgttttctttttattacaaccaacagtttcttatttcattagggaggatgcctttatcaccctactgagtaaggcnnnnnnnnnnnnnnncttttaaagtaaggggtgaaatcggtattcatcaaaaattttttggtactaccttctcatatgactaaaggtgcggaggggtaccggagctcgaa

SEQ ID NO: 10048 - DNA, 381 bp, Homo Sapiens
gggaatggaaggctttgccatgggcctgctgcgtcagaccagtactgggaaggaggacggttgtaagcagttgttatttagtgatattgtgggtaacgtgagaagatagcacaatgctataatatataatgaacacgtgggtatttaataagaaacatgatgtgagattactttgtcccgcttattctcctccctgtgatctgctagatctagttctcaatcactgctcaccccgtgtgtattagaatgcatgtaaggtcttcttgtgtcctgatgtaaaaatatgctgcttgaaatgagaaactttgatctctgcttactaatgtgccccatgtccaagtccaacctgccggtggggcgatcctctagacgcgaccgcag

SEQ ID NO: 10049 - DNA, 302 bp, Homo Sapiens
gcgcagctgctgctgcggtgatctagaggatcccgtctagcctcgccagggtcgggcaggcagtgggtcgggttcacctcgagctcctcgctttccttcctctccagcagggccagggggtccattgaacaccaacagggccaggctctcccttagcaccagtgtctccatttgctgccaggagcaccaggttcaccgctgttacacttgggaccaggagggccgccggggccctggggtccagaggggcctcgggcaccaggcaagccaggagcaccagcaatcgtgagagagggcaggct

SEQ ID NO: 10050 - DNA, 503 bp, Homo Sapiens
ctgactctccttaaaggacctaagaccattagatgggtcactggaaaagtttttttagtttaacaggcatggtgcaacaccaaaaaagccaaaacagccttaaatagcattccaacactctttcttccatgccttcagtcctgctatcttggtggtattaacacatcaaccatgtctccactgtaagagctatacttcaacctctgtggggagaaaacgactcaattagaaaattccttcctcccagcaaaaaagacacctaactcaaaccctatgtgtgctcacacggctttgcactcgttgtttaacacatggatcccaaaataaacttgtctcccttcacttccaacatagaggactactgtgtgacccttttaaggttcacctttaagggaggaggagtggcgagtgtgaacacctttcagcatctcactctctgatcttcaggggttgctcttattcttaacgtgaaaactgtactcatagataagaataccgacatg

SEQ ID NO: 10051 - DNA, 542 bp, Homo Sapiens
tatcacattggcctagcacaggtgaggggcacttagtatattttaattagatcaatgaataaattaatgaatttaccaacctgctggaaacgaaaagaatggaaacagctcctggagagaatacttgggaactccagagtttgcccattcattccttcattccctcttaaactcctgcataaaggccactgccctgtgcccacgacggtgcttataccgagagcgtcaaagatacaggaatcacagtcttgaccttcattattcccatttgaatgctgtgtcccaggccccttattgtctcacagtatttaccacaactaccgtatgggctaatcctacatctctattttacagatttacaatctcagagtggtaaagtctccttaggccaaggtggctcagcggattccacaccagtcatcacaggctgagcgtcacagtacaaagcaggagcggcagggaggccgattccgcggggaaaccactccccagctattctaggccttgcaaatccacccctcctatctaagatcccagccggc

SEQ ID NO: 10052 - DNA, 804 bp, Homo Sapiens
  misc_feature (226)..(307): n is a, c, g, or t
cggcggtgtctagaggatccctcttccaggctggtcctgtccctccctggccatctcagtggatacccgcattggagagccaggagaagagctaagagcagcttgcccctcatctggtttcctccgagtctgcttgacaatctctttcaaatcaactttactaaggaagaagttacgtaccgcaaaatgccctcatttgaattgtgtaaagaatgagatttgacannnnnnnnnnnnnnnnnnnnnnnnnnnnnnnnnnnnnnnnnnnnnnnnnnnnnnnnnnnnnnnnnnnnnnnnnnnnnnnnnnctatcctggctcacagtgctctgtgagcttccttgaccatggttcctcccgctcaccatcactcaatctctctcctcttcagtgaagcatccagaaagagttactgttccaggtctacactccccttcccattcactctgcttcggataaattctgatttggacaattacataaatgcccacctgggtccagcctcatcttatttctcctcctccctcatcctccccattggcacttcaccctgaaaccacacccccagcaaggagctctacacacatggatcctcctagcctttactcaagccgcatggtaagctcttattgatttttcaacacacaccctaaacggcccttcatggtcaagtgtccctcaacctcctagggaactggaagctccccctctggacttccaaatgtcacagacttgtctctattgagacacatatcactccaatgaccgtgtttacatgttgttatagatggaagtatgtctcccct

SEQ ID NO: 10053 - DNA, 815 bp, Homo Sapiens
  misc_feature (649)..(676): n is a, c, g, or t
gaagttggatcctttccagaaggttgtatgaaaagcagtagtgtgcacgaattgcgaaagaagcttagtgaaatcagtggatttcctttggatgatattgaattcgctaagggtagaggaacatttccctgtgatatttctgtccttgatattcatcaagatttagactggaatcctaaagtttctaccctgaatgtctggcctctttatatctgtgatgatggtgcggtcatattttatagggataaaacagaagaattaatggaattgacagatgagcaaagaaatgaactgatgaaaaaagaaagcagtcgactccagaagactggacatcgtgtaacatactcacctcgtaaagagaaagcactaaaaatatatctggatggagcaccaaataaagatctgactcaagactgactctgataagtgtagcattttccctgggggagttttggttttaattagatggttcactaccactgggtagtgccattttggccggacatggttggggtaacccagtgacaccagcactgattggactgccctacaccaatcagaagctcagtgcccaatgggccactgttttgactcggaatcatgttgtgcactatagtcaaatgtactgtaaagtgaaaagggatgtgcnnnnnnnnnnnnnnnnnnnnnnnnnnnngctaaccttctattagaaaaggggacaggggaatgagtaaacttcttttattgcggacaaatgtgcacatagccgctagtaaaactagcctcaaacaggatgctcatagcttaataataaaagctgtgcaaaggccaaa

SEQ ID NO: 10054 - DNA, 1355 bp, Homo Sapiens
  misc_feature (101)..(193): n is a, c, g, or t
  misc_feature (804)..(820): n is a, c, g, or t
taccgccccggatttccgggatatgtcgaccacgcgtcggcggcggcggaggaggaggaggagctcagcctgagccgccgctgccatcccggagcgagcannnnnnnnnnnnnnnnnnnnnnnnnnnnnnnnnnnnnnnnnnnnnnnnnnnnnnnnnnnnnnnnnnnnnnnnnnnnnnnnnnnnnnnnnnnnnaatatacaaagtgaagccacatgccaaacttgcagtcagcgattgcagcagttgctgccagctgcagccgcgcctgaagccgcgccgcgcgggccgagggctcctgcagctgctcgcgcgcactcggaggctggagaaggacgaagactgagactgacacttctgctcccggacgaccggctacttacgcgggggccccccaacccggcccagagcaacgtgatcttcgacgaccgctcctccgacccctatcccaccccgctgtgccgccccgcccccccagaatttttctaaagcactcgctcggtggggccgcctcccaggttaccgcaacacgcccctacctgtttcccaagaggacccggcgtctccccccggctttgcattctcgccaatcaaaatcgcccgcgggccatctcgagcttttctgcacagacctatctgcccggcccgcagcccccttattgaaccgcacttcccagccgcgcaccaggggacccgccttttccgataatttagccccgcggcccgtggccgcccatcggcactcgcgggggcgggccctggccgtatacggccggtcccgcccatattacgggcgcccttttctnnnnnnnnnnnnnnnnntggcgccggcgttttgataacgcggcccgcgccgggctcatacattagcgggccctggggccggcgctttatgttgctgagccagagagcagcggtgtggggggctgtatggggggcgcgctaataatcggcgtcggggtgcgcccaccgcgcacgcatatggcctcccctcttcctcttggccccccgcggcgctgtgttattagacgccgttctctgcccgcgggccgcgaaaaggatccgcccacgctgttgcgcgcgattgcgcggtcgcgcgcgcacccggtaatcccggtcgccgtgtcgggttgcgccctgctacggggcgccgcgccgcgttttggtataccgcgaccgccgcgcggagcgcccgcctttttctcgccccggcgcctcagcctgatagtgcacgacttcattttttaggagacacgggccgcttctcttttaggggcgggcagacacgaatgccggatatgtcgaagcatttttcgaccccccacagcgcttaatacgcagaggccgccgcggaggc

SEQ ID NO: 10055 - DNA, 681 bp, Homo Sapiens
  misc_feature (49)..(99): n is a, c, g, or t
  misc_feature (536)..(574): n is a, c, g, or t
gcctatatcccagctactcggaggctgagcaggagaatcgctgaacccnnnnnnnnnnnnnnnnnnnnnnnnnnnnnnnnnnnnnnnnnnnnnnnnnnncaaacaagagcgaaactctgtctcaaaataattaaaaaataaaagacagaaagcaaggggtgcctaaatctagacttggggtccacaccgggcagcggggttgcaacccagcacctggtaggctccatttcttcccaagcccgagcagagggtcatgcgggccccacaggagaagcggccagggcccgcggggggcaccacctgtggacagccctcctgtccccaagctttcaggcaggcactgaaacgcaccgaacttccacgctctgctggtcagtggcggctgtcccctccccagcccagccgcccagccacatgtgtctgcctgacccgtacacaccaggggttccggggttgggagctgaaccatccccacctcagggttatatttccctctccccttccctccccgccaagagctctgccaggggcgggcnnnnnnnnnnnnnnnnnnnnnnnnnnnnnnnnnnnnnnncaaaccacctctacatattatggaaagaaaatatttttgtcgattcttattcttttataattatgcgtggaagaagtagacacattaaacgattccagttggaaaca

SEQ ID NO: 10056 - DNA, 222 bp, Homo Sapiens
gggtatcacactgtatataaacatatcaatgtttgtcctgtataagaattactaaattacaaatgcaatttcatttaaacttctaggttaagtttgagcctgaaattttaatgaagtgcaatactgagtgtgcctcattatcttgcagctgtaaacatattggaatgtacatgtcaataaaaccactgtacatttttatacagtgataaagtctaaacaaac

SEQ ID NO: 10057 - DNA, 885 bp, Homo Sapiens
  misc_feature (554)..(565): n is a, c, g, or t
gggaaaaacctgtagtgtctgcaccaaggttcctaaagatcctgctgtttgccttgtgtgtggtacttttgtatgcctgaaaggactttgctgcaagcaacaaagttactgtgaatgtgtactgcactctcagaactgtggtgcaggaacaggtattttccttttgatcaatgcatcggtaattatcatcattcgaggtcaccgcttctgcctctggggttccgtgtatttggatgctcatggagaggaagaccgggatcttaggcgaggcaaacctctctacatttgtaaggaaagatacaaagttcttgagcaacagtggatttctcatacttttgatcacatcaataaaagatggggtccacattacaatgggctgtgactctccacctcagcattgcatcgtatcatcattttcgctacgaatttatttttcaacaataagctttaacttaatttgggggattaacacttttgctgagggagaaaaagaaaacatacattatgaagcctttccaaaattaggtgcttggtaatcacgttaatggtataannnnnnnnnnnnaatatctggagaacattaataacaagttaaattattctttagtggtcattttttaagtgcacaattaataagaagcacaacttgttcacaaactcattcagaaatgattctcccaacaatgcatatcagctattcattgatacttagagtgggtgtgatttatttgacattttactgctttctttctggctgggtggttttaatttgcatctgccaagcataatggcatcttttttcctctgccattcttgtgttgattggagaatttttctgtatgtaattagaaaaaaatgtaaaacatgatttatgtgaaatactgt

SEQ ID NO: 10058 - DNA, 872 bp, Homo Sapiens
gggaagaagagggaggcgaggaggaagaggaggcggccatgtatgaggaggagatggaaagggaagagatcaccacgaagaagagaaaactggggaagaacccagacgttgacacaagcttcttgcctgatcgagaccgtgaggaggaggagaatcggcttcgggaagagctgcggcaggagtgggaagccaagcaggagaagatcaagagtgaggagatcgagatcaccttcagctactgggatggctctgggcaccggcggacagtcaagatgagaaagggcaacaccatgcagcagttcctgcagaaggcgctcgagatccttcggaaagacttcagtgagctgaggtccgcaggggtggagcagctcatgtacatcaaggaggacttgatcatccctcaccatcacagcttctacgacttcatcgtcaccaaggcacgggggaagagtggaccactcttcaactttgatgttcatgacgatgtgcggttgctcagtgacgccactgtggagaaggatgagtcccatgcaggcaaggtggtgctgaggagctggtacgagaagaacaagcacatctttcccgccagccgctgggaaccctacgaccctgaaaagaagtgggacaagtacacgatccgctgagcatccaggaggctgcgcggccccggctcctcagctccctcagtgtgccccgtggtgtcaccgggactccaggcacccgctcccctgcgaccatgccaggcacgctgggaggaggacggcagctgctcgtgtcctgcccctgccacatcagtgactgctttattcttttccaataaagaagtgcacgtgtcagagctggagcgcctgcattgtgagaaaccaaaaaaa

SEQ ID NO: 10059 - DNA, 709 bp, Homo Sapiens
  misc_feature (24)..(24): n is a, c, g, or t
  misc_feature (308)..(338): n is a, c, g, or t
ggtcctcagctcggctctcgctcnccggcgccatccctatagagaagaacggaggtacggcctgtggtcatggcgctgttcccagcctttgcggggcttagtgaggctcccgatggcgggagctccaggaaagagttagactggctgagcaacccaagcttttgtgttggatccataacgtccctgagccaacaaactgaagcagctccagcccatgtttctgaagggttaccgctgacaaggagtcatctgaaatcagagtcttcagatgaaagtgacactaacaaaaagctcaaacaaacaagtannnnnnnnnnnnnnnnnnnnnnnnnnnnnnngaagcatcagcatcataagaaaaccaagaggaagcatgggccgtcgagtagcagcaggtctgagacagacaccgattctgaaaaggacaaaccttccagaggcgttggaggcagtaaaaaggaatctgaggaaccgaatcaaggaaataatgctgcagctgatacttggacatcgctttgtttggcttgaggacattcaggctgtgacgggagaaaccttcaaaacagataagaaaccagatcctgcgaactgggagtacaagtctctctaccgaggggatatagcaaggagtcatctgaaatcaaagtcttcagatgaaagtgacactaacaaaaagctcaaacaaacaagtagaaaaaagaagaaagag

SEQ ID NO: 10060 - DNA, 995 bp, Homo Sapiens
  misc_feature (232)..(346): n is a, c, g, or t
  misc_feature (374)..(388): n is a, c, g, or t
  misc_feature (405)..(422): n is a, c, g, or t
  misc_feature (546)..(554): n is a, c, g, or t
gggggtcgtgggcgcgtgtgtggaatgggaggaggtcgcgctgtccatgggcgtccttggcctgcgccacccagagatgataaatagccaaagacgtcaatggcacccatggacatagtaagcatagtaggagctgaaaaactagaagcaatgacaatgtcaactattttgagcaaaaagaagcagtgtcttcggaacatttgatcataaaaccagaaattaaaggatgagnnnnnnnnnnnnnnnnnnnnnnnnnnnnnnnnnnnnnnnnnnnnnnnnnnnnnnnnnnnnnnnnnnnnnnnnnnnnnnnnnnnnnnnnnnnnnnnnnnnnnnnnnnnnnnnnnnngaagcgcggagacacgcccccgagaggnnnnnnnnnnnnnnngaagagaatattgttgnnnnnnnnnnnnnnnnnnaaaaactttttaaaaccattcttttggggcgcggcgccccccacagggaagcaagaatgggttaaatttgtgttccaagaaaaacaccgcggcgaaaacaaaggggtttggaattcccccaccnnnnnnnnngccgcgcggggggcaccaccggggctgttgaaaaaaataccaaaaggggaccgtttccggggagctttccggggggattacaacacaagggggggccccccgcgctgcctaatataatatattccgcccccccgccccgctggacatcttgatgggggaggaagggtgggggaaatttcataaaaacacctttcggcccggccggcggggaagacccctacccgcacaccgggagattgattgaacaccctaattttcctcgacgcggcggccacccccacacgctggtggcgccccgtcagcgaaatataataatttcgcgcacggggagaaacaaacggggcggagaaagaaaagattgtctctctatgtgtgcgccacaccttttatataaacagaaaggaggggtggggcaaacccctcaccacgggtggagattgg

SEQ ID NO: 10061 - DNA, 1027 bp, Homo Sapiens
  misc_feature (919)..(919): n is a, c, g, or t
taggctaggtacgaggctgcgtggtaatcggcacgaggcggccaacatcaccgttcactgccacccctcccagactgtggacgggaggatggagtcgatggccgtcgctaccgacggcggggagaggccgggggtcccagcgggctcaggtctgtcggcttcccagcgtcgggcggagctgcgtcggagaaagctgctcatgaactcggaacagcgcatcaaccggatcatgggctttcacaggcccgggagcggcgcggaagaagaaagtcaaacaaaatcaaagcagcaggacagtgataaactgaactccctcagcgttccttccgtttcaaagcgagtagtgctgggtgattcagtcagtacaggaacaactgaccagcagggtggtgtggccgaggtaaaggggacccaactgggagacaaattggactcgttcattaaaccacctgagtgcagtagtgatgtcaaccttgagctccggcagcggaacagaggggacctgacagcggactcggtccagaggggttcccgccatggcctagagcagtacctttccagattcgaagaagcaatgaagctaaggaaacagctgattagtgaaaaacccagtcaagaggatggaaatacaacagaagaatttgactcttttcgaatatttagattggtgggatgtgctcttcttgctcttggagtcagagcttttgtttgcaaatacttgtccatatttgctccatttcttactttacaacttgcgtacatgggattatacaaatattttcccccagagtgaaaagaagataaagaacaccgtactaacagctgcacttctattgtcggaattccctgccgaagtgataaatcgaatcatggatacctatcgcaaaaatgggcgaaagtcttcacagaatctcggggncaacttttttcactttttatccttttggcatggaactggcttggattatggggggctctgaaataaccatgaaggcctgtaaaaaccgggaaagggagaagctttacc

SEQ ID NO: 10062 - DNA, 1182 bp, Homo Sapiens
  misc_feature (125)..(125): n is a, c, g, or t
  misc_feature (615)..(679): n is a, c, g, or t
tgcgcagggtcagcaagcgcagtacgagtgagtgtcacgtactcccccacacaccctcgggcgcgaaactaggcagcagagcgaggcggcgggggcatgtgtatttacacggagtcgacggtctncggagcgcggccagcgcgggcgcacggacgccggccgacggaatcgccgccgcggctgacgtccgcggatcggttggttgtctagcgccactggtggttggccggcccacggggtggtttattttggtgcggggaggggaagcgacctaacaggcgtcgctacacgggcgatgtattgtgcacgagaacagaaggaggagcggctggtgggcctcctcttgtcttgtgcggggcacgcggcccaacatggcgtgtcttttgagggccttcgtgggaggggggagggggcgggagcccagcgcacgcgttttgccttgtatgcgtggcgtcggggctgcggtattcgggcgctgggcctacccctgcctggcgggtccggtgggtcgcactgtactccgcggaccgggtctcggcgggtttgtctctggggggagcatgcgctgatgttcgtggtataggtgtcagttgcgcgtctgttgtctgtgtccgnnnnnnnnnnnnnnnnnnnnnnnnnnnnnnnnnnnnnnnnnnnnnnnnnnnnnnnnnnnnnnnnnccaattacttttattgatcttacagaatagtgtcttggtctctctactgcattcaacaacaccaaaaatctacaacgctggtgtcaacagcaataattactaaaaattgagcaagcaatttatgactatccgcaattatggaaaatggattcaaaaggcatctgctgcaataacaatagtatttatgtgtgttaagacacaaaaagccaacataactttagtacctcaggcatttttctaattgtgatatttatacaaattttggaaatcgatgagtacactgaccagtcaccgataatcatgaaaaagaaaatacacataagtgcctatttagctaatactgtgtttaactctagcttgacattgtgtgatactgtaatccctttcaaagcactggaaatcactcacatttgcctcaagcttttttttaaaacagaagaataatctgatgaagatgcccttatttcagaaactgaggtcattactatctttgcttgaaacat

SEQ ID NO: 10063 - DNA, 773 bp, Homo Sapiens
  misc_feature (726)..(726): n is a, c, g, or t
gggaagcgattgcgagccagcgcgcgcgcttcggcgttcccggcggtctgcgaagtttccggagccccggtcccgccgcgggttcgcgcttgtgctcgcgctcgttcctggagtcggcggccgctgcgcgcgctcgttgcccaacccggtccccgcccccagacacgccgggctctcggggcaccacagccatgtgctcgttagcgtcaggcgctaccggcggccggggcgctgtggagaatgaggaggacctgccagaactgtcggacagcggggacgaggccgcctgggaggatgaggacgatgcagatctcccccacggcaagcagcagaccccctgcctgttctgtaacaggttattcacatctgctgaagaaacattttcacactgtaagtctgagcatcagtttaatattgacagcatggttcataaacatggacttgaattttatggatacattaagctaataaattttattagacttaagaatcctacagttgagtacatgaattccatatacaacccagtgccttgggagaaagaagagtatttgaagccagtattagaagatgaccttttacttcaatttgatgtagaagatctttatgaaccggtgtcagtacccttctcataccccaatggactcagtgaaaatacatctgttgttgaaaaattgaaacatatgggagcccagggcactgtctgcttgaagccgcatgggccgnagcacgtgaggatctgcaaaaaatgaaaccatttgctcaaggatttg

SEQ ID NO: 10064 - DNA, 1543 bp, Homo Sapiens
  misc_feature (561)..(621): n is a, c, g, or t
  misc_feature (796)..(907): n is a, c, g, or t
  misc_feature (1485)..(1485): n is a, c, g, or t
attgcacaggaggccttgaacagagccaagtgccccagagactccactttcattcctaactgttctcaaattaatgctcatgattgagtattctcagtgcaactcgtagagtttgataagtaaaagttacatgcccctgttttcctagcatgatattcactgttatcaaagacaagaggcagaccattcattcattctcaaaacactgaatgccattctgtgcctagtgctatacaaggcatgggagattcagtgtgaataagtctttgctctccacctaacaagggacagttttaattatagattgtcttcctattaagtatgagttttagtaggcattaaaaatcgtaattagtttgataatatgagacccaaccctaacttgccagaagagtaatcagttcatgaaccattgatatttcctgtatatttcatgaatgtgacttcagtcattctagtgttaatactgtggaatgtcattggtgtagcaacgtgggttcaccaaaacacctttttatacaaaagacagatgcgtgaattaaagagattaaaggataaaannnnnnnnnnnnnnnnnnnnnnnnnnnnnnnnnnnnnnnnnnnnnnnnnnnnnnnnnnnnntatgaactatcgcgaaccagcagccacctgaacaatgcctccagcgcccgcccagtttgctctgccagcccctaccgtcctcccccggaccagccttgacaccctccgtacatgcggatcactcggagaaaacaccaccgctgcagcgattccttgttagataaaagcttactcnnnnnnnnnnnnnnnnnnnnnnnnnnnnnnnnnnnnnnnnnnnnnnnnnnnnnnnnnnnnnnnnnnnnnnnnnnnnnnnnnnnnnnnnnnnnnnnnnnnnnnnnnnnnnnnnagccgcctaacctgtggcgccctcgttatgccgacccacgtagactagcggcaggcatagtggggccgcactcgagatagaacaaacgccgccgcccagcctatcctcgcagtgtccccgagaagctagcgggctgcacaacagtttttgacgccgccttccgttcagaacccgccagcaccgccccccgcacgactagcgctcgccgacgcccgttgtcatgcgttacgcccggacgcccgctggccgtccccgctcgcccttatagcgacgcggggactgcgaatcgctggtcgtttgatcaccgacattgctggggtcggtaattcggcgctacgcgtgtcttcgcgtgatcaccgcctcgcaccggacttgaaacctcgtgcgaccgcgcaacacgcgccacatccgtgcgtgagccgttggctcgtctagcgcacacaacaacacgcgcgtgaaatgacgcccacacctcatgcgcggagcctcgaaaatctatcgcccgcccatagtccctcctcccgcactgtcgtcgaccgtgacttatgcgcccttctccatatcctgttacgccacantgcgcgttcgcacgccgtacttgtcctcggtgtttgcctagtgcacgcaggtgatact

SEQ ID NO: 10065 - DNA, 981 bp, Homo Sapiens
aatcaaaaccgcggttatgctgccggagttaccgccgccactgtaggaaaagtaacttcagctgcagccccaaagcgagtgagccgagccggagccatggagggccagagcgtggaggagctgctcgcaaaggcagagcaggacgaggcagagaagttgcaacgcatcacggtgcacaaggagctggagctgcagtttgacctgggcaacctgctggcgtcggaccggaaccccccgaccgggctgcggtgcgccggacccacgccggaggccgagctacaggccctggcgcgggacaacacgcaactgctcatcaaccagctgtggcagctgcccacggagcgcgtggaagaggcgatagtggcgcggctgccggagcccaccacacgcctgccgcgagagaagcctctgccccgaccgcggccacttacacgctggcagcagttcgcgcgcctcaagggcatccgtcccaagaagaagaccaacctggtgtgggacgaggtgagtggccagtggcggcggcgctggggctaccagcgcgcccgggacgacaccaaagaatggctgattgaggtgcccggcaatgccgaccccttggaggaccagttcgccaagcggattcaggccaagaaggaaagggtggccaagaacgagctgaaccggctgcgtaacctggcccgcgcgcacaagatgcagctgcccagcgcggccggcttgcaccctaccggacaccagagtaaggaggagctgggccgcgccatgcaagtggccaaggtctccaccgcctctgtggggcgctttcaggagcgcctccccaaggagaaggtgccccggggctccggcaagaaaaggaagtttcaaccccttttcggggactttgcagccgagaaaaagaaccagttggagctgcttcgtgtcatgaacagcaagaagcctcagctggatgtgactagggccaccaataagcagatgagggaggag

SEQ ID NO: 10066 - DNA, 555 bp, Homo Sapiens
ttcagcacattagttacggaatgtgcataatcactagttcatgatcttctttccctaatcttcttactgagtgctaccctctgccaccaaactcaagttgagctgactcagtaaaatttattaactgttccaagccagtagctttatgctaccaaaaaagccaatgatttccaatattaaatagcagaacagtccctcaaaccactgctgtgatgatcttggggccaagccagcttttggtattgtcaaagcgccacgtgacacctgccaagccagggagtgcaagctctagcacctaaggtgtaaaggccaagccccactcccttaggtatggacaactgcaaggctaagctgactcatgaagtgactgatgaaatgcaaaaaaatcatcagaagaccaaactcagaattagaagccaacatgctatggagagatggctgggggaggggagagaggaaactgccaacggtcccagggactaaagaaaccgcaggagtacttacacagaaaacgagaaatttcacttgttcagtagtcctgatgcacccacaaat

SEQ ID NO: 10067 - DNA, 908 bp, Homo Sapiens
gggggttgcgctgcggagcgcagctgtgagggagtcgctgtgatccggggccccggaacccgagctggagctgaagcgcaggctgcggggcgcggagtcgggagtgcaggcctgagtgttccttccagcatgtcggagggggagtcccagacagtacttagcagtggctcagacccaaaggtagaatcctcatcttcagctcctggcctgacatcagtgtcacctcctgtgacctccacaacctcagctgcttccccagaggaagaagaagaaagtgaagatgagtctgagattttggaagagtcgccctgtgggcgctggcagaagaggcgagaagaggtgaatcaacggaatgtaccaggtattgacagtgcatacctggccatggatacagaggaaggtgtagaggttgtgtggaatgaggtacagttctctgaacgcaagaactacaagctgcaggaggaaaaggttcgtgctgtgtttgataatctgattcaattggagcatcttaacattgttaagtttcacaaatattgggctgacattaaagagaacaaggccagggtcatttttatcacagaatacatgtcatctgggagtctgaagcaatttctgaagaagaccaaaaagaaccacaagacgatgaatgaaaaggcatggaagcgttggtgcacacaaatcctctctgccctaagctacctgcactcctgtgacccccccatcatccatgggaacctgacctgtgacaccatctttcatccagcacaacggacccatccaagattggctctgtggctccctgacacttattcaaccaatcatgtgaacgacttgtcgaggaaggagcagaaagaattctacacttccttttgcgcccagagtatggaagaagtcacctattgtgcaca

SEQ ID NO: 10068 - DNA, 232 bp, Homo Sapiens
  misc_feature (109)..(122): n is a, c, g, or t
aggtctagaggatcccttcagcacatatagtcaggcgtgagctaccatgcccagccaaggctaggtatttaaatgtcaaggagttgatttcaagcttagatgcagtgannnnnnnnnnnnnnttggaagaaaggtacattacatcacattggccatcttgaagtaagattcattgatagtataatcaaccacacacacattaaaacaacaacaacaataatataatactcta

SEQ ID NO: 10069 - DNA, 398 bp, Homo Sapiens
tcagcacatttagtgaaggcacatatgggaattatatataaaataatagcacgacctacattaatcagtggtagagaagggcaaaatcaaagttgcacctgcagcagcaaacatacagacataaaattatttctagcaattctcagtcttagtttcataattgttcttaccgactttagttcctattagttagctggtaatagtttgttgtagaatatgttaactgggtagactgaccatggtactaaatgaataacttaaatttgatctttatgacttacatgctttgctatatgcactttattttgaaacaaaaacttctgcttttttatgctagaaaggaaaaggtaagtttggttacactaaaatgaaaaacttccagtgtcaagggggtaccg

SEQ ID NO: 10070 - DNA, 446 bp, Homo Sapiens
agctcggtacccttcagcacctttagtgtggaccctgaggatctaggggagttatgagccttaagctgagggtgacccaggtcaacgtgaattgctctgaaagagaagcaaagggcataaagagaacgtataaatggagagagggagctcagtctctcagggtgaggaaaggctttctttcttacacagtctggcacttcttcaaaagcttaaacacagagttctgtgacccagcacttccactccagtttatgaaagaaatgaaaatatatgtccatgcagaaacttgtacacaaatactcatagcagcattatacataacaatgcctaagtgagaacaacacaaatgcttgtctactgatgagtggagaaatagaacatggtttgaccatgcaatggactattattcagtgcatccaaaggaatgaagtacgtaatgtgctgaa

SEQ ID NO: 10071 - DNA, 456 bp, Homo Sapiens
  misc_feature (289)..(289): n is a, c, g, or t
  misc_feature (324)..(340): n is a, c, g, or t
ctcaacgctttatacttcctgatgtcttacaaaagcagattgtcgagtacaacgtataatctttttagatgtgtaagaaatcaggaagtaggatgttccgtgtttgtaatttaactatattctccctgtcttttattgctatggttagtaagtttcttgataacttagataaaaataaaataagtattttaacaggctgaaagcggaggagagaaaagatgttttgtgagataggctaacacagattttgttgtttcctagagtgtgacaatttcctactttcaccttnggacagctactgtattatgaacacactttttaccnnnnnnnnnnnnnnnnngggccataatctcatacataggacagtttccatggcataccttggtctttcggcacataaaatttaaatttgggttattctaaaacacttctgtctagctgaagtataagcgttga

SEQ ID NO: 10072 - DNA, 306 bp, Homo Sapiens
aattctgttctccttcccccaatctccctcattttcccacaatacatctttcatagtgcactacttataataagcaatattgtttactgattgaaccattcaaagctcccaagagcttatcctggtagaggctgttatccctgccacatatgttctctcctttccctacagtggtagaaactatctgcacacaaggctgcctaaaataaaaacttattttccgggctcccttacaactgggtatggccaactggactaaaagttctggacaactgctgggaagtttctttaaaaggagaaagtatc

SEQ ID NO: 10073 - DNA, 449 bp, Homo Sapiens
agcactgtgacgccctccttgtgcgccaatagattagtaccgcaaggggaaagatgaaaaatgttctggccatagcattatgtcacaccaacaccagcatcaatattttaggttgcctaattaatgtatctgtaaacctatagccagcttgggtggggctattgagagtcagcaccagcactgatcatatataggatcagcctactggggttggccacgttgtatgtagctgcgaatagcaaggaggggaacagcaacatccctagggaaaccgatcacagaaaggcagctcactaccccacagtaaaaagaaccttgagtttcccagttcagtcccctgctgggtgcatgctacccccctcctctcccagaggctctggacctacacagctgctgaaaaagagaaaatgtccttacctacaatgaaccatcacaggcacccacctaga

SEQ ID NO: 10074 - DNA, 530 bp, Homo Sapiens
tacccgaggtgaccaaaaaagccaaatgagggccaattaaacatgaaggagacgcccacagcccccgtgttcccacagggtgttggcgatgccaatcttcacactggacgtactgacatggctgatacggttctcgtgctctggcttgaccagcactgccaccttgatattccacagtgattgcatggcaatcgggcggtaatccagatccgtaagctccttgaggcccccgcgcagtaggtccagccactcgcggtcgcccactgagttctcctgggtcccaaagacatagatgtcatggggtatggtcactgtgacctcgtccagggtcttccccagacccttcgatgtgaaccaggatgtcacgtttttttggaggtggtacacttcccatgttccaggtgcctatgaagactgagatcatgtcgggctcgtcctgcttggagtgcttgttcttcatgagctgcaacagctggcagaagcctcccgcttccagtccagaatgcccgaatcctctagagtcacctcac

SEQ ID NO: 10075 - DNA, 171 bp, Homo Sapiens
ccatttcaccagcaagtgagggcacagcacgctgggctgagaggatggcatgtacaagccaggagaaagggtgaacagcgcaggcattgtcagccaactgagatgtctgaaacacagggcatgagcaaagaggatgggcttgatttgagtctgcaggggaaaccgagctgg

SEQ ID NO: 10076 - DNA, 680 bp, Homo Sapiens
cgaggtgacaaaaataccaacggaattatccacaggcagaaagtgaaataggccaggacctggcaacaagagagactgagaagagggtgccccggaggtgccaagagtgggctgggtgtggtgactgcgtgttggtcaagagtgcacagggtggccacacctgatctccaaagggggcccaggcctgggaagcagggaacgccaccctcagacatggaaatccttctgtggggaaaggtggaggctgaaaatgactgaatgtggccacaaaccccatatcttggtcgctaggacaagcaactcccctggactgaaggaggcagacaaagtgctaagccatgactgactgacccacaccccccaaagaagtgaccttgctcttcccagaggttcaaactggagcagcagggtgtggagaaatcgtgggagaagaaaaccttggcggccactgggaaaagctggggctcaggggtgcagtccatccctgccctgtgaggactgtgtcagagaaggtcaccctagtaccccttcctgacctcaggatgacccctcgagggggacccaaaggactcactgaggaagagcagtgtcctccccaactcggccaaatgagcacagtctgtccccatccacacagctttctcaaaacatctatgttttgtagatttttttggtaacct

SEQ ID NO: 10077 - DNA, 523 bp, Homo Sapiens
gagctcggtaccctccactagtgcaggcattcaggtgtctgccttatttagtactgagtcaggccctctaggttgacttacaacctgagagtgtatagcaaaattcttgccccaaaagggcctctagtttagttgggtacacctgatttccgtaatcatatggggacattgcagtccagagaagggaaggaacttgtctaaagttacccgtctcattagtctcctgattttcacagtgccactccagcaccctccctcctacagactcactcccacacacacctgaaacaacagctggccatctagagaatactggcaactcccaacttcatcagtcctgtcacaatggtttgtcgttagcttgcttatttagaaaacaaacttctttccccattaaaagtattgatagaattgcattgaggtatggtgggaaaaaattagatgtttccagtgagacttgagttttagtggttctgatatttaccacctgtgggactctgggctggtcatttcctctcttttg

SEQ ID NO: 10078 - DNA, 330 bp, Homo Sapiens
aggtgaccaaaaaaaaccgggacttgcagggtgaagagattaagtcccaaaattcccaggagagcacagcagatgagagtgaggatgacatgtcatcccaggcctccaagagcaaagccactgaggatggtgaagaagacgaagtaagtgctggagaaaaggagcaagatagtgatgagagttatgatgactctgattagaccccagataaattgttgcctgcttctgtgtctctgccagcctgtgatcatattgggttagagttagaaatccgctgtttgcctttcttactggtaggatcctttagagtgtcacctcgggtaccgagct

SEQ ID NO: 10079 - DNA, 499 bp, Homo Sapiens
aaaagctaaaggagccagagtgaactcagtgagagccacagacacccactctcttttaactttttacaaataaacttaaactataaattagaaacacaaataatcatgagtgagtctaacattcaaaggaagtaaatgaattgtgtaggagattaaccccataacttggtttcttatttaaaaatttcttgagcagctgtttgatgatggtgatgtttatctccttcttcttggcagccaagcccaacaaaataatggcacacagcagttgctgcccaagcctgggtgctcctggtggtcctgcacgatcggctgtgcagtaggcttgtcaaggagaggatcctccctggcctctccttgggcagaggaggtgagggtcacctcacgaagatcaccatgcttgtctgcagccccaagcacctggggggctggggctcctggaccgggctcatcagcagagttgtgggcagcggccaggaaatttctgtgcccatttcaa

SEQ ID NO: 10080 - DNA, 434 bp, Homo Sapiens
ttgaaatgggcacagaaattacacccaaagaggtatttatctttacttttaaacagtgagcctgaattttgttgctgttttgatttgtactgaaaaatggtaattgttgctaatcttcttatgcaatttccttttttgttattattacttatttttgacagtgttgaaaatgttcagaaggttgctctagattgagagaagagacaaacacctcccaggagacagttcaagaaagcttcaaactgcatgattcatgccaattagcaattgactgtcactgttccttgtcactggtagaccaaaataaaaccagctctactggtcttgtggaattgggagcttgggaatggatcctggaggatgcccaattagggcctagccttaatcagtcctcagagatttcttcccatttcaggtaccgactcgatcgtata

SEQ ID NO: 10081 - DNA, 693 bp, Homo Sapiens
tcagaagaaataacataatatgtgagattcagtgggatgggaacaaagatcccctgagaagcagcacatgagaaacaggcatggaggggatgcttccaaggccagactacagagtaggatgcctgggtgattgaagagagctgccccagtgctggagactagatagcaccggatgttaggaacctgctaggagggcagcctcacctgaattgaaattgaaaggcagagagcctagaaagtatcctgaagtgagcagggaagagctataccttggactagagggtagagggcaatgtggcccccaggagtgaaatgaaatataatagtatataaagtctttgtctgtaagtgatggctcaggacagcctgaatggtgtaacaggattatctatgtataattcaccagcttttttctagataaaccatgagaataatggaaaatgtagttgaggaactttaaatgttggtggttgtgttatgtggacagtaagtgccctgtaaaagaacggtattgcaaaggtcggaaagatggttgtttctcagttacagtctttaaagggagacagcagaaatcaaccacagcagatgaccagactacctatcttggattccttcttcattacccagaaagcaattggagagagttacctccaccttgagagcacctatgtcccccatttctgtgcccgtcag

SEQ ID NO: 10082 - DNA, 635 bp, Homo Sapiens
tagagatccccttaaatgggcacagaaattagaaaaacagaaagcagaaaagaaggataaaatacaatcacaacatacttgcatttaactatgcaaacttgaccaggaagagaaaaataaacagtacaaaagtttgctcacaattccactcaatgaggttttacaccaaagtgaagttatttaccaggatgaacatgagcatgagatgagaggacttgaatctgagactttagcatgtctaagtccggtgtgcctcttcacattgtgagcattctgaatgctgtacatgattctagtttttgagaatacttattttttcatataaaatgtctcctaattacaggccaactatttcatatggtattccaactttgttctggcatatacacaaaaccatgtttatatactttaatttctgggtcatttgagatattttccatgataattttgattatttggaatcctcactttatgtgtaaactttacaacctaacctcctgcaggaagatgagattttactttgcaagagaggatggagcaaggtgggggagggagaaggcagccaagaaagtccttctaaaaactaaagacaatacagaaaagggcaagaaagacacaaaaatctaaatttctgt

SEQ ID NO: 10083 - DNA, 593 bp, Homo Sapiens
ctccgcagagaaaagggttggggagaagcctctgcagtcctggaagatgtggggtgctgggtgagaggcatcagcccccacaagtatgtttttgtgtcttaagatagcagtttactttgaaaaagtgaaaaaggcttccgggctgtcctctgcccagtgagatggaggacgctagagaaagtgctgagtgtcccgagagaggcccccgagccagtgcatggaggtccttcggcctggctcagctgggctgcaggatgcccactttgaggagggaggcacagggcttgggcgaggggcagaggccatcagaactgcccggcttttttggaaactgaggacccaacaactaaccacgtttacacgacttgagttttgaaccccgattaatgtctgtacgtcacctttcctagttctgaccctgagccctggggaacaggaaagcgtggctggcctcttgcactgctttgtctccaaaataaactactgaaatcaaaccgcatttcacacgtgtttacacatgttgctcaagtttgttatgtcatactcccagtccttaaaagacgtttaataaaacagctttaccttttaaaaat

SEQ ID NO: 10084 - DNA, 548 bp, Homo Sapiens
tagattcttttatcgcgggataacccctagttcagtcccaattgcgaaagtgggtcacctgcaccaaggtaccaaaattagactacccaactggattgtgaatgccagtttatgaaatggatcaggacaggaacaaaaatagattttctagaaactgcagactcctgtgattggagcagtatacaaagtacagcaacatcagactagatctcacctgaggtgctgggtgagaaatcttagggaccagatggaagagggcctgtgtataaagacattaggaaggaggtttgggaaggtttgggagggcagcctgacttgtctccagagaaagttagaactggttgacttagcaaccaagggacactgggtcaaagacgaggaatcaggacgtcggtgcctagtgactgagcgccagcccagcccatttctctacattgccatgggctaaacccagtgtgctgtaaactcttcagttcctttggttatggattttgtatcttttctgtgtttcttaataaagttcttttgaaaaatgggaaaaataaaaa

SEQ ID NO: 10085 - DNA, 551 bp, Homo Sapiens
  misc_feature (239)..(270): n is a, c, g, or t
ttagtaagtggccaagcaaagagagaattggagagcctgtactttgggccattgccattcactgcctctcacttggggcaggaggggaggtgtaggctagggagcctgttgtatttgggaggagaaaagagaacccaatactgtcatccagactatcatactatcattttgttgaggatcttatatccatctgctcttagtgccaaagaatcctttacttcatcctaaaggcagcagtnnnnnnnnnnnnnnnnnnnnnnnnnnnnnnnnccatcggttcaccaaaaaggattcagagtcctttgaataacaagctgccttaacagtcctgcaaaaactctgccaggggcctgtgccagtccccagaagttaattgatgggtttctaaaacatgaaggacctcctgcagagaaacccctggaagaactctctgcttctacttcaggtgtgccaggcctttctagtttgcagtctgacccagctggctgtgtgagacctccagcacccaatctagctggagctgttgaattcaatgatgtgaagaccttgct

SEQ ID NO: 10086 - DNA, 748 bp, Homo Sapiens
  misc_feature (221)..(379): n is a, c, g, or t
  misc_feature (388)..(401): n is a, c, g, or t
  misc_feature (441)..(552): n is a, c, g, or t
  misc_feature (622)..(630): n is a, c, g, or t
aaatggtcatgcctctacggatcagttaagtgaagaaaaggagaaaggggcatgtggctgttgagaagtcaagtaagcgacatagtagttcaggtggcccatgcctgggatcttctctatgattgatacatggcacagtgagagattaatgggcattgtgtacaaattgcttctcaccatccccattagacctacgaataaagcatccggttctaaaattnnnnnnnnnnnnnnnnnnnnnnnnnnnnnnnnnnnnnnnnnnnnnnnnnnnnnnnnnnnnnnnnnnnnnnnnnnnnnnnnnnnnnnnnnnnnnnnnnnnnnnnnnnnnnnnnnnnnnnnnnnnnnnnnnnnnnnnnnnnnnnnnnnnnnnnnnnnnnnnctttggggnnnnnnnnnnnnnnaaaaaatttttaaaaacatttttttgggcgcggggccccnnnnnnnnnnnnnnnnnnnnnnnnnnnnnnnnnnnnnnnnnnnnnnnnnnnnnnnnnnnnnnnnnnnnnnnnnnnnnnnnnnnnnnnnnnnnnnnnnnnnnnnnnnnnnnnncccaagggggttttgggggctttaatgggattaataaaagggggcccaggggagcccaataaaaaataannnnnnnnngggccatttttggagaaatgggggaattaaaaaagaaattgcgccgaaggggaacccttccaaaaggggtgtgaaaacccttaatcccccgggggaataaacaccttggcccctttgg

SEQ ID NO: 10087 - DNA, 343 bp, Homo Sapiens
gggctcttccctctcctggaggaaaatggcggtcgctggagccgccgaccaagaggcttgggagtctgtacctttcccgaccgggccactggaagttggagcctccgccgagtcgcagacaacgcctccgggaggctgtactttcaggtaagaatggtgctccatgagtcaagcgattacttcagctcacaactcaatcacttaaggttttttcctcgataaagtcatcatactttgatatgcagcgtaactgtttatgcatccttcccattttgtcacacaaactattaaaaagatgggtatctaagagttgaaatttaataaaatttgtaacttctactac

SEQ ID NO: 10088 - DNA, 1054 bp, Homo Sapiens
  misc_feature (991)..(991): n is a, c, g, or t
  misc_feature (1015)..(1015): n is a, c, g, or t
  misc_feature (1044)..(1044): n is a, c, g, or t
gcgcgctcgcagcgggaggtcgcgaagcctgggactgtgtctgtcgcccatggccgccgcgctgctcgcccgggcctcgggccctgcccgcagagctctctgtcctagggcctggcggcagttacacaccatctaccagtctgtggaactgcccgagacacaccagatgttgctccagacatgccgggactttgccgagaaggagttgtttcccattgcagcccaggtggataaggaacatctcttcccagcggctcaggtgaagaagatgggcgggcttgggcttctggccatggacgtgcccgaggagcttggcggtgctggcctcgattacctggcctacgccatcgccatggaggagatcagccgtggctgcgcctccaccggagtcatcatgagtgtcaacaactctctctacctggggcccatcttgaagtttggctccaaggagcagaagcaggcgtgggtcacgcctttcaccagtggtgacaaaattggctgctttgccctcagcgaaccagggaacggcagtgatgcaggagctgcgtccaccaccgcccgggccgagggcgactcatgggttctgaatggaaccaaagcctggatcaccaatgcctgggaggcttcggctgccgtggtctttgccagcacggacagagccctgcaaaacaagggcatcagtgccttcctggtccccatgccaacgcctgggctcacgttggggaacgaaaggaacgacaagctgggcatccgtgggctcatccacggccaacctcatcttttgaggactgtccgcatccccaaggacagcatcctgggggagccaaggatggggcttccaagatagccatgcaacaccctggacatgggcccgcatcagcatcgcctccccaggcctgggcattgcccagaccgccctcgattagtgcctgtgaactacgctgagatcgcatggccttcggggcgcccctcacagctccagtcattcagnttcagttggcagactggcctgggnccctggaaagtgccggctgctgacctggngcgctgccat

SEQ ID NO: 10089 - DNA, 1089 bp, Homo Sapiens
  misc_feature (625)..(625): n is a, c, g, or t
  misc_feature (987)..(987): n is a, c, g, or t
  misc_feature (1028)..(1028): n is a, c, g, or t
  misc_feature (1032)..(1032): n is a, c, g, or t
  misc_feature (1037)..(1039): n is a, c, g, or t
gggtcctcggcgggtggcggtggtggccgtagcggttcctcctggccctgttaatgtcggggccaggccgggggaggatggcgccctagaacccggccttgctggggtaggggcgggaggggacggggtggggaccggccatgtcggaggtgacccggagtctgctgcagcgctggggcgccagttttaggagaggcgccgacttcgactcttggggccagctggtggaggcgatagacgagtatcagatattagcaagacatctacaaaaggaggcccaagctcaacacaataattctgaattcacagaagaacaaaagaaaaccataggcaaaattgcaacatgcttggaattgcgaagtgcagctttacagtccacacagtctcaagaagaatttaaactggaggacctgaagaagctagaaccaatcctaaagaatattcttacatataataaagaattcccatttgatgttcagcctgtcccattaagaagaattttggcacctggtgaagaagagaatttggaatttgaagaagatgaagaagaggggtggtgctggagcagggtctcctgattcttttcctgctagagttcccggtactttattaccaaggttgccangggaaccaggaatgacattactcactatcagaattgagaaaattggtttgaaagatgctgggcagtgcatcgatccctatattacagttagtgtaaaggatctgaatggcatagacttaactccctgtgcaagatactcctgtgggcttcaagaaaagaagatacctatgttccttttaagggggaacattggagctccaaaaagcatggtggaaaaattaaccaaagggggcagcctatcttccttgtgaatcccaacccctaccaagccctaaaaaaagggtttacccccccacccaagtgggttttggctttccttggggggatgggatggaaatttaggccctggggcccaagtgggnaggagggacgtttgccaggagaacccccccgtgactttttnaaangcggnnnacggggggcgagttattggggccgaaggaaacccccttttaatcgtctcg

SEQ ID NO: 10090 - DNA, 983 bp, Homo Sapiens
  misc_feature (50)..(68): n is a, c, g, or t
  misc_feature (431)..(439): n is a, c, g, or t
  misc_feature (450)..(559): n is a, c, g, or t
  misc_feature (645)..(782): n is a, c, g, or t
  misc_feature (790)..(799): n is a, c, g, or t
gtggggtggctcagatactcccaagtggcctttatttcacaaaattctgnnnnnnnnnnnnnnnnnnngagacagtttcactcttgttgcccagtgggttcctggtttacaccaggcacttcaggcagtttccctggctctgaaccctgatccgcaagcattggccaggtcaatagttggacaagtatgtgctacaaggacctacttgggccacttccctcaggacgtgaacttgtcctgcctttctttcctggattcaaccttgagatacataatgggagaggccgtggaaagcccaagaggcagtgttctggatttgagtgagtgccttctgggcacctcctcctttgatggagaaacaaatccctcctgaccttgagcaacactacaggaatgtgcctggtgtaaacaggaaccagccgttcgtttcnnnnnnnnngagatggagtnnnnnnnnnnnnnnnnnnnnnnnnnnnnnnnnnnnnnnnnnnnnnnnnnnnnnnnnnnnnnnnnnnnnnnnnnnnnnnnnnnnnnnnnnnnnnnnnnnnnnnnnnnnnnngccgtttactactcatagtttttatcttgccaagaggtcaccctgacgttggcctgccttagctctgttaaaaaggttgtgctctnnnnnnnnnnnnnnnnnnnnnnnnnnnnnnnnnnnnnnnnnnnnnnnnnnnnnnnnnnnnnnnnnnnnnnnnnnnnnnnnnnnnnnnnnnnnnnnnnnnnnnnnnnnnnnnnnnnnnnnnnnnnnnnnnnnnnnnnnnttgggttnnnnnnnnnnttggccaccggggcttgggtaatccccgggttttattccggggggggtttgaacacggaaaaaattccccccttggaaacccccccgcaaaaggggggggaacggtcttttttaactgggaagccctgggggaaattggaggtccccccttgggtgaaaaccccctctaacgcccccgccgggg

SEQ ID NO: 10091 - DNA, 419 bp, Homo Sapiens
  misc_feature (237)..(286): n is a, c, g, or t
cgggctgtagtgccggcgccgccgcgtcttcccggtctcctttcccggccgcacagggttttataggatcacattgacaaaagtaccatggagttttatgagtcagcatattttattgttcttattccttcaatagttattacagtaattttcctcttcttctggcttttcatgaaagaaacattatatgatgaagttcttgcaaaacagaaaagagaacaaaagcttattcctacnnnnnnnnnnnnnnnnnnnnnnnnnnnnnnnnnnnnnnnnnnnnnnnnnntccagaatggaaacctccatgaatccgactctgagagtgtacctcgagactttaaattatcagatgctttggcagtagaagatgatcaagttgcacctgttccattgaatgtcgttgaaacttcaagtagtgt

SEQ ID NO: 10092 - DNA, 697 bp, Homo Sapiens
  misc_feature (619)..(653): n is a, c, g, or t
atagttggtatttaaaaattctaaaatatttaataattaatattgatgggaagactgatatacaatggcaattatttattttacaaggaggattctatacatcagggaaggcatcttgaagtacaatacaccaggctttcatttcttctttacattatgattgtgagtttccatataagttggtacttacatggaaagggaacacaaaatccatttttatatacataaaaacaaaacacccaaagagacttgacccccaaaatgtcttgtttcacttgaaaataacatgaatgagacgaaagatgaaccagattacttggtgacgcacagaaggcgaacaagtagctcaggaaatcaaatcctgtttcaagcttggcacattaagggtaagaaaggtagtgaaagaagggttcgaaaatatcatctcaagccacaaaaaatctggcagaagacagcctccaaatcaataagatagaatggttagaagtcaagttagagttattgtgtggctaccttatatccagacctctaatagactgagtggaattgtcacttctcttccctcagttatcccaattgttagtaaacttcaaggaggctgggcatgatgactcacacnnnnnnnnnnnnnnnnnnnnnnnnnnnnnnnnnnnagattccttgagccccggtgttcaagacgagcctgggcaatatg

SEQ ID NO: 10093 - DNA, 802 bp, Homo Sapiens
  misc_feature (562)..(590): n is a, c, g, or t
agtggaaagactgtttatgtagtaatgcatggctgaagcataaaagggagagagaatttctttatatacacaaacatacatgaatatgcatatctatatgcatagatgtacctatcctgcacccaaaaaggtgcctggtatggcactaaaatcatgtagttatactgggcagcaataataatgggcatgaggctgattactcaatggtgagggtaggtatatgtagatagatgtgcatgtatgtgtttgtatatataattttataagtttcacgcataaattaatacatgcctgtgtgcatacatatgtatgggatatatttgtatatatatgtacaggtaataaacatccccaaggtttgtggctggccatacacataggcatcagtttaacaccatcagacctcagctgtacaataacaggtgttttgtttaattaaaattatactgttctgcagcatttagacatttgtcacatttcattagctttgacaaccatactgtaacattaaacctagcattccacaagagaataacatataagatcgaaactgtaacaacannnnnnnnnnnnnnnnnnnnnnnnnnnnngacaaacgaggcggcgccccccctccaaaaagagatccccccaagggcgggccccacagccacaccccgaaaccaccggctccctggacccaccgcgcgccccctaatgcgggcgccccactaacaacgatagactcccgtcacgcgcctctaccacactctcgctacacgcgagaacacccgctccccgagccacctccgccgcaccaccc

SEQ ID NO: 10094 - DNA, 1343 bp, Homo Sapiens
gcgggagcgctgctggaacccgagccggagccggagccacagcggggagggtggcctggcggcctggagccggacgtgtccggggcgtccccgcagaccggggcagcaggtcgtccgggggcccaccatgctggtgactgcctaccttgcttttgtaggcctcctggcctcctgcctggggctggaactgtcaagatgccgggctaaaccccctggaagggcctgcagcaatccctccttccttcggtttcaactggacttctatcaggtctacttcctggccctggcagctgattggcttcaggccccctacctctataaactctaccagcattactacttcctggaaggtcaaattgccatcctctatgtctgtggccttgcctctacagtcctctttggcctagtggcctcctcccttgtggattggctgggtcgcaagaattcttgtgtcctcttctccctgacttactcactatgctgcttaaccaaactctctcaagactactttgtgctgctagtggggcgagcacttggtgggctgtccacagccctgctcttctcagccttcgaggcctggtatatccatgagcacgtggaacggcatgacttccctgctgagtggatcccagctacctttgctcgagctgccttctggaaccatgtgctggctgtagtggcaggtgtggcagctgaggctgtagccagctggatagggctggggcctgtagcgccctttgtggctgccatccatctcctggctctggcaggggccttggcccttcgaaactggggggagaactatgaacggcagcgtgccttctcaaggacctgtgctggaggcctgcgctgcctcctgtcggaccgccgcgtgctgctgttgggcaccatacaagctctatttgagagtgtcatcttcatctttgtcttcctctggacacctgtgctggacccacacggggcccctctgggcattatcttctccagcttcatggcagccagcctgcttggctcttccctgtaccgtatcgccacctccaagaggtaccaccttcagcccatgcacctgctgtcccttgtctgtgctcatcgtcgtcttctctctcttcatgttgactttctctaccagcccaggccaggagagtcccggtggagtccttcatagcctttctacttattgaggtggcttgtggaatataactttccccagcatgaagcttcctaccggaggaacaggtgatcgctggagacagacgcaagcttggtgtacttcaacctggttccggggtaactcttgacactcaactgtggttgcctaagggcactccttggtccttcccatg

SEQ ID NO: 10095 - DNA, 486 bp, Homo Sapiens
aaaaagggccccctccccttgttaagggtgcttggggggtcccagggagtccttttgggaagtttcaaaggccatgctccctgagccatactgttcccttgagtggaccagagagccggagggacagcacagacatcagctccaagtctgctctgcagcgcctcggtcacgaagtccgtcccggatgtcctcttgccgctgaacagcagtaccagccgcggggcagcctcccagcggggccatgggcccgccacgcctcgcgatgcctgaagctgacacttctccctacccctaaaatcgggacaccgcgcggaatggacgcggccactaagcggagcggcaacaaggagcaatcgcggagcggcgaaaggggtgtagtctgcgactaccgcggcagggagccgggagggcggccaaaagtgacttcgaattgcagctagccgtgtggaacgtggcccaagaggctctcattgtcctgcctgatca

SEQ ID NO: 10096 - DNA, 1007 bp, Homo Sapiens
  misc_feature (585)..(598): n is a, c, g, or t
tctacaggatcccctgcatatggcaaggccaagcccaaggttcggcttccccatgcctgcggccgcggcccaaggcctacaccaactcggtggacgtactcgacggggagggtgtgggagtcccaggacgctccctcgtgcagcacccacccctgcgacagctcgctgccctgcgactccgacctctagacgcttgtagagcctggggggcgccgggtggcaaaggactcacccccgcacaggcccgcctggcttcgagttggaacccggacacttgcccctcactggtgtggatggaaatctgcctttcgtgggaccaaacaggactccttggacgattagttcaggttgggtttggttttcttcttaaagagtttagttttcctctccagagggatcagggtcctcttagggagtgacgggcttttcatatatttttgctgaagaatatatggaaagggtggcatttgcgtcacgtggaccagggacagtgctgaaatcagcagtgctcagaaacaatttaacatgttgaaacgacaatattctaaaatactgatgaatcttgcatcaatataattatggggnnnnnnnnnnnnnncctgctgtataactccttgccatgcaaactctcaagaggccaatatattcctggccatgtttgaatgagcctcttaaaataaacttagagccatgcaaatgccagcagcttaatggatttcatggaatgaaataccgtgattaactcatagctacatatcattgcataaatgggatttatcttttttctcacttatttttgcggtgaaagtcgagggcatgcaagagtttctcttccagaagccaagaggagaacaaaggtcctaatgctgtactattccaccctttggacgcctcatccaggacgcagaggactctaggtttaacattttgtacaaaatggaacctgttaatcatattaaagcacatatgtatatatcttttatttataaataaaattttaaaacaat

SEQ ID NO: 10097 - DNA, 597 bp, Homo Sapiens
  misc_feature (546)..(557): n is a, c, g, or t
gagggacaaaaatgtcatttcctgataactacactgtatattttaattatggcaatatttttcaagtacaacttcatgtgaaaagatctgtgtttcttccactaaaaagattcaactgtgttatctgcctcaagacatccatcacatgaatgccaatatcttaggatttaaaagggggctttttgaaactttctaagtatttaatcaataggttccttttcatatagagactacactgcctgcatagaccgtgaacatgttttttctttaatctaaatttgaaatagcatttactatgtactgagcagctattagacttccgttacagcactgggttcttttcccaaatcacagtattctaatgctcacatccatgctgtaccattatcccattttactaataaagaaacaaaatgactaagaacttcaaaacagtctgatggtacaaaatcactctctcaggaaaaaagaaagagagcgagagagagcaggaacccaaactacattaacattcatgttgaaattccagttataaattaaaagggnnnnnnnnnnnngggccccccggtaccgggccaaatccgaatctgtatgtct

SEQ ID NO: 10098 - DNA, 630 bp, Homo Sapiens
gggggcccaggctgcctctcatctccacccactgactgcagactgggctttgggctctggggcaaacttctcttcagccccatggatccttaacctggcagcccgttttggggtgctttcttgagcccccagttctctgtcccctagcactagactcagctgtattgtttttccttctggggagcccactccaactgcacagaagttctgggcctgacaggtagattccagctggaagcgcaggcccgtgcctggttttgcgtctgtttcccctgagggccattcgtcatcctggagcttcaatggggccttggctcctgtctgcctctcagtcagagtcagggctgacaaaggactcagcttccttagcatctcagcagaaaccttgctctgaagaccagagacagaagggacagaaacaggagtgcctcctgctgtgccaggccccatgggcagtgcaggcagatccctgaaggtcagcactcctgggtcttcatatgccaacagggggcgctcttgacactgtgccttcattttccagcccacagcctggggtctcagggatcttgaggggtagaacatgtccggggtgggggcttgggaaataaaccttgatctaattgggaaaac

SEQ ID NO: 10099 - DNA, 427 bp, Homo Sapiens
  misc_feature (59)..(71): n is a, c, g, or t
acccccccaaaaagccatttaaaaagcccagccagataggaagtggacttcccataccnnnnnnnnnnnnnggaaatgatacgtggtaaaatcataaaaagaatccttctgcctttcagaaaagctgtgccctacacacaccaagcccctctatcctttcacgcggtagtgggaacagcctcgtgtttatggttcttatgaacagtcatgcagatgttagccacattgtccctttttgtcatctcctccactggactaccagacaggtgcagcagggctggtggaaacccacaccactgggtacaaatgccaactgtcctggcctctgggactggagaggagggttgcaaggtgagaagaggatcattctacggtcagttcctcacaatttcctatagagcactggtccctatttttttgtcacctc

SEQ ID NO: 10100 - DNA, 751 bp, Homo Sapiens
ctgttcggtatagagaagttcagctccctgacagaggatggtttgtttatcagcagagaaatgaagttcacaataactgtggcatcgagatatactaccaaacagacatgcaaagcacctcagagaatatgtttctggagctcttctgtcagattatctcggaaccttgcttcaacaccctgcgcaccaaggagcagttgggctatatcgtcttcagcgggccacgtcgagctaatggcatacagggcttgagattcatcatccagtcagaaaagccacctcactacctagaaagcagagtggaagctttcttaattaccatggaaaagtccatagaggacatgacagaagaggccttccaaaaacacattcaggcattagcaattcgtcgactagacaaaccaaagaagctatctgctgagtgtgctaaatactggggagaaatcatctcccagcaatataattttgacagagataacactgaggttgcatatttaaagacacttaccaaggaagatatcatcaaattctacaaggaaatgttggcagtagatgctccaaggagacataaggtatccgtccatgttcttgtccagggaaatggattcttgtcctgttgttggagagttcccatgtcaaaatgacataaatttgtcacaagcaccagccttgccaccacctgaagtgattcagaacatgaccgaattcaagcgtgggtctgccactgttttcccccttgtggaacccacat

SEQ ID NO: 10101 - DNA, 221 bp, Homo Sapiens
gttgcaattgtctctcactgacgtatttgaaggatatttgagctggaaagctcaaccaaatgatgcgtttttgctaatatgatgacttctccatagacttctttagatttatatatgttcctgtgcacttatcaaccttctcatagtgcctcctggcttatcatggcttttgaaagaatagaggatctttgtcactttgacaagtttcatgtctttatctt

SEQ ID NO: 10102 - DNA, 999 bp, Homo Sapiens
  misc_feature (925)..(935): n is a, c, g, or t
gggtctgcgtctgccgtggacagcgaagctgctgcggttcctgagccggaggagtgcctgtgaagaaaacggggtattgccctgaggcttatattctgcctcagttgtcttttcttgaaatattataaatcagaatgtctgcacagtcagtggaagaagattcaatacttatcatcccaactccagatgaagaagaaaaaattctgagagtgaagttggaggaggatcctgatggcgaagagggatcaagtatccccctggaaccatctcccagacccagagattttcccgacagcgattcaggcagtttggataccaggattcacctgggccccggtgaggctggtgagcaagctccgagaactttgccgtctgtggctcaagccagagacgcacacaaaagaacctatcttgggacctggtagtgctggagcagttcggttgcccctccctacccccagaacctacaggacttggggttcggaggatcagtcagccccccatacatggtagacgggaggcccacgtgcacaagtggcctcgaaccgattttcgggagaaaggtgcgacctcttggagtggaacccctgggggacaaacacccggggtgtcatccctcgcccggccggcgccggtacaaaaccgggggcaatagtactctggtgacagggaaaggaagcgttggcggtacttcttcgagggaaaaagagcagctctcccaggggtgtatgtcggcccacggcggttcccttggcagcctctctggagttgacttggagtggaacagaaacacccttatacgtgaggtggcggggggtggggtgccatgtgagggcgcgccctccccctctgtccactataagcgctagacccggcggcgccatgaactcttaatccggtgtattgccacactacgccaactacnnnnnnnnnnncacgtaaaagatgtgtttggacgaagcgggatagcccgttctgctgctcgctccacaagagatc

SEQ ID NO: 10103 - DNA, 304 bp, Homo Sapiens
cagagggccgtgagccacaccttacaagttctcaataaaacttattagcattaagtggtaaggcattttattttaaaagatttctacttccagccatcctgtttattgacccatctttgttcagtcatcttctcttttgaggacaccttggggatatgtgctctgcatcctttcccatggtgttaggttgattttgcctcctctgcttcctcttttgatctgcggtctacctttctgagctagctggccttttgtttgtaccaccattaaagttctactttactatagtctttttatgtcacct

SEQ ID NO: 10104 - DNA, 384 bp, Homo Sapiens
tacccgaggtgacaaaaaaaccggttgcagaggccttctggggaagacaggtggcaggaaaaggaccaagatgtaaaacatgatgtcatgtccaaccaatctgttctgcatcgatgggagagaaaacagaatcttaggcccatgcccaagaagtatcattctgaggtacagaggaagtgatgtccttgacaagggagcttctttatgtgtagctacactccatgattccaagagcccagcagccggggctggcctgtttctagagtcataagaacatgaagtctttgatgtgggctgaagattttggacctgagtttatcactttatgaactcttatatcagtacaaaactacccctttttttgtcacctcgggtaccgagctc

SEQ ID NO: 10105 - DNA, 503 bp, Homo Sapiens
gaggtgacaataaaagttccatgtacaactaattgaaaccataggcctttgtgtactaagacagtctgccctatttaaggtatcaaaagattaaaaaatagtttaaaacaataccaacacactctaaaaaagacagtcatgaggcatcacagtaacttgtttactggaaatgaaaagagaaaactttggcttagagtatggctctgtggtgttggttccacagttcttcaactacctgtttaaatatcactaataccatgaaaaagaaatctctgacagtagtctatgtacattatcaagaaggcaaaggaaagcgtcatttgacagtttggtggtggactcctacatgtctgagagttttattttttgttgtttgtttggtcacctcggggtgacatgcggggcgagaatgccctaggcagagtgagctgcagactccgcgggtcaggggtgtcagtcacccagaaccatccgtttgtgagaccccgggtgcgaggccaagc

SEQ ID NO: 10106 - DNA, 453 bp, Homo Sapiens
  misc_feature (59)..(82): n is a, c, g, or t
ctcttggagaccgctatggccccggtttcggaatcgggctcgggaccccagggggcccnnnnnnnnnnnnnnnnnnnnnnnngcactccggcctagactgccatgtcatgctgttcatgagacttgagggctccaaattggctgacactcttctttcccccatgttcattttactacgaaactggaagtttttccttcaccacaaggccacttgtcacctacttttttgtacactcacttccagcaaactagttccaacccaggccacagccttcagcttccttcttcctgcatatgacaccagcttagctttccagacttccttctgtcatttcacccttcagccctccaaattggctgacactcttctttcccccatgttcattttactacgaaactggaagtttttccttcaccacaaggccacttgtcacctactttttttgtcacctc

SEQ ID NO: 10107 - DNA, 662 bp, Homo Sapiens
gtggtagcatgtatgctgttagattaccgcgtagcaatcaagaatcccatgtagaaagctttctgtatgtagttatcttaaaaataattttgtatatgaggtgacaaaaaaaggagatgacaattttaataatttgccttctttgaaatattcactcctaacactagtttgagctggggagttaacttttttgcttgtgtttagatttcacttcaacatgaagctctttaaaaaaataacgtccctcaatcattcatgttacgttttaactagactcggcaaggagttagcagtctcagaatcatgaattcatgaaaaagatgagcttttgtgaatgtatttctggcttcctaaaaaaggtcacatctattaaatataaggagataacatcgtttttaatagtatttcacacattagcaaaggaattttttattaaacatagttatcaaattttttggaggaggtgacaaaaaaagagaggaatacgcccaggatgaaatattgggaaatgctaaaatctagggaaaacataataaacaagaatccagtcaaggaaaatcaagaacttaccacaagcactgggaaaataaatcaggatagtggtgtcggcagacaccaagaggtagaccgatcggccgagtccaaaaactcaaaatgtcatc

SEQ ID NO: 10108 - DNA, 627 bp, Homo Sapiens
tactcaatagaccaaacacttccagatttattctgcttcagtttattcataccatttccctcagcttccttatcacattagtgtagaaatgcaaaaatggtatacatgtatatcctactatctcattaaaactgttactgtttatagcataatgaaacagtggcttagttattcagtgcttactatgtactgtgtgccagagactgggctaggaattatgaaactgaggtttaggatgatgaggggcaaagttgggaagcatttattttaagatgttttcaattcttttgccccatcttctggtaatgtggtttttcctgataacccattcaagcatattttagttatattcatttttaatatgcttttataatttgctacaaactttctgctattcttaaacagaggctactgaattgaactcagggatcttaaagtcccttagaacctcaagattctattaaccttttggggatatctctagcctcactctgaccctgttatttacagtgtacagaagactcaggagatggctgaacagggtctgatgtagtcatgtcctgggccttgtttcctgtaaaagtctcactgttcgtttattttttgtcacctcggggactcctctag

SEQ ID NO: 10109 - DNA, 363 bp, Homo Sapiens
gaggtgacaaaaaaacactcacattcccaagcacgtatgcatgtacaccatgggcattgggttgtttttagttaaatagcatcctgttacgcacgccctgaaattggtttctaaacttgcctataggtctgtagattaatttcaaatgtatcattacatacataggtgtcattttacataaatgggatcataacatttttggtttttagtgcagtatttttttccatctaacctgccttccccttcccttacttcccatttcaccgctatgacttcccaggtaactcctataatttaccaggacttttctctgtgcttatgttgttattctaaacaacacatacacatttatatgtttgtttc

SEQ ID NO: 10110 - DNA, 422 bp, Homo Sapiens
ggaagaatcgagctcggacccctagtttagaagttcaatagcaagccaaactatcagtattttgtatatcctgcataaactctaatttagttcctcaacatattttcagtgtttatgcagacctttagagttaagcctttgtatttccatgttattccacaatatgcaatatttctctgagtagcttctgctatgatattcttatgaagaaaaggggcaactttctgtccactataggagagaattcagccgaagatatgagagtaatgagagacattttccagtcattggatcgtgttttcttttgtccattattgtactgtgctgtaccacatttatttctatattcattttgtaaaaaatttaaaagtgctattttgtttgtatttgaaaatctctgtgaataaattctctctttgatc

SEQ ID NO: 10111 - DNA, 1473 bp, Homo Sapiens
  misc_feature (83)..(191): n is a, c, g, or t
  misc_feature (805)..(855): n is a, c, g, or t
  misc_feature (876)..(926): n is a, c, g, or t
ctatcgtattgatagtgattgctgcccgactcactatagtgctgggattaaggcttgagccacgtgccaggcctgtattgttnnnnnnnnnnnnnnnnnnnnnnnnnnnnnnnnnnnnnnnnnnnnnnnnnnnnnnnnnnnnnnnnnnnnnnnnnnnnnnnnnnnnnnnnnnnnnnnnnnnnnnnnnnnnntgaaccactgtgcctggcctgtttgtttgtttgtttaaaacatttctccatcactcattccaggtcccagagcaaactctctctgctctcggagcctgtgacactggctatgtgctccacagtttcagtcccaggtcatactctccaacagttttcagagctccatatatatgtagatgccatcctttctaaaaacttctcacgacctcctggaatattcctattgatctcattttatttagcatcagctcaagaaactaagtcttagtgcacagtatcacaacaaagaaaaagcttggtttttataaccggtaaaaacaagaaaagattctcatcaaaatgaaaatataaaattaatcatttctcaccaaagagtatgcctgggagcctccagctgttaaaagacaatgctattactacttcttatcaaaaatctgtaatgccctgtgatttttatgatacttcttcaatacaaagtgttaatatgtgtcatcagtataataacaaccaacaaaatgccactttcagaaaactgtatgtaaattttttgtaacaatgtaaaaaagaaatggggagtaagtgttcacatcattaaaaggctttgaattcatggnnnnnnnnnnnnnnnnnnnnnnnnnnnnnnnnnnnnnnnnnnnnnnnnnnngaagaccgcaaacaacccacnnnnnnnnnnnnnnnnnnnnnnnnnnnnnnnnnnnnnnnnnnnnnnnnnnnggaaaatggccataagctgtttccaaagaaaatcctggggcatgaactaaggcattggattcctcaccaataacaaagggcccgggcgccaacgcgggcgtgtaaagaaattattccaaaatgtgtttttgtggggggcggtcactgcaataatataagaaaggaaaggcaaattctaggcttcaaataataaaattaacgccccccgcccgggcccgttcttccccatccaccgaaagaaaaatacctcccggggttcctgcccaaaattggaaaacaaataccaaaaaggggggtggattgaaccttggaattcccgcgggggcaatacaagagcccttcgccggccttttgcattaaaaaaatatttcccccccggccgccaaaacgggggtttaaagaaaagttgtcccataatttgtgccccggtttaacctcccggagggggagagaaccttcccccacagggttttggggtaaaaacacaaacaccgctgttttccaaaaaccaccccttttaggcgagaataggaaaaaatattcccct

SEQ ID NO: 10112 - DNA, 1056 bp, Homo Sapiens
  misc_feature (531)..(657): n is a, c, g, or t
  misc_feature (665)..(680): n is a, c, g, or t
  misc_feature (720)..(774): n is a, c, g, or t
  misc_feature (790)..(885): n is a, c, g, or t
  misc_feature (900)..(910): n is a, c, g, or t
cacgccttaacacagctctatacctagaagcagccagcccaggcatgcagtcacatttaatcacatcccccttctagagtgcttcaaaatgatgtagtccctcaacttggctaaagaatctcaatctcttgaaatttatttttttaatgtcatattcatctggtaaatatctactgtttgccaggcatttaagaatatggcaaagaacataaaagatggtgtcaccagaatttggtcaccaatgagtacccgacccggtgccatgataaagaaagaatgctttctattggagtttcaggaaatataatttgagaatactttaaagggaagtggaagtataagtgaatgatatttttcttttacatgtaaacaatgaagttatttcaaagttaagttttaaacaaaatacatgaagtagtgtctgccatacatgttaatattctacattcttgcttccttaaattaatatgtttgtgtgtatatatgtgcctcacacctgaattgaaaattaaagactggtttaaaagtggnnnnnnnnnnnnnnnnnnnnnnnnnnnnnnnnnnnnnnnnnnnnnnnnnnnnnnnnnnnnnnnnnnnnnnnnnnnnnnnnnnnnnnnnnnnnnnnnnnnnnnnnnnnnnnnnnnnnnnnnnnnnnnncctttggnnnnnnnnnnnnnnnnaaaaaattttttaaaacctttttttgggccccgggccccnnnnnnnnnnnnnnnnnnnnnnnnnnnnnnnnnnnnnnnnnnnnnnnnnnnnnnngggtttgatttccccnnnnnnnnnnnnnnnnnnnnnnnnnnnnnnnnnnnnnnnnnnnnnnnnnnnnnnnnnnnnnnnnnnnnnnnnnnnnnnnnnnnnnnnnnnnnnnnnctcaaaataaatttnnnnnnnnnnntgccctttttggaaaaaggtgtgaaattttaaaaactttcgcccgagagggaaccccctccaaggggttttaaaaactttattcccccggggaaaaccacctttgggccctttggaaaaaaatttcccccggggaaaaacgggggg

SEQ ID NO: 10113 - DNA, 639 bp, Homo Sapiens
ggggaacgccaccgacttgaggaagcccagtacatttcaagttggtcgcggcttgggctccgctttggggaggggcagcaggtttattcactggatctctgaatacccaggccccctccaccatggccagccggggtgggggccggggtcgtggccggggccagttgaccttcaacgtggaggccgtgggcattgggaaaggggatgctttgcccccacccaccctgcagccttctccactcttccctcccttggagttccgcccagtacctttgccctcaggcgaggaaggggaatatgtcctggcactgaagcaagagctacgaggagccatgaggcagctcccctacttcatccggccagctgtccccaagagagatgtggagcgttattcagacaaatatcagatgtcaggtccgattgacaatgccatcgattggaaccctgattggcggcgtctaccccgggagctaaagatccgagtgcggaagctacagaaggaacggattacaattctgctccccaagaggccccctaagaccacagaagataaggaggaaacaatacagaaactagagaccctggagaagaaggaagaagaagtaacttcagaggaggatgaggagaaagaagaagaag

SEQ ID NO: 10114 - DNA, 845 bp, Homo Sapiens
  misc_feature (42)..(53): n is a, c, g, or t
gggtgtctagtattaatgttgccagtaagcacctctctcccnnnnnnnnnnnnattattttaatttgagaactcctgtgtccagtttagaagtgagagacttccatttttagttcctttacactcaccaccctagcaagtgccctgcacagagtaataagtaaattgatttcctaatcacaattctatgtgacttatggtcaaaagagcagttttaataactttaaaagtacttcagatagacgcagaaaattggtgagtggttgaccaagaacactgcacaaatataaaaaaagttctggaaatgcagaatggcgttagatttatatttggtttgttaattttatatcactgtttttcactgttttttgtggacaaataatggttgctttgctgaagtgttcttcctcaatcttgattgccctgtacctacccaaaagctgtagtcacacgtcctaaaggccaagcaaacccaccgggatggtggggggtcttggagccaagctcttaggttcctcttatttggggcagtaccagtccataccagctgcgatttgtgagtggacctgtggtaagaagaaatagaaaaggctctcagagataaggttttttacatgtgtaacaatcccaagatttccctagattaaaatcttaaattgattttggaaattgggatttttatttagaatcaaaattaggacaagaacagataacttcttcagatacatttgtgtaactttacagaatgtcatcaagctttggggctctgtggggcacatgatttatccataaaggagatgcagtatgcttacttaaattaataaatttaaaatcttttaagtgtgt

SEQ ID NO: 10115 - DNA, 489 bp, Homo Sapiens
ccagaccagtccctttcaccagtattacttttatgagcaattaaaatatagaactaataataatatcatttatgaagtaatataacattataaatacatactatgtattatacatttaaactataataataataaaactggtcattagagtactttttgcctagaaatttcctccgtgtacttttttaattgtggtgagattcagctgtactctaaaacatgtaattatccactgtgagaaataaaagatagttaagtggttcccaagaacatattagacactttgagctaacatgagaatgatttcatgtcaaatgagatgaactctatggcttcacaaatccacttgtctttggcacagggaaaatgaatctttttaatatctgagagttaggttatagagattcatccattataaatttaaacttattatattacacaggttaagaatattttttccatcaagggccactgaaccagagggttaaa

SEQ ID NO: 10116 - DNA, 650 bp, Homo Sapiens
  misc_feature (520)..(531): n is a, c, g, or t
catcgcacgagaacgctttggatcgtggctggaaacaggtgccataacaaatcccaaaatcagtaggctgcggtttacacccagacattacacatggcatctggttcccagtcacctaaagcaggggaattccctgatggaagtcactccaaaaacttccggtcataatgctattattaacacattgacggtaaattctgatggagtgcttgtatctggagctgacaatggcaccatgcatctttgggactggagaactggctacaattttcagagagttcacgcagctgtgcaacctgggtctttggacagtgaatcaggaatatttgcttgtgcttttgatcagtctgaaagtcgattactacacagctgaagctgataaaaccattaaagtatacagagaggatgacacagccacagaagaaactcatccagtcagctggaaaccagaaattatcaagagaaagagattttaatgaatgtggaattttttctctctctttttttttctttttaattnnnnnnnnnnnngcttggcgttcatgaggatatccagtcattttgtgctctggctgggaatataaaggagaaattcacttgcttcaatcattgctgcttcatattttacaataaactgtcccctgtcccct

SEQ ID NO: 10117 - DNA, 1071 bp, Homo Sapiens
cctgtgtcacaaaaaagcactctttaagggttcaggatcactaaccctcaagatacccgagaaaagtcctcaaatgtgagtcgcctagtctcacagtagaggtaagttcaaagatgaaatgtgatttgttcaagcctgtccgcctaatcagaggcagaaactagacctatttctccttccactgcaccacaaaaaaaccgagattgataatgattaagaagagtttgtaagtcaatcaaaataaaatgcctagtacataggaaaagtctttgggatttctccagacttttagacagaacaaaggcaatctttacaaagagaaatgctcctcagttcaacagatgccaccaagtaccaaggatccttactcagttctgaaactgtgactacggagaatatgtcactatttgagaataagaggtcccacctgctccactcttttcaagttttcagtcacaagcttgcaacttactctcatccttttcacaagataatcaagttgaagcaggattaaggaggtacactgaagataaagcaaaaggcaacaagcattcttacaagcagatcatcccagttaccttaaaagtttcggattaatttacagagtagtgacagaaccatataatttcagtgaaaatcaagatagttataccattaaaaaaaacatcaattcagaaatactaagtcaggcaagcatgcaaaattcagaatataaaaaaatgcagggcctggttgcccacatacattcctcaggttaaggtggatttaaagatgcccaacagaacccaatgaatcagaagctaaaagggacacttcagtgatcagcagacgcattctctcacgtaacaaatggagggaaagtgagcacacattaactagcgaagctcacaaggctagattaggggtgtacagaaatctaattcctggtgctatttgcaactacatatatttaaaatacaaggagataaatacccagaacacattaagcctactgatttaaacagaacatttcaagactgctacacagaaagggaaggaagctgtacccgacgaaccagggcccaggtgact

SEQ ID NO: 10118 - DNA, 742 bp, Homo Sapiens
  misc_feature (442)..(454): n is a, c, g, or t
  misc_feature (587)..(628): n is a, c, g, or t
gggacttcctggaaaaacaccagttggggcgccgccttcccctccaaacgttggggcctgcactctcaacctgctataaggaagttaaaccgcagctcaccgaggagtagggtgtctacggggcgggcccgtgtagaccagctgtgctcctcgggcacaaacccgccgtacatgccaggcctagaagcttttggctttgtggacgcaaaatctggttggagccgccttctccaccctgactctcccgcctctcctttttagaaggaaccgcactgagaaagggtatttctgaaggctcaatgcgtaggagaaggggtgggaagatgggtttgtggaatgggctgagggtggggagtggtcaggtgactgatttcatgtttattgtacagattcctaaaacatagttttactaagtgactccttaaattctgattaatgtgannnnnnnnnnnnngagtgtttgggttttttagttgcaaacaggagtggaattgaaatgtgaaagtatggcaaaactgtgaaagcatttaaattaaaatgtcccttcctctgcattgaaatgtcatcaaaacgtcaaatataaatgnnnnnnnnnnnnnnnnnnnnnnnnnnnnnnnnnnnnnnnnnnctgtaatgacaagtccatctgtaataaaagtgagttaaaaaaccccccccacctacccaaagccacaattaaaacatggtggggccggcctccggcccttcggagaaagctttc

SEQ ID NO: 10119 - DNA, 526 bp, Homo Sapiens
aggaggcccggtttctgaggcgttctatttgtctttctgggtctgcaggtccaaccgtctgacacctttcattttactgaggggagattcaagaaagaaatccgccccccggccctgactaagaagttgcttcctgttgccagcatgacctaccctcgcctctttgatgccatccgctgccacctccttttgctcatggaccctttagcctctctgcccttccactctatgaccaccgcccccgccctccccacccagctccgcttcttgttacttgggggaggaaagaaactcctgatcattggccaaagggacttacccctggagaggccaagtgccttctaggaagttaggaggttgaggcacagcctgtgcagagagggtgggtcacccccccagatccaaggggaaactgcaggtcaagggctgataacggccatgcaggatgcttgatgctgcgtcccccgctgcttgccgccccccaccccgccattttgtataataaagctccctgtgtattctcaaa

SEQ ID NO: 10120 - DNA, 1192 bp, Homo Sapiens
  misc_feature (1117)..(1120): n is a, c, g, or t
  misc_feature (1122)..(1123): n is a, c, g, or t
  misc_feature (1125)..(1127): n is a, c, g, or t
  misc_feature (1132)..(1133): n is a, c, g, or t
  misc_feature (1136)..(1136): n is a, c, g, or t
tgatagcagcagctgctgcgtgatcgactctgaggaccccgttggcgtgagagcaccaggcacatcaattcgaggcctggattgctgctttcaattactggcatccagaaatgtgtattcagggggcgacgatggccttctgaggggctgggacaccagggtatccggcaaatttctcttcaccagcaaaagctatgatgaacacatcctactgtgggacacacgaaacatgaagcagccgttggcagatacgcctgtgcagggtggggtatggagaatcaagtggcaccctttccaccaccacctgctcctggccgcctgcatgcacagtggctttaagatcctcaactgccaaaaggcaatggaggagaggcaggaggcgacggtcctgacatctcacacattgcccgactcgctggtgtatggagccgactggtcctggctgctcttccgttctctgcagcgggccccctcgtggtcctttccctagcaacctaggaaccaagacggcagacctgaagggtgcaagcgagttgccaacaccctgtcatgaatgcagagaggataacgatggggagggccatgccagaccccagagtggaatgaagccactcacagagggcatgaggaagaatggcacccggctgcaggctacagcagccaccacacgtgactgtggcgtgaacccagaagaagcagactcagccttcagcctcctggccacctgctccttctatgaccatgcgctccacctctgggagtgggaggggaactgagcttgaaatcatgaagccccttcccacaaggaaaccaggagggagactgcgagtgagtgcccgggaccacctcatcagagatgcttactgcagccctgcaggtgcctgtgcactgatggaatccacagtgtagtcagaaaagctgttgacttctcttaaatcagcttccctgctgggcccctgaaagtggactgggtgattctgtctggcagagagtggggaaaagacgcggtttccagcttgcagatttgttaagtttctcaggcagattttgactttcagcctttcatacttgtttaagcaactatttgtattaaatgaaagttttttggcaaaaaaannnnannannnaaaannaanaaaaacatgttcgggccgccctcgggcccttccaagaagacttttctaagaccatt

SEQ ID NO: 10121 - DNA, 555 bp, Homo Sapiens
ggggctaaagcacgagcctcatctgtaaatgcagctcccacttcatttctttaatgaaatattagttggaagacttcacaaagactgctgataactatctgtgattgataggaaattttttttcttgatttctctgtgagaaatgtaatgctgacttttataaagcctggacttctactttatttaataaatcaatgtttgcaatggtaaatgaaacatttccttggacatgtatttgaaagtcattaaatacaaaagttttggaaattcaggaaagttagcaattatgtacggatattatacagaggaaagtagttatatttttaaatgctattattgcagaggatcatcaaaaaagaggtaatctacgttatttcctattctaatgtcttttcctaataaaaaacttcaactttctaagttagtagagactgtttttgtagttttactttcattaactgttgcttaaggtttttatacacttccagattttaattaatactttcatatttctaggaacatggttgatatgaaataaaggactttttatttgta

SEQ ID NO: 10122 - DNA, 692 bp, Homo Sapiens
ggcctgggaaaaggggaaagattaacctggccccccaggcagggttaccctttggcagggtaaagaacatctttcaagccatttcatcacccttctgggtttcccaatctcctttttaccaaccctctcaaaaattcgttataatggtaccacctgcacctcgggcccatccaatagctatcatgactatccagccatttttgtaatagctattagcatgtgtgactccacctactattttccaagttctggtcacttccttcattcccgaagccagtagttgaacaggtagatatgaatagccctgggaaactaggtcatgcgggcaaaaaaatgtaatataccagattgaagatgccagtaatatgttagtgtggtttgcaagaaacttcaatggaggctctgcaagcagtagacaggataaaattcctccaccaaaacagtggagcatagcagtaaaccagcttgaaataggattcttccatgccaatgcagctgctcccggctgacgtttcaccgccatcactgacactagatagtgcgcgatgtcaaaaaagggaaacatggacgtgcgggagaaggccagagccaactcgtcccatggagaatccataacgaccaccgaccgcggcaaccgaagcagccgcggctactggttccccgcgctcgcgcggtgaggagcggacgcgtgg

SEQ ID NO: 10123 - DNA, 446 bp, Homo Sapiens
ttcctcccacggagcagcaaggccagtagccgctgtgacagtgctcactgctggcagtttccaaatctccagaggagttccttagatccttcaaaggggaaccttccagtgtgttcttcacacctgatgtgcgtcctcacacctgatgagtctgtgctttggtgttagaggactcacacctggggctggacctgagtgtttttctaagtgtggctaccgctgacgggcaggtgccatccatcaggctgaggctcggctcttatgctaacctgaggccccatggctggcggccctgctggtgtggacgaccgctgtgtgcgtctcttgatggctggggagcattttgtttaaacaggatctttaaaatgaagtgtacgcttataatacaagtgatgcttgtgtatttctcactttaggaaataaaatatttgccaatttgatagcgg

SEQ ID NO: 10124 - DNA, 821 bp, Homo Sapiens
gggaggggtgggcagcagcggcccccagccccggctcagcccgcagcatgggcagccacaccacacgggacagcagctccctctccagctgcacctcaggcatcctggaggagcgcagccctgccttccgggggccggacagggcccgggctgctgtctcaagacagccagacaaggagttctccttcatggatgaggaggaggaagggatgaaatccgtgttgtgaggcggacagtgggtggccaccgggagctctttggctgctatcttctccctgtccccctaccccactatgacctgttgtaccctacggcgcaaaggctagccaggacccttgattcagaccatggaccctggaccttgtagatgagggacactggcctggccctcgggtcttcggaggacgtagggggctggcatgggtgccgactggctgcctgacttctatcatgctccctgcacttaggccgcgtgggacaagggctgtgttgtctacagcaggaataggttttcctctgttggcctccctttcctccccctggcctcaaatggatgccagatgccaaccccagttctgaccacgtacagccagcgggtcagcccagaggcagcctcaactccagggctaaggactctccggctccaattttctctgctgggggtttctgctgtgcccagcagtggcctcttgggggaaacccctgccccaggaagggaaacaggcttgcctctttaagcccctccctggcccaccccaagttctggccctggaaaatctggaaccccccttggaacttaacctgggaccggggggcccact

SEQ ID NO: 10125 - DNA, 823 bp, Homo Sapiens
ggaccactttggcgtgaggcaccgcttctgtacccagaccctgggtgtcgacaagggctacaagaaccagtccttctacaggaagcactttgacacagaagagacccgggtgaatcagctgtttgcacaagcaaaggcctgcaaggtgctggtggagaaatgcacagtgagtgtgaaggacatccaggcgcacctggctcagggccatgtggccatcgtgctggtgaactcgggggtgctgcactgtgacctgtgctccagccctgtcaagtactgctgcttcacccccagtggccaccactgcttctgccgcactcctgactaccagggccacttcatcgtgctgcgtggctacaaccgggccactggctgcatcttctacagcaacccagcctatgccgaccgaatgtgcagcaccagcatcagtaactttgaggaggccagaaccagctatggcacagatgaggacatcctctttgtctacttggacagctgacagcaggagcctggtgcgcctaggccctcggaacccatccccaccccagccgggcccgctcaggacgccctggcccaggcttggggctgctggggttggaatgtggaactgcagcctcagcccatctggcagagtcccaggaactcggagactggcacagctgctttgtctgccagtgccgtgtgttgtcatgtcactcaccccaagcacctgctggctgctggaagcataccccaagaccccaagccttgaccccagctgccgcaggggtttttccaagtcacgaacagtgcccatgaccctcttgagccagatcaaggcaatctc

SEQ ID NO: 10126 - DNA, 673 bp, Homo Sapiens
acaagtactagtaatatttactatatgcttagatacgtatgctacctgttaaatattaccgcctactcctcattcaaaataatcaaggaaacatcaacgcacatcttcaaatggagcctctgaagtataccagaaagcattactttttcccttctactgtgggtttaccatgcacagctcttatatattttggtgtgtgtgtcatcaaaaggcatatatgccttcccaaaataaactttaaatgtgagttcacattctacagatctatcagtcactgggatcacatgtacggctgtggaaataggattgatgaaatatgtacttgacaaaacagtcaaaattattggtggctgatacaaaaatgtaaaaattgtggacaaaaaaatgggattacctctttatgataaaataatttggttagtttttttgggtggaaggagactcctctctgaagtaacctgaaaaacactcggtttataaaagtcctcctaataccttaaacagactgtggaaaaataactgtgaaaacaaacttggactctaccagatgggagctttgtcttattttatctgtatccccagaatctaattgagtgccaagtatagagcaggtagaaaagtctatcaagtgaacgaaggaacagggcatttcagttaattacaattattttga

SEQ ID NO: 10127 - DNA, 550 bp, Homo Sapiens
  misc_feature (34)..(34): n is a, c, g, or t
  misc_feature (388)..(501): n is a, c, g, or t
agggacaaaaaaatatgatgacttatgtggtganatgttggggaaattctcaaacacgctggtagcagatataaatagctgtagacttttctagaggacaacactatgtacttcaaggaacacaccttaaggatttcctattggacaggtccttaaagataagaataatcattacagtattatttatgtaagtgaaaaactgatagcaacctaaatatatgccaccatggcactgcttatggtacattcatatagtggaatgctaggtagaaaagagatggagacaggaaagtcatgtgtatcgacataatacagtgagtttcaaaaaagtccagcttgggcaataagagtgaaactccatctcaaaacaaaaagcagctaggtaggnnnnnnnnnnnnnnnnnnnnnnnnnnnnnnnnnnnnnnnnnnnnnnnnnnnnnnnnnnnnnnnnnnnnnnnnnnnnnnnnnnnnnnnnnnnnnnnnnnnnnnnnnnnnnnnnnngtgtgagccaccgcgcccggcgatttagcaaatttttggtagagacagg

SEQ ID NO: 10128 - DNA, 299 bp, Homo Sapiens
ctcggtacccatccttaatctcaaaaagggctggtgcaatgtgtgacaagagtagaactcgctaaagcctcgatgtctctggtaagtctgagcccaccccgagaccacatcctgcatccttgagcttcctgcatgttcactgtgggattgttctctggagtaacaggcccatatatttcctcctaaaagtttgaaagcactacccttgtgccaggctactcagtatggttgccatagccacatagactatctatatttaaagtaaaattaagagaaatttttatagataacggatagat

SEQ ID NO: 10129 - DNA, 835 bp, Homo Sapiens
gggggggcggcagaggcaccagccgacccgtcagtgacaccgctgtgccgtccccaaaaccagccgagacagctggcccccacccttccacccattgggcaggccgcacgggggcgcggcccggagtcctggtccctttgttgggcgcgcaccccctcccttaggtggcaacaaagtcgtgcagtgggagccgccgcgatagggcggggagtggccagggcgggactccaagaactgcccgggggcagcggggccaaaaagtgggaagaaggaaaaaaggcaggaggcatctggggacaggcgcgagggcagccggctctgaagtatgcggagggcctcctcccggccccgggcattcgcggagaacgagcctcgcagaagtttggctgcagctgcccgggcggcgtcgatggctgcgcgccccgcgccgcgcgggggctgagcgggcgccacttcccctccgggccggcttttgtgtctggcatctcctcctcatgctgcgtctggccacctactgcggcggccgctgctgagacgctcgctcggaccaaggggaggagacggcgggggcggcccccggctttgggtccaggcgggactaatgggaaaggggatgtgcttcccaaaagcagaaagcggatttttccagaaccttgcttgctgcctgaacggtccctggttcgggcttttcctcctaggggggcgcaatggcttctaaattacgaagcttggcggaacgccagcttgtggggaaaaagtcccaagggccgggggggcggcctctcaagttaccacacacaccctcctccggggaaagtccccttcctttcccccc

SEQ ID NO: 10130 - DNA, 544 bp, Homo Sapiens
ctctatccttaatctcttgtatagtagtatatcataggaagttggcttgaggcagagtcagaacaagattctattgcagctgtatggtcttaatgtaggacttgaaacaatatataaaattcggatcctcaatatatacttagtattagctgtaaagaaatctgtaatggtggctcagatttcaagaagctgtagcccacttgcagtgcacacaaggcaagtcacacctcctagttcactagtgttgaagtattatagcagtgtaaagaaggcttctgcccttggaaagacaagacagacttaacatggattacaaccaaacagcgcagagatagtttcagctaggagcctagagtaaggatgctaagaacaggggaagagttttaggcaaagtgaaaatttgcctggattatgacagatgggcaaaattttggaagactggaggggcttggatatgatcagtggaattgagccttggtatgaagctggaactgcagaaactgacatgagggttgctcatgattgaggtgataacaagctttag

SEQ ID NO: 10131 - DNA, 561 bp, Homo Sapiens
tccccctcgtatccttagtcttacagagatggaaatggttacaataaagctctatgaagggggaaagcagaaagaataacatgctatataagatatatatgcagatgtacagggatgagatatcacatccaacattgtcatgattatatgcatgaagacatcttgacgttttattattgcttactaagtatgcctcatctcatctgggtgtacaccattttcttttctttgatcacagctgcttgatgccactgggaatggagggttctcccaaaatgtactgtctctgactatatccccaataatattataccctaaaacaattaaccatcttgatcacaatacagggcatcagtagggatgaacagggttattcctatgaagacacagaatgtgggtatgggcagagtttcaaagggagggagacaataaagaaggagatgtccactttttaactttatatgctattatattactatttgcattttcccccatataagcatgtgcttatttttaatggaagcctaagaagcaagtaaatcatctcgagattaaggatag

SEQ ID NO: 10132 - DNA, 302 bp, Homo Sapiens
ctctagagagtccccctctatccttaatccctatcctgatctctctatccgtaatctctcatccttaatctcctatgaaagatagatgagctttttcaacttctgcgagcaaaaaccaaagtaaatctgggagtcaaaaaccaagttaaagtctaagaaactgtcaggtatcttgttcatgattttctaagtccgactagactttataccatctgatatccttgttagtatgggttctccaacttcaaatctgtatactgataattattttggaaacaagctttcctagattaaggatagag

SEQ ID NO: 10133 - DNA, 459 bp, Homo Sapiens
ctctatccttaatctgtgggtctctcctggtctccgtctctttccatttctctgatctctctgcattgtacaaaaattctatgtttgctctcttgtcaatacaatccttgaatcttctcatacttagagcctaaacactcttctttgactacagtctccatgaggctatgccagccaatcagtagataggaatcaagagcttggagaatactcgctggcatttagtttgggcttaggttaaagcctgcctgactggggaagaagaaagggctgaggaaatagctgcttgctggaaagccagtgcttggagcaggctgacaagagttaggaagcagaaggcctatgctgtcatctacaagctagtgctcatcaatcagatgcacgagcctttccattcatcccaagcccagatgaaatgagacagaagctccccacagacagctgccacctagccttgcg

SEQ ID NO: 10134 - DNA, 667 bp, Homo Sapiens
acggggctgtacgagctggtgtggcgggtgctgcacgcgctgctctgtctgcaccgcacgctcacctcctggctccgcgttcggttcggcacctggaactggatctggcggcgctgctgccgcgccgctctgccgcggtcctagcgccgctcggcttcacgctccgcaagcccccggcagtcggcaggaaccgccgtcaccaccggcacccgcgcggggggtcgtgcctggcagccgcacaccaccggatgcgctggcgcgcggacggtcgttccttggagaagctgcctgtgcatatgggcctggtgatcaccgaggtggagcaggaacccagcttctcggacatcgcgagcctcgtggtgtggtgtatggccgtgggcatctcctacattagcgtctacgaccaccaaggtattttcaaaagaaataattccagattgatggatgaaattttaaaacaacagcaagaacttctgggcctagattgttcaaaatactcaccagaatttgcaaatagtaatgacaaagatgatcaagttttaaattgccatttggcagtgaaggtgctgtctccggaagatggaaaagcagatattgtaagagctgctcaggacttttgccagttagtagcccagaagcaaaagagacccacagattaaggatagag

SEQ ID NO: 10135 - DNA, 822 bp, Homo Sapiens
  misc_feature (392)..(429): n is a, c, g, or t
ctaatctgtcttcgagagacgaaaataaatctgatttttggaagctccttctggaagcagtatgtgaacaatgggttgggataagacagaagtaaaccattaggaagctgctgcaatatccaagtgacagatgaccatgacctcaggagggcttggagagcaaggttagattaaggaaatttcaagaaggtaaaaatcagtgaaaactggtgggaatctggttattaggagagagataaggatgagagatctctatccttaatctacccaagagacattaagaaaggggaaaggatttctataatagaaaaaatcaaacagacctttacttgaaaaccagctgtcccctttactaactatatgatgttactagaagtctctgaggctaggcnnnnnnnnnnnnnnnnnnnnnnnnnnnnnnnnnnnnnngtgaattgccattttttaaattatggatttagtttattcttttgtctctagattagattatacctcataagttaccacctatatacctcaggataataaaattccagttatctgaaagataaattatactgtttatttaaaatattttcttctagtattcaccaaaaattagggatatttagtcaaatatgaatagtataaagaaatcttggtaccagatttccatttgtattatttcttttttaacagcttttaaggtgttagtagagaatataacttagctgaaatagactatcatgtttgtgtatctatatggtgtgtgtgttaatgcatgtgtatagttaaggttgggaacaggagattgcatagcagttcacatcctgactagcaaag

SEQ ID NO: 10136 - DNA, 434 bp, Homo Sapiens
  misc_feature (223)..(251): n is a, c, g, or t
  misc_feature (271)..(317): n is a, c, g, or t
ttgaagatgataggattgatgacgtgctgaaaaatatgaccgacaaggcacctcctggtgtctaactcccccaaagacaatgagttaagggagagaataagaacggcggtaacagttattggcaaaaagcatgaaaagagaaagcactttgaaatttattactagcttgctacccacgatgaaatcaacaacctgtatctggtatcaggccgggagacagatnnnnnnnnnnnnnnnnnnnnnnnnnnnnnaggctctgggctcctctgcnnnnnnnnnnnnnnnnnnnnnnnnnnnnnnnnnnnnnnnnnnnnnnntcactatatacacatataaagaaataaaaagaagtctcagttgcggctatttgtcgagggatcttgaactggtcagagaagaggaagaggaaatgaaggtcgttgtcgagcacgtag

SEQ ID NO: 10137 - DNA, 556 bp, Homo Sapiens
cacagtagaattatttggtcttgtgattggagtcctgacagcaagtatttcttcactgggagtcgagacaaaaaggtggttgtctggggtgagtgtgactccactgatgactgtattgagcacaacattggcccctgctcctcagtcctggacgtgggtggggctgtgacagctgtcagcgtctgcccagtgctccacccttctcaacgatacgtggtagcagtaggattggagtgtggaaagattagcttatatacctggaaaaagactgatcaagttccagaaataaatgactggacccactgtgtagaaccaagtcaaagccaaagtcatacactggctatcagaaaattatgctggaagaattgcagtggaaaaactgaacagaaggaagcagaaggtgctgagtggttacactttgcaagctgtggtgaagatcacactgtgaagatacacagagtcaataaatgtgcactgtaatggacttaataactacatgcttgcagtccctggtatcttaaaatattatcatgtaaacaggtcattttttccttcc

SEQ ID NO: 10138 - DNA, 1049 bp, Homo Sapiens
  misc_feature (786)..(786): n is a, c, g, or t
  misc_feature (788)..(788): n is a, c, g, or t
  misc_feature (790)..(809): n is a, c, g, or t
  misc_feature (820)..(904): n is a, c, g, or t
  misc_feature (914)..(926): n is a, c, g, or t
ttaccatatagcataatgctcttatcaagggcaatgattatagtagacaatattgtaactacagatagacttgtagaatatgccaacttactgtcaagtgacctcaaagaaaaaatgaaacgatagaatacactagtagttcttatcctcttttgtaggaaaccaataatagccattgtggcaataattcatcagttgatttcaaagcttcatgttatgcaaaaaagaatcctgctgttatacatgtgccagtgactttgtgctgaaatttcagctattccagataaacattgtatatcttgtaaattaatgtttaacaggtagtttggtacttacagacagtgttgattgccaggttgcttcatagcactttaagttattctaaaaatgaaattataagccacatatttggctaaagtagatttagttgtatagcacttacatatttagttcttttgaaagtttagataattatttaaagaaagcataatgctaatggaaaagaaaatctgatgttctattataatatgctattgctgaatatgaatagaaatacagggcatcatttccttgtctcattataagttagtaacaatatatagattaaatgtttacaatatagggaattgtaaataaatatatcagtttttttccccttcggtcttccacagcagtattattgtctttgtggagttgactaatgataatttaaaaatcctgtaatggatttctactaaaataaggtcatagtggcatataccaaataaaatcaaatacagaaatacnanannnnnnnnnnnnnnnnnnnncaaaacaacannnnnnnnnnnnnnnnnnnnnnnnnnnnnnnnnnnnnnnnnnnnnnnnnnnnnnnnnnnnnnnnnnnnnnnnnnnnnnnnnnnnncttggggcgnnnnnnnnnnnnntcaaaaaattttttaaacacctttttttggggcggggggcccccaagaggaaagggaacgggggcaataacgtgtttcccaagaaaaccctgggccagaaaaaagggggtggatttccccccc

SEQ ID NO: 10139 - DNA, 967 bp, Homo Sapiens
  misc_feature (448)..(448): n is a, c, g, or t
aggagttggagaaacagcaggtcaccatcctggccacgcccattcccgaggagagcatgaagcaggagctgcagaacctgcgcgatgagatcaaacagctggggagggagatccgcctgcagctgaaggccatagagccccagaaggaggaagctgatgagaactataactccgtcaacacaagaatgagaaaaacccagcatggggtccttgtcccagcaattcgtggagctcatcaacaagtgcaattcaatgcagtccgaatacccgggagaagaacgtggagcggattcggaggcagctgaagatcaccaatgctgggatggtgtctgatgaggagttggagcagatgctggacagtgggcaaagcgaggtgtttgtgtccaatatcctgaaggacacgcaggtgactcgacaggccttaaatgagatctcggcccgtcacagntgagatccagcagcttgaacgcagtattcgtgagctgcacgacatattcacttttctggctaccgaagtggagatgcagggggagatgatcaatcggattgagaagaacatcctgagctcagcggactacgtggaacgtgggcaggagcacgtcaagacggccctggagaaccagaagaaggcgaggaagaagaaagtcttgattgccaatctgtgtgtccatcaccgtcgtcctcctagcagtcatcattggcgtcacagtggttggataatgtcgcacattgttggcactaggagcaccaggaacccagggcctggccttctctcccagcagcctggggggcagggcagagcctccagtcggaccccttcctcacactggcccctatgcagaagggcagacagttcttctggggttggcagctgctcattcatgatggcctcctccttcaggcctcaatgcctgggggaggcctgcactgtcctgattggccgggacacacggttttgtaaaaaatt

SEQ ID NO: 10140 - DNA, 457 bp, Homo Sapiens
tttttcacaagactagatggagaattaatgaagaagaaatagaaatgaggcttatttaaggtacaaaattcttgtatttgtaataacctagatttatagatataaaacaagtcttttaaagacttccctaaaatactcaatataaaacaggagttacttatcctagatcatccttagttaggtacacatgattctctgtgcaactagctggtggacatgaataaaagctgctgggcctataatgtactaaaacatttttctcccttcagcaagacaggtagggttgaaggctaaatgcatcagaggagtattttcttaggcattttggacaatctttttgcagtaggttccataggttttccccagcgaaagttgactcagaccagagtaactctgacacaagttgccaagagggaaaaaaatacttcatttgctagattacccaaatggtgtagcc

SEQ ID NO: 10141 - DNA, 516 bp, Homo Sapiens
gggggaagaccatcactgtcactttctttaatggtgacgtgaagcaggtcatgccagaccaaagagtgatctactactatgcagctgcccagaccactcacacgacatacccggagggactggaagtcttacatttctcaagtggacaaatagaaaaacattacccagatggaagaaaagaaatcacgtttcctgaccagactgttaaaaacttatttcctgatggacaagaagaaagcattttcccagatggtacaattgtcagagtacaacgtgatggcaacaaactcatagagtttaataatggccaaagagaactacatactgcccagttcaagagacgggaatacccagatggcactgttaaaaccgtatatgcaaacggtcatcaagaaacgaagtacagatccggtcggataagagttaaggacaaggagggtaatgtgctaatggacccggagctgtgacgatcctcatgtgatcatgaagtcacgtaactgacttgttatgttcact

SEQ ID NO: 10142 - DNA, 485 bp, Homo Sapiens
  misc_feature (281)..(366): n is a, c, g, or t
ggaaggagtaaaactctttattcatagaacacatgactgttgatgtaatttacaaaaacaccatgagaactcacagtttagcaaggctgaaggatacaagttcaacatcaattgtatttctatttactagcaacaagtggttagaatttgaaattttaaaataccatttagcatcaaaactatgaaatgctgacatggtagacctgtacactgaaaactacaaaagattattaagagaaatagaagacaaaacattaatacctaggaagacagaccttgtnnnnnnnnnnnnnnnnnnnnnnnnnnnnnnnnnnnnnnnnnnnnnnnnnnnnnnnnnnnnnnnnnnnnnnnnnnnnnnnnnnnnnncaacaggggtttttgttgttgttgttgtagaaattgacaagttgatcctaatttctttttgagatagagtctcactttgtcacccaggctccatcttaaaacaaagaaacaaacgaaaa

SEQ ID NO: 10143 - DNA, 1712 bp, Homo Sapiens
  misc_feature (103)..(103): n is a, c, g, or t
  misc_feature (166)..(166): n is a, c, g, or t
  misc_feature (213)..(213): n is a, c, g, or t
  misc_feature (630)..(630): n is a, c, g, or t
  misc_feature (1270)..(1270): n is a, c, g, or t
gccgctcttggtgtcccccgatcagtagacctgtttatcttgtgcgaggaaaaacaggtgggtggtctgctgcagtggaaagcgccgtagatcaaccggacgncggggggaagatactttccccccgccggggtctttcggtacgcgccatacagcacgtgtgggncgcccatattagtggcggcgcgcagcggttcttcttgtcttatacanccccccggatatctgttttcgcccggtacgagcggcgggcgcagagagaaatttatgcgttagcggcgcggaaaagggggcgccaaaaacaacaggggggggatgatcaagcggcagcgcccccgccggcttgtgcggtgcggggtgatttataaaaggggggggtggcacgcggcggcaaagagcgagcgcccaaccttatgtagggtgggggaccgtgagcgtttttccgccccgtccattattgttgccaccggggggcgatcgggagaaagaagtcgctgcactcgtgtatcaaggggtgggtgcgaggatttttgcccgcgctatacccgcacggtttatttttgtgtcgccggcgacaggggtacctcgctcgacacacaccagacgatcgcaggcggcgggcacttaatnaatttctggtagaactatatcgcgagagatcgtgcggcctctcgggaccgtttctcctgcgccggggcggagaatgtcccgcgacgaacggcacctcctccagggacttcccgcgttcgggggtattgtgtttccgagaccacggttatcgttgtgcccgccgggggcgtcttttttttggtgtgcgggaattcccaggcccttgattccggtgccgcgggttttccctcgggaacccgcgttaggaccctgttccgctttcccaccgggggccgcccggcccaaatgaacggttttgaaaagtttttgaggggcggagggcgcgcgaccaatacttactacggccggtgcgtgtctcgctcgttgtcggctttcgcggcggttccctttgtttggcgggtacatctatcatgtaatttaatctgcttttttgtatattagctttgacatatagaatcgggtatctcaggatccctaatatataaaagacccgcataagaaaaaaacatttgatgatatgcataaaatcacaaccgcaataattggaccataattagactagttaagagatgaggaatatatgctcatttgtaagcgataagtgattatataaagagaaaacatgggttaagtaacacangtaacattaatttttgtatataaacaaattagttatctcaagtccttaaaagtttacatttaaaaaaacaggtcaagatgaagaaataactttgtagtttaaacttccacatgttgctcctttgggtggttttgccttggattttgcttcctttgaaatctttccattttgacattgagtaaatctggctactgtagaaacaccatccacaaacttggttttgaaaagaacgtttgcattgttgaacataccttcttttagtgacaccacaatgaactgagaatgtgtgaaatgagtacgcagcatctgttccatgttttgggtatgagaaagatcccagggtggatctaactcatcaaggatattaattggggccggtttgaagagaagcatggccgtattaatgacaagggcactaaagaactctgaacaccactaagtt

SEQ ID NO: 10144 - DNA, 1340 bp, Homo Sapiens
  misc_feature (132)..(345): n is a, c, g, or t
  misc_feature (383)..(392): n is a, c, g, or t
  misc_feature (406)..(544): n is a, c, g, or t
ccccccccttttccccgcggggggaaatttttttccccagggggcccaggggttgtatccccctggggggtttcggttttcaccccccgcttgggggggttcccgctcccccggaaaggtttaaaaatttannnnnnnnnnnnnnnnnnnnnnnnnnnnnnnnnnnnnnnnnnnnnnnnnnnnnnnnnnnnnnnnnnnnnnnnnnnnnnnnnnnnnnnnnnnnnnnnnnnnnnnnnnnnnnnnnnnnnnnnnnnnnnnnnnnnnnnnnnnnnnnnnnnnnnnnnnnnnnnnnnnnnnnnnnnnnnnnnnnnnnnnnnnnnnnnnnnnnnnnnnnnnnnnnnnnnngggccccggccccaaaaaaaggttttaaaaaatttttnnnnnnnnnngggggcccccaaannnnnnnnnnnnnnnnnnnnnnnnnnnnnnnnnnnnnnnnnnnnnnnnnnnnnnnnnnnnnnnnnnnnnnnnnnnnnnnnnnnnnnnnnnnnnnnnnnnnnnnnnnnnnnnnnnnnnnnnnnnnnnnnnnnnnnnnnnncttaaaaatataaatgtatttatctgcattatcacgtccctggggcacccagctggccggcccgtgggccacaggggcaggaaagggaacagcgcgtaagtctcagcaaggcgaaggagagctcccacaagtggggatgtggggcagcctcacagggccccgtgctgggcatggtatcgggacagcacggcgcggtagctgggacagctcctggcgcacggccacaacttcctgccgcagcaggacgttctccttctgccaggaaggccgcccgcaccgatatctggttctccttgagccgccgggcgtcacgggaccgcttggctgcctcgttgttcttgtaccgccggctccagtatttctcatccttctgctcctccggcacctggatttttcttgccttcttcatgattggctggggcttaagttcctcttctgagaagcgatgtcttcgagggtcaaaggtctcgtggccaggaatgcttgatagggcaagatcagctgggtcgggttcaaaggtcatcaacacctccacggtgtctgggtccacagggctgggtgtgtcccgagaggtcaggcctgcgcaggtggccgctggcggtcccgagggcagcccgggcgggggcgtgcccaggagaggagcggggggaacacgagccgcacgaacccggccctggggagggtgcgggcgtccgcgcgggcgacggctccggcgacgggccaccgggggcggcgggctgggcgggagcccgtgctccagcaggaaggcgtccaggtctacgtactccacatcgcc

SEQ ID NO: 10145 - DNA, 680 bp, Homo Sapiens
ctacatgctgcgacatacaggtaatttagcccaagctgaagcagttggaagagaggcactggaattaatacctaatgatcactctctcatgttctcgttggcaaacgtgctggggaaatcccagaaatacaaggaatctgaagctttattcctcaaggcaattaaagcaaatccaaatgctgcaagttaccatggtaatttggctgtgctttatcatcgttggggacatctagacttggccaagaaacactatgaaatctccttgcagcttgaccccacggcatcaggaactaaggagaattacggtctgctgagaagaaagctagaactaatgcaaaagaaagctgtctgatcctgtttccttcatgttttgagtttgagtgtgtgtgtgcatgaggcatatcattaatagtatgtggttacatttaaccatttaaaagtcttagacatgttattttactgatttttttctatgaaaacaaagacatgcaaaaagattatagcaccagcaatatactcttgaatgcgtgatatgatttttcattgaaattgtattttttcagacaactcaaatgtaattctaaaattccaaaaatgtcttttttaattaaacagaaaaagagaaaaaattatcttgagcacttttagtagaattgagcttacatttgggatctgagact

SEQ ID NO: 10146 - DNA, 781 bp, Homo Sapiens
  misc_feature (222)..(232): n is a, c, g, or t
  misc_feature (546)..(546): n is a, c, g, or t
aggaccacctttgtcataaccgccactcccccctttagaaggttcactccgtaattaaatagctcccattaccctagaatgttttccctgataaatgcgctgatgttcctattctcttcaaaatgcttggttaatttaaatgaggccttaccaagaggttatccccagatgaccaggaccccatatatcaccggacttttcacccttctccttgttccgggnnnnnnnnnnngagtcaaaattaatccagttaattgtaagtaatggaactaaaccaatacatgtagaatgccccatatagaatgtcccgtttgaggaacctggtaacaccaaaagggtctatgagcaccttcaccatcttcactttcttcttaaacctgcagtaggagtcatagcatttcattgttctttcacaatggtcagaaagacatgcctttacctaccttaaaaagtcttaaaatgttagcaaccatgatggacacggagcttgctgcagcacctatgacgccagaaatcttgtcgggcttggtgaaacatgggtggatnctccattagcacacttcacatccgaagcatctttctctattaatgcctgcacgaagtgttagaagactgctccaaagcataggtgtccctagagcacgtgtcgaagatgcggacacccagagtgatgttggaaaggagatcagggtccttgttaatctggtcaattgcataaagcatggcctccagtctgtgaatccccttttccttcttcagctccccacaatggcacgtggat

SEQ ID NO: 10147 - DNA, 591 bp, Homo Sapiens
gacgagtctagaggagtccccatacttgctcgacaacaagatccacctccagctgcacctcacccacctccacagcgtggcacctgactgcgtggagaagctcattatgacggtgaccacccctgagatggtgatgccaagcagcatgttcctcccagcagctgttccagatcgagatgggaattccaatttggaagaggcaggaaagcagcctgaaacctcagaggatctgggaaagaacatcttgccatccgcaagcacagagcaaagcggagatttgaaaccatcccctgctgacccaggctctgtgagagaagactcaggcttcatctgctggaagaaggggtgcaaccaggttttcaaaacttctgctgcccttcagacgcattttaatgaagtgcatgccaagaggcctcagctgccggtgtcagatcgccatgtgtacaagtaccgctgtaatcagtgtagcctggcccttcaagaccacttgaaaagttgcagctccattctcagtaccatgtgatcaagagctgccaccatgtgctgtcttttcgagcactgtatggggactcctctagactctacctccag

SEQ ID NO: 10148 - DNA, 343 bp, Homo Sapiens
ctacatgctcgacacaaaatgatgaaagatatccaaataccagataatccaccaggaaggctttgtttaggaattgtttcaagaggaacaagggatgagggcagaaaaatccgtaatatccatcagagtcagtgctataaaattgcctattaaggtaaaagaaaaatgtggagactattttactatacagagagcattaattcagatggcttagaaaagtgataccagcccaagaacagggatctaggtgagcccattgtaagtatcattgaaaacaaaacatgcccgtcaacatgtcacagaaaacgaacgaaggacaacaagaagtggatgagaatatttt

SEQ ID NO: 10149 - DNA, 511 bp, Homo Sapiens
  misc_feature (141)..(153): n is a, c, g, or t
gtgctctaatgttactgagattcattactatcttaagatgtgtatatcctcagctgataggaatctctccaggtcaacaggttcaaatattcaagaaggtagaactctcctcaatttacactgactttttagaggttcttnnnnnnnnnnnnntgcagaggaatgaaactacttacaacatttaattcctttcataatatgaaagaatggatacaaggctatttgtctcgtaaacctggtctgcagtaaagtcaaacttacaaaaactgttgtgacaaatgttatgtacatatattgatatgtaactgcattagtggccattttgaatcacagtggtgatcgtgtgaatatatttaacactatgttaaattaatttacgttgctattttattttaatcataaacaactaccatgtttcttaatgttttgtgtaaatttaaggtaattatactatccttttaaacttcaagaaaacaaagttgttagcgtatttacatgaaggcgcattatg

SEQ ID NO: 10150 - DNA, 245 bp, Homo Sapiens
  misc_feature (177)..(177): n is a, c, g, or t
aaagatatggctatggataatggtcgtagatatcttacaatctaggattattttgaaaacttttttctgagttattcattgtaagactctccccaatccaagggtgaaggatacttggacacaacacaatgccagttcaagttcaagggaagtgttccatcctctttcagcctccanctcagctccctaacacacggtgcatggtccagctcaatgggattttcccattcggaaagggaagccgt

SEQ ID NO: 10151 - DNA, 209 bp, Homo Sapiens
aaggggcggttggcagttgattatgttctggatgattccgtctatatatgtgtgaatcatgtaagtattttacagcatgttgatttttaaattaacgtagtaaatgctgtaaaatagatttatattcagttaaccgctttcagttgattttttgaaagaaacaaggttaaatgggggattaaagtaaaattgagagaccctctaaacca

SEQ ID NO: 10152 - DNA, 476 bp, Homo Sapiens
ctacatgctcgaagaaggggagctgtcagtcgtgtggcctgggagaaccaggagccgccggccaggagacacaaaactccgctcccaccgtgtcttcaagaagaaccatgttttaggaagaacgtgcacacataggcgcacacatccagactgttcccttcgcatcctgcagaagagtcctggtggtggcagcctcaccgcggcacacgttcgtagctcattcttggactcgccagaaagacactcgggatggcaacattaagtcctacctctgtactcgctgcgctttaaatttttaaaacacacgaatgaccaaggcttgttccagggaataatgctctgtctgaaagcgtttttccaaaaaagagaatttcacgtgtaggagtataggtggggaccccagacgtgtcaagactcttaacccgacagccccaagcactgctgagtaaagtcatcagatgagtagtcccaagctg

SEQ ID NO: 10153 - DNA, 753 bp, Homo Sapiens
ggggggagtgagggtagcacgctgagctgaaggctgtgcggagcggcgcggcacagagcctgttgttgagctcagtatgtcgtgggaatccggggccgggccaggtctaggttcccaggggatggatctcgtgtggagtgcgtggtacggaaagtgcgttaaagggaaagggtcgttgccactctcggcccacggcatcgtggtcgcctggctcagcagggccgagtgagaccacgtgacggtttatctgttctgtgacgaccataagttgcagcggtacgcgcttaaccgcatcacggtgtggaggagcaggtcaggcaacgaactcccctctggcagtgggcttctactgctgacctgatacgctgtaagctcttggatgtaactggtggcttgggcactgatgaacttagactgctctatggcatggcatcgggcaggtttgcgaatcttatctcagagaggaacacaaacgttgccaaggtcccccctcaagtgtctggcccaagaggtaaatattccgcactcggattggtgaccttccccatgagctgacccacaagaaaatgccccatataaatgactgccgcagaggctgctactttgtcctggattggctccagaaagacctattggtgccgccaactggaagaacagccttgagagagacctgggagttggaggagttccagggaaagggatagaggaagaggatcaagaggaagataagaacattgttgttgatgacatcac

SEQ ID NO: 10154 - DNA, 1373 bp, Homo Sapiens
  misc_feature (656)..(656): n is a, c, g, or t
  misc_feature (689)..(689): n is a, c, g, or t
  misc_feature (691)..(691): n is a, c, g, or t
  misc_feature (855)..(855): n is a, c, g, or t
  misc_feature (903)..(937): n is a, c, g, or t
  misc_feature (984)..(984): n is a, c, g, or t
  misc_feature (1082)..(1082): n is a, c, g, or t
  misc_feature (1112)..(1112): n is a, c, g, or t
  misc_feature (1234)..(1234): n is a, c, g, or t
  misc_feature (1251)..(1251): n is a, c, g, or t
  misc_feature (1294)..(1294): n is a, c, g, or t
aaaagtggcccaatatgctcatcactgataaatgctccctggccttaaaaactaccaacatataatatatatgctgtcttaaaagttaatgatccaagtggcacctctctgaacctactttggcttgggaggctgcccagttaaaacaaaaataagttaatggtacagaaagagaatgaaaaatgaaagcctccttttatcctatcatcctaattccttttcccagcaataatgactgctgtgtcggattccttctgcaaataaaagtgtatacatatatgtagcaaatcttacttacgcgaaggacactgccgcgccggaaccgcaatggccgaaaggggtaggaacgagagcacgggccgccccctccggtctcggcccgccaccggcgcgagcgcggcctttgttgggcccggcctcgggcccctccagaaaaagtcttttcgcaaacccatgccggtgtgcgggggccggtgcggcccccaggggtgcggtacgcgggcagaacagggggaccgcgggcataggtgcgttgtcgcgtaacgagacgaatacccgcgtgggtggcacggaggggcgcgcaaagcggcgtcgccgggaatcgcccgcctcgcacccatcaactacaataaacgacccgcgcgccgcgcccgtgngtagcacaccaaacccgtgtgatggtacggggntngcgcaggacacaaaaagagagcagctcgtctcacccagcggagtgactgccgaacaccccatgctttcgtgttcagacgcgccggttaacgccccacctccacccgtcttgccgggggaggagaaagaatttacgttatacaagctcacgagacactcgcccgnttgggtttgtttctgttccgcccccacacactgttggcccgaggcggnnnnnnnnnnnnnnnnnnnnnnnnnnnnnnnnnnngcactttgtttgattcggcgtcgtggttctctccgcccctcgctgtnttgtctgggccgacccccgccttcgttattgtgggccggcggtatacaaccatgcaccaccgctgtcgagactgtgggtatcacccaccccccccgcngtgtgccaaaatcccccctctatttgtatntcgtactgtgccaaaaacgtggggatggggaaacgagcccacgccccccacgcgcatcaaccgacggagcaatgtcgacgatcgtaacaacgctcgcgtgatacgaacgacgcggccgcgtnaccgggtggtgtgtctnctcaccgcacctcccgtagtggcaccacgcgggctccgcccgngtagatggacgcgctatcctggttggcgccgctccgggtgagaaataagcagccccggctgctcacaagacgtaccact

SEQ ID NO: 10155 - DNA, 1146 bp, Homo Sapiens
ggcagcggctgtgaggaaaaaaggcatgaggggtcgtcttcggaatctgtgccacccggcactaccatttcgagggtgaagctcctcgacaccatggtggacacttttcttcagaagctggtcgccgccggcagctctccactccttcattgggacggaagtgctggtccccgcctgccctctggtggacagtctgtgaaacaggccttcagttgggcggcgtgcaggttaccacaggggaggaagctaccagagattcactgactgctataagtgcttctaccagttgcagcctgcgatgacacagcaaatctatgacaagtttatagctcagttgcagacatctatccgggaggaaatctctgacatcaaagaggaggggaacctagaagctgtcttgaatgccttggataaaattgtggaagaaggcaaagtccgcaaagagccagcctggcgccccagcgggatcccagagaaggatctgcacagtgttatggcaccctacttcctgcagcaacgggacaccctgcggcgccatgtgcagaaacaggaggccgagaaccagcagctggcagatgccgtcctggcagggcggaggcaggtggaggagctgcagctacaggtccaggcccagcagcaggcctggcaggctctacacagagaacagagggagctggttgctgtgctgagggagcctgagtgaggagaccgccagccccagaagcagagggcagtcaaggtcaagagcctgtggtccagcatgcctggcctgggcgggctacctctgagaacggctgaaatggtgcccagtccatcagcagtgatggaatttgctggaggactaggccagagcaagcctcactgccactgtgcctttggggcacccttggggttggacatacacccccctttagattcctctgtttcttctacctggataattcttggccatgttctctcttctctaggttcaggtcagctctgcccctccgcccccctcctggtggttccccagcccttttccctggccctggcttggagaatctgttttcaatctccactgattgcccccttgctggccagcccaggggcctttaccatgttctctccacatccgtaaataaacttccttcactacactgtaaa

SEQ ID NO: 10156 - DNA, 2475 bp, Homo Sapiens
  misc_feature (1684)..(1698): n is a, c, g, or t
  misc_feature (1787)..(1796): n is a, c, g, or t
  misc_feature (1870)..(1870): n is a, c, g, or t
  misc_feature (1900)..(1900): n is a, c, g, or t
ttacggcctaaggctagcgagggcccccgggtggttatcggccgagggcgcggctgcgggggtgcaaatagggtcagtgggccgcttggcggtgtcgttgcggtaccaggtccgcgtgaggggttcgggggttctgggcaggcacaatggcgtctcgagcaggcccgcgagcggccggcaccgacggcagcgactttcagcaccgggagcgcgtcgccatgcactaccagatgagtgtgactctcaagtatgaaatcaagaagctgatctacgtacatctggtcatatggctgctgctggttgctaagatgagcgtgggacacctgaggctcttgtcacatgatcaggtggccatgccctatcagtgggaatacccgtatttgctgagcattttgccctctctcttgggccttctctcctttccccgcaacaacattagctacctggtgctctccatgatcagcatgggactcttttccatcgctccactcatttatggcagcatggagatgttccctgctgcacagcagctctaccgccatggcaaggcctaccgtttcctctttggtttttctgccgtttccatcatgtacctggtgttggtgttggcagtgcaagtgcatgcctggcagttgtactacagcaagaagctcctagactcttggttcaccagcacacaggagaagaagcataaatgaagcctctttggggtgaagcctggacatcccatcgaatgaaaggacactagtacagcggttccaaaatcccttctggtgattttagcagctgtgatgttggtacctggtgcagaccaggccaaagttctggaaagctccttttgccatctgctgaggtggcaaaactataatttattcctggttggctagaactgggtgaccaacagctatgaaacaaatttcagctgtttgaagttgaactttgaggtttttctttaagaatgagcttcgtccttgcctctactcggtcattctccccatttccatccattaccccttagccattgagactaaaggaaatagggaataaatcaaattacttcatctctaggtcacgggtcaggaaacatttgggcagctgctcccttggcaggctgtggtctcctctgcaaagcattttaattaaaaacctcaataaagatggccctgcccagcactgtgaccttgtgtctatcggggcattcgatagagtcgctgaaaggatgtgttgctttgaaaaggtgtggccttacgacactatggagatgatgggtagaagctccttcgagaaacctagcagtggccatagagaagtagactgggtatggggaacctaagtcatagttgtaacctacagctgattggtaagaactatgggccagacatttaatctctccatctatgaaatagtccattctcatttatctagcttaggttatgggctcttcttttagttggatattcacatttatctttcagtgttaactgggtatcagttatgagtctactactgtataatggcatccaaaagaattttaaagtacctcggtttatagggatttacaattcacgtagaaacttgttattcatgtgaaacagtgaacataatatctaatgatgtggagcaaggtaccttcaacaacaggaaggaacgagatccggtgatttaaactaaaaggcccgctttnnnnnnnnnnnnnnngccgaatgcgccaccccacgacatgacaccctttgtttcggcccgcccctccggcccctccgaaaaaaacgtttgtcctaaaacccaannnnnnnnnngcaaccccgtcgggccccccacccccaggcttcacggggcccaaccgtcgggcccccacatagcgctgtggttntccccctccgccgacaaataatcccgtggngcccacatctggagccttaaaggccggcctgttgcgggacacctcctctctcccccacttgaagcttcgcccgacatttcccccctctctctttcccggcggcgcggggtatatggacatctctcggtaagaccccgggttccccgcttggagtcagcccgagatctcttccccgcgaaacgcgagcccgcactttcccccgtgagacacgggcgcctctttatacgagtcggggaggtacttgtcctacgtatcgcaaacctacgcgggggcggtggccccacaatcgggggggagaacgcgctcacggaacatagcgtcggagaacttttaagagccccgccgcccccaccccccgcttgggcccacatctccaatcccacccccctatagaccacgggctgcacggtcaaataattatgtcttacccggcctcttcctccttggccggccacctatggtagaaaagccctccttcgcccctggagattcgctgctcattggccaacacccacccccccttttagttgtgtacgcggtgagcggtgacacacagcccgcttcgcttgggctgg

SEQ ID NO: 10157 - DNA, 475 bp, Homo Sapiens
  misc_feature (63)..(149): n is a, c, g, or t
  misc_feature (205)..(246): n is a, c, g, or t
  misc_feature (460)..(460): n is a, c, g, or t
gggtgaccagaaaaatcccaccccttgccctttccccaaaggaccttttctgtacatgacacnnnnnnnnnnnnnnnnnnnnnnnnnnnnnnnnnnnnnnnnnnnnnnnnnnnnnnnnnnnnnnnnnnnnnnnnnnnnnnnnnnnnnnnaaatggaagcttctagcaagccccccaccccaatcaacctctatgctttcttcttnnnnnnnnnnnnnnnnnnnnnnnnnnnnnnnnnnnnnnnnnnccagaagccctgctgtctgtctgtgcccaagcccttccaccagaaaagctagtctaggtgtgagagcccacattgtctgtagccatcaaaaataataataataaactggacagtttacaatcgttggtttctttcaaaaggccttttttggaaagaagaaaaggcagtcaccgttttccacttggggttttggtttgtgcaacagagcaagggnagggagttttgggac

SEQ ID NO: 10158 - DNA, 647 bp, Homo Sapiens
  misc_feature (27)..(27): n is a, c, g, or t
gggggaagaaggatcaggtgggcacangctggatgacattgtggatatttctgatgaaatcagccctagtgtggatgatttggctctgagcatatatccacctatgtgtcacctgaccgtgcgaatcaattctgcgaaacttgtatctgttttaaagaaggcacttgaaattacaaaagcaagtcatgtgacccctcagccagaagatagttggatccctttacttattaatgccattgatcattgcatgaatagaatcaaggagctcactcagagtgaacttgaattatgacttttcaggctcatttgtactctcttcccctctcatcgtcatggtcaggctctgatacctgcttttaaaatggagctagaatgcttgctggattgaaagggagtgcctatctatatttagcaagagacactattaccaaagattgttggttaggccagattgacacctatttataaaccatatgcgtatatttttctgtgctatatatgaaaaataattgcatgatttctcattcctgagtcatttctcagagattcctaggaaagctgccttattctctttttgcagtaaagtatgttgttttcattgtaaagatgttgatggtctcaataaaatgctaacttgccagtgatta

SEQ ID NO: 10159 - DNA, 795 bp, Homo Sapiens
cgggcttccggaaaaactggggaagggtacccaggtgccttttgaacgctcaatcttgacatcagattcgacctatagttctgaccgtactaaagagaggactactgtcgaatggacacagacacaagcgctcatgtctatgcgagttcttggcaaacctgagccacgcagctcagccgtgtcccagagagtttgccaggggaaccggagatccttcctcaagcaccctgctaagtgctcatctgaaggatcttggaccgaagaaatctctctgatgaatgatgacttgttaccaccagctccttcgagaactcatagaacggaagactcagctccttggatcccaacgatcaggtggccatgggaaggcagtggcttgcaatccagaagttacgaagcaaaatccacaaaaaagtagataggaaagccagcaaaggcaggaaacttcggtttcatgtccttagcaagctactgagtttcatggcacctattgaccatactacaatgaatgatgatgccaggacagaactgtaccgctctctttttggccagctccaccctcccgacgaaggccacggggattgacatcgcccacctccgacacccagtgggcgccttggctggtgcggctgctggtccagatggaggaaaccagtgactttatggggctgagctagtagggaagcccctggaaagatgctgcgttccgaacctgtgcctaatacacgcaagggcgctgtcccgcccaaccccgcctttaaacgccacaaataaagagcattgttaccgccaaaa

SEQ ID NO: 10160 - DNA, 945 bp, Homo Sapiens
  misc_feature (294)..(295): n is a, c, g, or t
  misc_feature (297)..(304): n is a, c, g, or t
  misc_feature (306)..(308): n is a, c, g, or t
  misc_feature (311)..(312): n is a, c, g, or t
  misc_feature (497)..(509): n is a, c, g, or t
  misc_feature (519)..(527): n is a, c, g, or t
  misc_feature (743)..(751): n is a, c, g, or t
ggctactgcctggtggagggggaacttgacctctgggagggcgccgctcttgcatagctgagcgagcccgggtgcgctggtctgtgtggaaggaggaaggcagggagaggtagaaggggtggaggagtcaggaggaataggccgcagcagccctggaaatgatcaggaaggcaggcagtgggtgcagggctgcaggagggccgggagggctaatcttcaacttgtccatgccagcagcccctttttttccagaccaagggctgtgaacccgcctggggatgaggcctggcaaanncnnnnnnnncnnnccnncaccaaaaacatggtcggccgccctcggcccctcgaggaagccttcctaaacccattccgtttggccgcgccgggcccccacgtagggtaaagtggaaacatgggttcataagcctggttttccctagggaagaacccctggggccatggaactaagagggccttggggaattccccccaccccnnnnnnnnnnnnnccgcgccccnnnnnnnnncaaaccccgaagggggtttccttgaaaccacaaattccccaggaattgggggatgttcccttggaggggcgcccttttatacctggggaaattcccaatccccacaaccgggggagaggttccccaaagcggcaggagcctccctcataatatatcaaaattttaacggcccccccgccgcccctgggccaccttttcattttgaaaagaaaactnnnnnnnnnaatattcctccattaaagacaatttttcttcgcccgaacattggtgaaaacaccccctctccaccaaccggggggattggagagagaaaccccgtgaatccccgcccccgcgggcaatttaaccccccttgtggcgcgcccctggtgcggaaataaatatttttccccccgggggggagaaacacggggcggac

SEQ ID NO: 10161 - DNA, 796 bp, Homo Sapiens
cgggatatcaaaacaaatgattttcaggaatattcaatattctgcctttcagaaagtgtatgggtgtctgtgcttcataaatattaatgttcttcagaacatcattttaaaggagatacttgaatgttatttaaatcaaaccagatgtaaaacactcacatacaagttcatactttaaaagaggaaagctacttaacaatgacaaatatttcacaataataatttttacttatataccatctttcaactgaacatttcagttcttccaagagcttcttagagtagtatattttgggggcagtcaaggaataaactacagtgtaaacatatcccagatgaaaactgctgtatggaaaaatgacagaaagtaactgattgacactgttgattcacagttcaacctcctatctgggaaagacatttctttcctctgctcactttaagaacttttaccgactccaaaaatctcaggaattaaacttttaacagttacagcaataaagaatagttagtactccaaaaatattatatttaagatgctcaacaagaaaaaaatgcaaatgtaatatttttttcaaattacttctttattgacttgtccaaatttcaaaagtgcctacccttcaataaaacttttttattctgatctccataaaattacttagtcttctatgtatagctatcaaggaaaataaaaccaattttgccacagccacaactgtaaaatgtttttgtacccatgctgaaactcataacacacagacataaaaatagctgtgaggttttgctttttttg

SEQ ID NO: 10162 - DNA, 602 bp, Homo Sapiens
cccgaccatatgcagagacttacattcaaattgtgccacctgtactacaactggccgggcatagtcagtgtcccagcaccatgtcagtatgctcacaagctgacctttctggtggcacaaagcattcataaagaacccagtctggaattagccaaccatctcttctacctgtgatggcatgaactactggcatcactagatggacaatccaagaagaaattggtatactttgtgcaaatctgccataagctcaaggctgtgactggggaaaaagattgagcttagttttcatgtctaggaaaaaaagcaaaacaacttaatctgaaacagttttaaaaaatgtgtgttattttgttttaaagagttgtatgcttggggtaaattttcattgtcatatgtggaatttaaatataccatcatctacaaagaattccacagagttaaatatcttaagttaaacacttaaaataagtgtttgcgtgatattttgatgacagataaacagagtctaattcccaccccaaattttgctgaggttttcttaatgttgtagagcattttgtagagtggtttaaatagttgaaaataaagttcagaacatc

SEQ ID NO: 10163 - DNA, 415 bp, Homo Sapiens
catacatgctcgacaacacataatgagccaccaactcacaagtccgcgtgtgtggactgggagtatgccgctgctacaccgaaagccgtttgtgagacatgaatgccgcccgcggacctgcggcccgacgaggaagttttctactgtaaagtcaccaacgagatcttccgccactacgatgactttttagaacgaaccattctgtgcaacagccttgtgtggagttgtgctgtgacgggtagacctggactgacgtatcaggaagcacttgagtcagaaaacaaagcaagacagaatcttcagagttttccagaaccactaattattccagttttatacttgagcaggcttacccatcgttcgcgcttacatgaaatttgtgatgatatctttgcatatgtcaaggatcgatatt

SEQ ID NO: 10164 - DNA, 402 bp, Homo Sapiens
tacgatgctcgacaaagtgaggggttgaggagaggtacaggtgaaaaagccaggcagtagctacttgtgcatattcaaggatggctaagttgtttgtttggaatatagttcaaggtaggcagtaaaaagaaacagagggaggatcatgaatgatcctatgtgctatgcaaaagatttatagattttatcctgaaaatgatagagaactatcaaaggatattaagtagggcaattaagtctgagaaagttccttctagcattatggtgcatatcagggtcatggtaggatttatattaattcacagatttgtggactgcatgtccaggtaggtggtgggtgggaaagacaaatagttccattctaggaaaacagaatcagtagtaggagtgctcgagcatgta

SEQ ID NO: 10165 - DNA, 373 bp, Homo Sapiens
ctacatgctcgacatatgaattatgaatatctgtttgaaaccatgggctttcacattttcccaaggtttgctttaaaaatgaagttaatctttttcaagacagattgcacaagtgatctatctgataatgaagcaaatactgagcttatcttaggaggacattaataacctttgtgtttagcctcatcaaatttaacagtaatgcaagctattatacagctaagtaaaacctacttttctgaaattggcaacattctgggatagtgattaaattaccataattattgtaaggtctaacaaccttagaattagtggctgagggtcctgagggtggcatttatatggagaaacactggtagttgtcggcatgtag

SEQ ID NO: 10166 - DNA, 352 bp, Homo Sapiens
tccagttggggtaacatcaatacagatataatcctgtgggacttcctccccaagagatttgataataactgaaacatctgtaataggttcttttggtttagctactttatgacaagcatcattgaagtgaatttcttcttctagaggctttgaaacatcagttaatcctgctacaacaaagtagtcagcaacacgaggccccttgtcttcaatcatcttccattacagaaggtaacatacattaccgaaagtttctctctgaaaaagatgacagatttcaatgtgtgaactccgcagcctcagagatttgagaaattaacatactgttattgagattctgtcgagcatctag

SEQ ID NO: 10167 - DNA, 288 bp, Homo Sapiens
tcggtacccgtgtaaggttagacgtgtaaaggttggttgatctttcatctttttatctgagtaaaaagaagaacactttcctcattccggagatttttgatgttataatagttacctaaaagtaaagtgataagaaaataaaaattatttacatatgaatcattctttttgattaagtatgtagtcatcacctgacagttgtagtataggacacaagataaaaacaattcacctaacctaaagtaacttatttaattccataactacatcaacgctaacctttacacg

SEQ ID NO: 10168 - DNA, 550 bp, Homo Sapiens
cgtgtaaaggtagtaataagaagttctagctgttcttgtcgtatgtagttcattcacttcttctttgagggtggtcttcatactctccatttctgtcagctcaatttgaagagccagcatctctgaagacatgctttcctgcacacgttcagacattacgcgcagttcctctgatttaccagagaggagttccttctgatgatctacttggtgcttcagctgcttttcactaagcctggcttcatctaattccactttcagtttttctatcttagtttttagttcattcacttcctgtccctggcttctgcttagttgttcttcccatttcgccacggtgcctttttgtgttgttgtttaatagctgtcacatgtcgcagtctctaactcttctaacatatcgactctttgagcttccacttctctttgaagggtatatttttcttgttcataactctcagtcatggtcactcacttcattacgacaccgatccgattgactctgctcattcctgtagactctcgactcagttgtaaaccctccgtgctg

SEQ ID NO: 10169 - DNA, 321 bp, Homo Sapiens
ttccactagagtaggctaggtttttgttggatgaaatgaaatgattctgactgagcacagcaccagatctatagtgttaggtgtggatttgctattttaggatagaaattgtgaatgctatacttcagtatgcagctttttaaagattgtatgttttctcatcatataatcgcatgttaaaagccataatcaaagtacttataaaagtctgtacattagtctaacctatgcttgatatcttggctatttcaaaattaccgtattttaatcagtgttagaaccacagggagccattatgaagtctgtcaaaattgaatttcc

SEQ ID NO: 10170 - DNA, 953 bp, Homo Sapiens
  misc_feature (695)..(777): n is a, c, g, or t
ccagccagaccacaaaacgcaccgcaaaacacaagcacactgtacaatatagacccgtgtgtttagaaaagcaggatggtacggctcggaattcccggtgatatcagtcgacccacgctgtcggtctcgctgtccacgagagactccacactggacagaaaccctacgagtgtgctatttgtcagagaagcttcaggaatcagagtaaccttgctgtacacaggagagttcacagtggtgagaagccctatagatgtgatcagtgtggaacaaccctccagtcagaaagaaagcttaattgttcacatcagagtccacacaggcctgaagccctatgcctgtacccagtgcaggaagagtttccacaccagggggaattgtattctgcatggcaaaatccacacaggagagacaccctatctgtgcggccagtgtggaaaaagcttcacccagagagggagtctggctgtgcaccagcgaagctgctcacagaggctcaccctttgaccactttcctgaagagaagttctctttatgaattaagagtacaaaatcctctgagatgaagcaacctatccagttctatggaatgaatggagaatctttcagaaagaccatcattgggtagggcaaactgatttttttcctttcccccaaaagagtatgaaaaataaatgtcttgtttattatcattnnnnnnnnnnnnnnnnnnnnnnnnnnnnnnnnnnnnnnnnnnnnnnnnnnnnnnnnnnnnnnnnnnnnnnnnnnnnnnnnnnnggggggggccctttaaaaaatcccccggggggcccaaaattacggcgcccccctttttttggaaaaaggggcccccaaagggggggcaatttaaaacttgggcagggccggccttttaaacccgcgggaaggggaaaaacgccacctgggggactttgggaaagaaccttactttt

SEQ ID NO: 10171 - DNA, 544 bp, Homo Sapiens
cacaaagggggaattccgttcagcatgggctctaaacccacagaactgacaaagcccctgcttccccaccccctcctcaggctcctgcgagcacacccccacccccaaatccctccctgttctacactggggacagcagaattttctccccgtcttccccttcctgccattttccctcccttgaaaggttgacactggacaaccttggggcagctgagccctggccccctcctggctggaaccatgagaaggaagctcagcacttcccacagtgtccctgttgataactgtttttattaactgaattgtttttttcatggaccaaacttttttttgtactgtccccttattgatgttacccagttttaataaaagaatcttctgaaaaacaaacgacccacgaaaaagccgacggaaacgacaccccccaccgacccaccctcagtgacacccccagcgcgaagacggcggggcctccacagcaggaaagcgaaacaaccccaccacggtcccgctccccttggccgtcccacccaccgccctc

SEQ ID NO: 10172 - DNA, 739 bp, Homo Sapiens
ggggagagagctgagtaggaggcctccactccggatcgaggcctgtatagggctcgtttccccacacatgcctatttctgaagaggcttctgtcttatttgaaggccagcccacacccagctactttaacaccaggtttatggaaaatgtcaggccttccccacaactcccgtctaactgctgtcgcccccctacttgctggctctcagaagcctaggggagtccctgtggtcctgaattctttccccaaagacgaccagcatttaaccaacctaagggcccaaaggccttggacaactgcatggagctgcactctaggagaaggaggggaaccagatgttagatcaggggagggagcaggagtgtccctcccgtcagtgcctacccacctgtgaggcagccttctgatggcctggcccaccttccccagaaccaggggaggcctgaggcttcagttttactctgctgcaaaatgaaggcgggcctgcaagccgactacacctacggaggctgttgaggacaatttcattccattaaattaaaaaatactgactggctggcacgcaggtgccatgtctgggaacacggacgggggagcttcacctttttgtcttggcttttctttgggctgtgggggggcatccatttccagggtcggggaggaaataccaaatgcattgttgttctgctcaatacatctcacttgtttctaataaagaaagcagctgaacaaaaaaaa

SEQ ID NO: 10173 - DNA, 596 bp, Homo Sapiens
  misc_feature (35)..(35): n is a, c, g, or t
  misc_feature (387)..(388): n is a, c, g, or t
  misc_feature (392)..(393): n is a, c, g, or t
ccacttggttgctggctcactaaagttgtccctgnatctctacagtatggaggtcattaccaagaaatgcttggtatgaatgagagccagatctccacggtgtgagccagtgaattatggctaagttcggctgttacagccactggttggctggattttaaaccataaaacttgaagattacctacaaaagtaacggtgtggctattagcctgagctttaatggatatacatcctcacagaaaagttggaaataaccaaaacgtgaagtcttaatttaccttcagtttaatctgtggatttgttcaaatactaaagatcctcaggtccagaattccagcatcatttattcttttaaaatttttaagaacttgatccattgtatcagnntacnnctcacaaatccaggaagttgggcaaatggatgggatgagtgattcaagcagtgcacccggtggaagctggaatccatcctgggaatgaaacctgaagggaacgggaaatatgcttgactaaaacccgggggaagacattttttataaccccccctttgggaaatttttcacaaaaaaaatgggggggttttttttggcgcccc

SEQ ID NO: 10174 - DNA, 716 bp, Homo Sapiens
ggtcggtacctcagatcggctaacggcacaggtgataaaataggatcctggtgcggagcttacaattatgccagaaagccaacagctcccctcgtggggcctgccttaaacttgcctggtttgtacattttttgccggacgcatcaagaagcaatctgtgacaaagtctgagggtcttcctttatgcttgccctccacactaagagaagttggcgtctccctcctgggaattgttttgcctttctgttcatctgtgaactgttttttgtttttaattactctgtaccccatccgaatcagggcttctaccactgctgatgcaaaaccacaaagggacctacctgagccaccgtcctagccaagcgagcaaacctgcagggggtttggaagtggacttggtcaccgcagaagcgtgtgcgccgttgggggaagagctgcgtcacagccagagggacaaagtgtgggtgatcctggagacgccagtttccgagattgttctgcatattcatttgcacattgttgtctgggttggacatgcgtgtgggcttcagtgtgaggcttttaatatgtatatcctgttatcaataaaacaattatccaagtggttgaatcctgtgagacttggcaagtgtgtgcaaatcaagtatacttgacttttcaacctcttctttcaatgtaacttttatatgaaataaagtaatcaattaacagttctc

SEQ ID NO: 10175 - DNA, 542 bp, Homo Sapiens
tctaagtgcaagcagtcacgtgaaatgagcctgatagtctgcgaatgaagaaactaaaacgaactatattatatacttcataacacaagacaacgtgctcgtttgttcattctgcaagtaaatgcttaatgcttcctaggtggcaggctaaagaatatgatcattttaaagcagtcatgctttgaaaataaacaacccatcccagctgtaagctttttgaaagtgtacaaaatatgtaattgatgactccctaaatggtttgcagctttggtatttgactgaattgtaaaccattagttaaactacatttcagttatgctttgtaggaaaaacactttcctatgcattgaatgttctataactaaggagcttagtaatctactgctaaaaatctcactgaaatctccagtttaagcgatttaagcaatttacagctcttggcaaatatttgttttgggttataaaacactttttttctgactagtaaattgttcatgttctttgtttccagtaaaatgggaataaaggtttcagtactcaaa

SEQ ID NO: 10176 - DNA, 1295 bp, Homo Sapiens
  misc_feature (685)..(826): n is a, c, g, or t
  misc_feature (829)..(832): n is a, c, g, or t
  misc_feature (834)..(847): n is a, c, g, or t
  misc_feature (855)..(873): n is a, c, g, or t
  misc_feature (933)..(933): n is a, c, g, or t
  misc_feature (958)..(968): n is a, c, g, or t
  misc_feature (1057)..(1065): n is a, c, g, or t
  misc_feature (1089)..(1090): n is a, c, g, or t
  misc_feature (1143)..(1236): n is a, c, g, or t
ccacgcgtccggcaaaagatatcatgtaatttgtgcatttatgttactatattgtacttctgacaaatcttaaaaataccacccaggaataaagatttgtcagaagtacaatatagtaacataaatgcacaagatatcatgtacttctgacaagatctctattcctgggtggtatttgtaagatatctttacctataaaaagtgtttaaggttcataggactcgacaagagctatctggtgattttctcattagtaacatgcaacgttgtactgcaaaatttcaatcaacatgacaacttataatgagtggagatttcatattaggtactaaatattatagtattatttctattttctttttccaaataagaagcttggattattttattttgtgggctttatcattaactttaattctttctgtactgtgtataatatttgtatattattggccttaccataaaattatttagaaaggttgtcaaaataagttatacctctttggcaatagatagatgtatacatctacctactatgatctacaattttaggttaagtgaagcttgggggggctactgacttggttaccttcttgtctcttgtcccaaagatttaaactatgtacctttgtatagctcttctgccccattttgacttctgagatgaaagtatttactaaaattnnnnnnnnnnnnnnnnnnnnnnnnnnnnnnnnnnnnnnnnnnnnnnnnnnnnnnnnnnnnnnnnnnnnnnnnnnnnnnnnnnnnnnnnnnnnnnnnnnnnnnnnnnnnnnnnnnnnnnnnnnnnnnnnnnnnnnnnnnnnnntgnnnngnnnnnnnnnnnnnnaaaaaaannnnnnnnnnnnnnnnnnngggcccgggcccccaaaaggaagggaacggggcccaacctttttccaaaaaaaaccgggncctgaagaggggggggatccccccnnnnnnnnnnncccggggggaaaccgggggttttaaaaaaatcccaaggggtttgggggggtttttcgggaaataaaaaccgggagccaaggaaagtttnnnnnnnnnttacccccgcgcctgggccgtttnnaaagagggggagaaatattaaaacctctgccccaaagtgaaaacccccccaannnnnnnnnnnnnnnnnnnnnnnnnnnnnnnnnnnnnnnnnnnnnnnnnnnnnnnnnnnnnnnnnnnnnnnnnnnnnnnnnnnnnnnnnnnnnnaaaaaaagtggccccatatttgggccccgggtgtgttatttaaaaaagtggggggaaca

SEQ ID NO: 10177 - DNA, 830 bp, Homo Sapiens
gtggggataacgagacagaagtgaaaggaaaactggtgccggtattactgttgaaattaatgtacagtgaatgtttttaaagtattaattttaaaaaaccatgttctctagaaacaagttttaaaaatctatatgaaagttttaaaatgtaccagctaactaatggataagcataccagtaaagccaaagtaaaggttagtgcctttaaaactaacctgtgttagagttacatgaatctggctctaaagtatctattttgcatccatttatatatagatcttaaacagaaatactctaggttgccacaccacagttttaagaagttatgctgctgctgttactctcttctaggattctggtggtaaagtagagaaactcggacactatattaaccttactgaaacatgctttaaatcgtgtctaaaatctgatttgagcaagtcactgccgagcttctgagtctgcattgacactgctactgactcacctctccttccctggaataaggcttcagcttccctatgctgtgaagacaccatttgtaagcactttgaacataagcactgtgtgacagcgctggatatcatgcttggggggggcctctccctgactcccatccccataataatgagttttgtttggaattgtaataagtaatgaactgcatggtttagaaaattataaatatttgatcagctgtcctctctgaaaaaaattgcacccctttttcttttttaaaattttgttgcatcttcgtagtaatgtaattgtattttatgcctgcttttttataaaaaaatcaaataaaataataagaaacataagcatt

SEQ ID NO: 10178 - DNA, 464 bp, Homo Sapiens
  misc_feature (56)..(56): n is a, c, g, or t
aaagaagatactctcaaccacgtagaaatcttgcatgaggacatcacgctctggtntggtactcaggctccccacagtgtgggtaatgcctaactggatggcacctttcaaggctgatgaggttgtctgagaaacaagagaaatgagaagaaaattcctagtataagtaggatcatcacaatacaaattcagaaaggggaagctagaagatggtgttgcaaagacaaagtaactatgtgagccaatttaaagttagggaaaaaaatatttggaggaccagagaagacatcagttttgtctttcagaagctgggaaccaagacggtggaacagaatatgtagtaaaaggatagcttagtgcaggggcagagaaactgactgaggacagactctttggtgggagagaaggaagggaaaggatcagcattatccactgggaaaactgacctcagctaagctaacctt

SEQ ID NO: 10179 - DNA, 431 bp, Homo Sapiens
agctagaacaaggtttggtatataatggtgctcacaaatagttgttacaattatatcttttaaaagtattcaggaatcttatttcaacatttctatttaccaccaaagccatgacctgtagaagacatatgaaaaaactatgcctgaaggtagaaggtgtagtatgagtattggaagagaaggaacctatactattccatttctcgttagtatcagtggtaggaaacctaaaaattgatacatgcacattacaagaagtttgtggctgatgggggcagtagcaatgaaaagaaaaactagatcaatccctgaaatggcaaaagagaaagatctggtcactgtgctgacatgaaaccaaatatatatctcaaacccagaggtgtatacaccaaaaagaggccctaagaaaactctggtcctcaaaccttcga

SEQ ID NO: 10180 - DNA, 397 bp, Homo Sapiens
gccagaggatccggaactcctttcacacagcccctggttgtggttttaacacactgtaaccaggtgcacctctgccatagattatctacatggataatggtctttccagaaagataactgaggaactcatatttagtcgttctgattcacatgtatcaacttaaactaaaggaggaccacatcattagaactaatggacagatcgaagatgaaaggaagaataaaggactaggagctggtggacagtgtggctggagtatgtgtccagaatgggtttgccaggctccggccattctggactgtggagggacttgaaccccaaaggtgatggcaccccatggagagagctcatcctgcttggagaatgctatgaaagtaacgttccgggatcctctag

SEQ ID NO: 10181 - DNA, 161 bp, Homo Sapiens
gctctgcatctcgtaaggcctgctttcgagcatccacatcagcagcatcttcaatgtaagtatcatctatttcacgttcttccagctccttctcggcattttctggtagaacaatttcaaaatcattcttaggggcaggaaggcccaacaaccctaaacgg

SEQ ID NO: 10182 - DNA, 244 bp, Homo Sapiens
atcggaacttcctttcacaccctcctttggcgtctctgtgtatatccttgctttattttcttggaacctttggtttcaacactgagggcctggagacctcggctcctcctgctcctgaaccaggaggcttcatgtgggggaggaggagaggtctccatgtgacacatggtctcagggctgccagaatcagcggatgctggatgggcctgcagaaacaacactgggatcctctagacaccaccag

SEQ ID NO: 10183 - DNA, 712 bp, Homo Sapiens
aaagtaagatgtagccacgaagcagatgagtatcagggtctcagggtattcacggaatcctgcgggttcactcactcttcgcttcagaacgtatatatgtcttccttccaaattaaccagtatacataagggctaaaactagggatctcagaaccagtatgccaagtgtcggtgcaatttccagtttgaccacggtgacttggggcaagttgctgcttctatgttttttcaacgaaacaacccagtgaaaaaacaggtttcccgttaaaaagtctaggcaatgagtaacactaccaccaccacaatgaccaaaatacttctggttgtagctttggatctttggtgatctaacttgagatgctctttaatcttggggaataacatttagaagattaaagctgtagtccaataatgaaaacccttggactcttgagaaaacacatgctaacttgtatttataagatgtgaaactcattacccatttacttcagataagtgctcaacatcttacagattgatcttgtcacctatttcctattctcagagctagatttatgtaatttgttttcatgtaagtttaggcttacttgaaagtattctactcttcgcactaatactgttataagtaagatttgtgactaaataactttagaatcaccatttgaccttttataaggtctgatgaaggtatgtaggaacgtataagcggtga

SEQ ID NO: 10184 - DNA, 480 bp, Homo Sapiens
ttttttttagaagaaatacggactttaatgaagagttttccctttggtataagtgagacccgtggaaacatccaaacagcaaaaggaggccaggatgaaaacggtcaactctcccttatccacaaggccaaaagagggggggccggcttgctgtggtgtggccaccccgggcctaggctgggccgggcctgtagaaggtactcaggaactgcaggttttgcgtttcccctccatgaaactgacaggcattcgggctgacttctgcctctcagtctcgcggtaagagacccaagtttttctagtcctagatggaaataaatttcatctgcctcaggtctctggtataaaaggtgcgatcccagttacctcacaggcctaggcgaggaaaatgccaagagctgtaaaagggcttggaaaagtcaaaaaggtgatgtataaatgtaataattgattatcattttgtgctcaagaataagcaat

SEQ ID NO: 10185 - DNA, 481 bp, Homo Sapiens
tggggcgggcgttgggtttggggggacggtgcccccagcccaggatcgggcactcagtggaaccgcacacggccccggcgcgcctggtagagcctcgctggccccgcgccccggagccctatattaaggccacggagcgacagcgggcagtgcgggcctggcgggaggtgggggaggtccatctcagaacaccccagccttgagcttagctgcaggcccaggccctctgctctgctcccgggctaggaggtggccctctgtctgggcgaacagccccctcctcaccgcccgccgtgcaagagtcgagccggcagagcaaggggcgcggccccagggccctgcgcccactttgcacacccgctctccggcccgcgcccctgtttacagcgtccctgtgtatgttggactgactgtaataaatctgtctatatcgacttgtccatgtacgtctattaaaaccatagtccgagcgtgctaagca

SEQ ID NO: 10186 - DNA, 299 bp, Homo Sapiens
cgtgggccgaggccgcgcgcctggtattagaaaactactcggatgctccaatgacaccaaaacagattctgcaggtcatagaggcagaaggactaaaggaaatgagaagtgggacttcccctctcgcatgcctcaatgctatgctacattccaattcaagaggaggagaggggttgttttataaactgcctggccgaatcagccttttcacgctcaaggtgtgagccactgcaccaggccccttcatcttaattttaatatatctttgaataaacaccattgtatgaacctgctgtacc

SEQ ID NO: 10187 - DNA, 562 bp, Homo Sapiens
  misc_feature (295)..(333): n is a, c, g, or t
agtttagcctttaagtttctgtgtattgatttgcagattaagtaatgctgagaggaataaagaagggacagaaacatggaacataaagcattgaaaattccggtgcttgggcttcggcttcagagtaacgtcagtggcttagggttaaacggccattttattcaaatgcttgctatacaatctgaaaacacactggcaggtgctcctctccttggcaattcattgagtatccagagttctacgatgtttaactgaagaattggctaatgttttgatcctccagtgtgactgttgnnnnnnnnnnnnnnnnnnnnnnnnnnnnnnnnnnnnnnnattcctgaagcttaccagatatgaatggctaatactccattgttctgcttgttgtaatggtgaatgctttaagaaaaaaaagtgtaatttgctaagaataattcatgatctgtttatgcgataactcctttttgttacaatttttttaaaaaaagctatttttgttaatgtaaagtaaatatttcagagcaaattttttaaacttattgcactaaatacaggctctgta

SEQ ID NO: 10188 - DNA, 452 bp, Homo Sapiens
gcgtccgccgatcagatggagaaggggggacccaggccagcaggagacaggacccccgaagctgaggccttgggatggagcagaagccggagtggcggggcacgctgccgccttccccatcacggagggtccagactgtccactcgggggtggagtgagactgactgcaagccccaccctccttgagactggagctggcgtctgcatacgagagacttggttgaacttggttggtccttgtctgcaccctcgacaagaccacactttgggacttgggagctggggctgaagttgctctgtacccatgaactcccagtttgcgaattatagagacaatctattttgttacttgcacttgttattcgaaccactgagagcgagatgggaagcatagatatctatatttttatttctactatgagggccttgtaataaaataataaaccctcgaa

SEQ ID NO: 10189 - DNA, 1570 bp, Homo Sapiens
  misc_feature (422)..(515): n is a, c, g, or t
  misc_feature (1257)..(1257): n is a, c, g, or t
  misc_feature (1260)..(1260): n is a, c, g, or t
  misc_feature (1290)..(1290): n is a, c, g, or t
  misc_feature (1442)..(1442): n is a, c, g, or t
  misc_feature (1464)..(1464): n is a, c, g, or t
  misc_feature (1466)..(1466): n is a, c, g, or t
  misc_feature (1472)..(1472): n is a, c, g, or t
tagactagccaaaaatgccgtggcaaagagctcagaaatccaatttggataccaaaggtttctcatgttaatttctcagcccccaaagaagcatcttactcctgaaccttagacaggaagtattgtttcagtcacagaaagcttttctgggtacctctggttagcactttctactctctgatatttcctatgtacatagcttttattgttgtaaatcctttcttaatggttaaataggattgttagcaactatgggtttgcagttttctgagtaggtgagttttgaatatgggtaaatcagaataatgagacaacttgttaatctctttaatactaaaaataaattactcttctatttcagggacttaggtaatttaaaataaaccttcaatttatggtcttctgttttgaagctcatgggnnnnnnnnnnnnnnnnnnnnnnnnnnnnnnnnnnnnnnnnnnnnnnnnnnnnnnnnnnnnnnnnnnnnnnnnnnnnnnnnnnnnnnnnnnnnnnggaaagaacgtacaactcacatcgatacctaccgaaaataactgggaccatgctctccaaccgtcggggccacatatcatgtgccccttttcgtggtccccccccgcctggttccacaatattccgccggtctatcttcctgcagggcggggggcccaagctatcgcgacaatagacctgtcctgtagtctgtgtttttcccgtacaccagatccgtcgattaagaacaccccccgtggagttatgtccccgacaaaacaagactctttcgggcgccccctgatccccaccccggctccgcatccttccccgcgtaaccccgttttcggcagacgccccgccgggccgtcgctcctatcccataccggcgccgccctcgcatacctcccaccgcgccctattatttatttaacgtcgccctgctggcccgccaccgtggctgcaaagtaaagcggggggcgccgggtggcggaaacaggctgtaaagcagtgtacaagttcatccgcggcgccgtgcgctcggcggaaaggagcgacttccgttcgcctaacacaccagccttcttgctcggaagcgaagcactatagcgcgctagtattcctcggcggccgaggagccgcattcctcccccacccgcacacggtactagcgcccgcgtcgccagtagattaatacgggactgctccctgtggtcacgccgcgccgaggaaaaaataagtgtggtctcgcgcgccaccaccntgntcgcacccctccccacacgaatatggtgtntatagccgcccccctaggtaccgctaattccgagcgagcagaaagatgtggctacggaagaaacaccccggcttacacgaggaccacaccgctacctggtgtagcccttggggagtatataacgcgcgcacgccgcgcgcggcgccgactanatcataaagtctttgtgaagangntccgcnctgacgtcaagcgaccgcgaggagagcaagctcgccctatgtaaccgaccccgccctcccacgcgtgatcgcggacgcacaatcgcgggcgccgacta

SEQ ID NO: 10190 - DNA, 600 bp, Homo Sapiens
  misc_feature (538)..(538): n is a, c, g, or t
tggataggatatactcttaccaagtgataaaccagcaaccgcaattggagttataggaaattttactgagtgctgaaagaagaaagtgtgaagaagaaattgctaaattatacaaacagcttgatgacaaggatgaagaaattaaccagcaaagtcaactggtagagaaactgaagacgcaaatgttggatcaggaggagcttttggcatctaccagaagggatcaagacaatatgcaagctgagctgaatcgccttcaagcagaaaatgatgcctctaaagaagaagtgaaagaagttttacaggccctagaagaacttgctgtcaattatgatcagaagtctcaggaagttgaagacaaaactaaggaatatgaatggcttagtgatgaattgaatcagaaatcggcaactttagcgagtatagatgctgagcttcagaaacttaaggaaatgaccaaccaccagaaaaaacgagcagctgagatgatggcatctttactaaaagaccttgcagaaataggaatggcctgtggganaataatgatgtaaagcagcctgaggggactggcatgatagatgaagagttcactgttgcaag

SEQ ID NO: 10191 - DNA, 340 bp, Homo Sapiens
  misc_feature (121)..(137): n is a, c, g, or t
agtgctgcgttgcatatgccattgtggaggcatcacccgatgtggtggacctgaacattggggaaatgcagtgctgcgctggctggcatctgccctcctccgtctcctgggtgctgccacnnnnnnnnnnnnnnnnntgaagcgggcagagactggctgttgccatcacacaactgagggcggacctggagctcagccggctgagggtttgagagaccgttgggagcaagacccaaccacaaggcccatggaagaggaagttggcagatctcagaaaggggaggaaaaggagaggtgcttatttgttcatcttgtttttgcttttaagtgaaaggaagtt

SEQ ID NO: 10192 - DNA, 316 bp, Homo Sapiens
  misc_feature (59)..(67): n is a, c, g, or t
tgcacatatcctacacgtaccaaataaaatcttcacatactcaagtccttattcatacnnnnnnnnnatcttaaaaggcaatttcactccactttaagaaatgaggagtatcaaccatgaatcgccccaacttggtggcaacccccacttacttacatatttccttcctattctcctcaccatcctctaaagaggaatgttcttaactggttcagagtcacctactacatttacactcttgactcactcaccattgagcccatctctccggccccactccgcgattctctggaccttgttctatcaattagaagaa

SEQ ID NO: 10193 - DNA, 362 bp, Homo Sapiens
  misc_feature (13)..(13): n is a, c, g, or t
ctggctattcccnatggcaggaaagagcttctgctcatgagaaacttacaagataggcccaagatgggatctgacatcaatactgatattgataatggttaatagcaggcattaggggttaagtgctgccccagaggtgcagattgttacagacatgcagagaaggggaaagatgctttctcaaggaagcttggaagtggtcagagagtcattcatgtgagggaaggtcaggggaccaaaatagaggaatggaaacagcttgagcaaactcatagacgaggaaggaaggcataagtctttggattttcccaactccaactgacctcagcatgaaaagaaagcgggcttgacgtgaaacgaag

SEQ ID NO: 10194 - DNA, 325 bp, Homo Sapiens
gaggataccggaaacttcctttcacacacaaattcaggtcatctatgattatgccatctaagagatactgtgtcagtggcaccttcccgcatgggaagagatcttgcttcttgagcaggatatgacatcctcagaggcaattggacatcccttccacttcccctgtggcagcatgaacttcctctgtttctcaaggaggtagagggagaggggagcagcctgccacttctggaaattcacccacagctcttgcctggcgtgctgagcagaggccacccgtcggctttcaatagaattgactccccgccgaccagtaccgagttcc

SEQ ID NO: 10195 - DNA, 309 bp, Homo Sapiens
ccggaaacttcatttcaccttatggattaggcaaaaaattaatactagaactgtgatatttttccctctatttctccctgaaattccaatacaacccctattaagtgcttccaaagtcccaatgagaaggcaatgtagcctattttagtcagatccttagtgcttattcaaacacagaaaaacagaagtaaatctgaaccttaaccacctaaatctatgcacaaagtgaactcaacatttaagtatttctcctgtattccttgcttgttaacttccatacgcttctcttcgaaatataatggggggaat

SEQ ID NO: 10196 - DNA, 337 bp, Homo Sapiens
tgagctggtccgaaagccgaccatacactagcacctggggatgagggatcaaagacagaaacgccctaagcaagaagtatgaatgccttagaactaactctaatagagcccgggcactggaatggctaaagagatcacctgactagatggttacagataaaggtggggtaccttactcaagaccacaccagaaattaactacacaacaggatcggaacctggcgtctcgcttcccagccttagaccctttccccacagatgttcaccagtagacctctgcacccaacttcttgccaacattaccctttcgtgggtgtatgtcggctttgcgtccagc

SEQ ID NO: 10197 - DNA, 407 bp, Homo Sapiens
aacacagacacgtttgagtcctatgcccaatccctgagggccggtatacattcggcgccagctgtgtgactgcctgtccctgtgagtgccagggagaaacacagttttctcattttggtggggaggttagtatctgtaaatgggagcatatggggagcactgtctgcatctagctttgagagctggtcatgactagttcctgccgagctgccttgttctttcaacagctgtggagcaggtggcagtaaggagaggcagctaagagcccagccttgggagccagactgcctgggtttgaaacccagctctatcaattagtaggcacgtgtccctcttgctgtgccttagtttcctcatcagtaaatgggggcagaatagtcccaactgcatagatgataccaggccgg

SEQ ID NO: 10198 - DNA, 426 bp, Homo Sapiens
tgtgccagtacttgcactattgtagagtcctgaacatgatgcggtactcttggcgcctgtgtgactctgcacattctgctctcctgggggggaaagcaggtcttcctttttccacgtgactaataccctctggagaagaagcctatatacatatatttctgtctcccactgttgacttaagttctacatgccagggactacatttaaaaacccacaatatagtgctggcacagggtagatgtcagtaaacgtcaggacacttgtgtagccatctaatagatgtgcttattcttaagtacttgcttggtttcttcagtggggctcctcaatgactcttccatgtcaccgaagccttatagtgtaccagccagaccttgaggcaatgatctgcatctggggtggtcgggggactagagaactaggccc

SEQ ID NO: 10199 - DNA, 1136 bp, Homo Sapiens
  misc_feature (507)..(507): n is a, c, g, or t
  misc_feature (665)..(674): n is a, c, g, or t
agaactgtgctacattcaggcttacccattgaactcagtatatatagggttttccttcctgtcttttgtctggcaggataccattcttgttgctcttctgtgtaatgaagtttaaatgcttgtttggaaaactttatttaacagtttagaaggcttgatagaaagagtgcattagtctgaagagtatacattggataggaaagaatttccttcttttgtttctccaaatctttccgccttatttagcttgagatctttgcagcttggttcatggattctagccttgcccgttgcgcagtatatactgatccagatgataaaccagtgaactatgtcaaaagcactctcaatattacatttgacaaaaagttttgtacttttcacatagcttgttgccccgtaaaagggttaacagcacaattttttaaaaataaattaagaagtatttagcgcacatgtaaaattctgccagccatgtcacccaatccctgtccccacgtcaggaanatatatgccacttttgtgtcggcccgccccggcccctcgagaagttttcataaacttttcgttgggccgcgcgggccccaggaggaaaggtgacatggcccataggctgttcccaaagaaaatcccgggccatgacatagggctcggcattctccccnnnnnnnnnnccgcccggggggcaaccgaaggcgtttttaaaaaaatcccaaatggaacttctgggggccttcaccggggatttatccaaagggaggcccaaagcgaccccccattaatcaaatttacgccccccgcccctggcacctttattgccaagaactgggtgctaaatctatttaaagtctttttcggcccgaaatttgggaaggccccttccccacaacggggggatgggttggaacaccttggatatcgcccccgagcggggtatattcccccactcctttgggccgcgcctcctgggccgatattaaattattcttgcccccacctcgggaggagaacaaaacggcgggggggcgcaaaagaaaaaatctgctctcccacttaattgggccgcccacctctttcttacacactcccaaaaagcgtgggtgggaagattgtcctcgcctcccccggggcgcgtt

SEQ ID NO: 10200 - DNA, 641 bp, Homo Sapiens
aagggaacttaacggctaggtagcgaggctgggtggcgaattcggcacgaggaaggaataagcgcaaataaatttgtggactccacgttctatcttcttatggacttgatcaccttttttgacgagtatcatagtggtcatattgatagagcttttgatatcattgagcgcttgaagctggtgcccctgaatcaggaaaggtgtgggaagagagagtggctgccttcagaaatttcagtgatgaaatcaggcacaacctctcagaagtgcttcttgccaccatgaacatcttgttcacacagtttaagaggctcaaggggacaagtccatcctcgtcatccaggccccagcgagtcatcgaggaccgcgactctcaactccgaagtcaagcccgcactctgattacctttgctggaatgataccataccgaacgtctggggacaccaatgcgaggctggtgcagatggaggtcctcatgaattaagtgccatgctttgtgggagtctgggtcggcacactgtcagtacatcaggcacatgggcccactaggctggggtttctggttttgtttctgttgtgttttgttttggtttctgtattatgtatttttgtcaacgccaataaatttctttgatttgcc

SEQ ID NO: 10201 - DNA, 412 bp, Homo Sapiens
gcagttctcgatgaccgaaagttatcaaaaatatttaaaatatttaaattgtgaacctattgataaagaatatttataaaaactgatctgtaggcctgtactaatctctacgcattagcaatattgactgtaaacccacattaaggaaaccactacgggtctggcagtgcgtgtcccgtggggtgtgcattttaaaactcgattcatagacacaggtaccatgttccatttccgtcatggtgaagcaaatgaattggcctggctaccactgtggtcgcgtgctacaggtttgacaaaaagatatcatgtttcgatttttttgtgtgtggacaacaatatggaagctaaaattgacatatttttatgtaaagtttttctattctttgatttttaataaactttggaaaccaaa

SEQ ID NO: 10202 - DNA, 370 bp, Homo Sapiens
  misc_feature (338)..(338): n is a, c, g, or t
taagtttctgcatattatcaactcatttttattgatgaatatcacaaacttcaatcaatactcttaaaaatattattctgcatgcatttaacaaatctgacaaaagaacaagtatccagtttacttgcattgtaactatgacattttaactaaacaatcaattaacatatatttaaaaccattaggtacaggtaacaatgaaacacttcaatgctttaatctgatggcatcctaccactatgcacatgttcatgtaacactactagtaattaccctgaagcacaggcaaatgtagatggaggactctccctaaaaagcaagttttaagggattaaatntcatcgtcatcatcatcgctactgagaataaa

SEQ ID NO: 10203 - DNA, 596 bp, Homo Sapiens
gcctgtctgctgccgcctgccggggtggcagagtgagttgtctcaggaccccgtcactgcgacgttgacatcctctcccttcccttcctccccaactccccaaaacactgtggaaggggagaaggaagtgatccacagcattcaggccacttggggtctagaccatggtggtgccagcctggggggggcagtggccctcagctctgcccgctggagcggttgagtgcagaagggtgcgcctcttccctctacccccgcaccacctgctgtgtgccagcctgagacggttcctgcctgtcttgggggttggtggagggtggaggcagttctgccagccgtggcagggctgctatggggcatccagggctgtgggggtctggaggaggggacatgaggtgagaggtatcctggccgagggcggggggcagcggggggtctccctccggacctacctcagggagctgagcgtgcaggcgctccagggcaggcctgggacagagtcaaggctcagagaataaaggtagctaatctcatcataatatttttattagaatgttctgatgataaaaataaaacttgttttctttaaagaaaaa

SEQ ID NO: 10204 - DNA, 633 bp, Homo Sapiens
ttgttttgttttgttttacagcatgccaaatcctttggcatacgtgatggccttcaacaatctctctttaagtttttctttgcttgagtattccggaagtaaaagcacattaaagcaagtatgagatgtaggtaacctttctgtgtctgggccatttttggctataatcatctttaattttcctagtcctcccacaggtgctctgtctgtgcccgttgtaaactgcaagaagagtcttttctgttcatctgtaaatgaatgaacgatttcccagaactccctaatcagaacagagtccctggtatagccaccgtcatattctgtagtttcttctagtgcttggaaatctagattccggcttccacatataagcaattcaatttcttctggtctgaataagtactttaagggagattcattggtcaccatatgaaaacctctccgaaaagccttgaactgtttttctactgatttattgagaatgtagtcagaataaagattgacaaattccttcctgttttcatttgtaattggaattttatcaccattttcctttagatcatacatcattggggtaccaaaaagatctgtctgtgatatctggaaagtgatcatcatgtcatcttccacatt

SEQ ID NO: 10205 - DNA, 339 bp, Homo Sapiens
actcctgaagcccctcatcttggctaatccggacaggcttgctggggaccccatctccccttggagactttgggatgtggctggatgtccaagtggccggggtcctccacagcccccagcttcccagggcgggaggcaggctgtgtcctcggtgggcactgacagtgaggctgaaacgtttgcacttcacatttccacatttaggggcattttgttgttgactcattcaaagctcttttaagtcgcttaatttgctgctcagagggaaatgaaaagggagccattttccctgatttgtttgcctcatcaacttttcaatcaataaaaaagtgcattttg

SEQ ID NO: 10206 - DNA, 461 bp, Homo Sapiens
actttggaaaggacaataactataaacctatttccagattttctttctgctgaagctgttgtcagaatcttcctttggacaaaacatcactagctgactataaaaacaaaagtgtcatcattgaagccctgaagagccagggaattgagcttcagcaaaatacaggaaaagaactacccagtataaatgtcagaagacagatttcctaaacaagtaaaagagacatcaaaaattttaacataatcacaatgaaatcattttttaccacttttacagcggtgtttcaagcggactgtcactcagatctgcagagatgaatattactcaaaaaaatttttttgttctcttgcatttttttcaactaccgcaaagctatacagatttttttgtacttgtggatcttttgtacttctcataacctaatgtcagactaagaaaaataaaatatctgagagtaaaaa

SEQ ID NO: 10207 - DNA, 444 bp, Homo Sapiens
gctcctttcttttggaatccttttcttctcctttggtagcagctccctgcctccagcgttccgccaccagcgtctctgctgtgttgcgcagtgcagtggggtgcaagggctttgtttctgcctgcctgaaagagagggctctggggatggagatgagaaacaacacgctctccttcagacaatgaggcattctgtcctcctgctgccattcttcatctccactgagagccagagctggtaggagccgagtgccacaggcattctgcattgctctactcttaggtttgtgtgtgtgatccttcccctccctgtcgcccactcctccctcctctggctatcctaccctgtctgtgggctcttttactaccagcctatgctgtgggactgtcatggcatttagttcagagtggaggggctttggcctgaaataaaatgcaagtattt

SEQ ID NO: 10208 - DNA, 830 bp, Homo Sapiens
gttgaatatgtttgttcttggactttatgagatagtcttataagaatcacgattttctacacctgtcattgagccaagaaagtccagtttatgacacgtatgtactagtgaacaccgtcctcgatctgtacgaaatgtgaaatgtttagggacatctccatgctgtcacttgtgatttgccctcttatgtattttggtcatattgccaactggaaagtcaaaattttctaacaactttaagtaagttctttgaagacttagtgctgtttttaatccagtttagaaagtaacttaattttaataccgctactaaaaattcgaaaatttcttctttaatcacattcaatatggttaaaagaacaacactaattgacattgcgtgggctttttctccctttgtttaaaaatgtcatttgttgagcaagagttgtatagtattatctacttacttgaggctgttaatttttcattacagtgttttgtaaatgtatccacgagaccatgatgcattgttttgtgctcaacttgtgttttgtatttaaagcattttgaatgaagtgtattttataagcatttaatatttatgctctttagaatggaacacagaaaacaacccttataagtcctgattaatctgaaccaataacctgtgtggcctacaaagtataattctattaaatgttccttaaaacacttttttctaattaaaatctttgcaaatgcttgtgtaacttcctgccttacagctacttgtttgctgtgagccacccgcaactgacaagtggctgttaactgagtcaccatatcccagtaaagctgaattttctcac

SEQ ID NO: 10209 - DNA, 1355 bp, Homo Sapiens
  misc_feature (1200)..(1209): n is a, c, g, or t
agctagctggcattgcggctgcattgcacggggcactgggctgcaatgggcctaggccggagtttccaagccgccaggactctgctccccccgccggcctctatcgcctgcagggtccacgcgggcctgtccggcagcagagcactgggccttccgagcccggtgcgttccaaccgccgccgaaaccggtcatcgtggacaagcaccgccccgtgaaccggaacgcaggttcttgagtcctgaattcattcctcgaaggggaagaacagatcctctgaaatttcaaatagaaagaaacagatatgttcgaaaggagaaaagtactccacattccagagttctatgttggaagtattcttcgtgttactacagctgacccatatgccagtggacaaaatcagccagtttctggggatttgcattcagagatcaggaacgaggacttggagctactttcatccttaggaatgttatcgaaggacaaggtgtcgagatttgctttgaactttataatcctcgggtccaggagattcaggtggtcaaattagagaaacggctggatgatagcttgctattacttacgagatgcccttcctgaatatagcactttttgatgtgaatatgaagccaggtagtacaagagcctaacaaaaagttcctgttaatgagctgaaagtaccaaatgaagcctagcccgtggctaaacgcttgcgaacgtccaaattttaatattaaaggaatcagatttgatctttgtttaactgaacagcaaatgaaagaagctcagaagtggaatcagccatggcttgaatttgatatgatgagggaatatgatacttcaaaaattgaagctgcaatatggaaggaaattgaagcgtcgaaaaggtcttgattctgagaatgaatttggttagttgcagaagatacattggctctaagaggatatattttgagaccaatttaatttcatttataagaacatagtaattaagtgaactaagcattcattgttttattaatactttttttctaaaataaaacttgtacaccagtttattactctaaaaagagaattacacatgccaaatggaccaatgtccatttgcttattggaggcaaagctacaatagaagtcagagcatcaccagaatggtctttaatgagcatggaacctgagcaaagggaataggtgggatgaannnnnnnnnnaattgtgaaacaattcataagcacaatatgatttacagaataataaacattcatgtacccactatcaggttaagaaatagaacatttattaatatgtaggaatgttaagaaataaaacatttaataagatctcagaagactccagt

SEQ ID NO: 10210 - DNA, 676 bp, Homo Sapiens
  misc_feature (511)..(577): n is a, c, g, or t
ggctctaggggctaggggggagtggggagccaagaggtcccatattcctgagtgcaggggtagtccctctcacctgcttcctcagacgactctggaagcttccctctaccactgggcactgagacgaagctccctgacagccgagactggcagccctccatctggtccgtaccctcgccagaggcccccctacatcaacctcctggcgatgccctggtggagcagatgggtgctctgggagtcctgtgcttcctgatccaatggtgccaaacccttcatctcccccagaagcgcagcatacccctgggacccctcggccactgcccactcggggagccttctctgtttctggggcctcccccaccatagctctgattcccaccccacataggaatagcctgactgagggggaaggggtgggagagaagatacagacatggaggaggggaggctgctctggcaaagtcttcaaggcttttgggggtccaggcctgcggtcaagaaggaaaannnnnnnnnnnnnnnnnnnnnnnnnnnnnnnnnnnnnnnnnnnnnnnnnnnnnnnnnnnnnnnnnnnctttcctaggacccaccataccctgtgtatgtatgcatgtttttgtaaaaaggaagaaaatggaaaaaaatctgaacaataaatgttttatttgcttta

SEQ ID NO: 10211 - DNA, 1463 bp, Homo Sapiens
  misc_feature (575)..(590): n is a, c, g, or t
  misc_feature (753)..(761): n is a, c, g, or t
  misc_feature (790)..(790): n is a, c, g, or t
  misc_feature (896)..(905): n is a, c, g, or t
  misc_feature (1103)..(1103): n is a, c, g, or t
  misc_feature (1328)..(1328): n is a, c, g, or t
gatttcctctggagggcatgtacccacactaaataccaactgctcttcctcagctgtagttccccaacatcagtacttggcacgtggtggacactaacacacaggcactcaatgaatgagtgaaggaaataaaagtcaccccgttggtgagaggtgctatccctgagtctcagtgcaggaccagtggatgaaaggcaaggtaaagaggcccaagataggctggcttcccccgttcaaggtatagtctgcctttaagggagttttagaaccaacatgcaagacattgaaagaaatcttgcaagagccattattgacttagatccaaaacagcctctctcatgtctaaaaaggcacagaattttgcagatctgaggaagagggatgcattacctttttgcttcttttcaattgcttagtgtttctaatcatacttaatccacactaatgtgcgcaattataataaatggtaagatatccccaggccaacgacatcgtggccaatttggcccccctaatctaacccccccatacgggacctcattccccatatctccggcaatcgttcctgggttggnnnnnnnnnnnnnnnntcacaaagaggtttttccaaaaccctctcctgttgtgggccgcccgtgcccccccttcacgggggaacgcggccaattcggcccgccgttatccgtgttcctttcgaaaagaacagcccgcgccgccaattacaacaaagggggcggtggggggtttctcttnnnnnnnnnaacaaaaaaaacgtacccgcgcgcggggngggaaaaaccatagtgagctgtttctctttgtaccacaaacactctcctcaccatatgggggcgggtctctcctccccgaggcggcgcgctgtatatacgctgttnnnnnnnnnntcgctctcttctctaccacagccgagggagaagtgaggctctctcctgatacgcgacgagacgcccgcgctcctagcctcgctctcaacaaccgcgtttctcgcgccgccgtttgcccgcgcacccgactattgtgcggttaacgcccccacacactctcacggcagaaataagacacacccgcgcgccgtgtgcttnttacgcgctctccccccccatatatataacagcgcgcctacttttgctttcgccgaacaaaaccgcaggggcgcgtgtgtatcgcccccgctccgctccaccatagccaatgttaggcagcgcgggcgggaggtcgcgaatatcctcctcgttgatatatatgtcggccggtacatacaggcgtgttttgagtatgagacacacgacctgtcgtgggcctcgcgnaaatttctcgtgtgcccgcggacataacaaataatatatatttctgtgttcgccccaccccgcgcgcgcgacgcaatcgagggcgtcgggtgttttcgacccaccacaagcatgtgcgctctctcccgcccatct

SEQ ID NO: 10212 - DNA, 254 bp, Homo Sapiens
tgctcatatgatgtacatgtactgattactgcctattttaattaacactcttgaaaaatgcatgttgccctgttgctgcctgccctattctcctcatctccccatcattggtacccacttgcttttaaaatccactttatcttgaataatgtaagacaaatatgttctgacataagtatttaattcatgttgccttgcataatggtcagaggcgcatgaatttgtgaaggtggaaataaactatttgtaaagtg

SEQ ID NO: 10213 - DNA, 380 bp, Homo Sapiens
aaaggcacacgtgcttcccggcgccggcttccggcccggcgaggtttgagcgcgtccgcgggctgggaggccgctggacccgggcgcatggcctcccccgggcagttatctccttgccgcgaccttgaggtcttcggtaagaactggcgttcctctttctaacgccggctttcggccttcgcccttgacgcccaggcccggggaggccgtcactcagaaactgctccatccgagtccgccgcctcggagatgccgagagcctggtcctgccctctgcccccggccccttcctagactcactacttcaggtcactaaaggcgcctcccaccagtttgacttctgttctgcctctgcgccccgctctggcctctcctaagcc

SEQ ID NO: 10214 - DNA, 1753 bp, Homo Sapiens
  misc_feature (27)..(27): n is a, c, g, or t
  misc_feature (198)..(198): n is a, c, g, or t
  misc_feature (480)..(754): n is a, c, g, or t
  misc_feature (893)..(935): n is a, c, g, or t
  misc_feature (943)..(956): n is a, c, g, or t
  misc_feature (1229)..(1238): n is a, c, g, or t
agcggcgatgagggctcttggtattangctagggggtatctcgcttcagtccataggtgaatacggtgtcaatatacggcgcaaggatgggggtgcaatcgaggaggcgggtgggcgggtggtgtaataaaggggggcgcggttgggaggctatactctgcgggtgcatgatgggcttaataaaggggtaaatgatgnatgcgcgcggggatttatgcggcgtggcggggcggcggcttaatcacgaaggcgacgataaggagtggagtttgggttcacggagtgggatataggacgcgcggcgcgggagacgctcagtggtatttcccgcgcggtataacaacgaggggacgcgcgataagaaggaaaggcgcgggcgagcgggcgtaagatcgggcgagaaaagagaaatagggggggaaaggtgatcgcgggtataagaggggcggggtgcatgagagactatatcagctgtagtannnnnnnnnnnnnnnnnnnnnnnnnnnnnnnnnnnnnnnnnnnnnnnnnnnnnnnnnnnnnnnnnnnnnnnnnnnnnnnnnnnnnnnnnnnnnnnnnnnnnnnnnnnnnnnnnnnnnnnnnnnnnnnnnnnnnnnnnnnnnnnnnnnnnnnnnnnnnnnnnnnnnnnnnnnnnnnnnnnnnnnnnnnnnnnnnnnnnnnnnnnnnnnnnnnnnnnnnnnnnnnnnnnnnnnnnnnnnnnnnnnnnnnnnnnnnnnnnnnnnnnnnnnnnnnnnnnaaagacggggagggcaaatgggttgggcggggggatatggttttatagcgctcttatatcgggggggattgcggcgggaagaggtgtccaggagtaaggggagagtgggggtttgtaaaagaagaaatttttttgtgtnnnnnnnnnnnnnnnnnnnnnnnnnnnnnnnnnnnnnnnnnnncgagaggnnnnnnnnnnnnnncggggtgttgtggtgtaactaaagcctttattctatacaactgtgaaatacagatttttacccttttggcattgcagactgtcgaattttctggaaactgtattacggtttgactggaggggaaagaaatacaatcatgctgggggtcacatctatgacaggaggggaatgcagccacccaaggcttagcacacagggcaaaatgacccagcaaaacccatttctttgctcaaaggcccctcggcgaaacacaactgagggctggtaaataannnnnnnnnnctttgccattaattcacaactattgctaaaaaatgtgcaccaaaagcacactgttgtatccaacagatagaaaggacttttaaaaaaaagaagctggttgctctctgaggaagggagaaagaccatttcaacttattagaaatgtggccacgtctttgctcacttcttcaaagtgcaggtggcaatggcctgtccagtttccaaaagaagctgactagcagtgagggaaccctgtctctgcagttgtgcgatcagagtatcttaaatagtaaggtatggccttaggctatcagctgcccccagccgaacctgtgaagatgtagaaaagaaaaaacgttccctgccttccctcccaagtccctgctatggtggaggcaggccacacacaagctagggaggcaactggactggaatcaactgccctctgaaggcacttgtgattctggcttcatacaggaggcttgtcttacagttttatgggggtggaccactgatttactctgaatacaaatgac

SEQ ID NO: 10215 - DNA, 221 bp, Homo Sapiens
aagtgaggtgctatgggaaccaggtgccaggtgaggccaggtgaagacaggtgaggccaggtgaagataggtgaggccaggtgaagacagatgttacgggaaccagcaggtagaaagctaagtgctgtggagaaagagcgggaagaaatggaggaggtgtctgggacaacagaacttgaaaagaacctgcttctcagtagccccaagtcctgtgtgtgcct

SEQ ID NO: 10216 - DNA, 485 bp, Homo Sapiens
ccctaaagatggcggacaaggtggtcccacggcaggtggcccggctgggccgcactgtgcggctgcagtgcccagtggagggggacccgccgccgcctgaccatgtggaccaaggatggccgcaccatccacagcggctggagccgcttccgcgtgctgccgcaggggctgaaggtgaagcaggtggagcgggaggatgccggcgtgtacgtgtgcaaggccaccaacggcttcggcagcctgagcgtcaactacaccctcgtcgtgctggatgacattagcccagggaaggagagcctggggcccgacagctcctctgggggtcaagaggaccccgccagccagcagtgagcacgaccgcgcttcacacagccctccaagatgaggcgccgggtgatcgcacggcccgtgggtagctccgtgcggctcaagtgcgtggccagcgggaaccctcggcccgacatcacgtggatgaaggacgacca

SEQ ID NO: 10217 - DNA, 287 bp, Homo Sapiens
ccgggtgcgctagaggccaagtagaacaccgagggggacccccaaatcacacccgctctggccttcactgacctgccccgcactcccatcccatctctagccttgcctccgcacctggggcaggagcctctccaaagcctccttcagctgccgctggtgcttgcggctgtaaacgtgcccgcgaccacagaagaaggtctggcggcacagagggcagcgctgcgccggcgccatagcccgggtacccggtatcaccaccaccagcggccgatcctacgccatccggc

SEQ ID NO: 10218 - DNA, 199 bp, Homo Sapiens
cagtctgccacccacaccctggtggaccccatcacaggccagcggctgtgggtagacgaggcagtcagggcgggcctggtcagcccagagctccatgagcagctcctggtggccgagcaggccgtgacagggcaccacgaccccttcagtggctcccaaatcccccttttccaggccatgaagaaggggctagtggaca

SEQ ID NO: 10219 - DNA, 453 bp, Homo Sapiens
ctgtgccttgggacggcggatggcttctggggtgtggctgagccataggagccggccatcccatactgggaaggggagccatagctctggtacatgctcatgggatagtagtagctgtaggggtaggcatagttgtactgctggtaccactggtagtactgctgctgctgcaaagctgaggcttctgcctgggacacgtactgtgcactggccacaggcccattgctgctggacttggcagagccgccggcagctcctgacttgctgatgctggccagggcctgacgggccttctcccactccgggttctcgtgcatcggcgtctccatgccattctctcggcctgccccagccaccatgctgtactgagaagaccaatctgtgctacgttgatcacccacgttggccgccatctggaccttggggtataaggggtggacctcgggagccaga

SEQ ID NO: 10220 - DNA, 426 bp, Homo Sapiens
ggccatgtggctcctacattctgttaacagttcctccttgtcatcacccagccctaagcacatacagtacacagtttatggactatctgggatgatgtatttagatcagattgaagagatttcttctgtgttttacctttgtttgtcaagtttgggggtctattcaaagctcccgtatgaaaaattgaaattcaaagtaaatacttaccaatggaccgttagtgccaattgctgtagagtttgaaacactaatataacgactatttggtctatcggagtccacagttccctcccgcttgcctctcctcctgccttccagactgctccagcacaggctttttcagattcctttttatgtcccagcgcctcagcattctccaagtttctagttttgtctttctcttcttttctatgcgccctctaggc

SEQ ID NO: 10221 - DNA, 139 bp, Homo Sapiens
cgagctcggtacccctagaggccagagcagagggaggtgcctgcagagacggtgaggtcagagaatgtgggacctgtattgggggaatggtctggagagagggcggggcctgcatagggggcgtagtcatagaaggtgg

SEQ ID NO: 10222 - DNA, 796 bp, Homo Sapiens
  misc_feature (742)..(742): n is a, c, g, or t
ctcttctcctcaggaactgctcaaacctgtgccccaaatgatgagggcccaggaggacctcgagggccggacacagcatgaaaccaccagggacccctcgaccccgctacccacagagcctaagtttgacatgttgtacaagatcgaggacgtgccaccttggtacctgtgcatcctgctgggcttccagcactacctgacatgcttcagtggtaccatcgccgtgcccttcctgctggctgaggcgctgtgtgtgggccacgaccagcacatggttagtcagctcatcggcaccatcttcacgtgcgtgggcatcaccactctcatccagaccaccgtgggcatccggctgccgctgttccaggccagtgcctttgcatttctggttccagccaaagccatactggctctggagagatggaaatgccccccggaagaggagatctacggtaactggagtctgcccctgaacacctctcatatttggcacccacggatacgggaggtgggtttgcatgtccagggtgcaatcatggtgtccagcgtggtggaggtggtgattggcctgctggggctgcctggggccctgctcaactacattgggcctctcacagtcacccccactgtctccctcattggcctttctgtcttccaagctgctggcgaccgagctggctcccactggggcatctcagcttgctccattctcctgatcatcctcttctcccagtacctgcgcaancgtcacttcctgctgccttgtctaccgctggggccagggcctcactctcctccg

SEQ ID NO: 10223 - DNA, 253 bp, Homo Sapiens
gagggcgcgcttggaggccagtgagcaatgccggggatggggtcggagagcaccccacccaggccctgctggacatcttcaccatccgtgaggagctgggaactgtcaatggcatgacgatcacgatggtgggtgacctgaagcacggacgcacagtacattccctggcctgcctgctcacccagtatcgtgtcagcctgcgctacgtggcacctcccagcctgcgcatgccacccactgtgcgggccttcgt

SEQ ID NO: 10224 - DNA, 464 bp, Homo Sapiens
  misc_feature (158)..(420): n is a, c, g, or t
tcgcaagatgtaaagtgtcatgtggacacagaaaagggacagagacaagacaaactattgcctggcgctgaagagacgagccctcactcaacacagcccagctgcggggacctctctctagccccaccatgacgtagacacaggagcccttcttttgnnnnnnnnnnnnnnnnnnnnnnnnnnnnnnnnnnnnnnnnnnnnnnnnnnnnnnnnnnnnnnnnnnnnnnnnnnnnnnnnnnnnnnnnnnnnnnnnnnnnnnnnnnnnnnnnnnnnnnnnnnnnnnnnnnnnnnnnnnnnnnnnnnnnnnnnnnnnnnnnnnnnnnnnnnnnnnnnnnnnnnnnnnnnnnnnnnnnnnnnnnnnnnnnnnnnnnnnnnnnnnnnnnnnnnnnnnnnnnnnnnnnnnnnnnnnnnnnnnnnnnnaccgcgccaggcctgggagcccttcttggaagaggtccttgttt

SEQ ID NO: 10225 - DNA, 394 bp, Homo Sapiens
tccctcccacaccccgtgtttgtatcatcagctttgccgccttacaaatttaggtgtgtcagagaatgtatgtctctggctctttcatccaaggaaaataagcattgagcccaggctgggagacagggccacagtgcattcccaacattctaatatacatacacaggccaagtagtgaagggtgacaaccttcacacctggggacaagaaggggccagggcatggaacaaagtcagatgtcaggccaggctgaccctcctctgccttgtccttcctttgggctcctttttctggccaagttctgcccactgaagatggtacaagacactagggaaggtggcaggggactgagcttggatcaccaagggtgggaacttatttggttgcagcgatg

SEQ ID NO: 10226 - DNA, 165 bp, Homo Sapiens
agaagttacagcagagctccatcttaaggcacttggctctcagttttctcagagtgaacatgcctcgtagcttgggtcctatggcaggagtgcaataggacatggatatgcatcacctgttctataaaactggttgctggctgggtgcggtggctcaactcgtat

SEQ ID NO: 10227 - DNA, 291 bp, Homo Sapiens
ctatgcagccccccaagcccagcttcaccccgaaaaaccaagagcctctccctggagagcactgaccgcgggagctgggacccgtgagctgcctcagcactgggacctctcgctctccgctccctgccactcgcctcctctcactttcatctcttccctccacctcgcctgctcggcctgaaagccaccaggggctggcagcagtagcaggacagggattcaggagttctgacgacacgactctcagatccacgcccccagcctaacagcaacaacaaagacagactttcc

SEQ ID NO: 10228 - DNA, 283 bp, Homo Sapiens
ctgcaacagtaaaaccgatacggtgagcgtggaacccaagctaagccaatcagattgtccctctagagaatttggaattgggaagtgggaagtggaaagactgggtctgtgatgtgagctggcagaagttagagtttcagaatggccttccagagtgaccacctggggtcacgtgttatttactgccaagcgagagaagagattagggggagggcaggcacacatagaagcatagggcagacacacagtgagcaggagaagcctgggagatgaaggcaaagcg

SEQ ID NO: 10229 - DNA, 322 bp, Homo Sapiens
gctgcaacatttacccaacgatacaatacaatattgctttataaactaggaactacctataacagacgcatccagcaataatgcactgtgcacacacaaatactccaaagagtggattcctcattaatctgataatgctgaatccaactttatttttcattacctttaaccaacgttttaacttcaaacagtccacctggtatttcccaaatacaacatgccagggaatcagtttcatattgtgcccaagtcactcttcaccactgagaatgacatttgtctttattcctcattcccatcagccactttttaaacaacctga

SEQ ID NO: 10230 - DNA, 403 bp, Homo Sapiens
  misc_feature (78)..(88): n is a, c, g, or t
ttcaaatgaaaggccctgttataaatcaaagctgtagctggttcctcctgtgtatttagccgaatacaaaatgactgnnnnnnnnnnngcttaactttgagaccagagtactgttagatacaggtcactcagtccaagttcttccttgggaaaatatgacaatgttcccatgcatacagttaccaagggtacctgttccatgaataacggttttaatgcagtatgctgtcaagagagagaaaatctaggtagtaaagcaatattaatgaatgaagtgtgaagaaaaacggcacttcaaagggcactggagtggaaaccagaactgggtgacctcgcattatcattaactgcctgtgtgtccttggggaagtgacagcctaaaagggttgcagaaatgctagaa

SEQ ID NO: 10231 - DNA, 423 bp, Homo Sapiens
gatttaaagcgggcctcatcacgtcctgtgctgtggcatccaccaatgctggctctgcattggtacaagcagtggtaccatggcttgttgggacatgaggttccagttgccaatttcaagtcactgtcatcctaccagggctcgaatcagacgcctctcaatgcaccctctgtatcagtcctgggtgattgcagctgttcagggcaacaacgaagtgtccatgtgggacatggagactggtgacagaagatttactctctgggccagcagtgcaccaccactttctgaattacagccttctcctcatagcgtccatggtatctactctactcctgcagatggaaatcctatcctactaacagctggctcagatatgaaaataaggttttgggacttggcttacccagaaaggtcctatgtttg

SEQ ID NO: 10232 - DNA, 277 bp, Homo Sapiens
aaaatgtggccataggcacccattcccccaaggctctctggacacatctgttctgcatgtcttcctgtccacaatccctacaaggctcttgcctggctgattctgcaactgtgttcacacagcacagcctccactgattggcctgacagtcttgccagtggccctgctggagtgctttccccacagcctgggaacacttcagctctcctagcacaacaggtgcctgatcccaaggaggtagagcacaaagccacaggcatggttccaatgcaaaaag

SEQ ID NO: 10233 - DNA, 578 bp, Homo Sapiens
  misc_feature (22)..(22): n is a, c, g, or t
ctcgtgcaattcggcagctagnggactaaatacacttggcagctgaagatgaattggaatggtcacgttttttaggctggacagcgtcccgccacagctactacctgacactgagctcatgcagagagatgatggctgatgttccttctcccttgggacatgggtctggcacctgtgggctgtcgatagtgccctctgagcagagggtcacggtcatgtcagtttgggggaattctctgttgtgcctcacagactcccccctttctttcctccctccccttctcattttgatgtctaaagcatcaagtccctcttcctcggagtttctctagctgcagtggaagattctgttttcctgtggggaaaatgctcacttgagattttgcagggacccgggtctgtctggtttctgatgacatagtaagagaaaggtcttttttcaggttggctggtgaaaggaattgcatgtgactcacacaaacaggagctagcccaatcatacactgactcgcgtgggtgttaaaatgtttatcatgcctaagggagacatttatgattaaaccatttatgctacataa

SEQ ID NO: 10234 - DNA, 380 bp, Homo Sapiens
  misc_feature (297)..(307): n is a, c, g, or t
ccttttcactgttatggccttttcacatttctaaatcccatcttgatatactatgaatactctagaatgatgtaaagcagataggaatgtatgtgtacatatttattgcatacttgcacatcaaatcgatgtacatagtttaacacgtggtccttttgtgaaacctagaactcagaggattgctttttttctttcagcctattttgagtaacttcagtgctttcttagggaaatgacagggcaaagcaatttttctgttggctttgggctgtatttgtgcactaaatctttattctnnnnnnnnnnntggaaactttaatttttttaaaacgagaatttcatttacagctacattaaaatcttaatgagaaaaataattt

SEQ ID NO: 10235 - DNA, 594 bp, Homo Sapiens
ctgatactgcagaccagccttggctagatcctaggcgtcagagtgaaatcatgaatttccttttgtagattagaattgatggtccaactctcaacccaccaaagagaaacttaccttttccaatttaattgtaaaagccagatatatcactgaatgaaggtatctaaggaagtgatatttatcaacttcccaaatgatacagagaaggaaagcataattattaaaatgaacctaaagtctagatacagtgggccaggctggtgaagccttagactactatggaaatgacattgtttataagatgttgcacaaattatggtaatctgtgtcaatatttcaatgtgtgctggattattactgacatattcataattttaatgtccacaaatctttttatcttaatagccagggtatggcagggtcaaagcaccacctgggatgataaatgggacaagtatagtccatggacctcaaagcctttgtacagaaaactagtttccttcagatcctccccctctttttgtttaaataaaaagcagaataaaagcagctagggctgaaggaattctaaacctcaggtagcttcaaaattaa

SEQ ID NO: 10236 - DNA, 672 bp, Homo Sapiens
gaacctggcttcgcccttattgtctgtcagcgttgatggcactcagaggactgtccagtgtcttctcgagaagcaggtggaaacatgaagcattcagtttcttggtacagggacaaggtgaatatcttaaccagacttgccgcagaattgaacaaatttatgctggaaaaagtgactgaggacacaagcagtgttctgcgttccccgatgcccggagtggtggtggccgtctctgtcaagcctggagacgcggtagcagaaggtcaagaaatttgtgtgattgaagccatgaaaatgcagaatagtatgacagctgggaaaactggcacggtgaaatctgtgcactgtcaagctggagacacagttggagaaggggatctgctcgtggagctggaatgaaggatttataacctttcagtcatcacccaatttaattagccatttgcatgatgctttcacacacaattgattcaagcattatacaggaacacccctgtgcagctacgtttacgtcgtcatttattccacagagtcaagaccaatattctgccaaaaaatcaccaatggaaattttcattgatataaatacttgtacatatgatttgtacttctgctgtgagattccctagtgtcaaaattaaatcaataaaactgagcatttgtctaaaaaaa

SEQ ID NO: 10237 - DNA, 368 bp, Homo Sapiens
  misc_feature (308)..(308): n is a, c, g, or t
  misc_feature (316)..(316): n is a, c, g, or t
  misc_feature (322)..(322): n is a, c, g, or t
  misc_feature (353)..(353): n is a, c, g, or t
cgagccactgtgcccagcctacaatcatgatttctaattccaaaaatcagactttctaattctcaggtagatggccaaagctgattttcaagttttgtgtctttttaaacagaagaaaatgaaccttattaaagctgaatgactcattcaaggccatatagctggtaggtggcagaagtggggtttgaacccgtttttcttctataccacacaccaattactgtatagaaaaatagctgaattgctcctatttagccaaatttcatttttaaaaccccacatgtggtttattattccggttatgggcnatggtccnatgttngcatatttaattaaaaaaggaaatccctggngtttaggaaacaggg

SEQ ID NO: 10238 - DNA, 397 bp, Homo Sapiens
aaccctgccccgaatcttccgtccctcatcctaactttcagttcacagagaaaagtgacatacccaaagctctctgtcaattacaaggcttctcctggcgtgggagacgtctacagggaagacaccagcgtttgggcttctaaccaccctgtctccagctgctctgcacacatggacagggacctgggaaaggtgggagagatgctgagcccagcgaatcctctccattgaaggattcaggaagaagaaaactcaactcagtgccattttacgaatatatgcgtttatatttatacttccttgtctattatatctatacattatatattatttgtattttgacattgtaccttgtataaacaaaataaaacatctattttcaatatttttaaaatgc

SEQ ID NO: 10239 - DNA, 446 bp, Homo Sapiens
attagaggatcccccgctggtatcccacccccattcttgacaactctgagccctggtgcatgtccctcagttggtcccgttccatggtgagggcggccaggacgctgctgagggagctgtgcactacagggagtggggcagaccatcagagtcctcgctcgctcatgtacgctccccaccagcccctcccagcaggcacttacccttctgcgccaggacccagaagctgcgctgcaggtgggcatagtctgtgggtggcagcccacgggtgcccgaggagtcccgagactccaggtaagcgagacaggttcgggaacagagccatggagacgaccaacctgtaggtgaaggggaagggctgaagggggcggcctccttagagcatcctgccccagatacgtgaggtgaatgccagacctacacccgtcccaatggtgtccatcctt

SEQ ID NO: 10240 - DNA, 387 bp, Homo Sapiens
catgcaatataggcgggactacagagttaatctcctttttacaaatgaggccaagagaagcctcattggttcacagtcatgcagctcatactgtccacccttgtattctcagatgcaggacaattgcattttagttttattttgtggaggtgcagaatatttactctttctgtccaacccttgattctgccgaggaagacactgatggtttgatgagtgattcagctgtttttggctaagggcttttggagctgatggcaggggtttgatgaatccaaatgagctctagacattatcacagactgaatagatcttaactgtctcctacatgtgtgttttcaaatgtgtatacatgctattgttattaataaagttacaaattaattt

SEQ ID NO: 10241 - DNA, 334 bp, Homo Sapiens
aggcgcagagccagctggtggccggcatcaagtacttcctgacgatggagatggggagcacagactgccgcaagaccagggtcactggagaccacgtcgacctcaccacttgccccctggcagcaggggcgcagcaggagaagctgcgctgtgactttgaggtccttgtggttccctggcagaactcctctcagctcctaaagcacaactgtgtgcagatgtgataagtccccgagggcgaaggccattgggtttggggccatggtggagggcacttcaggtccgtgggccgtatctgtcacaataaatggccagtgctgcttcttgaaaaaaa

SEQ ID NO: 10242 - DNA, 370 bp, Homo Sapiens
atcgctgcaacgtctctaggtgcatcctctgcatgccctgggacatggcgctctcgacagtctgtgatgtgccagcccccacctggaaggtgggacgccagccctgggagctcatttcacgggggctgaggaccctgtgcccagggtgtgtacccgccctggctgaagctagaggcccgctcccccagacaggctgagcgtgtgaacagcaacggttgaccttgggaagcagagtttgggaaacagctggtttcaaaaccaatgccaagtaaaaaggggcaaaggtcagcccctttcacgatgggcttccaaacccacagaatctgactggagggccactgatgttccctcagtgggccctgccccgtag

SEQ ID NO: 10243 - DNA, 1212 bp, Homo Sapiens
gtcctgtcccgcagcgtcccgccagccagctccttgcacccttcgcggccgaggcgctccctggtgctccccgcgcagcatggctcagcacttctccctggccgcctgcgacgtggtcggattcgacctggaccacactctgtgtcgctacaacctgcccgagagcgccccgctcatttataatagctttgcccagttcctagttaaggagaaagggtacgataaggaattgctcaatgtgaccccagaggattgggatttctgttgcaaaggtttggcattggatctagaagatgggaacttccttaaacttgcaaataatggcactgttctcagggcaagccatggcaccaagatgatgactccagaggtgctggcagaggcatatggcaagaaagagtggaagcacttcttgtcggacactggaatggcttgccgctcaggaaagtattacttttacgacaactactttgacctgccaggagctcttctgtgtgccagggtggtggactatttaacaaaactgaacaatggtcaaaaaacatttgatttttggaaggatatagttgctgctatacaacacaattataaaatgtcagcttttaaggaaaactgtggaatatattttccagaaataaaaagagatccaggcagatatttacatagttgtcctgaatctgtgaaaaaatggcttcgacagctaaagaatgctgggaaaattcttctgttaattaccagttctcacagtgattactgtagacttctctgcgaatatattcttgggaatgattttacagacctttttgacattgtgattacaaatgcattgaagcctggtttcttctcccacttaccaagtcagagacctttccggacactcgagaatgatgaggagcaggaggcactgccatctctggataaacctggctgggtactcccaagggaacgctgtccatctctatgaacttctgaagaaaatgactggcagagctgaacccaaggtgtcattagggtgacagcatgcattcagatatttcccagctcgtcactatagtaatggggaagacagtcctcatcttggaagaactcagaggggatgagggcaccgacgagtccgagggcctggaggagtcagagggctcttagagaagcaacgggcaactttgagggcacaaaagcaagactttaaatacttccatcctaaaaacgggg

SEQ ID NO: 10244 - DNA, 359 bp, Homo Sapiens
actcctgggcttaagcgatcccccagccttggcccctaaagttctgggattacaggcgtgacatctgcagcccggccacatatgaatctttgaacacgtcttcccttctcccggctcggctgtttgccacacgtttgtggagtggctacacgacttcacagtgatggatgagatccagctgttccacatcctcatgccacactcagggcttctgaatttcagccatgccagtgggaccacagtgtcggctccccgtggctttaatctgccttctcctatgaccggagatgctgggcgactttccatgtgctcaactggtcattccatccaccttggtgaaacgtctgtccggatgctct

SEQ ID NO: 10245 - DNA, 1078 bp, Homo Sapiens
cgtgaacggtgaagtatcacgggggccaacgagacacgcacacgctgagttgggggaaagggcgagaacgtacaggagggccagggccatggggcggtcagggggagcctggccccctgggggacatctgtcaataaagtaaataaatagctacaataataaataagggtgacgggctaagtcaggagcaggggtcttgtgcccgtggctggtaggggccgggtcaggcccgggtagattgggggaagctggggaagacagggaagaggggaaagggagtgggatggctctcagcaggcgcagtcctggtgcggtggcacctgctggtcactgagctgtgggccctgcttggcgcctgtgaccgcagggtccgccgtgtccaacgactcggacatcttctcgcagatgacatccaccaggcgctcaaaggtctgcttgacgttaatgttgtccttggcgcttgcctcaaagaactcgaacccaaggtggtcagctagctgccggccacgttctgatgacaccacccgctcatcctccatgtcacacttgtttcctaccagcagcacctgggcattgtcccatgagtaggtcttgatctgggtggaccacccctgcactgcattgaaggattcctcgttggtgatgtcatacatgaggatgaagcccatagcgccccggtagtatgcggtggtgatggtccggtaccgctcttgccctgctgtgtcccagatctgcagcttgatcctcttgtcgttgcgatagatggtcttgaccttgaagtcgatgcccacggtgctgacgaaggcaggcgtgaacgagtcgtcagcatagcggaagaggaaggacgtcttgcccacgctgctgttgccgatgatgagaatcttgaacatgtagtcgaagttctgatccgaggactctttctgcccatagcgcgagtctgtggcggatgccatcttgccctgcaccgatgcaacggcgaccctagcggcggtgacttttttggcggtggcggtgacaggcccccggtgcgttgatgtggggctgcgcggcggcgcggcagcagcggctcaggccctgc

SEQ ID NO: 10246 - DNA, 545 bp, Homo Sapiens
  misc_feature (516)..(516): n is a, c, g, or t
actagtgtaggcatcactgatactaattcagagaaccagaaaatgtgtgtctctgtgctcattcatatgcttgcttctcagatggcctggcacgcctaccttctgatcagatactttagttttgggattttccttgaataaaaaaaggaaaatatcaagaaaagattgtaaaaattactttactatagttgattttttaccaaattgtttaggataaagaaataagcaataaatttgtaccctttgattcttagccagattaggatcttgatgagaacaagaggcattgattgttcttgaaagcatcattccaggtttgttgaaagtgggatactgaggtgagaaggggccagttagcacgcaccagagacaaagcttgggccttcaggggagtatgggttcttggctctgttagtatgtagaaggatttgtagcattttaaattgatgaacttgatctgggtcttcaaaaatatttttagggtagtactatcataagtttcaaatagactctcanacgtatttttttcatctagggtattttgc

SEQ ID NO: 10247 - DNA, 618 bp, Homo Sapiens
tactatagtgggctcggactactctgaagtattaatgctgggatagtcactgggtaacaaagctccgataaatctatcccctctgctccaacaattttgcccctcacttcccacaaattcctttaacaaataggcgtacccaggttaccccattaaccaggggtgggagccagtctgaaggaggggagatctgaggcagggtaaatggaagtcacattgttttctgcacatcttccaaagagtggattccgggaggtcagaaagcaaagagaggtcatgacaaaaccatccctggcttcctttgcttccctcttccttcctaaatagagtttaatgcgtactcagtgcataaagtaaggtatgactgagttggctgtgataccttaagaactcaagatgtggcgttagatgagccaagatgaacataatttaatcttttgggggaaaacggctggcaggatatgaccatgctgaagggtttgcctttattagtgggacagagaggctgaaccagcagcagcagtagttgtgatctcattcacaccctgttcagggttccgtgagggtttggaaaaatagttcactagaaatggcctaacagtttctcttctcaaatta

SEQ ID NO: 10248 - DNA, 753 bp, Homo Sapiens
  misc_feature (71)..(122): n is a, c, g, or t
gagtgttgaacatctagactcaggtgtgggtgtgacagtgtcatgggagatcctaataggaagtacaatgnnnnnnnnnnnnnnnnnnnnnnnnnnnnnnnnnnnnnnnnnnnnnnnnnnnncttaaggagcagggctaacccacagaaagtgtgcccagagtcggccagcacaatgattttattcagatttatggaaatttttctctaaaaatgaatgggaatatatgatgggatagaatacaacattcgcatggctttttaagatactatgttagattttaaaaagaaatttcagacttgttcagggcagctttgaagtatgtgttcatgctgtggaaaattgagaaacgcagcatattgcactagtcttccttcttaatcctcgctttcactcctacctcacaatccatctaaaaaagtgattctgataaattgccttttggttttcttaaaatgtagtgtattttgttctggacccacagacatcttctgtggtcatcttctaaatgtgtactaagtagcgtttctaagatcttcattctgttgatgccatgtcagtcttcctgctcaacttaataccctgtggaaaagataagaatgtctgctgtgtgatatttaccatctgaaggacaggcagagagatttctcacacatctcactcatacatgaccccagccacacaacaagggtctcacttgagccttgtccgtcccagcaccttgcggaatgggccacagcctacactagcgca

SEQ ID NO: 10249 - DNA, 279 bp, Homo Sapiens
ctcggggctggtgagccgacagccggactcctcggagcagccgccgccgctcaacgggcagctgtgcgccaagcaggcgctcgccagcctcggcgcctggactcgagccattgtcgccttctagggacccccgagggcacagggacccggggccccgcggggctggggacagacaaaagactcggcaaaggggcgagaggagggaacgagcgggcgccgggccactcggggctgagctgggggcgagcgggggcaggcggctgatgttttataaattgt

SEQ ID NO: 10250 - DNA, 691 bp, Homo Sapiens
  misc_feature (46)..(60): n is a, c, g, or t
  misc_feature (669)..(669): n is a, c, g, or t
aaactcatatctgtttattctccccaaatcaggggacacaaaggcnnnnnnnnnnnnnnnctgatgagtgggtaatcctaaaataagcaggaaatgcctgtggcccagcctaactcaaggtgagacgaagctggagctgggagctcgaaagtgtcccccagctccctcctcactttgcctgtaacgccacctctgcagaaggtaaagtagaattggtagctgtgtcactggtttgggttgagtcctcggtcagggccctctccagactggcgggaagggcgtggatcagcctctcccggaagtcctggcccatgaagacatagagcatggggttgaggcagctgttgaagaaggccagggcacttgtcacatccactgcaataccaatttctttgtacatgccttgcaataactcacggattctgactgtggctataagggccaccacctgatatggggaccagcagagaaaaaaggctgctgcgacaaaggagaggacccgtaagggacgactggacttaatcaagccttgcttgtggatcttggtggcaataagcccataactgacagcaacgatggacatgggtgcgctgaagccaatgatgaaccggatgatgcctctcaccgtcaacatggcaacggcccaccttatcctctctttagggtcgntggtccagggcgaaaagttaaa

SEQ ID NO: 10251 - DNA, 491 bp, Homo Sapiens
ggatctctgctgtgcccttctcgggcttccagaccaggtgtagcaaacgaaaaagtgcagttaattcaagaacaggaatccctgtgtccttgctgggatttccttttgggaacctgactttccgactccagatcctgctgtctggatcagtgttctggctggaggtgctggattctctgactttgcctcctcactctgtgtctggctttgctcctgggtcttggccctgggccatatgaggggccaggaaatgaacgacaaggaggataagagtgttctttcttgaaagccgggacttcccctcaagaacctgggcctggggccgggactctgcatgactgggagcaagtcacttaaacctcctgtgcctcgatttcccccttctacaaagtggggccaatgattcttgtgtgtcagcactgttactaccgagtgctgagtaagggcaaaataatacccctttctctatgtatctctgtatgcacacgcac

SEQ ID NO: 10252 - DNA, 795 bp, Homo Sapiens
agactaccttagtcccaccaactgtggaaagtagtcctgagcggcctatgaacaacagacctgaggcccatacagtggaggcaccttctcctgagactatctgtgagatgatcacagatgtagttcatgaggttgagtctccttctcagatggatgttgaattggtgagtgggtctcatgtggcactctcaccccagcctcgatgtgtgaggtctggttgtgagaaccctcccattgtgagtaaggactgggacaatgaatactgcagcaatgagtgtgtggtgaagcactgcagggatgtattcttggcctgggtagcctctagaaattcaaacacagtggtgtttgtgaaatagtccttcctgttctccaagccagtgaagagttatctgctgggaaagtgtccaagagcctgtttttgaaacacaagctgggcttctggtagtgcctcatcacaacccatgatggctgttcatgtttcaccccttttcttccttcagcagaggccaggctatggagcagggccactgaatttgctgtaatctggagatgctttttactttcaaccataagcggtaatagcagaggaaagggtgaagggagtctgggcaagcaaagcatagagatggtggggtggtggtggggttgaagaaacttgttggtataattgtcataggacttgcctaaaatattattaaaattacgggagtgtactcagctttgagcctaggagaaaatgccactgtgtgcatccattttaaagggttccctcataaaaaaatgttattccccatt

SEQ ID NO: 10253 - DNA, 632 bp, Homo Sapiens
ctatacaacaaagaaaaatggtcatgtacctcaacatgctaaggacttgtgagggctacaatgaaatcatctttccccactgtgcctgtgatccaggaggaaggggcacgttatcacagccatcagcatcacgcactttaaactgcatgcctgcactgaagaaggacagctggagaaccaggtaattgcatttgaatgggatgagatgcagcgatgggacacagatgaagaagggatggccttctgtttcgaatatgcacgaggagagaagaagccccgatgggttaaaatcttcacgccatatttcaattacatgcatgagtgcttcgagagggtgttctgcgagctcaagtggagaaaagagaacattttccagatggcgaggtcacagcagagagatgtggccacctagcctttccttatccccttcccttcccttcacccccatcctcttactcctttcatgtcccatttcagacagagtaaccattaacaaaaaagaagagaaaaagttaaagtcgttatattcaaaagccctaaactaaatattattaataaccccctctgaatttcatgtctctggaatgaggtggtagtgaacagcagatcgtcagcaccagaaattagggtac

SEQ ID NO: 10254 - DNA, 454 bp, Homo Sapiens
ccagaaatggcccagacgttccctcatgcttgacttttggtgcctagggtcctgttctcctggttagagggaacttggtgtgctcacactgagggaaagtgaaggacgcggggcatcttcctgccctggccttcctgccttggtgcctgcgctccccaccatcctgcaaagaggaaccctgggaagtgagtggaggtggcaggggtttggttcctgcctgctgccaggcggccttgcccagggggtgggtcccagacctgagagcaaagcgctgttctctgaagtgctttgtagctgactgcatcttgtgccttactcttttggttgattttcaaattttgtaaaagcaaatttgcatctattttctcttttacttggttatagttttaaatgtctctatgaaagggttttgaccttggatgatgtagtatatgcaataagatgctgtgatttt

SEQ ID NO: 10255 - DNA, 623 bp, Homo Sapiens
  misc_feature (115)..(115): n is a, c, g, or t
gtgtttaccagcccactgagatggcccgtatgcacaaagttccgtcgaaggagcttacgacatcatcctcccacgggccaccgccaacagccaggtgatggcagtgccaactcgntactgcgggctgaagacatgtactgggcccagagccaccaggcggccacaccgccgaaagacggcaagaactctcaggtctttagaaacccctacgtgtgggactgagtcagcggtggcgaggagagccggtcggatttggggagggccctgaggacctggccccgggcaagggactctccaggctcctcctccccctggcaggcccagcaacatgtgccccagatgtggaagggcctccctctctgccagtgtttgggtgggtgtcatgggtgtccccacccactcctcagtgtttgtggagtcgaggagccaaccccagcctcctgccaggatcacctcggcggtcacactccagccaaatagtgttctcggggtggtggctgggcagcgcctatgtttctctggagattcctgcaacctcaagagacttcccaggcgctcaggcctggatcttgctcctctgtgaggaacaagggtgcctaataaatacatttctgctttattaa

SEQ ID NO: 10256 - DNA, 447 bp, Homo Sapiens
actagtgtaggcatgggcagcagtgagagcatgcagcagaggtgaggactgggctgagagggcagcatcagcaacattgcctgcgcaagccagggctcgcaacaacactgagcccacaggggattcaatggggcggcgtaagggctccagagaggagaggatagagtccaactgaaggagaccctcttgaaggactatgggttcatgtgacagagtctgaaacaggaagaataattaaagtgttaatatacaatgaacttcaaattcatcatgtcttttaatagtcacaatgcaagtgacaattaaatggaagcctctcagattttggatatggccatgggctctcacctagtaaatggtgaaacccaaatatgaaggcaggtacaacataccttaacatctctatctagagcaacacactactttcaaacttggggagccaataac

SEQ ID NO: 10257 - DNA, 502 bp, Homo Sapiens
  misc_feature (401)..(461): n is a, c, g, or t
gagacagagtctcgctctattgcccagcagttaaacactttccaaaagtgtctgggcagaggaagtgtaggcatagtgagagagaaaggaagaagacaaagtagccagaatctttgggtctttatggcactgacagttcttattccctttgtcaacacacactgagcaccctataaggcacaaagctctgtaacagacccaagcttaaggaaacagagcaatttactcatgccagatcaaaaggaaataaaactaaacaacatcatcagcatttacctccgaccccctttttgttgcacataagaggataagatataagctccacagaaaagcacaatatgtcctaaatgacacttagaaaattcaacaaagttttataaaattagagtctaggctgtgcnnnnnnnnnnnnnnnnnnnnnnnnnnnnnnnnnnnnnnnnnnnnnnnnnnnnnnnnnnnnncctcggctttccagttcagtttttaaaacctctatttcaat

SEQ ID NO: 10258 - DNA, 544 bp, Homo Sapiens
  misc_feature (432)..(432): n is a, c, g, or t
  misc_feature (489)..(490): n is a, c, g, or t
  misc_feature (527)..(527): n is a, c, g, or t
tccactagtgtaggcacagagacagaatttcccagcttgaagggatttgaaacatccataaagttacagaaattcatagtctggaggagtcttaacggtcattcagaccaacgctttctcgggtatctataacatccaatgccctagtttccctgctgtctttttttggccactccttttcaatctcctttgcaggctaccctttacagggctcagtctccacactcttttgttctagattttcccctggtgacctcaccgaggcctacagctttaaataccatccatatgctgataattcccaaatttatatttccagtcccaagctctccactgagtttcaggctcatatatccaaatgtctacttcttgccttcagtataccttacaaacctctcaagtttgacgtgcctagaactggactctggattntaccttttgcccgtatcaacaagttcctctcttagtcttccaatcacagaaagggcnntcaccatcagatggacatgagcctaaaacccaagaantcttgtttcctgcctac

SEQ ID NO: 10259 - DNA, 751 bp, Homo Sapiens
gcgggctgttcagaggatcccctctggatgcaaagtgtcagtcttaagtttcagcaacaccagcaaacagtggaaattgataacctgtggatttccagcaaactccgttagccatgatcttccacactatgtggcattgtgctttggagaagtgcgtatcagaacggacctacagaaagtttctgacctgtctgccccattctcccagagcgctggggtggatcaaaaggaactgtccttcagcccatccttattgaagatcttctgccaactattctccattcatgtagatgctataaacatcatggttctcaaggtggatacctctgagtccttatggcatattcagatcagtagaagcagatttcttttggatagtgatgggaaaaggctaatctgtgaggtgagcttatgtaagatcaacagcaaagttctaaagagtggtcagctggaggacacctgcctagtggagctttcactggccctggaactgtgtctaaaggtgggcattagcagtcggcatctcactgctatcactgtggatgtgtggacactccatgctgaactgcatgagggcctcttccagagccaactgctgtgccagggcccaagcctagcatctaagcctgttccctgttcagaggtgacagaaaacttagttgagccaactctgcctggtctattccttctccagcagctgccagaccaggtcaaggttagatggggaaacaaggggggtatgtcatgaata

SEQ ID NO: 10260 - DNA, 337 bp, Homo Sapiens
  misc_feature (319)..(319): n is a, c, g, or t
agttcaggtcacacagtgacttgatgacccgtagtcaaaggtttggtttccaccaaagcccagtaacaggccaagagctgtctctcaaaaggagagtagttacctgcagaagatggcagagccttgctccaaaatcctagcagcctctgccatgattcagctatgagggcctcccagaggctccaaacaccatctctatctgccactgatacctcaagcacaattggatctgctgggtcatatggtccaagtggcagagcagcttgcacagcagcctggacctgttgcagaaccttctcctgttctggatcccactcanaactggcagccttttgag

SEQ ID NO: 10261 - DNA, 466 bp, Homo Sapiens
ccgctcttctcttggtccacagaaacatagttaagatgccttaaagataggggataataaaaggaaaataaaaacagaataccaagaagctctgtaatatagctctaagatatagtttactcatctttcacttgagttccacctcaaggagtcctcattcctggcatcctgtctgctctaagcagagcaaaagctacttaatcccaccactacctggcattgccttcccgggtaatttgatttctagcggaggtggagggacagaaggctagtcatcttggctcgtcaaacctagttacaccttgaagtctgagtttcccgtgtctatgaaaggccaatcaagaatagactccacttcataatgttccgggaaaaataagaaaactgcatacgtgatgtgacctgacacattgcaatagcttaaaaatgtatcaagtgtttaaagagaacacgggccgagccgatt

SEQ ID NO: 10262 - DNA, 617 bp, Homo Sapiens
  misc_feature (246)..(256): n is a, c, g, or t
cctgcttcgctcgggtacccatggttccaagcactctctcttaacaatcattcctactgtgaattttctacccggaaaagccaggggtgggcaataacaattaagatcatttggtttctaaaagttcttcctctctgggaaagcagaactatacagtgggtggcatcctgcagattctagtctacatttgggaaaggtgtacgcctcttgcactttcagaggaacaagtcaaaaagtaattgcttnnnnnnnnnnngtgctagcaattcacagcctattcctgcccgctgaacagaaattgtgatgccttgatttaccccctagcagctacatattcttgagcaagtcataaccctattgtgcctcagtttctggatctgcaaggagtgttgcctgcataaatgtttgtttaggaacttagtaaaatgacatactcctctctctgctctaagaaggccatgagccagctgcagctcatctcactcagcctgggcctgaccagagtcctttcctcttccaagagaaagcaaggaaaagcagcaagcaagcagacataccaggtcaacaggagtgatctatcattggcaacgaggcctcaaacaaactgcaaatgctct

SEQ ID NO: 10263 - DNA, 389 bp, Homo Sapiens
agcgctcgggttaacccatccatagatcccgaaatataaatttacccagacctcaacctgcttaagcctgtaaatagctcactagggcttttagaatgaagttgaagttccttggactcacccttaagacctttttagaaaggagtcatgagaggaagtaaagaaatggaaatggagttgcctcgctgggctcccaggccctttgccgtggccctgcctgctctccagcctggtctctaccccacctgtggcaccttcgctgtggaggataccgtcagccaggctcacagttcctggcaggccacttcctctgtctggggccctgcctgggggtttggatcacctgagtcctgccccttggcaagcctcttttaacccgagcgctacca

SEQ ID NO: 10264 - DNA, 244 bp, Homo Sapiens
tgcctcatgacatcagcagtcgtctcctgggtctgaataaatggtaggataatgcctcaagagtctcggggcagaaactttatgcaaaattacctctacaaaataggcctctcataacagtacacctgtggtatgtagaaaagtgctactctcagagcaatgagaaagtaactcctatgcccagctcttctgggtttggaccccaacctgatgctcagttaaaacatgggtttaacccgagcgc

SEQ ID NO: 10265 - DNA, 192 bp, Homo Sapiens
cctgcctttggactagaagtgcctaccattgctcccagcattgccagttacatttctagtccttattttcctccagattatcagaaagcatgttttggggcctgtgactacatgtatttgctggcaaatccagtcaaacaaggactgttacttagtttcaaccggaaatttttagtccaaaggcaggacaag

SEQ ID NO: 10266 - DNA, 592 bp, Homo Sapiens
tcatggggacccccgggcagccgggctcaccaggaccagtgggtgctcctggattaccgggtgaaaaaggggaccatggctttccgggctcctcaggacccaggggagaccctggcttgaaaggtgataagggggatgtcggtctccctggcaagcctggctccatggataaggtggacatgggcagcatgaagggccagaaaggagaccaaggagagaaaggacaaattggaccaattggtgagaagggatcccgagggagaccctgggaccccaggagtgcctggaaaggacgggcaggcaggacagcctgggcagccaggacctaaaggtgatccaggtataagtggaaccccaggtgctccaggacttccgggaccaaaaggatctgttggtggaatgggcttgccaggaacacctggagagaaaggtgtgcctggcatccctggcccacaaggttcacctggcttacctggagacaaaggtgcaaaaggagagaaagggcaggcaggcccacctggcataggcatcccagggctgcgaggtgaaaagggagatcaagggatagcgggtttcccaggaagccctggag

SEQ ID NO: 10267 - DNA, 115 bp, Homo Sapiens
attaaaacaaagggcctctcttccaaagtaaaaaatcacaaacgcttacgttttactattcaattcaatcccccctcccattgcacttatctaccttccccaagttgtttgtttt

SEQ ID NO: 10268 - DNA, 453 bp, Homo Sapiens
tccaagtgcaaaattacagtgtgttagagtgtggggggaaaattagtcttatttttccctacatgggatacaacactgtgaattcaatcttcaactgaaggccctgcagttctcctaaaacatagttgtttgtttttctttaacaaagtttaagctagtgttaataaattaaaaaaaattgcttgtctgtctactcaagctttgttttatgcccatttcatattgttgtctgtgttgtaattcataacttttgataccatttctgatgtgtaaaattggttgtcttgtaaatatcttataaagagttcaattgtaaataaactattgtggctgttaatttttgaacttctgcttcaatttattatatttattggcaaacaaacaattctgcttgtatatttgaaacattggaaaaagaaatccattttctcaataaaaaagaataacacatta

SEQ ID NO: 10269 - DNA, 1240 bp, Homo Sapiens
aaatactgacagtcagagtcattcttgccccatgggaagaaaggacttattgcagtggttatcatcggagtgatcattgctctcttgatcattgcggccaaatgttattttctgaggaaagccaaggccaagcagatgccagtggaaatgtccaggccagcagtaccacttctgaactccaacaacgagaaaatgtcagatcccaatatggaagctaacagtcattacggtcacaatgacgatgtcggaaaccatgcaatgaaaccaataaatgataataaagagcctctgaactcagacgtgcagtacacggaagttcaagtgtcctcagctgagtctcacaaagatctaggaaagaaggacacagagacagtgtacagtgaagtccggaaagctgtccctgatgccgtggaaagcagatactctagaacggaaggctcccttgatggaacttagacagcaaggccagatgcacattcctggaaggacatccatgttccgagaagaacagataatccctgtatttcaagacctctgtgcacttatttatgaacctgccctgctcccacagaacacagcaattcctcaggctaagctgccggttcttaaatccatcctgctaagttaatgttgggtagaaagagatacagaggggctgttgaatttcccaacataccctccttccaccaagttggaacatccttggaaattggaagagcacaagaggagatccagggcaaggccattgggatattctgaaacttgaatattttgttgtgtgcagagataaagaccttttccatgcaccctcatacacagaaaccaatttcttttttatactcaatcatttctagcgcatggcctggttagaggctggttttttctcttttcctttggtccttcaaaggcttgtagttttgggtagtccttgttctttggaaatacacagtgctgaccagacagcctccccctgtcccctctatgacctcgccctccacaaatgggaaaaccagactacttgggagcaccgcctgtgaaataccaacctgaagacacggttcattcaggcaacgcacaaaacagaaaatgaaggtggaacaagcacagatgttcttcaactgtttttgtctacactctttctcttttcctctaccatgctgaaggctgaaagacaggaagatggtgccatcagcaaatattattcttaattgaaaacttgaaatgtgtatggtcgggtttg

SEQ ID NO: 10270 - DNA, 423 bp, Homo Sapiens
  misc_feature (82)..(82): n is a, c, g, or t
tagctagcccatgtttagatccaggtctccaattcatggttatcagggcatgtgttcaacaacccccaaaggtccacgcagngtggcttgtagaaaccttggggcagcctcatgtctgctaaaacagccatcttcaagacagcccctgaaaagagaccagttcaggtcctgccctgctgttctttgctggagatgaggaacaggtgctggggctaaagtttggggtagagcacaagggacaagaggaactcttggagttggctgggtgagagggctctccatttgctacctgtagtagcctgcctcttaactggttgcttctccctagttccagccctgccctggtctgatgccccaacactgcccttgctttgttttccctgtcacctccctattattaaatgttttctacagaagaaaaaa

SEQ ID NO: 10271 - DNA, 546 bp, Homo Sapiens
gtagtttcattctcctcacatccaaacagctacagcttccctccttttgtggggtccccaaaccaagtctcttttcaggagagcagacatgtgcctccacacagttctgaagttctgggggctccacattgtcagctgggttggggtctcccatgtgagggaggctgatggcactcgcaggtttttgcctcatctatgtacaaaggctcagaaaatttcttcggcatttgggaccctcgtgttctgtagctccaccagtcgctgcacagcctcaggcaagtcccactccccaaggcgacgattatctcgagtccgaatgttcactgttctcttactttgctctttctggccaaccacaaactgaaaattgtagtgggcaagctgggcccggcggattctccggctgagggtcagtccagagtctgcatccaggtcactgaccagtcctgcaaccagcaggctctgctgtgcctctatggcgtattccacttgctcactcaccaacaggatgaccaccacctggtactgggacagccacaatggccc

SEQ ID NO: 10272 - DNA, 509 bp, Homo Sapiens
atgaactctggaatcttctctctcaagtcctaaaatgaacaaacagatatgattgtgtttgagggaaatatgtccctagcaggaaaagaattcaaagaggttcaaagaatatgtcacttactcctacttgctataggaataaccttgctgataagaaaaaaagggacaatattggagaaactacctcttgtttaattgatctgtccaactctgagatcacttggtaactggtttcatgtgtatccaaaaatcagcatttggatttaagctttctgaatttggtagtttaagaaacagatttagtttttcagtggttttaactcatgtgaaataatgattttccaccagctctgatgcaaagagatataattttaatgaacgatttatccagcagtttgttccaggggttgcctctccttatctacggggattactttgtacatgcagataagttttcgcaaacctatttccattttcttttgtaagcaaataaaactttaaaacaatga

SEQ ID NO: 10273 - DNA, 511 bp, Homo Sapiens
ggaatgggcgtccccttggggacacatccaaaagttgggccggggagctccagcttctaagaacaaagccccggggctggcgcatcctgagggtctctgggggtgtttgccaggctcctgggatgggccgctttcagaagccctgcagtgcctccagatggaaaggcgggcccggcctccggttgggtctgcattttggagagtccacaccacggaccaggttttcccccaaggcttggctttgtgtagctactaacctccttggggcattctgagaagtgtgggcagagagaattatgtggcctcatcctcccccaaggctgtgcttgcagcccgggcaccttcccactttctagctctggagaggttggattttgcttttgtaaacacatgaatccttatgataaaagtctgtcagtcaaaaatacatttataaattatttaatgccagtcctcatgtaacctcaggtatcttcagcttgtggagaataaatctggtttaataaacaaa

SEQ ID NO: 10274 - DNA, 272 bp, Homo Sapiens
ttgtcctgctttggactatgggagcaaactggctcctgtatcctttattttgatcccagcagtcttcgacagatagcttcatgcttttgcccaccttcccaaagtccatttttagcctatactgaagttggttgtttcttcaaaaagctttggtttcttccagttagaactgtagagactacagtctaagttttaggagagataagatagacagatcctctagaaagaggaatgtaaagaattaattcataatagtccaaaggcaggacaag

SEQ ID NO: 10275 - DNA, 228 bp, Homo Sapiens
ctgttctgctttggataggtctggcagtcagaccgggttgatgccatcgcaggcaagccagctcccacattgatttggttgagtcagggaaaccgggttatttccccggcaccagcgtcaaccgcgtcttcccatacaccccgtcaaagttctgcggctgcattgggaagctcaggtattgcgctttcaaccacgggtcgatgccattggcatagtccaaaggcagac

SEQ ID NO: 10276 - DNA, 463 bp, Homo Sapiens
cttgtcctgcctttggactacagcacagtcttaattcaggacagagtttagagtctgtaactctgaaaggcagagctccacggaagcagatgtcccttctgaacagttctgaattccagcctcaaattagaacagttgccaagagtcacagtgactcatgcattctttcttcaaacaacctccctaccaaggatcttctttcagctctgttagaacaaggcaataaactgcgtaatgccatggtgatttctgcaatgaaatcaagcccagagaccagcatgttgttggaccaagttcatcctcctattaatgaagattctcttagagcatcaacacagatcagagccttttctaggaatcggtttaaagaccacattgaagatcacctcctcccttcaaccgagaatacattttggaaacacgacacaaaagctgataccagagctatacagctgctattagg

SEQ ID NO: 10277 - DNA, 198 bp, Homo Sapiens
cctgcctttggactaagttctcacggggtttagggtgaggatgtgagagtaactgagctccacctttgcttgagctttaaactcaccctgcggaagagagacattttagccccactcccttcctaccttgaagggtcctgcatgatatgtgatttatcatggcttttctctttctcttctaagtccaaacgcagacag

SEQ ID NO: 10278 - DNA, 497 bp, Homo Sapiens
gttgctgcggtgactctagtaggatccccttgtctgcctttggactacagctcttgcaggcggggtggggtaggggggtgcctcctccttcctgctttgcttctggacctgcatgctgctctctctggctggtcaacacctgcttgtccagaagcctcagctgaagtgtcagttcctctgggaagccttccctccgcggagacttagaacttgtccctctctcccctgggactcttcacacagctttctagtccaaaggcaggacaagcttgtcctgcctttggactaccttttacttccttagtacctcattacatcttccatagtcactgaattttattctttgtcattgcggcttatttaaatactgactgtattggaaaaattaaaattatggtatccttaataaaataacattgaagagggtatagatgtctgcactgggaatattctttgtgtgtgaaacaaaattcacttgttatagtcctaagcaggga

SEQ ID NO: 10279 - DNA, 236 bp, Homo Sapiens
tgtctgccttggactacaggtgggcacatgctgggccatcaccgttagtattaatgaacctataataatggtggttattaactaaagtccaactttattcagatttctttagttcttaatgaccattttctgtcccaaaatccctatccaggttatcatgttacacttcagttgtcacgtctccagaggtagtactagtccaagaggcaggtacaaggaggtaccgcagctcggaa

SEQ ID NO: 10280 - DNA, 136 bp, Homo Sapiens
acagtcgcaccaccaactaatcagttaatgaagtaatgattgagcgcctactatgtgaccagtgctgtacactctacttgggcccactgttctttctagaggtagagatgcaagtatgtatatataaaaagaatga

SEQ ID NO: 10281 - DNA, 527 bp, Homo Sapiens
gggttacccgttagctgcatctgccctggctgtttgcccgttcaggtcacaaactgccactactatgtacctgcagtggggttgcagagatgggggagactcaagtcttactccccaggagctcccagggcccaaggaggagaatgctgcctcctttcagtctggtctacacccactttctggtagcctctctgcttcctgtaattctggctgtttttccagactcagctcaaatagtgcccctccttaagcccatccctcgcccccagcctgaggtgatctttccctcctctgaactattagagcagttactgtctgttcagttcgtttggcaggcacacacagtggcataaattctattgttttgaactctgatttaaaattaaattgcagctgggcgtggtggcttatgcttgtaatcccaacacttagggagtcaggagaatcacttgagctcaagagttctagaccaatctgggcaacagagagaccccatctcttttaaataaaaagttaaattgcttaaa

SEQ ID NO: 10282 - DNA, 295 bp, Homo Sapiens
cttgtcctgcctatggactaatggaaagagatgtgtattacttgtaagaatgatctctgctattacatgactcattcctgcatgcaaggactgctctcatctggtgccaaggaaagactgctgaattatggaattgcaaacattatcactgactgttactcacaacactgcagggaaaactgatatgcgccaaatcagccatgttaaggggttgttattgcacctctcctcaggaccagctgttgctatttcgcattaagactttaaccatatcttagtccaaaggcaggacaag

SEQ ID NO: 10283 - DNA, 370 bp, Homo Sapiens
aatttggaacatacaggacaatttattgaaggcaagctcaagcaaaatctgaaatcagcggaatgtcattaaaaacctttccaaattaatcctcacggaagcaaaaaacacattggaattccaaagtatttgtaaaataaaaaaggcaacatctcagtaaatataatgtacaaaaattatatgttcctaccagcacacacatcagtaaagaagcttaaatattacaggcaaccctaaatacactataactagtcaacaataagctatctatatacaggttaaccaagctttacacgtttcacactatgcaataaaacataggccaatcaacaaaatcctcaaaatattatatatcttgaagtctatgtgg

SEQ ID NO: 10284 - DNA, 462 bp, Homo Sapiens
gaggcctctgagtgcctggtgtgctccgagctggcgctgctggtgctgttctcgccgtgccagcaccgcacctgtgtgtgaggagtgcgcgcgcaggatgaagaagtgcatcaggtgccaggtggtcgtcagcaagaaactgcgcccagacggctctgaggtggcgagcgccgcccccgcccccggcccgccgcgccagctggtggaggagctgcagagccgctaccggcagatggaggaacgcatcacctgccccatctgcatcgacagccacatccgcctcgtgttccagtgcggccacggcacatgcgccccctgcggctccgcgctcagcgcctgccccatctgccgccagcccatccgcgaccgcatccagatcttcgtgtgagccgcgccgtccgccgcgcccgagctgccttcgcgtgcccccgccctgtgttttataaaaagaaagattctcgg

SEQ ID NO: 10285 - DNA, 546 bp, Homo Sapiens
ctattactattgaatacaaatgacaattcatttatgaccactcaaacagcgttagtaaccatttagtgacaaaggattaaaacatccatctggatgttaattttgaagatgtaaattatatgttgtttaaatttttccaggcatctgaaaaccttatctgctagacaatgtaagattcacacagagttatctgggattctgattttttaaatagtacatatcattaaaccattttctctaaatgtaagaagagcagaaaaaatcttataagattatcagatttttctaatgacacagaaatgtaagaaaaaaatccctttatattgaaaaaagatgcagtcaaagtcttttcagacatgcccaaactttgagaatttcttcaaccatctaatgctataaagatttttgttcttcctgttcacaaccagttgtataacagaaatactagctactgttttccttcctgtgtgtgaagtaatgaatcattgattatgtgacttgttatgtattcaattaaacactaaagaataaaacattcactccttt

SEQ ID NO: 10286 - DNA, 859 bp, Homo Sapiens
gactcctagaggattcccaggcaaagctcctacaacgcaggcattaccatctgagccctgcagtgctgcggcgcatcagctagcctacgtccattgagaaggaggtcttccccattattggcaaggaggggcagctatatgccatggagttacatggcttctggatggacattgggcagcccaaggacttcctcactggcatgtgcctcttcctgcagtcactgaggcagaagcagcctgagcggctgtgctcaggccctggcaattgtgggcaacgtgctggtggacccaagtgccccgcatcggccaagaactgcagcattggccccaatgtgagcctgggacctggcgtggtggtcgaagatggtgtgtgtatccggcggtgcacggtgctgcgggatgcccggatccgttcccattcctggcttgagtcctgcattgtgggctggcgctgccgcgtgggtcagtgggtacgcatggagaacgtgacagtgctgggtgaggacgtcatagttaatgatgagctctacctcaacggagccagcgtgctgccccacaagtctattggcgagtcagtgccagagcctcgtatcatcatgtgaggggatgcagtggggctggccgagccccggttttcccatcagcaaggggagtgctggcctgacacatcagaagaccctggacttgtcattatttgtctggggggcactgggtgaagctgaagctgttggacacctgccttctcatgtggacatcatctggcaggatccctgctgggcacaccccacaaaccccactccctcaagaagggccagggccagggctgtatggaataataatttaatgctccctgtgaaaa

SEQ ID NO: 10287 - DNA, 146 bp, Homo Sapiens
agttaaaatgctttacctcaatggttgagatattttgaatggatttttcaagggggggaaatgcttattataataataaaccaaaatacttaacagaaaattgtcagctattctgacaaaaataaacattttgagagactttaaaa

SEQ ID NO: 10288 - DNA, 718 bp, Homo Sapiens
cacctatgtgacaagaagaaaatggaattatctctgaacatacctgtaaatcatggtccacaagaggaatcatgtggatcctctcagctccatgaaaatagtggttctcctgaaacttcaaggtccctgccagctcctcaagacaatgattttttatctagaaaagctcaagactgttattttatgaagctgcatcactgtcctggaaatcacagttgggatagcaccatttctggatctcaaagggctgcattctgtgatcacaagaccactccatgctcttcagcaattaataaatccactctcaactgcaggaaactcagaacgtctgcagcctggtatagcccagcagtggatccagagcaaaagggaagacattgtgaaccaaatgacagaagcctgccttaaccagtcgctagatgcccttctgtccagggacttgatcatgaaagaggactatgaacttgttagtaccaagcctacaaggacctcaaaagtcagacaattactagacactactgacatccaaggagaagaatttgccaaagttatagtacaaaaattgaaagataacaaacaaatgggtcttcagccttacccggaaatacttgtggtttctagatcaccatctttaaatttacttcaaaataaaagcatgtaagtgactgtttttcaagaaaaaatgtgtttcataaaaggatatttatatcaaaaagga

SEQ ID NO: 10289 - DNA, 449 bp, Homo Sapiens
gcaatctgtcattttacctgaaacagacaagcctatgtattatgaatactttcaagcttccctttggaatatacaagacatgcgtttggagttacctttgtttttctatcgtaaatttagattctggaattggggtttggtggtgcaatgtgttgctcacaagtggccagaactcctatttcctaaaaggattttgagatggaggaacacatatttaattcccctttatgccttggttcttgctcctctttccacgttggataacaattttttggttgttttgtttaagttggtgctctgaagcttaatctcagtaccctttactctgaattgtcaaattttgataaaacgtgccattttctttggtaagagaaagcaggtcttaatgtctgccagaacacaatttatatgccttattggcttcattaaacttttagaaaacttaaaaa

SEQ ID NO: 10290 - DNA, 1083 bp, Homo Sapiens
caaaaagttataacaaatgtcctagactaagccagaaaagctttatctgatgaaagggatcattcggaaagccaatgtatgataaaggattgaaaaacaaaaaagacagctggaaataaccaccataatgtttcaacaacatttatacatctttttaattagattagctttacaagcaacttgagagctctttcataatgaaacactgcttttcaatttacatgactttatagtctatctgtatatgaatcctgaaaatctttgcctactcttgataaaggtctgtgttttacagctggttaatgtgttgaataaaaacagcattatgaagctttatctttaaccaggattaaacacatataggccacaaacagttttaaattttgtttgaaatagagtcctgcttggtgacaagttaatagtcccactaacatgaaatgaatggatattaaataaatggccatcctgatttcttgatcttttcacaatgattcctaagagagtatataaacttttccaaaaaatatacaatttaagacctgtctggcaagcacaacccacagatagtagaatctaatactttttacaactgtagaggtacacatttgaatgacaacaggggctcccaaattaaaaggctgtggctgtacattttgacaatcaaacaaacctcccatcaacataaaacaatttctactaaccctaaaaaagataatgcttttgagttgtggcctaacgccgcgcactgtactatagaccagatggcaaagacaacttgcgctcctgggttgggctggcagaggcacttactgtagagatgtgatgttatcatctggaaggaaggggaggaagtagaacaaaactgaatatgggcgaggaaaaaacaataaactatcactttctcctgcaaattctcctaagtgagatcactatactgaacattcaatcccatcctaagtccactgttggcttcactacacaattttttttccatggtttacatgaatagcaatggcaatcttttaataaaaattactgagcttcccatagaaaaggtctcaaattgaatacaaactatacaga

SEQ ID NO: 10291 - DNA, 477 bp, Homo Sapiens
ccaaaattcttcagattgttcctcatgaatatcccccttcctctgcaattctccagagtggtaacagatgggtagaggcagctcaggtgaattacccagcttgcctctcaattcattcctcctcttcctctcaaaggctgaaggcagggcctttccagtcctcacaacctgtccttcacctagtccctcctgacccagggatggaggctttgagtcccacagtgtggtgatacagagcactagttgtcactgcctggctttatttaaaggaactgcagtaggcttcctctgtagagctctgaaaaggttgacgatatagaggtcttgtatgtttttacttggtcaagtatttctcacatcttttgttatcagagtaccattccaatctcttaacttgcagttgtgtggaaaactgttttgtaatgaaagatcttcattgggggattgagcagcatttaataaagtctatgtttgtaa

SEQ ID NO: 10292 - DNA, 345 bp, Homo Sapiens
ctcggtaccctgctggcccttacgcgcaaactgctcccgccagctcagccccgagcagacggcgcagcccgtggaggatgctgagccacccaggcttctccccgccccttcctggactcttctctcttttgcctttaatccactctgcgcagtcattgcctgtgttcatcctacctggccgacttctctctcaatatttccttggtgaaacatcctaagaggaagttacattagagaaaatcacatatttcatctcataggccgtaaacagggccatctaggaagccctgtcttcacgaggggagacggatcctctgacccgcgtgcagcgatatacgatccccc

SEQ ID NO: 10293 - DNA, 442 bp, Homo Sapiens
acgccctacagcggccactgcggcgtgcgcggcttcgcctaccccagcgagctcaaggcccacgaagtgaagcatgagagtggccgctgccaggtctgcgtcgagtgcggcctggacttctccaccctgacccagctcaagcgccaccgggcctcccaccagggccccaccctctaccagtgcctcgagtgtgacaagtccttccactaccgcagccagtggcagaaccacatgctcaagcaccagaacgtgcgacccttcgtgtgcactgaatgcggcatggagttcagccagattcaccacctcaagcagcactccctcacccacaagggcgtgaaggagttcaagtgcgaggtgtgtggccgggagttcaccctacaggcgaacatgaagcggcacatgctgatccacaccagcgtccggccctaccagtgccacatct

SEQ ID NO: 10294 - DNA, 207 bp, Homo Sapiens
cttctcagctttatgaagagaagggaaactgtctaggattcagctgaaccaccaggaacctggcaacatcacgatttaagctaaggttgggaggctaacgagtctacctccctctttgtaaatcaaagaattgtttaaaatgggattgtcaatcctttaaataaagatgaacttggtttcaagccaaatgtgatcgtggggttgtaa

SEQ ID NO: 10295 - DNA, 484 bp, Homo Sapiens
cccttacaaccccacgatcactgccaccacagtggcccacacttgcctcaaagtcctgcttgcaaacaagtacatggatattcccaaaccattccattagaaaactgccctccctgcacacacaacaaaaacagcgctatttcctacacctattggactgaaagtgcttggaaatggaatggttttagaatatgaagaagaacacaaaccaagtagctgtgggttgaacctggacgtgagctggttgcagggccgttgggtagaaaaccagcatctcataaacaggtcactacaaaaataggaagagtataaaaatagaatatattatgtcactatttcgtcttctctttatagtagcgtatcgtaggagtgggacaaggtggcctttcccgacactgctacgctggtctgtgcccgacaaacctcacctgatgttgtacctgagtacgttactaaatcctcaagaccttacacacagcctggc

SEQ ID NO: 10296 - DNA, 330 bp, Homo Sapiens
acacatacagcctgggcaataagagcatgggtttcagtcctggctttgttatactgggaaagaagccactatggttctgttaattattgggatagttgcagaggagtgatgaggaagacatggaggtgaagaacattagatttcttgcactaattgtaatgaattacaataatatgggagcctaattaaatatgttgaagtaggattataactatagcttctttagatacaaaattatatatataaactgagtagggataggctaagtcaagagaattaaagtattcacgacagaccctgacataaaatatgtccagaatttcttgacac

SEQ ID NO: 10297 - DNA, 367 bp, Homo Sapiens
caattagactgcagaggaccggcggcaagaagacctggtggaagagtcctcatattcctccgcaagggagaagagatcactgaatctaagcaaaaggagcggtagctctttgagtgggagcctgctgctcctacggcacctcccatcctcttctctgcccccaggcctaggccttctttttcttcaaccctggaccctaaggtcttgctggccattacgtttatgtccctagcaggcttcctctcccttaggcttttcccctacatacatatccaaaggcccataacgtggcaggagcacagtcacgctatcgttgtggccattcgataacaggctaaagctgttccctgtgtaaaggtcgcaggtt

SEQ ID NO: 10298 - DNA, 309 bp, Homo Sapiens
actccagcctgggcaataagagcttcagctggtacctgtagtagctgagcacattctcgtcgtgggcgttgccggcccgcgcctcctgggccagctgcctcacactcttctcatgatgctcgttattcttgtcagtccacgtgagccacacttcctcttctgactactcgatgctcaggtactcgtgggattgggccatctccttcacgggccgaagctcggtccggatgagaatgtcactgttcttggggtccagcacacacttgcagatgagctcttggtgacggggatgcgtcccgactaacttcg

SEQ ID NO: 10299 - DNA, 286 bp, Homo Sapiens
caataagagcttggcttagggaagttgtgggcctaccagggccgctgggagctgggcaggagctgagtccaaagacgttgttgggacctggagtcgggccagagtccggcctggagatgcagccgggaggaagagccgggcccggagggggcgccgggaggctgcaagtgggtctgagaggccaacttgaggaggcctggcctctgcctcccgcattgcccagctgttcctcctggctgcatctcccacctcccagcaaacaagctcttattgcccaggctggagt

SEQ ID NO: 10300 - DNA, 291 bp, Homo Sapiens
atcggtcacgcaggccctgatcttcgctactctggatacaggtcactagtggaagaccaaagttgtaccatagatagattgttcccttgatagtggcagatagtgttaacacctgcacaatctgtaactcagaaatccccaccatttcttacctctgggcttcagaatagaatcgcctggtttctctgatgatgcagcatggttccttaaaacccagaatcagaaaggaatgaacaattttggttgcatggatgaaattagcaactgtttagctctatatagtccgggggc

SEQ ID NO: 10301 - DNA, 835 bp, Homo Sapiens
gacttggagtgaggctggggtgcaggacccggctcacaagcgcctccttctggacaccctgcagctcagcaagtgtatagcggaggcaccacgaagctgtgaactcagagcccctccctgctaccaaggcccagctatggccccagggttgaaaagttatgagggtcagggcagtatctctctgcctatttattggggtgcctatttattggggatctgcattccccgctgcccaatcatttgcaatgccctaattagggcatcctgcccctcgccttttaggctcaggacggaaggtcagttgccatggttaccgaggacactggttactctggtgctgtcctgttttactggaccccgcctcccagccccaggggtgcctgtgggggtccatttgggtacgtctgggcccccactttcaccagtttctgcggccttccaccgggcctgaaccacagcggaggagctccgctaagacctccccacccccgctgggggtgggggcgggtgtccgtccggaaatgaaggaatagcccgaggaccgggctggggtttatttaaactgttctgtgtgggtctggggagggagagcaccttaatattattggggttggttggggtggggcaggatctcagccataaagtgccagtttgcttagttctcactgtctcctggtctgtgctgccctgctctggggatgcacggcggcagggtgggggagggaggttcctcgcaggtctcagcccgggacagggtcttgcaagcagcctcctgggcagtcgtaagggttgcggcgtgatgtcttcaataaattaagttttatttggattgagt

SEQ ID NO: 10302 - DNA, 478 bp, Homo Sapiens
  misc_feature (42)..(79): n is a, c, g, or t
  misc_feature (202)..(202): n is a, c, g, or t
tagttcagcttacctttgagaatagcatcaattcagactctnnnnnnnnnnnnnnnnnnnnnnnnnnnnnnnnnnnnnnaactacattgtgttagagtcatagtctaggatcctgagagattttccattcttgtcaccattcacttgcattgtaaagattttctttgtctgttgttggcatagattctcttgtacatatttnatttatttgtgtttatatatgtcaattggtttcctttcttagcttgatattgcctagctttgttgttttaattaactttctattagagagactgtatatattttttctaaatactttgtgaaatcatttttggtagcaatatctttgaatatgatgaataaaagtgactgtgagtgcaaatagaattagcagtaagaagctactctagctaatttgccattttacttaaatggaaaatgtttttcaaataaatacttatgttgttcatgtaaaaaa

SEQ ID NO: 10303 - DNA, 306 bp, Homo Sapiens
ccccgactgtggctagttgtctgtccggtggctgggagggggtgtggtgggaaaaagtcggaatctctgcaatctgtgtcatggactgtactattgtaaggtctatattctgtatgtgggtcccagaccctgatcaggaaatgagcctcatgtgtgtcgttaacatttatatatttccattcaaaatatgtattcagtgtttatttcctcaaaacagactttgttaatgtaggaaatctctccaagtggaaacgtgctaactttttctgtaaatctgaaataaaaggggctgttccttcctctgaa

SEQ ID NO: 10304 - DNA, 531 bp, Homo Sapiens
aggctactggcggcgggcagccccctggcgcacagccgcaccatgcacgtgctgggcctggccagccaggactccctgcatgaggactctgtgcgcggcctggtgaagctcagctccgtgtgacccacatggccccaggccgggggacaccagaggctcctccatgggcagcaggagtgagcggaggggtgtgtcccacagcgactttcccagccaatgccacggtggagatgacagccccaggtctggggtacagagaccacttaggatggcacagggtggctggccccggatgctgagagcttggtttcatttgaattttcttccccaacctgagtgctttgacaacaatggaaatagagaagtggctgctttcttttggtgaccctccaggggtggaatcggagtgtgtctgcccgcccttgtgacagacacacggaaggcttctgacgcttgtggccagactgcaattgcacttatgtgttatgctactaatatttgaaacagacctgccattccatttgttaattt

SEQ ID NO: 10305 - DNA, 452 bp, Homo Sapiens
gtatttgcaggacaagtacaactgaaccaacaaatttatttagttagtgctgataaagacagcagccttgagagacaagcagtaattacctggtctacttaatgatgccctttgttatattttacaggcaaaaagaatgattcctcagcagtcattgtgaaattttgtgggccacaagtattgtgcacacatgatccttgatttagagtcaacctgatgtccattatagctgtggaaaggcagcaggcagttgtgtcgctcttcacaataaggaacacatcttgctttcagcatgtgagaggaacaaaagcattgatgtaaatgtgcctcaaagtgagaactgaaaacattaacataaaataaaaaagtcaaataagactaagttcttacaactacctataaaaattgaattattacaactaaagcagcaaatcaaaacatctgctgaggtt

SEQ ID NO: 10306 - DNA, 287 bp, Homo Sapiens
gtctttagcgaagtttagactgtgaatatgatgacccagattcttttttatggtggctttgcttgttttaaatttttgcatgacttttcatctttttatgtgtgtttcctgtagtttgatccgaaggaaaagagtatagtagcctgagaatcaggagatgggagttttagtcgtaggccttatgataattaccccgcggtggtgtgtagaaaagtatgtaaatttgctctgttttaagactttgaactacctcaagaagaggaatctaatacaatatttgtaatgtt

SEQ ID NO: 10307 - DNA, 431 bp, Homo Sapiens
ttgcaactgggcacagaaattcaatggaagccaattacactgctaaaacaatagctatcctgtacctttacagaatcaaacaaaatagcaggacaaagagaacatgagagataaaagatactgctagtttctaagaggaatgcaagtctaagtggacactgaccccagcatcttggatgtgtgttctgttctttaagaaatgtagttattcattctctttagaaaaacaaagtgtaggaatttataaaccatgtcaatcaaactagagactgggtttattcagttccactatttctcagtacattttaaaaacttacatacataaatatttgggttgatcagcatttgtgccaacttaactaccacttttgtagaaactggcagtcaatttctgtgcccatttcaggtaccgactcgattcgtatctatct

SEQ ID NO: 10308 - DNA, 766 bp, Homo Sapiens
aaaataaggctaggtacgaggcctgggtgtttaatcggcacgaggggctggaggaaagggaactgaacgcggttctgggagcagcaagcccacgggtagcagccgaggccccagaatgagtacaaggaatgcttctccctgtatgacaagcagcagagggggaagataaaagccaccgacctcatggtggccatgaggtgcctgggggccagcccgacgccaggggaggtgcagcggcacctgcagacccacgggatagacggaaatggagagctggatttctccacttttctgaccattatgcacatgcaaataaaacaagaagacccaaagaaagaaattcttctagccatgttgatggtggacaaggagaagaaaggttacgtcatggcgtccgacctgcggtcaaaactcacgagtctgggggagaagctcacccacaaggaagtggatgatctcttcagggaagcagatatcgaacccaatggcaaagtgaagtatgatgaatttatccacaagatcacccttcctggacgggactattgaaggaggagaatgggagagcctcccctgggcctgaaaacttggagcaattaatttattttaaaaagtgttcttttcacttgggagagatggcaaacacagtggcaagacaacattacccaactatagaagagaggctaactagcaacaataatagatgatttcagccatggtatgagtagatctttaataaaagatttgtattgattttattaactaacaa

SEQ ID NO: 10309 - DNA, 257 bp, Homo Sapiens
aatgcctggcgtcccaccttaacctgatctcgaatccatacattgatagatgtctagaagggcttccaggtacaattcaaaatgtatcgcagacaatgttcaataatagtaaaagaatcacagtcttgttataagaagcaaaacaaaacagtgcagagctcatgatccagccatgagtcgcggttaatgttaactacttaaccaaggtctggtaaccattagccaattattaggttgaattactgtgcccatttcaa

SEQ ID NO: 10310 - DNA, 339 bp, Homo Sapiens
  misc_feature (214)..(228): n is a, c, g, or t
ctcaggagtttgagacccacctgggcaatatggcaaaacccagtctctatgaaaaaattagccaggcatggtcgcgcaaacccgctagtcccagctatctcacggaagctggggtgggaagatcacttgaggccacagaggtcaagactgcagtgaaccgggactgcaccacggcttttcagtccaagcaacagagtgagaccccctttttttnnnnnnnnnnnnnnngtactgcaactagctgggggctgtgacgcgtacctgtagtccaagctacttaggaggctgaggtgggagataactgatgctcaggagctcttattgcccaggatggagtgg

SEQ ID NO: 10311 - DNA, 846 bp, Homo Sapiens
gactaggggactacgagacagtatagggcagcacgtttcaatactgacgcacgctagaattaccttaagttctagtaagtaatttactacaattaagcttatgtaaatttaaataaatacctatgccagggcacaagaatctgatgcaaccgctgatttatagctcaaatcacccccactcccatcccacatatgaccttctgtctccctagagcttccaccaacaggtccttgctccatcctccgccccccaaacatactgttcatctctcctccacattacctagagtcagagaattggattggaaactggcctcagactagtcttctagatggaaaagtcaatgtacagttctgaggcccaaaacaggaaagtgacttgcctaagatatccataagtcagtaacagagctgaatctggatctccgattaccaggcaaggccccacccacaaaggggtcacagggaaagccagtcctgatggcaaatccagcagctcctgctagcagaagagacccagcaaggggctaaggaggacaccaggggagagcgtgtgtatttggtgggaatggggtgtcagtgaccaccctgggtccctgggcaagtctgctcttgtggcatactgcaggcagagagcgattctggagtgaccaggcccggaccctggcctatacggaagatatcctcatctctagaatacggcccagcctaatatgacacgcccttacagatacccaatctcttgggccagcttacaccacaggtgtccaaattcctgcccacgatagtatcatgtctcacacttcttgagctcttcactagcaccataccgctaatacacgtatc

SEQ ID NO: 10312 - DNA, 366 bp, Homo Sapiens
ggtaacctggggacccgctgcagaagagctactccagcctgggcagtaagagctctcgaactttctgcatcacgtggttttccttccggctcttcctcctcttctttttcacgaagtgcttgttgctctaagagtcttagtttgttcttccttttttcactaatttttgaaacaagtggattcagaagcctaaattcttcactctcttcatctacttggaagtcagggttctcaaacataactttaaatcgatcatcggtgagaatattaggaagactcttaactttctttttccatgtagatctctgcttctcctcttctgcctcaattaatttaagtgccagctcttattgcccaggctggagt

SEQ ID NO: 10313 - DNA, 435 bp, Homo Sapiens
atggataagtgtcagacaggttgactcttaacatttggggctggatcatccctggggtgggacgtgtcctgtgcatgtagcatatatttagcaacatccctggactccctgcaccagatgccagtagcagtccccttcccccaagttgtgacaattaaaaaaatgtgtctagatgttgctagtgtccctgggggacagaatggtccccgcttgagaatcgctggtctatatattttatcggcttcaaactcaacttttttggcaaagattccttatgggtggtgtggtgtcctcccactgggaagcccgtcatgtctgatggtctctctttgtccttgacacaccatcttgcattggttactacttactgtctcctgggccttggaagctcattctgtcagtttcctagaagtggaatttctgtgcccatttcaa

SEQ ID NO: 10314 - DNA, 426 bp, Homo Sapiens
tactgggcaataagagctagactccatctcagaaaacaaacaaacaaaaggaaacttttgttcaagctgcatcttcacattgaatgaaagcattcagacgggtgactgctgctgtccacaactgtgggcggaagtgtgccttttcccagtttctcgtccaggaggttgcatagcaaatactcaagtcactgggatatatgctttccaaagtgcgggcccccatagacaccttcccccatgtctaactaccaagcctcttatgtataatctgtgcagggaagacaagagtagaccatatactctgtgtgctgtgcatgtcctggtgtcactcattgcctcttatctgtcgacattctaatataagtcagcttaatagttgactctgaataatgcaaaacccagcttgcttccagaatggcctaggac

SEQ ID NO: 10315 - DNA, 539 bp, Homo Sapiens
ggacggctgaatggagggggcgtgcgaaaaggaggcacctggaaaaagggagatgcccacaccaccctagatgtagtagggtatttgaagaagtaggagggtacccacagaaattagggttcccatggaaatgggggaagactaagactagagcatagactcctaatagtataaaataacttaagcatgcactctcaatttatgcatattcataaattcacttataactcatatacctctaaaagatgccagtaatgatgtctaccctgcagtgttgctgtgagaatgaaattgaatttcaacctggtaaatgctgtagaaccgcgcctggtatgtggtaacattcaaggagtgtaatggttgttgctgttactgtcatcatcaactttagggacttattgtggacattagaaaatacacaaaatcagagattaaagatgatataaaatactgagatttctgttttattatttttctacctgattttctttccagtaccacttcagagactgctggatcaatttctgtgcccatttcaa

SEQ ID NO: 10316 - DNA, 261 bp, Homo Sapiens
actcaagcctgggcaataagagctgggaaccattgacttaagggcatgcagaggggagagactggatgaggggaatgacagtcagaggcaggtgttgaggtggatgcaggagtagcaacagcaggtgggtgtaggccctttttgtacccctatgttcccccaccttttcagtgcccattcagcttgctcttagacagcccggacctagatagatgcgaagggtctgcctagctcttattgcccaggcaagagtgggccgag

SEQ ID NO: 10317 - DNA, 165 bp, Homo Sapiens
gacctgtaggagcatctggtgggaggtggtggagggagaactgtgggtttggaagctgcgccctccccccagcaatgcgttggaacaggaacagttacatggagaacaaccataccttgtccgacaccctcagatcttgtcccaggccaaaaaaaggcggccgct

SEQ ID NO: 10318 - DNA, 473 bp, Homo Sapiens
  misc_feature (26)..(26): n is a, c, g, or t
tgcatgcatgtgagcatgcggactantggcgtggtggctgccagcacagaagaagcaggcatcaccgccttggtggtggtctccatcgtggccctggtgtccttatcatcacatgtgtgctgatacacttgtgccaggtcccgaaaacacttgtgagtggtgccgggccctcatctgccggcacgagaagcccagcgccctcctgaagggaagaaccgcttgctgccactcagaaacagtggtttgaagagcccagaggaggtttttggccaggtggacttgtggcagatcaataaagaaaggcttcttcaggacagcactgacagagatgcctgggcgtgccacagaccgttcctaacttggcctgtaatcacctgtgcagcctttcgtgggccttcaaaactctgtcaagaactccgtcggcttggggtaattcagtgtgaccagagaagaaactcagcggaccacgaatt

SEQ ID NO: 10319 - DNA, 459 bp, Homo Sapiens
ctctggtatctctatacaatggaatacagattgcttgattcatcgattttccaattgatcagtgtttgcaaaagccagcagatgtaattggaaaatcgatgaatcaagcaatctgtattccattgtatagaccagttcctgcttcttgaaagtgatccaggttgctcaaaccaatctttttgcttctccttgtaacctaagtgtgcttgataccttttgtttaacacttgagattgtaaggaaccttaccattgaaaatttagatgtgaaaacataagctcttacaagttgttatagaatttattttattgtttgtcatgtttataagtagtgttgagaattaacggctttcccaggattccagtttgctttcttttcaaagagaattgtttgggccatgcctggattctaaaaatattctctcccccaaaacaattggtttcaagaagcaggaactgg

SEQ ID NO: 10320 - DNA, 294 bp, Homo Sapiens
ccagttcctgcttcttgaaagaagtcttcttggttatcctggctttggaaaagagatttattttgttttgctctgctggctctttaaagatggatagttgctcaatgtagcagtgatgttcttggaattgctgagaaatttggggagggcaaaagataggggcagaattttttcattatttccctttatctaatacttttaaatagaaccaacacagcctaaatgagttcaggcaatatttagatgtggtatctccatctgtctcctgtaaaagataagattttcagaagcaga

SEQ ID NO: 10321 - DNA, 263 bp, Homo Sapiens
aactggggcccagttctgcttcttgaaagtagtcccactctgtgcaaaagcctcccatgccccctgctagcctcaggctaagagcccttctccttcgcacagcctttggacctgtctatctttatggtctggaaacttcaggaacactgatagctgagcatctggcacatattatgcactcgaaaaccatgtatttctttctccttccctttgggacccgtaaaccagggactggacattttttcaagaagcaggaactggct

SEQ ID NO: 10322 - DNA, 736 bp, Homo Sapiens
agaattgtatttgcaacgggtagcagaataggacaaaattacttatgaaagagacagttttagacaggcatatgaagatcttcggaaacaaaggcttaatgaatttatggcaggtttttatataataacaaataaattaaaggaaaattaccaaatgcttactttgggaggggacgcccgaactcgagcttgtagacagcttggatcctttctctgaaggaatcatgttcagtgttcgaccacctaagaaaagttggaaaaagatcttcaacctttcgggaggagagaaaacacttagttcattggctttagtatttgctcttcaccactacaagcccactcccctttacttcatggatgagattgatgcagcccttgattttaaaaatgtgtccattgttgcattttatatatatgaacaaacaaaaaatgcacagttcataataatttctcttcgaaataatatgtttgagatttcggatagacttattggaatttacaagacatacaacataacaaaaagtgttgctgtaaatccaaaagaaattgcatctaagggactttgttgaactttatgctgaagattcttcaagttgattcagtgtattactgatttttttctatttgtaaaggattatgagttgtataaaatacatactccctaaactagatcatgaaactggtttctgttttatgcagttgtcatttgtaaagtctaataaaatattctctataa

SEQ ID NO: 10323 - DNA, 419 bp, Homo Sapiens
agtaggtcacctggcttccgtggaccaattcatctttcagacaatctttagcagaaatggactcagggaagagactcacatgctttggttaatatctgtgtttccggtgggtgtaataggggattagccccagaagggactgagctaaacagtgttattatgggaaaggaaatggcattgctgctttcaaccagcgactaatgcaatccattcctctcttgtttatagtaatctaagggttgagcagttaaaacggcttcaggatagaaagctgtttcccacctctgtttgcttttaacattaaaagggaaatgtgcctctgccccacagttagaggggtgcacgttcctcctggttccttcgcttgtgtttctgtacttaccaaaaatctaccacttcaataaattttgataggagac

SEQ ID NO: 10324 - DNA, 421 bp, Homo Sapiens
actgctgcagtgctttcgcttatccctacctaaaaaaccgtcaatgtgaaatcatttccttgattataactataatgataatggattagtttatataaacctatgtttagacaagttcaagacaagcgtgtctttctataaaaagtattgaaaatgaaggaaatgagatcatgtttcaatttattaaagcagggaagagcgttctgtgcttagttcgtgtctaggatttgagtgccttactgaatgcatttaccagcaaacatgtagcaatctgttctctcattgtgattgtggaagaagctcatgtaaaatgatagtcattaatgaggaagtatggcgtggtacttattctgtaagttcagagtatgctgagtgttaatagattatcatattgcctgaaaataaattcatgatgacatga

SEQ ID NO: 10325 - DNA, 509 bp, Homo Sapiens
tgttggaaatgcgctcgctttaatccacacagagacgggacataatcctacaggtttaaatgtacataaaaatagagtttggaattctttgctctgtttacgttgcagactgctctcatttcaaggagtgagattataaataaaatgatgcactttaggatgtttcctatttttgaaatctaaacacgaatcattcacatgaccaaaaattgtgtttttgtaaaaatacatgtctagtctgtcctttaagtaatagctctcttaaataagctatgatattaatcagatcattaccaattagcttttaaagcacatttgcttaagactatggttttggaaaaatacgctacagaacttatttttaagctacaaataaatgagatgctactaaattgttttggaatctgttgtttctgccaaaggtaaattaactaaagatttattcaggaatccccatttgaatttgtatgattcaataaaagaaaacaccaagtaagttatataaaata

SEQ ID NO: 10326 - DNA, 380 bp, Homo Sapiens
agcatgtgatatgtgaaataaaatggattcttctatagctaaatgagttccctctggggagagttctggtactgcaatcacaatgccagatggtgtttatgggctatttgtgtaagtaagtggtaagatgctatgaagtaagtgtgtttgttttcatcttatggaaactcttgatgcatgtgcttttgtatggaataaattttggtgcaatatgatgtcattcaactttgcattgaattgaattttggttgtatttatatgtattatacctgtcacgcttctagttgcttcaaccattttataaccatttttgtacatattttacttgaaaatattttaaatggaaatttaaataaacatttgatagtttacataaaaaa

SEQ ID NO: 10327 - DNA, 384 bp, Homo Sapiens
caactactgtttattatactaaaaggctgaaaaacctccaggccagactgctaagctctgaaattcctgagaggtctcagaccgggattctacttgttccaagaaagggtaaagcttctaaaccatcttattcttgtctccaagcatgaacacaggagcatgttaagaaaatctttactacttcttccatgcggagaaatctacatattttgaattagaaacaccctcacacccacttgaagatttttttcctgggaacattatgtcccgtagatcagaggtggtggtgtctttttgcttctactggccattgagaaactttgatgataaaaaagaacggtatagatttttcaaacgtatataaaatatttttatgttatatgt

SEQ ID NO: 10328 - DNA, 414 bp, Homo Sapiens
  misc_feature (13)..(13): n is a, c, g, or t
  misc_feature (50)..(50): n is a, c, g, or t
  misc_feature (319)..(341): n is a, c, g, or t
gctcggtacctgnaatgggcacagaaattaatattaataaagatactgantctcgaggcattatatataaagatcccggcttgtttgtggatctgaacacagcagagggtggttttcaggaaataaagctacttctagatacttgaatagatatttcaagctgtaataatattttataactaaactggaaagttaaaaataagcttttacaatatcctcatacttcaaggcacagttccaaagttacctattccaaaaatattccttgctttctgtagccagaagtatcctttctggctcctgtgtttggtccctgccnnnnnnnnnnnnnnnnnnnnnnnggggaaccttatggcctcgggccgtggaaatggggtccttaacaattacttttttttgggaggggcaacgggc

SEQ ID NO: 10329 - DNA, 683 bp, Homo Sapiens
caacaagagcaaacctccgtcgaaaagaagaaattactctattaagataccgtaatgaccatctctgacccttgcagcccagagttttgtttttgtaaattctacctcctgaaaccttcaataaaggggaaaataggtggcaaacttcacagtttaaatgttcaacaggtattcctcctccctcatccctcaaacctacctatttcacaatcgtctggagattccaagtcctttaaaaggattttagctgatctgcaggcatctggatgttagcctggggttttggctggattccacctcgctcagtgatgatagtctgtttccctggaacattcctgtggttttagtagtaatgagatgtgtgcaccactccagtgggaactgaagctcttagtagttacattgtaattaaaaaaagaattataaaacaagaaatcagcaagcctgcttacctccagagacacaccgttccacttacagtatctagcttcctcgactcctttgttaaaatcgtggagtatgaaccgtgaccagagaagtaaatatggagccgttttattgagcagtttcctacagggatgacggctgtcagtgtgtttcctgccagttttccagtccttactctctgcccttcattctgtactcttggcagagtcagtaaccaacccctaataaaatcaaag

SEQ ID NO: 10330 - DNA, 522 bp, Homo Sapiens
ttgaaatgggcacagaaattctgaagtgaaccatacagaagtaatgaaaaaaaattatttttaggtttgctatcagtaagaaaaaacaaacatttctgaggtttatatgtttttaacacacagaagacttggaggtataacctctggaaaattttcttccactcttctttttttcttctctactcttccctattcctatattattccctagcatcccctttttctcatcctagcttttcctctccaccgtgctgcgctatttcagtatctttctatgcagaacgttactttttgttgtattatgcaactacagtgtaatctttttgaatactttaattagtaatttaaactcaacatagtcttagccacagtgcacgttacttagctggcatgaccatagtctgagcggtgtggccagtgtgaagcatgagtgtgcagtgagcaccgcatcacagcagccacttgccggcagcagactgtaaggttgtatctaagccgtcgtcttgattttagctactggtc

SEQ ID NO: 10331 - DNA, 680 bp, Homo Sapiens
ccaccccagggctaccggaaggtaaaatcttcacctgaaccaattatgagcagtctccttactgaaggtacagccggatacgtggtgcccccggggctggtgttggcagccggggggaggtgcctgagggtccccacggttcctttctgcttttctgaatgcatcaagggtacgagaacttgccaatgggaaattcatccgagtggcactggcagagaaggataggagtggaatgcccacacagtgaccaacagaactggtctgcgtgcataaccagctgccaccctcaggcctgggccccagagctcagggcacccagtgtcttaaggaaccatttggaggacagtctgagagcaggaacttcaagctgtgattctatctcggctcagacttttggttggaaaaagatcttcatggccccaaatcccctgagacatgccttgtagaatgattttgtgatgttgtgatgcttgtggagcatcgcgtaaggcttcttgcttatttaaactgtgcaaggtaaaaatcaagcctttggagccacagaaccagctcaagtacatgccaatgttgtttaagaaacagttatgatcctaaactttttggataatcttttatatttctgacctttgaatttaatcattgttcttagattaaaataaaatatgctattgaaccccaca

SEQ ID NO: 10332 - DNA, 468 bp, Homo Sapiens
ttgaaatgggcacagaaattaattcctcccctctcaccctgtgtaggaattaatttcgggtacagcatccctgacagatggtcattcagccctctgcttgccacttccaactacgaggagttcactacactgtgagtcagtgaattccacttatatccagtgttaattgttagaagctttttctgttcatgaaattgaaagctctatggtggatattccattattaaagctagttctgctactctagaatggcacttttacatgatggcttttccaatattggcaactgtggtaatcttaacttttctcttctccagactgaaatttggtctgttccacttcagagcttcctctcctgttttaattccaggcttcttccacattctggtcacctccttgtgaaaacattctgattcagtttatccttccagaactgaaaacacactactaattctgtgcccatttcaa

SEQ ID NO: 10333 - DNA, 227 bp, Homo Sapiens
gatcagttgtccgtttataagcacccagaaatatcttcaagtgagggttgctgtttgtcagaatgtcttcattacttgtcatcaagtgtaaacaggaagatcacaaaatcattcttttctgccaaacgctttgtaactccctctgtacagacacaggtattatacaggatactcaagcagtccttggacatttcatcacttattttcaatttctgtgcccatttcaa

SEQ ID NO: 10334 - DNA, 215 bp, Homo Sapiens
gttaaataaataaataaataaataaagtcatgagacgggatttggtcaccaaggaagtgagtatatatagagaagaggtccaagggctgggcccttgaatatttaatataatttagaagtctgtaacgatgaagtagttagcagaagaaacttgaggagagaccagtgaggtgggtagcaaaactgaagaatgtgtttcaagaagcaggaactgg

SEQ ID NO: 10335 - DNA, 436 bp, Homo Sapiens
ttgaaatgggcacagaaattcaaatggcataggaaaagttcataaccaagaaaaaataattaccgacccagaaagggcaggtgctctgctaaaattttcatttagaacacatactgaaggtgttattagaaaactacataaagtattgaagtatggagttaacataaacaaagacattcacaataataccctcaggaatattaagtcaatgagaacgaaaatgctgaaattatagggaatgaataagagaaatcagaaaaacagagaaccttggctcacctacaggataatctttaaccatagaaagctgtccatttcactaatatcatttccataataaaatgtaacttacacatgtatacaccaaagcaacaaatgtatttttatgactcttgggatttcagagcacagaaattaatcccatttctgggtaccg

SEQ ID NO: 10336 - DNA, 566 bp, Homo Sapiens
  misc_feature (73)..(81): n is a, c, g, or t
  misc_feature (272)..(301): n is a, c, g, or t
aacgatggtcctcagctgtaaatagccagtcaaactgtatgattaaaatcactggattggacaatgtgcgtannnnnnnnnaaaacaatcaatctctaaaattcctttttaatgtaatgaggcgaaagttttcttagtaagattaaacagatatctaagtagataaacaagggaaaataatagttggtgaatgtctgtaaagctcttcccatatttcacttttaaaaatgtttagggaaaaaaattagaagtatttgccattattctagtgnnnnnnnnnnnnnnnnnnnnnnnnnnnnnntaattaaacaaccaagcaacactaaaaccacattacacagatggatcatcatgctttcatctggtttaactatcacatctagtttaactgggatgcttttcaactttaaaaatggtgatacatgaagatgtaactttaatggataattttgaattgggatttaactttgttgactataacagagtatacttattacaatacagtgtagcacatctttctattagaaaaaaatttaagatcctttacccgtctccttaagttaaag

SEQ ID NO: 10337 - DNA, 441 bp, Homo Sapiens
  misc_feature (87)..(159): n is a, c, g, or t
  misc_feature (166)..(188): n is a, c, g, or t
ttgaaatgggcacagaaatttgccaggtgtggtggtgggcgcctgtaatccaagctactcaggtggctaaggcaagaagatagcttnnnnnnnnnnnnnnnnnnnnnnnnnnnnnnnnnnnnnnnnnnnnnnnnnnnnnnnnnnnnnnnnnnnnnnnnntgtctcnnnnnnnnnnnnnnnnnnnnnnngctgtcccaggttgtaccctaccaacaatgggtgacggtgcctatttcactaaactcaacatcaaacttaccttgtttgcctgttaccttgttgcctgttatatagaagaaaagtatttcattgtatttatctgcatttttctgcagctgagattttcgtttcgcatttcttcacagattatactcttctgataattggacatttgtgtcgtctgaatggccttttcatgcccttgccatctctgtgcccatc

SEQ ID NO: 10338 - DNA, 545 bp, Homo Sapiens
aggacgtgtactccaggcgaggcctctggacctgtgttcctgtgccaaagtcctgtcaggctggtgggcaccaggaaaggcctgcaccctcgtcatgctctccacaggaagccagctccctgagctcctgagccagccggaaactcttcctccagccttccggggagaacatccctcccattcagggaaaggaaagcagcctccagtggaaatgttttctgccttccggcttctagaaccacctcaggtactgatgaaccccacttagcacagctgaaggggtttgtgaatactcccgcctaaatcccttctacttcactcctcaggggagtgaagtgccttaagaaacaaagccctgtcctaatttatctagcttgtcagtccggtcttagagataccctctttcctgaagtgaggcgtgcctgtagaaacactatgtggtcagcctgtccccaaggagatcttgtgtctcctctccatctctgcctttgttaccagtgtgcatgtgtttgtgtgttttttaataaaatattgactcggaaaaa

SEQ ID NO: 10339 - DNA, 448 bp, Homo Sapiens
gcacttgaaacatactaaaagggaaaagaaaaatactaacatatcaagttactatggtgattattttaacaatcttcaataaaagcacgcaacggttttctattcaaaaatgcctgggataaaatgttctaggccaatgtatctcagaatgcaggaactaatcctaatttaaaacagactacaaacctagagagttaaggaaaggaagcactcatggtcatgtccaatgttttcattgcccttctgttataacactgcctgggagaacacagaagttattagtgacaatgagctattaaggcaaaaagttattttaaaaaaacagtaagaatacaagaaaggactggaaaagataatgtatggttttgcttaaatgaataaggattagaaagaaaaagaaacagggactagacaatcaaacaaaatggtgtaagagggccgagagcag

SEQ ID NO: 10340 - DNA, 548 bp, Homo Sapiens
ctagttttagaagtttcaatagcaatgtgatttactaccatgatttctgtgacatatcaatcatgaaataaatgcctacttatagacaatttccgctcctaattatatagcctcctctctgacaaagggttacgccataaatttcactaaaagacaatgaataagaagtgctctaacagcagtagtttcaataaattagcattactgttatatgtgctgagacataattctctgctatggaaacttctaaaactaggcctagttttagaagtttcaatagcactaaagaactacacctaaaagacatatataggtaagcatttcacccaagcagtataacttatactcttctcaaacacacatggaacattctccaggatacatcataaatctggagagcctcaacatcccagcctacaagtgatcctcttgcctcagccccagctgggactacaggtatgcaccaccttgccaagccaattttttttaatttcgggtagacataagatttcaccatgctattgaaacttctaaaactaggggggatc

SEQ ID NO: 10341 - DNA, 353 bp, Homo Sapiens
ccagttcctgcttcttgaaaccacagaaacggcttgtgaaacagccgatagggcagactgccaaatacagactgttaaaaccaatctctcaatgacaaaatgtcaaacactgatgttaaacctgcattaagactgtggtgtgaggatttttctcaataagaaatgtataggtgctgaactcccagtttcacattcagaatgcttctattatcaaattcctcctggtacatcatattccgagaggctagtgtagctaatccactatctatctgtacaggaaagattttagaataaacctattcccattaatcctcatctgtgtttttttgtgggaatgctccttggagtttctt

SEQ ID NO: 10342 - DNA, 343 bp, Homo Sapiens
cctgtctatcgaaatccaggagttgcttcttgtgatcctgatgctggagcatttaggagttgcttcttgtgatcctcattctggagatttagcgagttgcttcttgttgatcctcattctggagatttaggagttgcttcttgtgatcctgactctggagatttaggagttgcttcttgtgatcctgattctggagatttaggacgttgcttcttgtgatcctgattctggagatttaggagttgcttcttgtgatcctgattctggagatttaggagttgcttcttgtgatcctgattctggagatttaggagcagtttctgtttcaagaagcaggaactgt

SEQ ID NO: 10343 - DNA, 433 bp, Homo Sapiens
  misc_feature (54)..(73): n is a, c, g, or t
ccagttcctgcttcttgaaaagaacgtgagcaggaaaaactgctggtgataccnnnnnnnnnnnnnnnnnnnnatcttgcctgttggcttcaacacatttgagaatacgctgaagagggaaaatttcagtgatggagattctagattaaatactcaggactgatttcctggtgggattatggtccagttttaccaaagaaccaattccttgaatgttggaatctaactttttatattgtcattattattgttgtttttaaacggttctttgtcttttctgttttatttttctcaagctgctttcaggagctagcagaaaataactcaaagttgaagactctggaagattttgctttaacctaactcgcattgatgtattaaatttataattttagcattcccaatagatcctatcattccttaaacataatac

SEQ ID NO: 10344 - DNA, 399 bp, Homo Sapiens
agctacttctcagtgaaatctactacatctatcactgatgctaaaagttgtgagggacaaaatcctgagctacttccaaaaactcctattagtcctctgaaaacgggggtatcgaaaccaattgtgaagtcaacgtttatcaccagacagttccatccaagggagaactaagtagagaaagttgtcagcgaatctcaatactaaagacaaatctacgacaccaggaggaacaggaattaagcctctcctggaacgctttggagagcgttgtcaagaacatagcaaagaaagtcctagctcgtagcacaacccacagaacccccattattactccaaatacaaaggccatccaagaaagagttattcaagcaggaactggtttcaagaagcaggaactgg

SEQ ID NO: 10345 - DNA, 1083 bp, Homo Sapiens
  misc_feature (14)..(14): n is a, c, g, or t
aatatgttaagagntatggctctaatgtgttttccatcagggaggatcggagtcttggaaggtttctttttcagataggtggaaaagatacttcagctgtctgctggcacaagagtgtcatcttgtctttgttgttagtagcctgagcaagtattatagatatttgccaaattgaaattgtgcctttttgaaagtaaaatactcattacagtctttatagttttgtgtctctgtatattttaccattgattacaggtgcaggccctagcaggtgcaggtggagtagacaatctccatgtactggactttcagaagtataaagctttcacttacactgtagcagcgtctggtggaggaggtgtgaatatgggttcccatcaaaaatggaaggttggcgaaattgagtttgaagggcttatgaggactctggacaacttggggtatagaacaggctatgcttacaggcatcctctcattcgagagaagcctaggcacaagagtgatgtggaaatcccagcaactgtgactgctttttcctttgaagacgataccagtgccactctctcctctcaaatacatggcacagaggcaacagcgtgaaaaaacaagatggctgaactcaccaaatacttacatgaaagtgaatgtgcctgaggagtctcggaacggagaaaccagtccccgaaccaaaatcacgtggatgaaagcagaagactcatctaaagttagtggtggaacacctatcaaaattgaagatccaaatcagtttgttcctttaaacacaaacccgaatgaggtactagaaaagaggaaataagattcgggaacaaaatcgatatgacttgaaaacagcaggaccacaatctcagttgcttgctggaattgttgtggataagccaccttctactatgcaatttgaagatgatgatcatggcccaccagctcctcctaacccatttagtcatctcacagaaggagaacttgaagagtataagaggacaatcgaacgtaaacaacaaggcctagaagaaaaccatgagctgttttccaagagcttcatccccatggaagtgcctgtcatgg

SEQ ID NO: 10346 - DNA, 840 bp, Homo Sapiens
gggacactcacctgggagcacggcgcctggctcttaccagcgtctggcctagaggaagcctttgagcgacctttgggcaggtttctgcttcttctgttttgccccatggtcaagtccctgttccccaggcaggtttcagctgattggcagcaggctccctgagtgatgagcttgaacctgtggtgtttctgggcagaagcttatcttttttgagagtgtccgaagatgaaggcatggcgatgcccgtcctctggcttgggttaattcttcggtgacactggcattgctgggtggtgatgcccgtcctctggcttgggttaattcttcggtgacactggcgttgctgggtggcaatgcccgtcctctggcttgggctaattcttcggtgacactggcgttgctgggtggcgatgcccgtcctctggcttgggttaattcttggatgacgtccgcgttgctgggagaatgtgccgttcctgccctgcctccacccaccttcgggagcaaaagcccggcctggacaccccctcggcctggacacccctcgaaggagaggggcccttccttgagtaggggggctccccttgcccttccctccctatcactccataatggggtggcctggaggaggccacagggccaccttattgtaaaagctttttatttttcataaacataccccccacggttacgccacgtcaaaagtaactaataaagacaccgaatccttggtgggggccgccctccggccccttccgagaaaggttctcctgacaacacctttcccctcttggggccgcgccggcgcgcctcccactcgaggtcaaaaggctggatacc

SEQ ID NO: 10347 - DNA, 888 bp, Homo Sapiens
ggactcttgagactcaaggtgaagatgaggaagataaagagaatattccttccacagatgtctcatcacccgccatggatgctgctggaatacacctacggcagtttagtaatgaggcttctacccatggtacacatttggttgtgactgccatgtctgttacacaaaatcagtccagtgcttctgagaaagaattagcactgttgcaggatgttgaaagggagaaagacaataacactgtggatatggttgatcctatagagatagcagatgagaccacttggattaaggagccggttgataatggcagcttacccatgactgattttgtaagtggcattgccttcagtattgaaaactctcatatgtgcatgtcacctcttgctgaaagcagagtcattccttgtgaaagcagcaacattcagatggatagtggctataatacgcagaattgtggaagcaatattatggatacagttggggcagaaagttactgcaaagaaagtgatgcacaaacatgtgaagttgagagtaaatctcaagcatttaatatgaagcaagaccacacaacacagaggtgttggatgaaaacagcaagcccttttcaatgcagcagtccatagaatacctctgtcagaatcaaagactaagcttaagagttcctcgcatatatcgttgtgcacaggatcaacatgatggtgactgggaaaaaattacttcaagtaacatgcttagctttccctccttaatgtgaaaaatcaagggcttactgacataggaacaacagaaatgctcctggaacttcaagttgctgaattataagtttattttttatcaataaatatttttatacttacattgagtgatgtgtataacaacaaatagtca

SEQ ID NO: 10348 - DNA, 837 bp, Homo Sapiens
gggggcggcccaagcggtttcaaacggcttagagcaggccgcttggttctgacccagctgaggaaatactcttaattctaaggaaaacctggaagcacaatgggagatgacagtgagtggttgaaactgccagttgatcagaaatgtgaacacaagctgtggaaagcaaggttaagtgggtatgaagaggccctgaagatcttccagaaaataaaggatgaaaagagcccagagtggtccaaatttttaggattgatcaaaaaatttgtcactgattccaatgcagtggttcaattgaaaggattagaagctgcacttgtttatgttgaaaatgcccatgtagcaggaaaaaccacaggagaagttgtgtcaggtgttgtaagtaaggtgttcaatcaacctaaagctaaagccaaggagctgggcatagagatctgtcttatgtacatagagattgagaaaggagaggctgttcaagaagagctcctgaaaggcttggacaataagaatcccaagatcatagtggcctgtatagagacactgaggaaagccttaagtgaatttggttccaaaatcatcttgcttaagccaattatcaaagtgttgccaaaactctttgagtctcgagagaaggctgttcgagatgaagccaaactaattgctgtgggagatttacagatggaatcggcatgctctgagacccccattacaaaatataactctgctctcggttgaaagaactagaagaagaatgggtcctactgccaacaagtgctgcgctagacctactccgatttcttcgttcgcctacagaagctagaagctgaattggaacca

SEQ ID NO: 10349 - DNA, 726 bp, Homo Sapiens
cagggagagaaaataccatgcataaattgtttactgaatttttatatctgagtgttcaaaatatttccaagcctgagtattgtctattggtatagatttttagaaatcaataattgattatttatttgcacttattacaatgcctgaaaaagtgcaccacatggatgttaagtagaaattcaagaaagtaagatgtcttcagcaactcagtaaaaccttacgccaccttttggtttgtaagaggttttttatacatttcaaacaggttgcacaaaagttaaaataatggggtcttttataaatccaaagtactgtgaaaacattttacatattttttaaatcttctgactaatgctaaaacgtaatctaattaaatttcatacagttactgcagtaagcattaggaagtgaatatgatatacaaaatagtttataaagactctatagtttctataatttattttactggcaaatgtcatgcaacaataataaattattgtaaactttgtggcttttggtctgtgatgcttggtctcaaaggaaaaaataagatggtaaatgttgatatttacaaacttttctaaagatgtgtctctaacaataaaagttaattttagagtagttttatattaattaccaaactttttcaaaacaaattcttacgtcaaatatctgggaagtttctctgtcccaatcttaaaatataaaatatagatatagaagttc

SEQ ID NO: 10350 - DNA, 684 bp, Homo Sapiens
ggggaaggcgttcagactcttagctgaacgcggagctgcggcggctatgctgtggagcggctgccggcgtttcggggcgcgcctcggctgcctgcccggcggtctccgggtcctcgtccagaccggccaccggagcttgacctcctgcatcgacccttccatgggacttaatgaagagcagaaagaatttcaaaaagtggcctttgactttgctgcccgagagatggctccaaatatggcagagtgggaccagaaggagctgttcccagtggatgtgatgcggaaggcagcccagctaggcttcggaggggtctacatacaaacagatgtgggcgggtctgggctgtcacgtcttgatacctctgtcatttttgaagccttggctacaggctgcaccagcaccacagcctatataagcatccacaacatgtgtgcctggatgattgatagcttcggaaatgaggaacagaggcacaaattttgcccaccgctctgtaccatggagaagtttgcttcctactgcctcactgaaccaggaagtgggagtgatgctgcctctcttctgacctccgctaagaaacagggagatcattacatcctcaatgggctccaaggccttcatcaggggtgctgggtgaggcagacatctatgtggtcatgtgccgaacaggaggaccaggcccc

SEQ ID NO: 10351 - DNA, 1051 bp, Homo Sapiens
  misc_feature (907)..(930): n is a, c, g, or t
  misc_feature (935)..(935): n is a, c, g, or t
gttcctatcttttgaaagtttgttctgcagagacttctaggaggatgctgtgcctcccaagctcagagcagcctctgtcctggctgtgcacattctcccttgattccacttgtgtggagggattgaacacaggcaaagaggtgctgctttgcttcttcaatggcaccttcattctccgttgtcattgacttcaagatgcctcttctacctcttccaggaagcacaggccaggggatctgggtgtgtgagtgggaggagagggcagaggtcccctgaggtcatgcattgtaatcatcatagaaggagagcccaggcctgccctcacgctctccatcataggctgacaccaagaagactcgtcttggcacaatctcacacagctggggctgtagcaaccctttccaacccctttgctggttgctgggcctcattccagcaccttgttcttagagcagattctagcacatcatggcagtgggaccaagcgtggtcccgaggaggggccagagcctggtagagactagggaagggaggtctcctctagactgactcacattgccttgagcttttcagttaagttgctgtaagcacctgggctgaggaggcagtttttgttccttcctgcgttatagcggggccttgtctcttcctctgcaggacacagatctggaggacgtggactggggtaggaaaccaccctgagggtgttagtacctagtggtgaaacggatgaggtcatttctaaggtgtgttgcccgtggatctgggcacaatcattggaattccttggagccactgggattcatggctttgtatccaactgcatccaggcctgaggctgctgacgtttgacaccagggccagtagagagtgcccttttgtatcttaagccaagaagtgaggcctnnnnnnnnnnnnnnnnnnnnnnnntggangccaatactgagtgcctgcagcatctactactctgtcttcactattcagaacttgtaactaaagtatttaaagaaactgattttaaatgcaaattaaagggcagatattctcaaaa

SEQ ID NO: 10352 - DNA, 956 bp, Homo Sapiens
ggaaccattgaagatacattaatgactgtgaaacagtatgaaagtgccaggattgaatatgatgcatatcgcactgatttggaagaactgaatcttggaccacgtgacgcaaacactctgccaaagattgagcagtcacagcatctcttccaagcacataaggaaaaatatgataaaatgcgcaatgatgtttctgtcaaattgaaatttctagaagaaaataaggttaaagtattgcacaatcagctggtccttttccacaatgccattgccgcttactttgctgggaatcagaagcagcttgaacagacacttaaacagttccatatcaaattgaaaacccctggagtggatgccccatcttggcttgaagaacagtaaaatcacagcggaaaataaaaagaaagtcgcgttgttatatttctaaaccaacctaacaagaattaagcagagttgggggaagtgggaggggtgacaagcattatagtgattcttgcacaaacagctttaatttttccctttttcatactttaacaattgaactgttaagggtggttttaatgtaaacaaagtttctataatctgaacacaataattttcctttttgagaaatccttttgtattgtgagggttgatggctatttctgtagtttgaaaacatctaatagagatttgcactgacaagataaaaattccaggtttttggtcctggaaatgagggccgattgtaacttttccaaagggaggtttacatgatttgttatcaacatcagatattttatatgtgaatatattaaacatctttaagagattcattttcatgaattaaagaaaaaagagactattttgcagagtaaagttatatggtgttcctgcagcgtacacacagaggcagcagctctaatgaatgattagcctgtggagttgtgccaataccgttttcatatgatctgccc

SEQ ID NO: 10353 - DNA, 721 bp, Homo Sapiens
gggtacacccgctgagagacccctttcggtgtgaccggcagcctggctgaccgtgagggccagagagagccttcacggacggcgcatgtgggtgagccgagctgtggtggcggctggtttaaaagggatccagtttccagctgcaggtttgttagagtctgttctacatgggcctgccctcctgtgatgggcagaggctcctggtacatcgagaagattcctgtggatcccgtcaggagggacttagtggctctgccgccagtgagacttcccgccggcagctgtgcgcaccaaagactcgggagaactggaaaggctgtctggggtcttctgactgcaggggaaggatgtactttccaaacaaatgatacaaccctgaccaagctaaaagacgcttgttaaaggctattttctatatttattgttgggaaaagtcactttaaagacttgtgctatttggaagcaaagctatttttttgtcagtggaatgcagtttttttactattccatcatgaggaacaacatagattccatgatctttttaatgacagtacagactgagatttgaaggaaacatgcacaaatctgtaaaacatagaccttcgctttatttttgtaagtatcacctgccaccatgttttgtaatttgaggtcttgatttcaccattgtcggtgaagaaaattttcaataaatatgtattacccgtctgaagcttaaaaa

SEQ ID NO: 10354 - DNA, 787 bp, Homo Sapiens
gggagaaaccaggcggcgcgttcccggtggcggcgccctggactcccgggcccgcgcatccccgccagccttccttaaggcggatgggtggcccccgagaccccgtcggacccatggtttccagtgcagcgcggagtgggcgatgccagcgtgccaggagccatgtctgaccaggacgtttggaagatcatatccatgccagaggctcttgtgaggagatgagtgggtaaagagagaggctgggatgaagatgctgccaggagtgggcgtgtttgggactggcagctccgcccgagttctggtcccactgctgagggcagaagggttcactgttgaggccctgtgggggaagactgaggaggaggcgaagcagcttgctgaggagatgaacatcgccttctacaccagccggactgatgacatcttgctgcatcaagatgtggatctggtgtgcatcagcatcccccctccactcacccggcagatatccgtgaaggctctaggtattgggaagaatgtggtttgcgagaaagcagcaacatcgggtggatgcctttccggagggtgacaagcctcgcgctactacccgcagctcattgagcctggtagggaacgtgctgcgcttcctgcctgccttcgtgcgcatgaaacagctgatttcggaacacctatgtgggagccggtgatgatctgttgatgcccggatctactcaggcaagctgtgagccccaggtaatggtggatctgtgatgaagctcatgggcgggggggcttgcacaccatgggg

SEQ ID NO: 10355 - DNA, 468 bp, Homo Sapiens
tttggcgggggagtggggaaggaaaggacatgaagcaaacagaggaagctgagaaggtggaagtggctttgctggtggtgtgggctgctttcagagagctctctcctcaggcaccacaacttggagaatgtgaatgcttgctttattttcctttcctaacaaaaggaagccttgtctgggagcattcaatcacggactctcctgaaacctcactaatatgtgttcatttcttgtaggcgcgaaatcagacccgggttcattccactggccagaggcagtcttgggaggatttgtgttctggtttattcaactctgggtgcgttccttttaggtcctagtgggctggcggggctaccgcagcacctagtccctcagagcaggccagctaaggctgctggaaactgagagggacgccggctggtacaatacctgctcaggggccctgctcctgcctggccttgcgcaacg

SEQ ID NO: 10356 - DNA, 435 bp, Homo Sapiens
caaggtctccaccaagagcctctccaagaaatgcctgcttctgagcccacctgtggcggagcatgccatcctgcccgcactgaagcagaccccgaagaacaactttgccgagaggcagaagaggctgcaggcaatgcagaaacggcgcctgcatcgctcagtgctttgagccaccccaatctggtcagtgccaggcccaccaacctgcagctggagactggctctctatagcatttcctgatacttccgctacttttaggcctggctaaattccaagacagataacactcaagatagataaagtacttgatctccaaactgacaaactgtttattttctagctgttattttgctatttggcatttacataaaagcacacgatgaagcaggtatcgccttacctgttgaaactgaaaataaagcttgtttatttcc

SEQ ID NO: 10357 - DNA, 613 bp, Homo Sapiens
gggtctggaggcacaacgcccatccttaggccaaacagtacccaaggcctcagcccacaccaagactaatctcagccaaacctgctgcttggtggtgccagccccttgtccaccttctcttgaggccacagaactccctggggctggggcctctttctctggcctcccctgtgcacctggggggtcctggcccctgtgatgctcccccatccccacccacttctacatccatccacaccccagggtgagctggagctccaggctggccaggctgaacctcgcacacacgcagagttctgctccctgaggggggcccgggaggggctccagcaggaggccgtgggtgccattcgggggaaagtgggggaacgacacacacttcacctgcaagggccgacaacgcaggggacaccgtgccggcttcagacactcccagcgcccactcttacaggcccaggactggagctttctctggccaagtttcaggccaatgatccccgcatggtgttgggggtgctggtgtgtcttggtgcctggacttgagtctcaccctacagatgagaggtggctgaggcaccagggctaagcaattaaaccagttaagtctcccagg

SEQ ID NO: 10358 - DNA, 428 bp, Homo Sapiens
cctgggatttacaccacgcctagcccagcagaggccttagtcccatttggggcttgggagtgacatttgcttgaggcttatacactggtgtggttgcctggcttgcaggaaatgaccaagctcacacatgctggctgaagcgtaagcagacaactgaggtactcttttgaaggatgaaggtggtggattctcagccctgggggtcttcctcacctgaggacccttcagagccaccctttctagtttgcatttcctggtgcacacatttaaggcataacagcacattcatccctttggtttgggatctcaggaatacagtcccatgcaaagattctctggttttatggcttttttccctttctttacaccatcctctcccataagcacccatgtctttgaatatgaatgtatttgtaaaataccaaaaa

SEQ ID NO: 10359 - DNA, 735 bp, Homo Sapiens
agcggccgccggcgtctggggcctgctggggccgcccccgccctgctcaaagggctgtggggggctctggccatcggcgggcagcggctcgggggcggccacctcctggatgaccgagccagccccgtccacctcctcgccggcgtcgaaggcggggttggcggcggcactcaggtcaacattcacggcgtcagttctcagagccacgatggtggcggcgtcgccccgccgctcggcgtagatgcgttgctcgaacacctgtgccgcggcgggcgggaactcggggtcgaggggcacgctggcggcggcggagcccatgaccgtgcggtacacctccacgccctccggcagcatggacttgatcttgggcagccagcgcttgcgaacgcggcgggcgttggtgcacatgtccgcggcgatcacgttcatctcgctctccttgaagctgggggcgaagttctgacagtacactgtgaggacggggcggcgtgagctcagccacctgcctgccgggaggcccgcccctccccaaggccacagaaccatgatgcctggatgagcctccccggccgctcctggggcccatgtgaccacctggggctctcctggcctcagccagaagaccagaggtcacgtttctcactgctcggcctgggaggcctccccaccccattcctctggaacagtctctggcctggtcaggcccagcagccttggccgtccgccagctgtgag

SEQ ID NO: 10360 - DNA, 264 bp, Homo Sapiens
ttatcatagcagagaacaaattcgtatgcatgattccagaaacatggaatgggaaatgagaggttctgtatataggtgaactttcagtgataagagccagtcctactaccgtctcgccattccggcccaggatgcagagggtagaataattcacaatcccatccaattaaagacttcattacttggcctcgcatttcctatattctatgggaactgtaattccacaattattttagagttggctatagaaacttctaaaactag

SEQ ID NO: 10361 - DNA, 381 bp, Homo Sapiens
gcctgtcggttgcttggattccctgacgtaaggtggatattaaaaatctgtaaatcaggacaggtggtgcaaatggcgctgggaggtgtacacggaggtctctgtaaaagcagacccacctcccagcgccgggaagcccgtcttgggtcctcgctgctggctgctccccctggtggtggatcctggaattttctcacgcaggagccattgctctcctagagggggtctcagaaactgcgaggccagttccttggagggacatgactaatttatcgatttttatcaatttttatcagttttatatttataagccttatttatgatgtatatttaatgttaatattgtgcaaacttatatttaaaacttgcctggtttctaaa

SEQ ID NO: 10362 - DNA, 516 bp, Homo Sapiens
tcgggtgggcgggggaagctcatatgctgaagctttggtcaggattttctctgagttctaaggaactgtgttttacacacaccaaacccagactcttctcaggaaagagcagatttacttctgatggcgggaagtgattctagtgaggtggagagagacaactgctctagaattttcccctttgctagagctgtctccctctcaatccctccagggaccccaccacaccctcccagctgtctctggaggctggaggagttgagtttggttgacttgaggacttggacatggacctgggaggaaggaaggacctgggagcaacaggagaccccacggaaaggctgccccaggaatgacaagagggacatgctgaaacaggtggggctgcagcgtgcaggcagatgctaggctgggtgggcagggatgcacaaggctctactccatccccagagagctcccaaatgcagaaggattcaaaccccatgtgagcgtgcccacaccagccgcccctcctga

SEQ ID NO: 10363 - DNA, 513 bp, Homo Sapiens
gcggccgcctgctctgcgccatggccgtcgtcctcctcgagctcctctgagtcgtcctcatctgagtccatctccaggctctccccattcacgtgcaggctgctggcgcccaggtccttctcccccttggaacccacagtggaatgagttatgctcttaaacatctcaatcaccgtcctctgttttaatactttggtctttttcttaggaaccaggctataggttcccattcttcgttttttcttccgagatactgcagctgctaaaacaaaaggcaagcaagctgtctgtgattttgtggtggccatgtagcactggttctgaggtagcgactgatgaagggatgggaaggggggtaaaagctgctgtcgtccaaagtcagaaatggtttttgttgatctcctcttttggttccttatgatctctagcttctcgaacttttctgggatctttactggctgcatgcaggcccacgacggacttcggcatggtcttgcgtgccctgtggacctt

SEQ ID NO: 10364 - DNA, 123 bp, Homo Sapiens
  misc_feature (26)..(26): n is a, c, g, or t
agcccgggaggaggaaagagcatganccaaggccacagagtggggaggcttgggagggtcagtaaagaccagcgctcatccatgagaacacagatgcgaacgagaggcccaggtaccctcatc

SEQ ID NO: 10365 - DNA, 283 bp, Homo Sapiens
ggatcgcgcacagtcagccagcgaatgtcatctcggaatcagcgggagagggctgctgtcatcaccgcgggcgtaaagcggccatcagccgttctgtttcctcagccgccattgggcggagcttcaacttcgggcgcggcgaacgccaatgtaccttcctgctggatatcgaccgccaccaggccgacgccgcattcctgcatcaccatcccaggccgtttaggcgtcaaaccggcttccagcagggcgtgagcggtgcccagcgttgggtgcccggcgacgg

SEQ ID NO: 10366 - DNA, 494 bp, Homo Sapiens
atcgtaaatcatccttccacctaccctgagataaatgcagcatggccctattcccctactccctcttttcatgtttactttatgttatgtaaaatccagatttactgagctcaagatgaatgcagcataaactctttactccctcttttcacctttatcttatgtaaaatgtggattcactgggcttaggatgaatgcatcacagactctactccttttcaagtgtactttatcttgcgtaaaatgtagatctactgagctcaagatgaatgcatcatggactcctctactcttttcacatgtttatcctatgtaaaatgtggatttactgagctcaagatgaatgcatcatggactctgtactccctctctttcatgtttatctctatgtaaaatgtagatttactgcgcttgagatcaatgctacatggactcctctactccctccgttgcatacctttatcttatgtaaaatgtagactttccgtatggat

SEQ ID NO: 10367 - DNA, 271 bp, Homo Sapiens
acccatatcaattgtaatcgtgtccatcaagctatcaggtgctatgtttgattggacttaaggtgaccccatgatcccagcctcctggtgttcaggcgtttctgggatcccctcccctggtgagtgggacctgtgactggcttccaaccaacagaacacggcaaaggggacggggatgtccagagctagctttggagtctctctccgttgctggctgtgaagaaacaagttgcagtgagtccatacctgcaagaagcgcagctatctgtcg

SEQ ID NO: 10368 - DNA, 886 bp, Homo Sapiens
ggccggcggggtccgtggccagagctgcagagagacaaggcggcggcggctgctgtgctgggtgcagtgaggaagaggccctcggtggtgcccatggctggccaggatcctgcgctgagcacgagtcacccgttctacgacgtggccagacatggcattctgcaggtggcaggggatgaccgctttggaagacgtgttgtcacgttcagctgctgccggatgccgccctcccacgagctggaccaccagcggctgctggagtatttgaagtacacactggaccaatacgttgagaacgattataccatcgtctatttccactacgggctgaacagccggaacaagccttccctgggctggctccagagcgcatacaaggagttcgataggaagtacaagaagaacttgaaggccctctacgtggtgcaccccaccagcttcatcaaggtcctgtggaacatcttgaagcccctcatcagtcacaagtttgggaagaaagtcatctatttcaactacctgagtgagctccacgaacaccttaaatacgaccagctggtcatccctcccgaagttttgcggtacgatgagaagctccagagcctgcacgagggccggacgccggctcccaccaagacaccaccgccgcggcccctgctgcccacacagcagtttggcgtcagtctgcaatacctcaaagacaaaaatcaagggcgaactcatcccccctgtgctgaggttcacagtgacgtacctgagagagaaagggctgcgcaccgaggggcctgttccggagatccgcagcgtgcagaccgtccgcgagatccaagaaggtctacaaccaaggaagcccgtgaactttgacgactaccgggaacattcacattcc

SEQ ID NO: 10369 - DNA, 368 bp, Homo Sapiens
tcgctctgaaatgtcctccccctccattaccctggcaggcttctacttttccttcagacttcggcttctatattactttaggtaacaagtccctgacccccttcctccaaatctaaatcaggactctcatttttaaaagtgttaacttgttgctatatatctatttgtgttggtattcattaaatatcttttgaattgacacataactcatgaagagaccttctcatttgtattaacatccagctcatatttttcatttttctgcaagaacagcttgccagataccttgcgtgccgtccagatacataatctctctcttaattttttcactttctaagtttttaaatctttcaagaagcaggaactgg

SEQ ID NO: 10370 - DNA, 538 bp, Homo Sapiens
cactaaacgcagaacacggagcccctcgcaaacttctcgaatgaatgaccgaatgaaggtcgttttcaagacctctgccccttcccctcttagaatctctaaatctcacacttgcacttgctctggaggggatgaaacagacactgccagggcccggaggtctacgatgtttatgctgaggcccagggagctatgcgggctcaggatccatgtggatttgttaccctgaactcagcggtcagggcctgctggtgaatcagcaaaacctccggctgtgcttcattccagggaggaaacccagcagccccgtcaccgtctgcatttccgctgacgctatcactggagagggagacgtggagtccatgaaaccagccctccgaacagaaataagcacccggcatcagtaaagcacaggacgcagacttcacctctgccagcgtttcaatcccagaagagtcctgcgggacagattctcacagtccccagtggccccatccatgactcctgctcgccccccacgtttcccaatgaggacgag

SEQ ID NO: 10371 - DNA, 878 bp, Homo Sapiens
tctgctctgaatctgcttcgttctctcttcttctatttgactttatcttcatctgttttttcttcatagattctttctttcggattttctcttcttccagggattggtgctggcctcgatccttgctccagttcctccttttctgccactttcttccagatgtctttagtctgctggttatccggagcctgcagatcatggtactgtgattttgttttcaagctattggtgaattcttcagagtgagtttttctgggctcttctgcctcctgttctgctttcagccgggccctctcagcaataatttcattacagagcacatcatagggtttatctagatggtgttcgcccatcacccatacccagacttccttatcagctccaagtttccaatgaaccgatttgccattctctttctttggtctgggtttcactggcagggactcctttctttccatagctgcttctctttctttccatcgtcggatctgttcctctctcatcttgaagaacaggatctgtttctgttcttcgctgtgctctgccagtagatcaggatctatgtacatctccgacagtatctgtttcagcatctttgcacttctgaagtcttttatacttgtggcaaaagttcctgaaactggcctccaggtgtccctccacctgtgctggcacttggccgtttccacgaaacttcccaaacagctcacaatcctggctgactgggacaataattcagcaaactggctactcagacctggcaccaaatgtcctgtccaaaatgctgttcactgaaccagtgctgggcgcccctgggcagggtggctccgatcacccgccacatccactttggccgcagaagccgtcgggaaagggca

SEQ ID NO: 10372 - DNA, 438 bp, Homo Sapiens
gtaggtgcaatgaacacaatgaaaggcgaaagttctgctgtccgaacaattttcagggtctggggctcaatgtcaaggatggcaatcttgttctgcttatggatctggtgcactgtttcaaatttggtaccaaacatgtagccttggtagctgccaaactccaagaactcattggcagagatgttcctcgtcatctccgccgttgagataaagtggtactccttcccatcgtcctcactcttccttggcgcccgtgttgtatctgtgtacaagaacccaaatccccgacaaactccaggtcctcaccctttcatgagggcttggaccatggtgtctgtatggaaaccctagctgcctttggtgcattgactttaaatacaggggttccttcccgtgggctcctgaagagctgatgctagaaagtgatgcacacccaga

SEQ ID NO: 10373 - DNA, 512 bp, Homo Sapiens
  misc_feature (61)..(80): n is a, c, g, or t
tatgcgccagggtcaggaaaaaaatgagttcataatacatttgttacgattagaaggaagnnnnnnnnnnnnnnnnnnnngatggcatgtgtcgaggcaagaaaatagacaacatattccagaatgaaggcaaagaattataagaggataaaacagcagtaactaaaaatgataagtaagcgataaacacaatgatgagtaaaatgtctattcctgaatccgagacggtgcttcacaaagacagcctcagaggccacaattccaaagcttttttctacgtacagatattctccccgatgcctgggttaatggcgcccgaactgcagaaaacataacctcaaccgagttttctgcttcaatgacaaatgacaccagagccccaccaccaaaccatggctggcatctatttagttctgagcactgctctgacagaatgcatcagtcttgctttgctctcagcaaaactgggtgcagaggggacggctgttagcctggtcgttgttacacattct

SEQ ID NO: 10374 - DNA, 628 bp, Homo Sapiens
ggagaaaactcatcacctcccccaagaaagacctctgagagccgagacaagctgggagcgaaaggagattttcccacaggaaagtcttccttttccattactcgagaggcacaggtcaatgtccggatggactcttttgatgaggacctcgcacgacccagtggcttattggctcaggaacgcaagctttgccgagatctagtccatagcaacaaaaaggaacaggagtttcgttccattttccagcacatacaatcagctcagtctcagcgtagcccctcagaactgtttgcccaacatatagtgaccattgttcaccatgttaaagagcatcactttgggtcctcaggaatgacattacatgaacgctttactaaatacctaaagagaggaactgagcaggaggcagccaaaaacaagaaaagcccagagatacacaggagaatagacatttcccccagtacattcagaaaacatggtttggctcatgatgaaatgaagagtccccgggaacctggctacaaggctgagggaaaatacaaagatgatcctgttgatctccgccttgatattgaacgtcgtaaaaaacataaggagagagatcttaaacgaagtataaagcgttgag

SEQ ID NO: 10375 - DNA, 464 bp, Homo Sapiens
agaatgtgtaacaacgactggggaaggatattataagcaaagtgggagggactagatttgcaaaacatcctgtcacggataggcagcaccactctaaattccaacagtgaccctgctgagaaatatgcctgttaactaccccaaaaggtttataaaaagcatcaggatcgctgctcattctacgttaaccttgcatttcttatttggaaaatccttccacatatagaaaagtgaaagaggatgagaattgctcacaattgtgacctacattttgtgtcacgagttggctcaagaaatcgtaacaatgaagaacttgttccgggctcgggtgtgtgggtgactgaagtgacatttttgcttagatcatcagctatgcagctgcggatcatttgctcggtctcccctaacaggtctcccatataaacctatctctaatgacaatctacagtatactatcttccaca

SEQ ID NO: 10376 - DNA, 327 bp, Homo Sapiens
cgagcggacccctagtttagaagttcaatagcattacaatttttccccaatgaagcaaataaatcccatttgtacttaccatttactgggcactacagtgccaaaacactatgctatttacaacaggacctcacttaatccttaccatgtcccgtggaatacagataacttcattttatacatgaggaaacaggcttttaagcaatattcccaagatcacacagatagtatattagaaagtaaagtgttcagctgcaaatacaaatagtggtttctttctccccctgtcccctccctgccactgctattgaaacttctaaaactagg

SEQ ID NO: 10377 - DNA, 496 bp, Homo Sapiens
tcttgggctttgcagcagatttccagttacatggaaatctatttgctttgggagtggggccaagacaaatatgcccaagtgtaggatcattacgctactgtgaattaaaaagaagaaatcacattcaaatccctggagttagaagagttgtgagttccaatgtggtattatcactccaagttatactggactcctgagttctccaaaggaaccctagtggtaccttgtaagtctacaggaagacaaattggtatagttgtagtggagggcttggtgaagcttgctatgtgtcctcaattagggagcatgatctgagttcttaatgtggctctggttataagcccttgctcaaggcaatgagagaagaactccatcctatgatctgaagttcaagatgtcaaagaaccgtgatataaatctgccagtgtataccttgggcagtggggaacttgggaaaaaacataaattccatttgcgatgcaaagtagaatattgc

SEQ ID NO: 10378 - DNA, 442 bp, Homo Sapiens
  misc_feature (113)..(157): n is a, c, g, or t
  misc_feature (176)..(353): n is a, c, g, or t
agaatgtgtaacaacgacctagctgagcgggtgttgtggacctgtagtcccggcttctcaagaggctgaggtgggaggattgcttgagcccaggaagtcaaggctgcagtgannnnnnnnnnnnnnnnnnnnnnnnnnnnnnnnnnnnnnnnnnnnncagcaagaccctgcctcannnnnnnnnnnnnnnnnnnnnnnnnnnnnnnnnnnnnnnnnnnnnnnnnnnnnnnnnnnnnnnnnnnnnnnnnnnnnnnnnnnnnnnnnnnnnnnnnnnnnnnnnnnnnnnnnnnnnnnnnnnnnnnnnnnnnnnnnnnnnnnnnnnnnnnnnnnnnnnnnnnnnnnnnnnnnnnnnnagtaaaagataataccaggatttgaatcctagacagtctgactccagagcttaagctttaactgttataccataatgcgtgcttcatag

SEQ ID NO: 10379 - DNA, 418 bp, Homo Sapiens
ggtgtacaccctcagaaggactaactaggctagagggaggctgatggtcgcgggagtggaaggcagaggagcaggagatgagtgagggctgctgtggtcacctggcaggtgatggcagctcgactgggcaggtggtccgaggcagcacggaggtggaggttgagccaggggctgctctcagggaagggaggaggcgaaaggagtcatccaggaggcctcccaggcgggagctatgatgtcagggcgggaggaattctatgttccagtgcctgctttcattttgggtatatacccaggcatggaattgctgaatcatatggtaattctgtttttaattttttaaggaatcatcatactgttttccacagtgaccacaccattttatagtcccagcagcaatgcacaagggttagaattt

SEQ ID NO: 10380 - DNA, 396 bp, Homo Sapiens
gcatctcggatggaacgtgaaatgtgctcctcccacagatcgaagaacaccttctggtctccgtagtcaaatgcagcgacaagatccttctgaagttgtcaatgattcggagtctctgaacagatccgcctactgttttacacaatggttttccttttattgtgcattcttttgaaaatgttttcaaggtgtcttcaaattcagcaaaatctaaatactctttcactagtccaagtaattcagattcatgagccagaatgtcccccatattgaactgttactggtaattaattctcacagcaaaaatctgggaagcagctgggcctgtcctttcttgggatgtccaggcggccgcctcggcccttgccgaagcttgatcacgtgatcaagcttcgg

SEQ ID NO: 10381 - DNA, 422 bp, Homo Sapiens
ggtggaaatatggagatggaaatgaaaaagtccagtaaacgtgccctcctaacacgagaataagaaaggtggctgaagtagaatatttcagtgacggaggggatgaaatatattttggttaattgatgtaatgatgactcactatgccttatttcctatatttaaaaacacagaatgagcaagtcattcctgaacaaaaatttactgtgtgtataacatacacctcaaaatgaattttaagggaacatattactaatcaaataacacagtttatgctttttcaatttccacaaatagttaattatgatacttaagggaacccttacaatatataacaagtcatttcaatattattcatcatccttaacttctgaaagtttggtctatgttatcttatctagaaagaaaactacttacaaatc

SEQ ID NO: 10382 - DNA, 594 bp, Homo Sapiens
  misc_feature (1)..(1): n is a, c, g, or t
  misc_feature (334)..(361): n is a, c, g, or t
nggaaatgcattaaatagaaggttgatagtttatcataaacctgcggggaagaaactcagactttctatttttgatattttgtgcattaatacattacaaacatgaagatgtttgtaaagttttgttttagtcattttctttgcagtcacatcattgtaccaccttcattattgtatagagctgcttcaattctgagtcctctggacttcccctgcctatctgtttgttgttgttgttgaagacagtaaaataagtgttttcaaatctatatgtctcctttttgttggataatgtttcttctttttaatggtaaatattcttgttcttcaacannnnnnnnnnnnnnnnnnnnnnnnnnnnaggaaaaacaaaacaacagacttcatccttaggttttctcaagatttaagtgaacacatttacacatatcaattttcttaaagaacacaaaatgtttccctccctagcaaaactatttaacgaggcaaattaaactatgaaataggttataaaaatattttttaatattttaaaggccttgaaattataatttcaagggaaaatctaaatgggggggaagttgtatatgccca

SEQ ID NO: 10383 - DNA, 935 bp, Homo Sapiens
  misc_feature (459)..(467): n is a, c, g, or t
  misc_feature (574)..(657): n is a, c, g, or t
  misc_feature (760)..(768): n is a, c, g, or t
gggagcgacaggtggatgctgcagaagggctttctgaaggaggaggacctcacggagaagaagccctggtggtggcacctccgtgttcaggagctgggcctgtcagccccgctgaccgtgctcccgaccatcacctgtgggcacaccatcgagatcctccgggagaagggcttcgaccaggcgcccgtggtggatgaggcgggggtaatccgtgggcaatggtgacagcgtgggatacatgctctcgtcactggctagccgtggaaggtgcagccgtcagaccaagttggaaaagtcatctacaagcagatcaaacagatccgcctcacggacacgctgggcaggctctcgcacatccctggagatggaccacttcgccctggtggtgcacgagcagatccagtaccacaccacccggggaagtccagcccagccggcagatggttgttcgggggtggnnnnnnnnnattggaccttggcttgaacctttcgtggggccgccccccaggaagcggggacccaaaaagtgaaaagtcccggaaacccctgtgggccggtggcgggaaaagggggnnnnnnnnnnnnnnnnnnnnnnnnnnnnnnnnnnnnnnnnnnnnnnnnnnnnnnnnnnnnnnnnnnnnnnnnnnnnnnnnnnnngcccggggaagtttggggtaacccctgcgcctgggcccttgggcaaacccgttttattcccctggcgccacccggggacccacgaaagccatctccggttctnnnnnnnnngcgtaaaaaccaatgggctttcccctaaaatggggcccctggtttttacccgtccttatcaaaaccagaaaaaaacccggaattcttcccccaaagggggaaccttccccccttaaggaaggcttctccccccaggggaaattttttcgacgaaaaaatacccccgc

SEQ ID NO: 10384 - DNA, 816 bp, Homo Sapiens
  misc_feature (203)..(203): n is a, c, g, or t
attatcttggaaaagccaaaggccccagaggggagggaagggcttgctttgacctgttcccccaattaagttttgggggaattggaaacttttaatcaacccaaaggtgggtaggggcccatttgccaggcaaggagaaagccaaaaggcttcccttggggatttgccggctgccttttgcactggcgaaagggagggggcancgggttatgttgtttccattcgacagtccttccaaaggcttccctcccagcgccactaccaaatccagaaaagcgtcctcctccagaaggtaccaccaaacctttaaaacctttaaaggctcctccagtgtcagattcaaatccaacatttctgcgctttgctttctttatggctctattcttcaagacttcctcactggccatggagaatgttcccacctcttcagcttcatcttcttgatcccaattcctatctgtcagttccttctcggcatttcttttggccatgttttcgaacctcctcggcggccgccgctgcactcgctgggtcttggttgcggcgaaacccggggcgcagcggcgcaggggtctggagcccgcaggggtcgccgggctgagcgcgctcggccgcttccggtgctgcgctgcggaactcagaggacttagtgctcggcaagcccagagactcaaacaccatatccctgggggggctcctcacgctgtgttcggcagggaggcgagagcgccggttcagccagagacagctgggggaaccgcgccgaacacgctccgggcggccattttgtaactcgaatctacccccaaaaacccc

SEQ ID NO: 10385 - DNA, 808 bp, Homo Sapiens
gaggctctgcggagaccaggagtcagactgtaggacgacctcgggtcccacgtgtccccggtactcgccggccggagcccccggcttcccggggccgggggaccttagcggcacccacacacagcctactttccaagcggagccatgtctggtaacggcaatgcggctgcaacggcggaagaaaacagcccaaagatgagagtgattcgcgtgggtacccgcaagagccagcttgctcgcatacagacggacagtgtggtggcaacattgaaagcctcgtaccctggcctgcagtttgaaatcattgctatgtccaccacaggggacaagattcttgatactgcactctctaagattggagagaaaagcctgtttaccaaggagcttgaacatgccctggagaagaatgaagtggacctggttgttcactccttgaaggacctgcccactgtgcttcctcctggcttcaccatcggagccatctgcaagcgggaaaaccctcatgatgctgttgtctttcacccaaaatttgttgggaagaccctagaaaccctgccagagaaagagtgtggtgggaaccagctccctgcgaagagcagccccagctgcaggagaaagttccccgccatctggaggttcagggagtatttcgggggaaaacctcaacaccccggggcttcgggaaggctggaccgaagcaagcagggaggttcagttgcccttcaatccttgggcaaacagcttggggcctggcaacggcattggggcctgggcaccaaccccggggttggggggccaaaatcccctg

SEQ ID NO: 10386 - DNA, 572 bp, Homo Sapiens
agaggcaggaaggttagtttagagggtatgaacatgatttgccaaagaggtaataaggtttggactacatttatgtcagcaaagaggagaggacagattaattcattcaataagtgattgagtagatacctactggtgtcaggcattgttctaggcactgggaatacagcagcaaacaaaatgattgagtagatacctactggtgtcaggcattgttctaggcactgggaatacagcagcaaacaaaatagatcaccccttggggctttcaagtggagtatcggtgacagagtgggtgtctgattggatatcggggaaaaggagaaaggtgcgatgaggcaattcaggggtcattggtacctggatttttcaccttgaacaactaagtgatatcattggacttgttgggtagacaaggtctaggggacatcaagatggactcattttcacagctagcaagagagacattctgaagatcaatagtaggggagaaactggaagtacagactttggggtcctaagaggcagttagaaccatgggagtagatgatgctatctaggaacgtgagatg

SEQ ID NO: 10387 - DNA, 963 bp, Homo Sapiens
ttcgccaccatccttacgatggtaatcctgtgagtgcctgatggacatctatctttgtgtttttctcaaaccatggaaggttgagaggaatatacagtatctgggggctgacttactctactagctaggggcatcacagcagagagataggacagagaccagagtcatgccagcttggggtcttgggaagagaggcagatggttactctgttctggaatgggactctgcagctctatgcagtggccaacattctgagcactttgtgcaaatgcttgtagagctcaagaacatctccatccagaaccccttccccatctgcagagaccatgtccaggcctttcttgtgtctgcagaggtgaagtgcacatgtggaaagggatcaaatgtagcacagtgtaaagaaagacagcaacacaggtagagggacccagtgtgtgctggtgaggtggctgtggaaggtaagtatagacctacatctctgttggggaggtggtcagggcagaatggcctgggtgtttagcagcttctaggggtgagggtggcaggaccccaaaaccaaggccctctgcatcgttgttgtaataatcagctctggcatattcagctgcaactgtccctgaagaagaggtttctgagctggctgaccccatgtaggagggtgttaccttgtagaaaaagctggagggacctggtgggacagtgcagtgaggcagggtagaaatggtcagttgtttagggccagtggccacataccaaaataccaccaatgtgcccagggccaaactgccttaattctgagtgctgtgtgttctgcaggtgacagtttcctgaggagaggggtgtatccaggcttacctcccagcaggagtggtaccatatggtgtttatgtactactctatagaactcttggcttgcacttctacagctctgtacatttataagaataaatgcaatcacacta

SEQ ID NO: 10388 - DNA, 1052 bp, Homo Sapiens
gcggccgcgaccgagtcatggctgagacctacgacttcctcttcaaagtcctggtgattggcagtgcaggaactggcaaatcatgtctccttcatcagttcattgagaataagttcaaacaggactccaaccacacaatcggcgtggagtttggatcccgggtggtcaacgtgggtgggaagactgtgaagctacagatttgggacacggctggccaggagcggtttcggccagtgacgcggagttattaccgaggggcggctggagccctgctggtgtacgacatcaccagccgggagacatacaactcactggctgcctggctgacggatgcccgcaccctggccagccccaacatcgtggtcatcctctgtggcaacaagaaggacctggaccctgagcgggaggtcactttcctggaggcctcccgctttgcccaggagaatggagctgatgttcctggagaccagcgctctcacaggcgagaacgtggaggaggcgttcctcaagtgtgcccgcactatcctcaacaagattgactcaggcgagctagacccggagaggatgggctctggcattcagtacgaggatgcgtccctccgcaagcttcggcagcctcggagtgcccaggccgtggcacctcacccgcgtggatgctgagctctgtcgagccagctcacctgctctccaggaccagccctgctggggcccaggcccaggctctgagaggccgtgtcctaacctgccctggccccggagaagctacgttgccacctgtcccccttccctggcctggtggggcctggctttggggcaagactgagccacgggggaagggggaatcccgtacctgctgctgcttcctctgtcttggctaacgtctgtccccctgaacccctaaccatatcccaagagctcccaaagcctgagaccagggtcatttgtccccaactccccatctggccctgctgttgctagtacctgttatttattacctggaggcctgtccagcacccaccctacccccataaagcattgtttacacctgtgaa

SEQ ID NO: 10389 - DNA, 553 bp, Homo Sapiens
gtacgcgaatacatcaaatggcttttacttcaccctaagaatattaaagacttcatggatcttgaagctgtccacgatgtcttggatcttaacttgtggctaagctaccgatttatggatatgtttccagatgccagccttattcgagatctcaagaaagaactagatggtattatccaagatggtgtgcacaatatcactaaattgattaaaatgtctgagacgcataagctgttgaatttggagggctttccatcagggagccagtcacgattgtcaggaaccttaaagagccaagctagaaggacacgcggcaccaaagctctagggagtaaagctactgagccacccagccccgatgcaggagagctgtcccttgcttccagattggtgcagcaaggactcctcactccagacatgctgaaacagctagaaaaagagtggatgacacaacaaactgaacacaacaaagaaaaaacagagtctgggactcatccaaaagggacgagaagaaagaagaaggaacctgattcggactagttttctgttcctg

SEQ ID NO: 10390 - DNA, 763 bp, Homo Sapiens
  misc_feature (261)..(261): n is a, c, g, or t
gggggaaatcacggggacagaggaggaattcacgggatcagagcactgagaaactccagaggcttctggttcaccgccctgattccacagatgtgggtcagaggcagagatggaagttggaatggacaagccgtgccctctcctcagctctccatggctctgtcctcaggctgtttctgcaatttgacatgaggcctggccccagggtaaaccatgtggggcctcatctccttcccgtgtgctgctctgagtgtggagccnttctcagggttcagtccatgctctggagccccttctccagcgtcggtcaccaaatgctgtctggtcccagggcggtgtggagtgacaggcacgccagccaatccaatcggccatttcatacccaatgcatgtgactgataaagagataacaccctgtctccaagacacaggctttacataaacagctttaatgacttcttcacttagggacaagactccttagtggtggaacctcaggcatccatgcaggatgtaagaaacctcccgtatatacatgaactgagaagtgtgtagaagagtaaatactgtaataggtagtaaaatggatggatttttatttatgcgctactttggcctttctccctctctggggatatacccatacataccaaaatggatttccttctatgggaaacctggaaagatgtaatattcctttacatatgaaaatttaaattaaatgaattttttttccggatcctattgaaccccccaaattata

SEQ ID NO: 10391 - DNA, 1045 bp, Homo Sapiens
  misc_feature (163)..(173): n is a, c, g, or t
gggagcttctgcagggcttctcttgtttacacagctgcatcagacaatgccatttctccccaccacggaaccttccatctaagatttcttccagggaatgccagcaatcaggcagcacccagctgtgggggcagtggggtgggggagacccacattgatgacnnnnnnnnnnncttttaatgaagaaacaccaaagaaagctgtggaaaggacctgccccacatgaaaaggataagccaagatggctgtaaacacagagcatttgagctgccactcttggagcacattgatttttcaaaagccagctctgtcaggaaaggaggtgctgttatgagcagctcttccagtgggcaaagaggacgcccataatttcttccattgctagctcatctgtgggaccaatttggtgtaagcaacctgtggcctgcacttgtggcctcgaaggaagcacaaaccctccatccacttcccatttcctctgcccttttccacctcccccttccatcccaccagctgccagtggctcccagaaagccttattgagccccttgttgacacttggggctgcggaggcctctccctactggtctggcctttcctgagaggcaggtcttccgtcctcagagcctttctggaacaaggagaatgcctgtgcaggtggacacacaggcctggcctgtcgctctcacttgtcttccagcggggagcttcacgttgccgagtggaagaaccatgacctccacttgcttccaaggtgctagggaagtttcagggtacgctggttcccctctccagctggaggccgagtttctggggactgcagatttttctactctgtgatcgattcaatgcccgatgcttctgtttcattcccgaccctttctactatgcattttccttttatcaggtgtataaagttaaatactgtgtatttatcactaaaaagtacatgaacttaagagacaactaagcctttcgtgtttttccacaggtgtttaagcttctctgtacagttgaaataaacagacagcaaaatggtgccaaa

SEQ ID NO: 10392 - DNA, 463 bp, Homo Sapiens
tatgtctataatttatattcttttgtttacatgatgaaactttttgttgttgcttgtttgtatataatacaatgtgtacatgtatctttttctcgattcaaatcttaacccttaggactctggtatttttgatctggcaaccatatttctggaagttgagatgtttcagcttgaagaaccaaaacagaaggaatatgtacaaagaataaattttctgctcacgatgagtttagtgtgtaaagtttagagacatctgactttgatagctaaattaaaccaaaccctattgaagaattgaatatatgctacttcaagaaactaaattgatctcgtagaattatcttaataaaataatggctataatttctctgcaaaatcagatgctcagcataagcgatggataatacctaataaactgccctcagtaaatccatggttaataaatgtggtttctacattaaaa

SEQ ID NO: 10393 - DNA, 377 bp, Homo Sapiens
cttgctcaggaaataagccactacagcttctgccccttatgccatagtccagtgggataaaggaatgataaactgtatataactgtaaaatatatgtagcatatatacatggctatatgctgtatatgtaataaggtttatttctgtgagttttgtatgaaaatcagcctcattatttatagttgaatttttgcacaaaatatatgttaataaaataatttttatggcaatacaactgtgaaataataaggccgattttcatataaatgtatgaaaatcaaccatgttttctctcaccctctctcttttgtttatcttgtttttggttacatgataccatggaaatattccaaataaattttttctcacagtgaaaa

SEQ ID NO: 10394 - DNA, 605 bp, Homo Sapiens
ccaccactattaatttccccatatgcttcaaccacccccttgctcaaaaaaccaatacccacacttaccttaatacaaacatcccagcaacagcacatggcaggccattgctgagggcacaggtgctttattggagaggggatgtgggcaggggataaggaaggttcccccattccaggaggatgggaacagtcctggctgcccctgacagtggggatatgcaaggggctctggccaggccacagtccaaatgggaagacaccagtcagtcacaaaagtcgggagcgccacacaaacctggctataaggcccaggaaccatataggagcctgagacaggtcccctgcacattcatcattaaactatacaggatgaggctgtacatgagttaattacaaaagagtcaaatttacaaaaatctgtacacacatttgaaaaactcacaaaattgtcatctatgtatcacaagttgctagaccaaaatattaaaaatgggataaaattatacatttctcttctcagttcttttcaaaaggattaatatttttaaagcacatatatgctactttccattagcaagacccatgaagggactgagcagcccc

SEQ ID NO: 10395 - DNA, 442 bp, Homo Sapiens
acatcttccaccactccctgcaccatcagcatgcacggagcgcataaaaccaagccctgcttccttaatggccagtggaaaccctcggatggcctccatcaggtcaataccaactgaattgctgggctgacttaagattgaaggactccatttttagtaagtagagaagtgtgacctttctcaacccaggttgtgaatgtggattcacacttatctcaaaaaggcacctggagttttaactttatgtcatgtctcagtactggttgcaaggtatgaccaaaagtgttccttgaatggcacctttttgaatattaatttagaagaaaacatgccagactgacatacttaccccctccgcactgttactacttccttaccagccctatgtactgcatcaatgtctacaagaaagcactcttcattaaaatgaaatatatatatt

SEQ ID NO: 10396 - DNA, 344 bp, Homo Sapiens
tctttgttgttgacttgagtcccttatatagttggatactgctgtggcctgaatgtttgtgtcccccaaaaattcgtatattgaactctcatccctaaggtcaacagtttagggaagcgattaggtcctgaggactctgccctcttgcatagaattagtgctcttataaaagatgcccgagggagctcttttgcccctcctgccatgtgaggacacagctagaagctaccatctgtgaaccaggaagcccccctcaccagacactgaatctgctggagccaccatcttggacttcccagcctccagagctgtgagaaataaatgcctgttgtttaagctaaaaa

SEQ ID NO: 10397 - DNA, 343 bp, Homo Sapiens
tccgagctgtgtacccctagttttagaagtttcaatagcagctagctactgcttcaaagtaaaagtgtgggaggcagtccccttaaaacaagaaagatgaggatgcctctagcagatgacagggtaattgggcaggaagaacatttatgtctgttcaggagatggaacagcagaaaggctttgacgattaagaggcacacccagtgagccggcccagcgcagagttgcacaaagaccaccagctttcttgcacaaggatgatggccaagtgggaaatataataagagaatgctattgaaacttctaaactaggggtacacagctcgattcgtatcatgtctac

SEQ ID NO: 10398 - DNA, 506 bp, Homo Sapiens
  misc_feature (48)..(48): n is a, c, g, or t
  misc_feature (144)..(144): n is a, c, g, or t
gtccagcatacgaggacgtggctgctctgcacacttagggcaactacntgttttacagaggggcaaaagagggcccagagtgatctctcatccgctctggccccaagcactatttcttccttttccactagggcccctacatgnctgtagcctttctcactcattccccaccaaaagtgctcagaccttgtctagctacttacaaaactgtatgtacctccctcacttctctcctatcactgctttcctactctccgtttatctcactctagtccaggggcaaagaatttcccttctaccctctattctcttgtgtctgtaagttacaaagtcaggaaaagtcttggctggacccctttcctcctgggtggatgcagtggtccaggactggggtctgggcccaggtttgagggagaaggttgcagagcacttcccacctctctgaatagtgtgtatgtgttggtaaaatgatactgaaaataagtaaaatgaaaatatgaatcctc

SEQ ID NO: 10399 - DNA, 382 bp, Homo Sapiens
cctagttttagaagtttccatagcaagaataaaatgtaatagaatgttggtaatgtgcttcgcccagtactaggtgcttaagtactagataaatattaccgcttagttaccgtactacaattttattttcctaccctctcgccctgttttagggtaacaaaaacatgataccaattacaatgaaaattaaactcccaatatattcctgcacaagaaaaacaatttgatacataaccttccaaatcattctctgttaactgacttgagagtcctcgttttcagaaagataaaagtcacttccccagtgtctctggtgtgtcagttctaaagattcactagagttgtgctattgaaacttctaaactagggtaccgactcgatc

SEQ ID NO: 10400 - DNA, 975 bp, Homo Sapiens
accccacagcctgcatcctgcccagatgtgtccagctgcagggggagcctcaggaaaaccggctgctgctactcctgtgaggaggactcctgtcaagtccgcatcaacacgaccatcctgtggcaccagggctgcgagaccgaggtcaacatcaccttctgcgagggctcctgcccggagcgtccaagtactcagcagaggcccaggccatgcagcaccagtgcacctgctgccaggagaggcgggtccacgaggagacggtgcccttgcactgtcctaacggctcagccatcctgcacacctacacccacgtggatgagtgtggctgcacgcccttctgtgtccctgcgcccatggctcccccacacacccgtggcttcccggcccaggaggccactgctgtctgagaacgttctgcctccatccccatgctctgtccacctggagccaggatgtgcattgtctgatcatgaaaaccttgggcctcctctgcggagccccccggcctgtgtgtggcaccccgcgctccgtgctcctgctgcccaccccgtgggtgaaaccggccccagaagggtgaggggccagcaggacccctttcgggagggcgccactcaggagtcctaccctgggagagcctgtggcccaccttggccttgcccctccctgatgtcactgggacgccctggaacaaactaagcatgtgcgggcctatgtgtccctgccacggccggagcgcccgcgcagcacggattccagctggccacgtccggccgctggggcagacaggctggtccaggcaaggccagctgctgccaggaagctgcgacaggcaaggcggccgcctgtccatgcctgctgcagggtaactcagggctgaggtcgcaacggccaggtcagagaggggtcagcatcccaaagccccctctgctcaacccagcccagttttgcaaataaaccctgagcattgagtacgtt

SEQ ID NO: 10401 - DNA, 268 bp, Homo Sapiens
agaagttcactagcactagtaagaagtttcaggtaagaagctggcaatgacaataaaggtaaataacgtacaggtgtccctgggtatccatggggtataggttcctggaccgtccccccaacccacagacaccaaaaatccaagtatactcaagtcccttacataaaatgacatatttgtatataaccaacgcacatccgcctgtatactttatccctagactaatacctaatgcaatgtaaatgctattgaaacttctaaaactagg

SEQ ID NO: 10402 - DNA, 603 bp, Homo Sapiens
ccagccagcgctttcagaagggcacagagcccttgggcccggcggaccagttcgaggtgggcccagacagcctgaagcccgaagttgaaagagctcggacgaggagccggtggagtccagggcccagcggctccggcgcaccggattgcagaaggtacagagcctccgaagagccctttcgggccggaaaggccctgcagcgccaccgcccaccccggtcaagccgcctcgccttgggcctggccggagcgcagaagcccagccggaagcccagcctgcgctggagcccacgctggagccagagcctccgcaggacaccgaggaagatcccgggagacctggggctgccgaagaagctctgctccaaatggagagtgtagcctgagggctggtgttgcctgcctcccctgtgcttgtgccttgtcccaaaataaatcctttcagaatgtagcactcacgccctaataaggagcgaatcctacatccaccaaggcgggcgctctggccctcccttccttaagcccagtcctgtgtcctctgaaagaggtgcagtcactcacacctgcttgcgctcaccatcaataaaagtaatttcacccgaaa

SEQ ID NO: 10403 - DNA, 322 bp, Homo Sapiens
atcgaagtcgagccggtcgcctagttttagaagtttcaatagcaaaacaggatcataataggaaggtagacggagaaagttttttttactggagacctgaggtagatcatgaatgacaagtcaagccacaatgaaggaggggcacatctgacttcaggaatgtggcatattaagggaacaatgaatctcagtaaaaattgtgtgtttctaaaggatttaaatggccactgaagaaaatgacttgaaaagagaaccctttttccctgagcagttccttaacctgctattgaaacttctaaactaggggtaccggctcgattct

SEQ ID NO: 10404 - DNA, 750 bp, Homo Sapiens
  misc_feature (575)..(602): n is a, c, g, or t
  misc_feature (604)..(673): n is a, c, g, or t
ccatgtaatatatccacacaatagaatcttattcgtcaataaaaaggaatgaagtactcctagttttagaagtttcaatagcagctttcaccaactaaaacaactcagtacataagcacaaagggtatagtatatcaagtggcctgcaacagatgaggctaggcgggcattgctatgctattcacttcattttattcccctctatcatgcaatctctccttgccttatcacccagacttcctgaaagagaattctatactctcataccttcgcatctccgatttacttctcagtgaactccagcttgtcttccaccttcactctgaaattgctctaggccactagggaatcctaatttgcggataacatagagatttggcggggcggcgggggggtcacttttctgaactgttagtttgatactattttaatatttaactatttgtaggtcacaacgttttctggaagtacgatgaatgctattgaaacttctaaaactaggcctagttttagaaggtgcaatagcaggaagaagttcaagagctctattgtataccatagtaactctaggatcnnnnnnnnnnnnnnnnnnnnnnnnnnnncnnnnnnnnnnnnnnnnnnnnnnnnnnnnnnnnnnnnnnnnnnnnnnnnnnnnnnnnnnnnnnnnnnnnnntgatcaacctatcgcgtagctatgaagcccgcatgcagtagccattttcctgatgctattgaaacttctaaaactat

SEQ ID NO: 10405 - DNA, 312 bp, Homo Sapiens
cctagttttagaagtttcaatagcagaagagaacaaagggcattaagctcaagatcctgaaaaactatccgctctccagtggtttagcattaacagtttacaacatgtgctagaatgcatcatccacctggtaagcaacttgtgaagcaggcgggcagggatagaatctcctccacaggtggggaccctgaggcttggggtgctggtgtgacttgccagaagccatgtgggtaccgagtggcagagctgggacttggccttaaattttgtaccaaattttcctttcttgctattgaaacttctaaaactagg

SEQ ID NO: 10406 - DNA, 701 bp, Homo Sapiens
  misc_feature (62)..(101): n is a, c, g, or t
tagctgttctcgaggatccccacctctgaccgaattcatggcagcagaggctcatcggtttnnnnnnnnnnnnnnnnnnnnnnnnnnnnnnnnnnnnnnnnggagagcctaccaaggacagctgggtcacaacccggcacagcagaaccattacgtgagagcttcagggtgcccacatatcatctgagggaagcaccgctcatcaggcacccacctcctggcctgcgggactgcggggagttggggacacagagggacaattgcaggaaggtggcctgtcctagaaagccccagcagtctcgaatttgtagctcagcaagtttcttccctcccttcctgacctttccgctgggaatcaggtaactcagttagccccgggagtgtggccaccatagcccaagaggaccccgctctgtgccaacatggcccaaatgtagtggaaagagcagagctgggccctgctctcagcatccagggtgtgaggagggaggagaggctgagaaagaaagaaaagcaggtttggggttcccctgaacagggtagatagaggccgtgagtacacagaccaggtgtcctgaacagccccgccccctcacctttcggcctcaggcctcttcaggccagcatcattaggagagggccctccctcctggagactcctgcaggctcctctccagtttcaatacagccctgttctgtcc

SEQ ID NO: 10407 - DNA, 257 bp, Homo Sapiens
tgctgggattacaggtgtgagccactgtgcctggccaggaataagttttaatgagaaggaaacccatagacctaccaaacactaaaaagcaactggattaacatggggagcttggtgaatttgcttagggaaggaggtacacagatggtaaaaagttaattttattagaaaaaatgggtattggtatgtcctggaaaacaggtattaaaaccgttgtgatattgatggccttgctactggaaacttctaaaactagg

SEQ ID NO: 10408 - DNA, 909 bp, Homo Sapiens
gcctgtgcttggggacggcgaagtagtcacagctcagcctggagaagtcccctgggtgtctgacgagtcctgagtactcagcctctggaggggcggtgacccgaagctcagcctcataggcgccaccctcacccacattctgggcatggaaagtgaggttcagggcattcttgtcacccaggtacacatggttctgctccccaaacacttccagctgcaggtcaggcacacagatgttgtcttctccacagtccagcaagatctgagccttgtcctctatccggctcttgctctgataatgtagggctggcctgaggccgtggctgtccactggggcttgggggtccaaggagaagttgagagcgatgtgaatcggcgagagtttgtctcgaaattctgactcgttcctgaggtagatcttcatctctctgcaatcctctcgagccccattctggatgagcagggtctgggtcagggttgcctgcctggaggccaggaacagtgcccgccgtacccctccctcctgcttctgccagtccagctgaagttccactgtgaaaccaatggagtcagcaacgtgttttccagaagcattgaggcagaagctaaggttgatgcaggccacagggttcccctctaagctgcagctccgctcctctgggttgaacatggcggggaagatggtgagggaggcactagcggacacgatggggcggcccctgtataccacagccttgtccacaccaaaggaccccacaatcagatcaggatatccattgccatccaggtctcggcctcctcgaagggcagagccaaagaagtctggggtgtggctggctgcccacaggggctgcagaacctgggaaggcttagagcccagccctcctgggcccccaggaaatacaaaca

SEQ ID NO: 10409 - DNA, 294 bp, Homo Sapiens
cccagttttagaagtttcaatagcagtttccatttttattttggaggcccctcccacgaaccttctcccattttactgaggcccagggagaatgcacagggagctgagcccctcctttgatcttagtttggtggcagagacaggcagtgatactgacgatgtgatggcagtgtcaggtgcactctgtcttcactagaaaactggcctcctggaagggctggaagctcccacccttgactgctctgactctgtctccagcagctcttcgctgctattgaaacttctaaaactagg

SEQ ID NO: 10410 - DNA, 513 bp, Homo Sapiens
gtgagcgagttccgaattatgggaggagaaacggggctggaggagagggcgggtgcatattcagacttgataatggaggtagatctgtcccaggggagagtgaaagttcagttccacttctgcctcctgtctttccatgctgtcctcatgctctttatcctcacttcctcagtcccttcaacactcaaaatctgattttatttctctctcacacgtatcaggggcagtttctgaagttgctgaggttgaattttcttcacaaacctctataaaacatcagcagagaacatataaatacattttgattagcatacattgcaaaatttctcccacaaggtcaggggatgaaagcaggtggtccccactgagagtacttcctggattagatccttggaatgtcagtttcctgcctgatcatctcattttcattcctcaaatcagaacatgaactccatcttgagttaacttctcctccagagtatcaaagcatcattcctgctgcttctcctctag

SEQ ID NO: 10411 - DNA, 281 bp, Homo Sapiens
cctagttttagaagtttcaatagcagccagagaaagaagacacatagcctcacaatagacttctcaacagcatgggtgtaatactatctcatgtactaaaagaaataactgccaaccttttatattttccaagatctcttctggaaaacaaaaactttaagaatctgccttcactggaaattcttaatgatgtacttcaagcaaaaagaaaatttcctaggtaaaaggtctaagatgctattgaaattctaactagtgctattgaacttctaactagggga

SEQ ID NO: 10412 - DNA, 518 bp, Homo Sapiens
gccgaccggggcagacagcgggctcggatgctcataagccgagagatgcccatgagctgacagttttactcatccctctggcgctccaagaaggccggtattatacgtgtcctccggggggtaggagatgatccctcaagtacacaaaggtcccctggcccttcatcggggaatcatatactccactctagctcccagaatctacagagcctggctcctcggatctgaagcccagcacaaaataatctccccgtccaaggagcttgtggaactggaatggggaacttgggagtcttgtctcccatcccagcacattgaggatgtagttggtgaatggactcttccaggcatggagatcctccatcctaaaagtacctgcctcccttcccagccatccctgacacattccagccagttggatctcacagcacagctatccacagggagactgggatgttcacgcagcactccattactcagtacctccatacccagccctatacgcagacccacaggtg

SEQ ID NO: 10413 - DNA, 310 bp, Homo Sapiens
gatcgagccggtccctagtttagaagttcaatagcatgagcgatctgtgccttaaagacatgctcctgctgcagttaaactagcccaagctattcctttaattcagcccatcccttcatttcccataaggaatacttttagttaatttaatatctatagaaacaatcctaatgactggttagctgttaataaatatgtgggtaaatctccattcaggactcttagctctgcaggctgtgagacccctgatttcccaattcacacctctatatttctgtgtgtgtgtgctattgaaacttctaaaactagg

SEQ ID NO: 10414 - DNA, 579 bp, Homo Sapiens
gtttttccaaggagaatggaaagcacgtgcctcctgtcttaagaatgcacaaagagtaggactagcaaggctgggggatgaaatctcccttcctaagtctttgacagagaacttttattattctgaacagataagagtagcaaacttacaaggaatagcttcttatttcccattccttacgggtataatcagtcctttaactacaccagcatgaaggcaaaggtgttttgtcagactgctatatctattagaataggcaaggcaactgggaattgctggagaaggataaatcaggaggaattgctggtagaaaaggctgcagacagtcacagggaagtgctgtatattaaatgcatgtgaatagctggcaaaaagatgtcaaggatgtcactgggagccctttggcttcacactcgcctgttagcgccttcgtttcgctgaattaccagagcctaccactcggaggaaggtcttggagttagactgatgagaaggcaatggggtgtcaaaaacaagtgtcaaagttctcttagattctgaagtcggtgatgagcacacaattaaagtggtttgtggaag

SEQ ID NO: 10415 - DNA, 247 bp, Homo Sapiens
tcaccgtgcatggagcgagtacccacctctggactgatgttcacacctctgaggcgagttacccagctcgtgagcgagtctcacctctgaccgagtacccacctctgaccgagatcccacctctgaccgagttcccacctctgaccgagttctcacctctgaccgagttctcacctctgaccgagttcccactgtgagaaataaaatggaaagggagaaagccaattcctatattttttcaaatggg

SEQ ID NO: 10416 - DNA, 516 bp, Homo Sapiens
cagacatttcacatcagcaagctgccgccctccttcacacttatttaaaaaacctttctccttatattaaccctactccccccatattcggacctctcacaacaccaactactatgcctgtggtcgctcctatatgtatctctcggccaagacccactggaattcccctaggtaatctttcaccttctcgatgttcctttactcttcatctcccaagtccaactacacacatcactccaaccatgggagccttccagctccatattacagacaagcccgctatcaatactgacaaacttaaaaacattagcagtaattattgcttaggaagacacttaccctgtatttcactccatccttggctaccttccccttgctcatcagactcttcctcccaggccctcctcttgtttactcgtacccagccccaaaaataacagtgcacaaggttgcttgtagatactcaacgttttctcataccccatgaaaatcgacctcccctgactcgtcagcagt

SEQ ID NO: 10417 - DNA, 1056 bp, Homo Sapiens
gagtctggaaataatttgtatgtggaacatccggaagtagcaaggctgacaccatatgaggttgatgagctacgccgaaagaaggagattacagtgaggggggcagatgtttgtcctaaacccgtgtttgccttccatcatgctaacttcccacaatatgtaatggatgtgttgatggatcagcactttacagaaccaactccaattcagtgccagggatttccgttggctcttagtggccgggatatggtgggcattgctcagactggctctgggaagacgttggcgtatctcctgcctgcaattgttcatattaaccaccagccatacttggaaaggggagatggcccaatctgtctagttctggctcctaccagagagcttgcccagcaagtacagcaggtggccgatgactatggcaaatgttctagattgaagagtacttgtatttatggaggtgctcctaaaggtccccagattcgagacttggaaagaggtgttgagatctgcatagccactcctggacgtctgatagatttcctggagtcaggaaagacaaatcttcgccgatgtacttaccttgtattggacgaagctgacagaatgcttgatatggggtttgaaccccagatccgtaaaattgttgaccaaatcaggcctgataggcagacactgactctggagtgcaacctggccaaaagaagtaagacagcttgcagaggatttccttcgtgattacacccagatcaacgtaggcaatctggagttgagtgccaaccacaacatcctccagatagtggatgtctgcatggaaagtgaaaaagaccacaagttgatccaactaatggaagaaataatggctgaaaaggaaaacaaaacaataatatttgtggagacaaagagacgctgtgatgatctgactcgaaggatgcgcagagatggttggccagctatgtgtatccatggagacacgagtcaaccagaaagagagttgggtacttaatgagttccgttctggaaaggcacccatccttattgctacagatgtagcctccc

SEQ ID NO: 10418 - DNA, 548 bp, Homo Sapiens
caccaagacagagatccctgttcttaaggagcaagtgagtgcaacagaaaagagcagggagaagtcagctgtcatgcgagggcactcaagcagccctgtggaaagctctacgtggtgagaaactgaagcctcctgccaacaccaacaaggaactgagacctacttccaacagccatctgagtgatcgatccatcctggaatcagatcctccagccccagtcaagtcttcagatgactgcagccctgaccagcatctcaactgcaacctcgtgaatgaccctgagccagaaccatgcaactaaactctgcgtggattcatgacccacagaaactgtgagatggtagctgtttgctttgttaagcctctaagtctggaaagaatgtcttaagcagtagcagacaatgaacacaagattattattcagctgttgaattggaagaggaggggaagaaaaaattttcagatcacaaaatattcattgtgtaaaacttcaaaaattctgaaatttaaggaaaaaatatcatttgttgggaatttgttgggattc

SEQ ID NO: 10419 - DNA, 544 bp, Homo Sapiens
ggatgggcatcttcatcttcaacgttgtgtactacgagccgctggtctacaacaacacctacgtgtacccgtggtggggtgaggccatgggctgggccttcgccctgtcctccatgctgtgcgtgccgctgcacctcctgggctgcctcctcagggccaagggcaccatggctgagcgctggcagcacctgacccagcccatctggggcctccaccacttggagtaccgagctcaggacgcagatgtcaggggcctgaccaccctgaccccagtgtccgagagcagcaaggtcgtcgtggtggagagtgtcatgtgacaactcagctcacatcaccagctcacctctggtagccatagcagcccctgcttcagccccaccgcacccctccagggggcctgcctttccctgacacttttggggtctgcctgggggaggaggggagaaagcaccatgagtgctcactaaaacaactttttccatttttaataaaacgccaaaaatatcacaacccacaaaaaatagatgcctctccccctccagcc

SEQ ID NO: 10420 - DNA, 1208 bp, Homo Sapiens
cagaggatcccggaactcctttcaccaagtctctttccttggtgtccatgcaattgactaccactacatctcctcccagggcttccctatcgaaggcgggctgtgtgtactacataactcaccctttgaaaggggcgctactcttcatcaccattgcactcattggcactggctgggctttcattaagcacatcctttctgataaagacaaaaagatcttcatgattgtcattccactccaggtcctggcaaatgtagcctacatcatcatagagtccaccgaggagggcacgactgaatatggcttgtggaaggactctctatttctggtcgacctgttgtgttgtggtgccatcctcttcccagtggtgtggtcaatcagacatttacaagaagcatcagcaacagatggaaaaggcaagttctctcgtgctcattttgtgttgctcagcttgctctgaacccacgtgctgcggcactgcggaggagtggaggcagcctatggtgtcaagatgctgtcttcctgggaggagagctaggggaggcctggggcccacttcgtgagagtagccaggggtagtttggagaaggaggtgttgagtcagttgtataaggaggaggttgggggtgactgctgcttattaagatgattcatttcatttccactcgtggttgtgattttcaccttctcaaaactgagtcagcaagagaaaatcttgtcttagaaaggccagataacacttcgctgtgagaacaggagggataatggattggagatggctatgtgtaaagcagccctgcctgctgatttaacacactttcaaaatagatgtgtcaagtattcatttaaaagcaagactctgaatgacagaaagaaccttggaaaactacctgatattgaaatggttgtgccctttatagcccttttgcatctccttgactttccagtcatgcctcctaaatcagaagaaaagctgcaaagaaaatgttttgtgtggttctgggcttatttgaataatgttcatgaccacaggctgccatagcacaagtgagaatttcagaccacaagggtttaaggagcagtgctctcttctctcaaagctcagaacggtctctggatccatggtatcgtacacccagtgtggatattaacattctttaatgcaggttatgaataataaataaaacaggtttttgctaataaaaaa

SEQ ID NO: 10421 - DNA, 672 bp, Homo Sapiens
  misc_feature (455)..(495): n is a, c, g, or t
  misc_feature (502)..(502): n is a, c, g, or t
  misc_feature (542)..(542): n is a, c, g, or t
  misc_feature (557)..(557): n is a, c, g, or t
  misc_feature (580)..(580): n is a, c, g, or t
  misc_feature (592)..(592): n is a, c, g, or t
  misc_feature (599)..(599): n is a, c, g, or t
ggggagggagaatttcaggtcttagactataaggatagaatccctttgcttttgcccttgatcacatgtatactaaggtattaagtggcccaagtctttcctttcaccaaagggcagggagaagtgtctatggacagcagggttccaattcttgtcattccaggaatatctgaatattcctggaatgtggaccctgagacagtgctcaggggccactgggagccaatattaggcattgactctcagccaggagtctgactggtctaacaccacactgcaactcctgacctcttgaagtactaagctactttgctgttagtgacagttattaaagtttctcagccccattgtctctgcccctctgtggcaatggaaagagaatatagagaagacaaaaattaaattatagatagacctgggaaagggacaggccaggataagaattccattttgtnnnnnnnnnnnnnnnnnnnnnnnnnnnnnnnnnnnnnnnnntaaccangttgggtttatttttcctccatttgcattaccatggatgntggtgtcatttggcnctaacccttccccccctaaaagnaaagaaaagaangaaccanggtggggccttggattggaatcctggctccctaaatcctaactggtggggggaatttaaaatcctttgggttt

SEQ ID NO: 10422 - DNA, 500 bp, Homo Sapiens
aagctcctccgcagacaaattagtctgaaagaaaacagacactggagaaagactgaggaggagaggaaaccaagtctagaaaggaagaaagagcagaccaaaaggccggggctgtcgtctcaccggaaacggagccagcccaagaagccgaagcccgaagaccccaagttccctggggagggtacggctggggcagcgctcctagaggaggctgggggcagcgtgaaggaggaggctgggccggaggttgaccccgagtaggaggaggaggagccgcagccactgccacacggccccagactcagggagcagggccaggcgggctcgggggccggccaggggagcaccccactcaactactcagaattttaaaccatgtaagctctcttcttctcgaaaaggtgctactgcaatgccctactgagcaacctttgagattgtcacttctgtacataaaccacctttgtgaggctctttctataaatacatattgtttaaaa

SEQ ID NO: 10423 - DNA, 899 bp, Homo Sapiens
gggggcctttgggaacccctgtccggaaggcggtatgaatgttcttaacgaaggggttttcttggttttaagagaccccgggacaccagctggaagccgttagtgggggaggaggggttgcctgctggctgtaattggtgtttaaatttcctgtttcctgcgtaggggctttccacaaatgcatttttcagccgggttggtgtgttcagcttttagaccttttttctggtggagggtcatacactgctcacatagaatcttaccattcttttcttgcttccagtgaggggtgaaatctgtgcggcactgggcacatacaaagggttcaacccgcagaagtgaggcacagcttttgccttggctgtcaatgacactctgtacgacttcttccaagcctaccatgtagatgaactcgctattggctgcactaggcaagaaatgaagtaagggagcaggaggtttagggggtgggatctccaggagtgtcttttccagctgtttgcgaagagccaatttggctgcagcctgtgagttggcagcatcagtcatggcgctggggctaggaagtggcgaggacactctgttcaccgtccctggctggatatgagaagcaaggttcatatagatggcagaggatgttgtacgctgacatggaacagaagaacttgactgcggttgataattgatggcgggattcatgttgggtgttgtggtgcgtacaaggccaggcttaggcgggccccgctgaccctgtagctgggctgggtttggtgcaataacacgttgagacatcaacatgtgtggaagggtggtattggtagctgacacggatgacactgtgaccctgtaatgttctcaaattttgaggttcaaccccttggtccccatgctcgagagga

SEQ ID NO: 10424 - DNA, 545 bp, Homo Sapiens
gaagtaccctggggagggaagggacagaggaagctattcctggcttttccactccaacccaggccaccctttgtttttgccccagagttgagaaaaaaacttcctcccctggttttttagggagatggtatcccctggagtaaagggcaaaaggaaagagcgcctccagtctagaaggcataagccaataggataatatattcagggtgcagggtgggtaggttgctctggggatgggtttatttaagggagattgcaaggaagctatttaacatggtgctgagctagccaggactgatggagcccctgggggtgtgggatggaggagggtctgcagccagttcattcccagggccccatcttgatgggccaagggctaaacatgcatgtgtcagtggctttggagcaggttaggctggggctcatcgagggtctcaggccgaggccactgcggtgccagtgcccccctgaggactagggcaggcagctgggggcacttggttccatggagcctggataaacagtgctttggaggctctggaaaa

SEQ ID NO: 10425 - DNA, 990 bp, Homo Sapiens
  misc_feature (180)..(188): n is a, c, g, or t
  misc_feature (764)..(764): n is a, c, g, or t
ccccgtgtctatggggctgggggaccccgcgttcggctgtgggccttttgtgacccggttggaaccaagccagaataaggcgcccccccgggggcattcccggttccccattttgaaaagattcttgttacttccgggtggaggggggtttggatgccccagggcccgcgcaggccaatnnnnnnnnntccacatcctgctggatggcccacctgccaggagcccttgggccccgccattcatttcccgttgaagacgttgaccaagtgaggctgtgcccgcatcccatggggggtgaccttcatgtgattcacttgaacaggaactcggtgcctccccatgacccctggaggagaggaccccgcggctgtagcggccccgggcgtagatggagaaggtggggtgcttgcacaccgggtctgagtagtgggtagtagtggccctcccaggtgttgttgttgtcatggaagatgaagtggcgggtgaggaagaggacttcggggcgcacctcacagcgctggctcacccactccccgtgcaggccgatggtcaggtctgcctttgggggcaggatgggagggtggtgctcgtctgaccgatagatgatccgacaggcgatgcaggcatggtcgtggttcttggcattctgcagagggggctggtaactggagggccggtagaacatcctctgggtggcatcagtgtgaatgtcaccaaggaagagctcctcgaccaggtggtacgaggttgtggtagaaggtacntgcttctccaccgcggatgagctgaagttcatgcatggcaaagttcacggccttggtgcactcacagccgttctcctctcgccagaggtcataggccacgtcctgcacccagggacccccgtctgcgaggaagcccgggcatgtgcggttcacctgctggccgagcttctcggccaccgcctcttgtgtggcaagatcaccctgggaccgtttgttgcagccttgg

SEQ ID NO: 10426 - DNA, 478 bp, Homo Sapiens
gggatcaacccacgattgtgtgcccctttttttataaaaactggaatgtttgaaggttgtactacaggctgtccttctctgttgccaattctggaaccaaaatatgcagttgaaaaaatagtagaagctattctacaagaaaaaatgtacttgtatatgccaaagttgttatacttcatgatgtttcttaaaagctttttgcccctcaagacaggactgcttatagctgactatttgggcatccttcatgcaatggatggctttgttgaccaaaaaaagaagctctaaagaccaactctatggctaaggtcatctgatacacagtgttacataatgcgtacttcaataaaaaaaagtatttttgtctgacagtggaatatatctggagaccacaagtaccactcctattctgttatctggactagaattttcaatcaatgtgtttgaaaataatgttgctatcacctatttggttgag

SEQ ID NO: 10427 - DNA, 817 bp, Homo Sapiens
  misc_feature (145)..(145): n is a, c, g, or t
gggaacctgttcttttaacttagggagcagctggtctaaaaccaccatttttgccactgttggtactaggatgcatatctgtgtataaaggtggaccagtttctgctccatcaaagagatatggatgattacaacattttctcanctgcattaggatgttcaataacctcattttgtccatcttgcctgctgagttgagtatatctatatccttcattaatatccgagtataccattccctttgcattttgctgaggcccacatagatttttacttccttctttggaggcaaactcttttcaacatcagccttaattcgacgaaggaggaatggacgcaaaaccatatgaagcctctcaactagtttttgatccccaaggcagttgtttgtatcaaaccaggaatcaaagtcatctgctgaattaaacacatctggcaacagaaagttaagaagtgaccacagctcatgcaagttgttctgaagaggtgttccagttaataatagtctatttgtagtcttgaattccctcactaattctgacaacttagatttttcatttttgatcctgtgagcttcatctattactaagtatctccaattaaatttttttgaacacagacttctctttaataagcatttcataagatgttacacatacatcccattctcccggtaataaaacgtctctgacaaaagcagctctttgttctttatctcctatcaaacaaacagatctaagtgttggtacccatctcttgaattcactcatccagttgtgtaatgtagacttaggaaccaaaaccatatgaggcccag

SEQ ID NO: 10428 - DNA, 854 bp, Homo Sapiens
  misc_feature (679)..(680): n is a, c, g, or t
  misc_feature (682)..(682): n is a, c, g, or t
  misc_feature (687)..(687): n is a, c, g, or t
  misc_feature (715)..(731): n is a, c, g, or t
  misc_feature (753)..(754): n is a, c, g, or t
  misc_feature (756)..(756): n is a, c, g, or t
ggccgggacgttgtggtctccctctatcattactccaagatcgccgggcagttaaaggacccgggcacacccgaccagttcctgagggacttcctcaaaggcgaagtgcagtttggctcctggttcgaccacattaagggctggcttcggatgaagggcaaagacaacttcctatttatcacctacgaggagctgcagcaggacttacagggctccgtggagcgcatctgtgggttcctgggccgtccgctgggcaaggaggcactgggctccgtcgtggcacactcaaccttcagcgccatgaaggccaacaccatgtccaactacacgctgctgcctcccagcctgctggaccaccgtcgcggggccttcctccggaaaggggtctgtggcgactggaagaaccacttcacggtggcccagagcgaagccttcgatcgtgcctaccgcaagcagatgcgggggatgccgaccttcccctgggatgaagacccggaggaggacggcagcccagatcctgagcccagccctgagcctgagcccaagcccagccttgagcccaacaccagcctggagcgtgagcccagacccaactccagccccagccccagccccggccaggcctctgagaccccgcacccacgaccctcataataaacacgtcgattctgaaaaaccnnanccaanttatccccccccacttatcattattttnnnnnnnnnnnnnnnnnttataaacctatattaaattcnnantaaacatgtgtgggccccctccggccccccaaaaagtttttctaaaaccattcctttttgggcggcgggggcccccgttagggaaaggtgcacactgc

SEQ ID NO: 10429 - DNA, 446 bp, Homo Sapiens
agaagaaagctgagacattgcatgaaagatgatgagagataaatgttgatcttttggccccatttgttaattgtattcagtatttgaacgtcgtcctgtttattgttagttttcttcatcatttattgtatagacaatttttaaatctctgtaatatgatacattttcctatcttttaagttattgttacctaaagttaatccagattatatggtccttatatgtgtacaacattaaaatgaaaggctttgtcttgcattgtgaggtacaggcggaagttggaatcaggttttaggattctgtctctcattagctgaataatgtgaggattaacttctgccagctcagaccatttcctaatcagttgaaagggaaacaagtatttcagtctcaaaattgaataatgcacaagtcttaagtgattaaaataaaactgttcttatgtc

SEQ ID NO: 10430 - DNA, 652 bp, Homo Sapiens
  misc_feature (153)..(153): n is a, c, g, or t
  misc_feature (246)..(246): n is a, c, g, or t
  misc_feature (265)..(265): n is a, c, g, or t
  misc_feature (302)..(327): n is a, c, g, or t
  misc_feature (350)..(380): n is a, c, g, or t
  misc_feature (431)..(491): n is a, c, g, or t
gacaaggtcttggagcgagacagaagctgtcgaagctgacgaccgtgcagatgcactccaggcgggggcttcccagtttgaaacaagcgcagccaagctcaagcgcaaatactggtggaaaacctcaagatgatgatcatcttgggagtgatntgcgccatcatcctcatcatcatcatagtttacttcagcacttaaatccccgaggagtctgccctgcctagagaagggcctctcccccaaccntcagccgttcctccacctntcagccatatctttcagccccccctcccctggatccnnnnnnnnnnnnnnnnnnnnnnnnnnccccctgtaaatagccagctgtnnnnnnnnnnnnnnnnnnnnnnnnnnnnnnnggtctgtttgtagttttattactagatgatttttccggttgtccttaacannnnnnnnnnnnnnnnnnnnnnnnnnnnnnnnnnnnnnnnnnnnnnnnnnnnnnnnnnnnngactagccccaagtcccttcatttgcatctgctatgcaatagtccctctcctttccttcttcttccctcagatttagctgatccttcctcccaccctggccttcctttcctctttcctcctcactctccccgtcatgctccctctgccccgccctcaaaaa

SEQ ID NO: 10431 - DNA, 463 bp, Homo Sapiens
  misc_feature (366)..(375): n is a, c, g, or t
ctagtttagaagttcaatagcaggatataaagaaagtaattatgcttggagtccctctttactgggtttgagttaggtgcataacatggaaaggagtggtgccttcaaatgaatgtgaccactccgtatagtggagtgacttccctagggcatcctatacatcctaccacagaaggccaagggacagagcaccaacttcagtatccaagaaattagatccacaactcttgattttccacactgaggactgtcgcgagtaagttgtaagtttgccgtcttccttctggcttagcaggtgctgcagctgtactctcgactcctgtctgtgagcgtgagctcaggaaatgagagtggagtctattcccnnnnnnnnnntgtgatgaagtttctcctacaacgtgcattcatatgcccaagcctttttcggaggattctggatgcctagtggacttctaaactacgc

SEQ ID NO: 10432 - DNA, 521 bp, Homo Sapiens
ctagtcttagaagtttcaaagcaacataatgaaaaattcaaaaataatattacaaaaagataaagtacaacagggattctctttcaccgttacattgagtgaaacatcttttttacaccgtttaaagctaatgtcataactttcattttttaacttatcaagatgatgaagtttttagaagccctacctttattttcaatcaaaaactaaaatgactgaattacttttattaatatacacatcaagttactgtaacggtgacttcatgtagtttcccccttaaagatggcactggcaggtacaaagatgcagagatgtctacagccttcagatgtttacttgaaaagattcttcaacagcagtttggtatcgggtttcttcatctagctgaagattcacaaattctccataatcaaatgtgatgtctctgatttagatgactaacgaaatttctggtaatctggctaggatctccccaaggaagagacacacaaatggctattgaaacttctaaaactagg

SEQ ID NO: 10433 - DNA, 508 bp, Homo Sapiens
tatatatatgcccttccatctggcagtgggggaagaatacactcttgacattcttgtctcctgctttagaaatgctagtgtgtatctatcatgtatgcaatactttccccctttttgctttgctaaccaaagagcatatattttactgtcagttgtctcaactcttgaatccatgtggcgttttctctgtcctgctgcttcttttggcctcctcgttttccttctctttttcgacaatggtagacatgaatgagatatttaaagttcattggaaatcttcttccctacagcagtaagcaaaaattagcaaagagatagtctaaatggcctctcagcttggtatgtgaaaatgagatcacatactttttaaatccaaatacaaaagcatagtctctgcaagattttgttctttgaatttcttgatattgtaattgattattgataactgtcatcatgaaattatctctcaataataagataaataaactagcatatgaatcataaaaaa

SEQ ID NO: 10434 - DNA, 395 bp, Homo Sapiens
  misc_feature (303)..(334): n is a, c, g, or t
tcagaagttcaatagcatagaggtgtatagtattctgatggtagttgtatttctgtgggaccagtggtgatatctccattatcattttttattgtgtctatttgattatttcttcttttcttctttattagtcttgctagcggtctgtgttgttgatcttttcaaaaaaccagctcctggattcattgatttttttgaagtgttttttgtgtctcttatctcctttagttctgctctgaacttattttttgacttctgctagcttttgagtttctttgctctggcttctctagtccttgttcnnnnnnnnnnnnnnnnnnnnnnnnnnnnnnnngggggaggctttggaactttttaacacggggggggacccccaaaatgtcgccctggcaggg

SEQ ID NO: 10435 - DNA, 333 bp, Homo Sapiens
atataagaggcattgtcctctggaggctcgaatgaagcagtcagacatgctgctagagagaggggtgtctgctttttcaacgtgagagagggacgtgttggtgaatggggaccggcggtggatcacgcagctgcacttcgccttccaggatgagaactacctgtacctggtcatggagtattacgtgggcggggacctgctgacactgctgagcaagtttggggagcggattccggccgagatggcgcgcttctacctggcggagattgtcatggccatagactcggtgcaccggcttggctacgtgcacagggacatcaaacccgacaacat

SEQ ID NO: 10436 - DNA, 237 bp, Homo Sapiens
tagaagtttcaatagcaggaagaagtcaagagctctatgtataccatagtaactctaggatctttaggtttgttttttaattttaagttccaggcacatgtggaggatgtgcaggtttgttacataggtagacatgtgctgtgatgttttgctgcacttatcaacctatcgcgtaggtattaagcccagcatgcattagccatttttcctgatgctattgaaacttctaaaactagg

SEQ ID NO: 10437 - DNA, 343 bp, Homo Sapiens
gggccgtaacggtaggaggtagaaggcagaagggaagtaactgaatgagaagctgttctgttgtaataaggtgttgctgaagctagttaaacccatctaccgtgtctttaaaccctctacctgtcttagggttaatttacatgtttgtcatccccttacctggatatgtatagctgtacccaggaaccttgtctatactgagaatatatagtgatgagggtttttctttttcccaggtattcctgatggtcatcaagcttatagtagatgaaccactaaaataatactacaatttgacattagtgttcttgtactttatgctattgaaacttctaaaactagg

SEQ ID NO: 10438 - DNA, 341 bp, Homo Sapiens
acagatgaatagcagctctcctaggtaatgaaataatgtaataactttcaggacatatctaactgggcacctgtagtctttgcttaagaagactctactactcactccccaattaggattccactcctgatcctactccaacactttagagtctcattcctgtgtgaaaatacagcctttctataggcaaattcaagtcatttccaggcctgcccacagttattatggggcaaggtgttcgggatagagcgagagggaggcaaattccaactcagacccagggatcatctaggttggtagccaaacccaggttcagtgctatggaaacttctaaaactagg

SEQ ID NO: 10439 - DNA, 256 bp, Homo Sapiens
cgactcgagccggtaccctagtttagaagttcaatagcagcaactctatttcttagacatggaggcatgggttgccagctagaaccaacggccctgatactcttcatccagttaagtggaaaccttagcaactataataaactatgagatgggtaatcagtgggcattattatctcatgtcttcattggtcactttatgtagcaattcagggatccttattttttcacatatgctatggaaacttctaaaactagg

SEQ ID NO: 10440 - DNA, 287 bp, Homo Sapiens
tacactagcagatgggcgactactggtcactcatgccgggcaaggtagcgggctggcgctccacgcttctcctctgttcaggaaggaaagtgagcgcctcactctgagggcggtttgcttggtggcccttcctctggttcaggagcagccaccctgtgagagccagttaggcactgggagggttggagttgctggctggagagcccctcaggtgctgggagggctggagttgctggatgaattgctattgaaacttctaaaactagggtaccggctcgattcgtatc

SEQ ID NO: 10441 - DNA, 344 bp, Homo Sapiens
atagcacattgctgctggggctgctgcttaacagacctgtgtgcagaaacagcaggcacccctggggctggagaggggctcctggggtctcaccagatagatggtgttgtgcagttcaaatcagttaggaggcctgagacttgagacaggctcacgtggagggaggtggcatcctacccagccctcggcccttgctgccccactcaggggccagatggtggacagtgaagccactatgaggagttggaaacagctatttgctcacttcccctttagatggctgccagtccttctagatcagtgaactctcccaaacaaatgctattgaaacttctaaaactagg

SEQ ID NO: 10442 - DNA, 472 bp, Homo Sapiens
agaatacgaatccatatagtaacattaaaacaatccgatacgtaccattcgcgtttatgaaagatcagcaaaaatacataaacaaggatataactagtacatttataaaatacatcataacaatgaaaccaaaggatcccacacaataatcttcacatttgacatgctggttacagctgaggagagccagtgtctttggcaagtgattcatatacataagcgatgacactgactaatcctaacacttctgaaatgttcattctttaccagttaaacctaaaataaatcagcaagagtactgaaatataacaagaatgaaatccaaaatttgtcgaaaggggcaatgtttaatactaggaagaacactgaatttggggactaattcttgtccccaagtacatttggattcttgtcttcgttcctggatgatcttaggcaagtaatctgtgctattgaaacttctaaaactagg

SEQ ID NO: 10443 - DNA, 565 bp, Homo Sapiens
gtgagcaaccacaccccaagctgtactgggtattattaaaaaaataataagtcacaggatggagccaggaagcctgaggcaggtgaacctatgaggcaaatgtcacgtgcaacaaagtgtaattggctctggcagccaaaaccaattggacatcttggtgagacagtctccaaatgtgtcacaggatataatttccaaagttataaacatgactgtctttaatgtatgtaccaaaggttacttcaggtgttaagaaactataatggtggaaacactagttcaaagggaactggagagactgaaatactcagaggcactgaaaaagcaatgctggaataagattgctgagttacatccaaaagtacctgctgcgctgcagggtaataagcccattatcttgggtcatcttttctacctgacagaagctagctatatcttatcaatctactcatcagagcccagcctcatcaatggtgaataagtcagagaggtgccatgcctagagaatcccaaaggtcatcctatggccaccttttcggactggtcttcattttgccttttcaaa

SEQ ID NO: 10444 - DNA, 605 bp, Homo Sapiens
ggagagtgaccctaaacatcaaccgtaagctctccttcttggccgtgttgagtggcttactgctggaaagcatcatggtctacttcttccagagtatggaatgggatgttggaagtgattatgccatctttaaatctcaggacttctgaagagttttattcttcttcactatctgtggcatgaccagctgtatctgaaagagaaaagacatgaaatataaaccaacctcctcatttctgttgagtaaaatgaagcaaagattggaaacactttctgaaaaagaaagcaatgataatagcggtggatacccacccccacaaatgcacccaagagacaagccatttacatacagatattcacagtcacacatagaaacacccacatggacacaaggaatgttgctgcagagactgaatgacatgcaacaggtgaaggtttatacgttatacacaaggccaggtaagcgctcataattcacacataataaaacatctaggtttcattcctttgacatgtttatatctttttaatttaaatgttgttactggcttaaaatattttgtgttcttacaatagaaacgcttttaataaagtctttcagaatg

SEQ ID NO: 10445 - DNA, 1187 bp, Homo Sapiens
gggtccggggatggaatccgaaatggaaacgcagagcgccagggcagaggagggctttacccaggtcacccgcaagggtggccgacgggcgaagaaacgacaggctgaacagctgtccgcagcaggagagggcggggatgcgggccgcatggacacagaggaggccaggccggcgaagaggcccgtcttcccacccctctgtggggacgggctcctgagtgggaaagaagaaacaaggaaaattccagtcccagctaacagatacacaccattgaaagaaaactggatgaagatatttactcctattgtggaacatttgggacttcagatacgctttaacttgaaatcaaggaatgtagaaatcaggacttgtaaagaaaccaaggatgttagtgctctgacaaaagcagctgattttgtgaaagcttttattctcggctttcaggtggaggatgcacttgccctcatcaggttggatgacctcttcctagagtcttttgaaattacagatgttaaacccctaaagggagaccatctatccagggcaataggaagaatcgctggcaaaggaggaaaaaccaaattcaccatagagaatgtgacacggacaaggatagttttggctgatgtgaaaagtcacatccttggctccttccaaaatatcaagatggcaagaactgccatttgcaacctaatcttgggaaatcctccttccaaggtttatggcaatattcgagctgtggctagcagatcagcagatcgattctgatttcaagtcagagactttttatcttgccttttggactctggtgaaaaatactttacagtggtcggtcacaagaaaccatctgaacaatttcagtcatttgaagcctccgtcccttcttccattctcagccagaagcataaacagaaaagaaagatttaagaggattcacactcaacaggttttaggataatttaaatatcaaaaattgattgttatacttacacattaggtataatttatcatttatctgaaatcacatgtagcagattgcatagtctgtaatcctctcagagggaaacttcttgtttaaacagctctatatggatttatacttttatatttataaatttataacttcatacaaatttataaacatttctttataaattgtaatttaatagattatctcagaaaaaaa

SEQ ID NO: 10446 - DNA, 351 bp, Homo Sapiens
  misc_feature (256)..(256): n is a, c, g, or t
  misc_feature (262)..(262): n is a, c, g, or t
atgactataggcatgcgctaccatggccagctaatttttaaaaaatttctgtagaggtggggtaccacaatgttgtccaggctagtctcgaactcctaggctcaagcagtctcacctcagcctcccaaagggctggaattacaggtgtgaaccaccccacctggctgaaatgtttgctttcaagatatacctttgagaagataggatgtaaagataaccatctgaaacactagacaactaaaagtacataagactncaaatnttggtaataggattttatttaagcttatattggttgggaaaaaatgagcaaaaccatctacatgtttcactaccaagactactataata

SEQ ID NO: 10447 - DNA, 1032 bp, Homo Sapiens
ctcactgtcctcaaaaaagggaaaccaggtgaaatttataacatcggaaccaattttgaaatgtcagttgtccagcttgccaaagaactaatacaactgatcaaagagaccaattcagagtctgaaatggaaaattgggttgattatgttaatgatagacccaccaatgacatgagatacccaatgaagtcagaaaaaatacatggcttaggatggagacctaaagtgccttggaaagaaggaataaagaaaacaattgaatggtacagagagaattttcacaactggaagaatgtggaaaaggcattagaaccctttccggtataatcaccatttatatagtcgagacagttgtcaaagaagaaagttatcctacctcgccaagtggtatgaaattaagtgaccaaatgaagtgcactcttttcttttggaattagattcatgactttctgtataaaattcaaatgcagaatgcctcaatctttgggagagtttcagtactggcatagaatttaaatgtcaaaattctttctgaaaccctttctcctagaaactaggaaataataggtgtagaagactctccctaagggtagccagggaaggaagtctcctgattcggacaaccatgaggggtagtggtgctagggagaaggcaaccttcactggttttgaactcagtgcctaagaaagtctctgaaatgttcgtttttaggcaatataggatgtcttaggccctaattcaccatttcttttttaagatctgatatgctatcattgccttaataatggaacaaaatagaagcatatctaacactttttaaattgataattttgtaaaattgattacgttgaatgctttttaagagaagtgtgtaaagtttttatattttcacaattaacgtatgtaaaaccttgtatcagaaatttatcatgtttactgtttaaaatgattgtatttataaaattgtcaatatcttaatgtatttaatgtagaatattgctttttaaaataatgtttttattttgctgtag

SEQ ID NO: 10448 - DNA, 1684 bp, Homo Sapiens
  misc_feature (968)..(976): n is a, c, g, or t
  misc_feature (1643)..(1643): n is a, c, g, or t
  misc_feature (1648)..(1648): n is a, c, g, or t
cgagtatcattatatattggtggtccggtccggaatttccgggatggcgggccgggcgacttgagatccgcgggtctccctcctctttttccgtctgcgtcgggagctcccgggcacgtgaggccgtgccgcgtttactggcgggcgggacggcctagccgggcggcgcctcggaggaagccgcggaccccttaggtgctgggcccttggaaatcggcgcgtggggggcggtgctcgagctgagcgcgagagggcgggagagctcgtggggtgcgaggggagcacgacgcccggccgggcagcatgagtcagcagcggccggcgaggaaggtacccagtctcctcctggacccgacggaggagacgcgccgccgccggagccgagacccgatcgccggggcacggctctgctcccctcagcaacggcgggccgagttctagcagcgcccggtgtggggggggccgcgtgcgagcggcgggttgggctgcatgagggggccgggggctcaggatcccgacgggggccgccggagggccgcacggcaccgtctggggggcccacccagattataacataagttatcgcggaccggcggtggcgggggcgcggggcgggggagcgcctgtctagacgccagctagagacggcacgggacgtgcgcttaacgccggaagcaggagctcacgtgcgcgcgtgccgctggggtcggggggtggcgggcgggcggggcctccgcctggtgggtcgccgtcgtggccgcgcagtcggaggggcatactggagtgtgttcgaggggacgggcgaggcacggtcagacccgactggggggctgtgggtggtgttggcgctgaaaagacgcgtcgttcggttgagcgcctcgggctccgggcgtcgcgggcgagcctcactacgccggggcgggtggcgcgcccactacgtcgaaagagcctccagaccagcagcgcannnnnnnnntgcagcagcgctgcgcctgtccgggaggtgtgggactgcgtcgcgcggtcaagcgtgcgggcagaccggagcgctagcggtctggtcgcgtctccctgtgtcgtgggcgctgcacaggcgggcccaccggggagggcccggtcgcagaggggcactcctggcggccagcccccgaacccggcggacacaatactacgcagcacggcagcctgaaagactagccggtctacgcctaccgatacaacggttgttaatatttgaaatgacgcgccacccgagggcccgagttgccgcactgttcgttcttaacgtcgggggccccgctctcggtcgctgtgggggcgcgtgtgggggtggagcggagctccccgcgctcgaggggggacaatgttggcgccctgtggtccccgccggtgctgtggaattccctgtgacggcctgttggcttgtgtctccgaacgaccgaggaaactgcgcgtcactgggccccgcgtctgccgcgggtgggggggtgcggtgggcccgctcctccgcgagtggtgggcagccgaaatgatacggggtgccggccgagggggtccgccaggactcgtacaccgacgctcgtgacgacgggtgcgtgcccgatcacctgaaaccccggtgagagccaaggtggctgggtggnggcgncgaggcggcctgtaaactaaaagaggcgagcaaccg

SEQ ID NO: 10449 - DNA, 1014 bp, Homo Sapiens
  misc_feature (12)..(12): n is a, c, g, or t
  misc_feature (76)..(76): n is a, c, g, or t
  misc_feature (82)..(82): n is a, c, g, or t
  misc_feature (127)..(127): n is a, c, g, or t
gaggctaaaagnattcttgaagatcatggctccactgctgggagagattgatgatgaagacaaagacaaggatganactgancagttaaagcagactcaaacatctgagggtgtatgatggtcccancaatgtagatctgatattttctgatcaagaggaagatgaagaaagtgaaggatgcccagtgtctattaatttgtctaaagctgaaactcgaggctttaactaattatggaagtggagaagatgagaatgaggatgaagaaatggaagaattcgaagaaggccctgtggatgtccagacttccctccaggctaacactgaagctactgaagaaaatgaacatgatgaacaggtcctacaacgtgactttaaaaagacagcagaaagcaaaaatgtcccattggaacgagaagccactagtaaaaatgaccaaaataactgtcctgtgaaaccctgttacctcaatatcttggaagatgagcaacctttaaatagtgctgcccataaggagtcacctcctactgttgattcaactcaacagcctaaccctttgccgttacgtttacctgaaatggaacccttagtgcctagagtcaaagaagttaaatctgctcaggaaactcctgaaagctctctggctggaagtcctgatactgaatctccagtgttagtgaatgactatgaagcagaatctggtaatataagtcaaaagtctgatgaagaagattttgtaaaagttgaagatttaccactaaaactgacaatatattcagaggcagatctaagaaagaaaatgatagaagaagaacagaaaaaccatttatctggtgaaatatgtgaaatgcacaccgaagaattagctggaaattctgagacactaaaagaacctgaaacggtgggagcccagagtatatgagatgtcttcagaggctcatctaactctgtccttacatactcaatgcatatatgaaaacaatactaaataaacatctgatctgtataaaaatgt

SEQ ID NO: 10450 - DNA, 849 bp, Homo Sapiens
  misc_feature (564)..(564): n is a, c, g, or t
  misc_feature (566)..(566): n is a, c, g, or t
  misc_feature (568)..(568): n is a, c, g, or t
  misc_feature (572)..(575): n is a, c, g, or t
  misc_feature (577)..(577): n is a, c, g, or t
  misc_feature (579)..(580): n is a, c, g, or t
  misc_feature (584)..(584): n is a, c, g, or t
  misc_feature (596)..(596): n is a, c, g, or t
  misc_feature (605)..(605): n is a, c, g, or t
  misc_feature (702)..(719): n is a, c, g, or t
gggggcgacttggtgttcaccgccatcttcattggggctgtggcggccatgactggctactggttgtcagagcgcagtgaccgtgtgctggagggcttcatcaagggcagataatcgcggccaccacctgtaggacctcctcccacccacgctgcccccagagcttgggctgccctcctgctggacactcaggacagcttggtttatttttgagagtggggtaagcacccctacctgccttacagagcagcccaggtacccaggcccgggcagacaaggcccctggggtaaaaagtagccctgaaggtggataccatgagctcttcacctggcggggactggcaggcttcacaatgtgtgaatttcaaaagtttttccttaatggtggctgctagagctttggcccctgcttaggattaggtggtcctcacaggggtggggccatcacagctccctcctgccagctgcatgctgccagttcctgttctgtgttcaccacatccccacaccccattgccacttatttattcatctcaggaaataaagaaaggtcttggaaagttntnanaatnnnnanannctgnaactcctcaaancccccccangcaatgtggatcttgtccaattcactgaaaaaaggtacaaatctattgtccaggtccgggacggctttctactccttcaaaattcctttggcttggnnnnnnnnnnnnnnnnnnaaaaaatttttaaaacattctttgtggcgggggggcccaaaaaggagggagaaagggggaaatattttcttctccaggaaaaatcccccccacaccctggtgcgtggaccctccccccaataaaaaaacc

SEQ ID NO: 10451 - DNA, 428 bp, Homo Sapiens
tgtcatgcagttgaggggacttagtctcaatcccaggctcctcttgactctgggcagctttaatcaggttgggcagcctctgctacagcgtggagtgggatggctctcttccctcagccacgccgcttgtgaggacagaggtgggggagtgggaagtgggaagtcaccagagaacaggagagggatttgagggcgcgaccccagcgctctccacggaccagccagagggactggagccaggtgtgcatgggttcaaggccctggccctgcccagcctctgtcttgggagctcagccccagggttcggtcgtcagcagtttcccaagaacaagatgtgatggcatctgctgctgaaaccctgatgaggaccaggccccctgcaccgctgtcagcctgaggaattaaagctttggtgctgggaagagcat

SEQ ID NO: 10452 - DNA, 1144 bp, Homo Sapiens
taaaatcccccaagccccccaagacttggccaattagtgttccaaataccgggcccctggaaactgggaatgagtctcagccatccacgcgacgggtcccgtgtaaactcgctggcaaccaggagctcgccctgagcaacagttctggctctccttggtcaacaggggcaccgccttagccactgggcgcccggtccttactaaccggggtcccaccccgtcatctggctcagaggcacacgttgatttgcttggagagctctctctccagatccaggatgagggcgtcgaagtctttgagattcaggtgcgggttgaagggcgcatcgaagtcgtcttcgaagtcaccggtgaccctcggctcgccgacctcctcgtcctcgtcctcgctgtcactgcccgtcacgtggtcgtagtctggcccggacaggaaatcccgcccacagggcaggaagtcccgcccgcaaacgctccagtcgccggcgtagcggttgtctcggggggctttcggggcctcctcgaccgcggggccgagtcaccacttcggggtctgccagcggcaggtgccagaggtggctgtcgtttgggtcgcaagtaaggcgcgacatctggagattgtcggggcagccggggatctggccaagactgcagcaggtagtgcagcacctcgatgtggtgcttgaagtccactgcactggcaaggcctgggccggagctgcgggcacgaggccttgtgggcgcctggcgtgccggcagcagcacaggcccgaagcacacggccaagttctgtggggtcatgcggttgtaggcatggaaggaggagacgaggcgcaggtggtccaggagaagcgtcagcgtggccctttccacatctggcaggcagctgaggagccctcgggtgccctcagtggtggggggaactctgtttggggggtcccgggccatggcctccagtaccaccttatacaggggctgggtgatgagcggggtgggcactctcgaagataatccttgaggatgccagtgatgacattgatatcggggtacaggtcctcagataggcagaccgctgcactgtcccgctccaaggcatcccgaagctctttcttcactgccgctgagccacaaagacggtacagtccca

SEQ ID NO: 10453 - DNA, 727 bp, Homo Sapiens
  misc_feature (629)..(643): n is a, c, g, or t
ccccgtggccgaggttcccacagcagcaggggccctcacgcccacacctgcacccaccacgaccaccgccaccagggaggaggcctccacgtccctgcccaccaagcccacccagggggccagctctgccagcgagccccaggaagcccctccaaagccagcagaggacaagaaaaaggattagtcgagactggtcctcacctgctccggctcctggcgaccactacccctgcgtcccggccccctcgcctcccctccctgtcgccctttccctggacagatcaggccggggcggtgggaggcccgcctcaggtcagggcccagcgtgtgacgtaggggccggggcaggccagggtttgtttgtggaggcgctgtctgtccctctgtccctctgtgtttccagccatctcgccctgccagcccagcaccactgggaatcatggtgaagctgatgcagcgttgccgagggggtgagtagggcgggtggtgggccgggcccccctacgggatgcccacggccgttcatcatcttgtccctcgtccccctaccacactccccctcctagaccgccgccctttaacacagtctggatttaataaattcatatgggtgtttaacttaaactccnnnnnnnnnnnnnnnggcgccgctctagagtatccctcgagggctccaagctacgcttacccagctttctgtacaagtgtggctatagtgattaatgct

SEQ ID NO: 10454 - DNA, 368 bp, Homo Sapiens
cgtcctgctgggccccagggggcttctaaggagccagagggagcatggttgcaagaccccggcatccacgtgggccagtccccggcccctcctcaactggagccgaaaggcccagcagggcaagactggaggctgcccccagccctgtgccccagtgaagccagctccgccctcatccttgaagcacccagggtggccgtgagggccaggatccctgcacgcctcagccctggctccagctggcagcaagcaccgagcatgccctccccacccagaggacctccgggcaatgcctgtcccgcctcatgctggaggctgcctcgggcacctgcctgcccattaaagactggtcagacctgtctgagccc

SEQ ID NO: 10455 - DNA, 316 bp, Homo Sapiens
tgcgatcgaatcgagccggtacccctagttagaagttcaatagcaaaagccacatttaaaaagaccacatgaaaggctgattctaatggtgtgtaggtcttgaggattaagcacacaaatttcacaaacttctgtttgagtaaacaaactcagccttctgtaaatatacatgcaagtttggaaacagtaatactgtacctataaatatatgctgtctgttttgtgtacagtatgtaaaaactccttttctgccacactaaaaatgcaagccatttatggggatcctaaaactgctattgaaacttctaaaactagg

SEQ ID NO: 10456 - DNA, 467 bp, Homo Sapiens
ctcggtaccctagtttagaagttcaatagcattcagatggaaggtgcttccaaaagatattcactcccactccaaactcttcagaaattacattatggaaccataaagcaggaatgaataatacatcaccagcttcaagggaacattcatatcttctagccttggaaaaaagtggatatttagccaagtctgggttatctatattcagtacttctgatttagtaccttttaaatataaatactgggcatctcgaggactgaagagtacaacacgcttttttcctgtcacttgtattaacaaattatccattacatcataatgagtccatagttgtaatcctggtgaactaattcgaaaaacactggaaaagaactgttcctctttgaagaattctggaaacttaatatctcctttcaacaaaggaaactgctattgaaacttctaaactaggggtaccgactcgatc

SEQ ID NO: 10457 - DNA, 599 bp, Homo Sapiens
cttgaaggggaagtgcagcagaggctgaagaaccaaaaggaaaaaggccacagtgaaggccgactccttagtttcttggaacagtctgagcacaagacttcagatgcagacatcaagtcttcagaaacaggagccttcagggtgccttcaccagggatggaagaggcaggctgcagcagagagatgcagagttctttcacacgtcgtgacttaaatgaatctcccgtcaagtcttttgtttccatttcagaagccacagattgcttagtggactttaaaaagcaagttactgtccagccaggtagtcggacacggaccaaagctggcagaggaagaaggagaaaattctgaatttctagggtccaaaagttgacaaaaccattagtaggaggggtgggccatgttcattaagccatagtggtccctagttcattgttgagcaagttttagccctgcagttttcaccaccagcacctacccagcattctggtttttatgttttttatgatctatgcagacaactgtgtattctgttttataacagtttgtttgaatttacttacagttaaaaaatttaaatatatttatatttgtacgaa

SEQ ID NO: 10458 - DNA, 237 bp, Homo Sapiens
cataaagaaagaaacggcaatgcaatttaaaaactggtaggccgtttaaaagagccggtttgacctctgacaaacccagccaagacaaggccccttggcccggctcgcgagtctttgtagagagcagagcttaccctgacgacgatggcgttttgtggttaaagtgacttgggcgcacccccaggcagcaatgtgctattgaacttctaaactaggtgctattgaacttctaaacta

SEQ ID NO: 10459 - DNA, 383 bp, Homo Sapiens
cagtgctgaccctgcagcactttcagcatatgcacatcaaagttggagaccgcgctgaacttaggagggccttcacacagactgatgtggctaccttctcagaattaacaggggatgtcaatcctttgcatttgaatgaagactttgcaaaacacaccaagtttggaaatacaattgtacatggagttttgatcaacggacttatctcagctctcctaggaactaaaatgccagggccaggctgtgtatttctttcccaggaaattagctttccagcccctttatatattggagaagttgttttagcttctgcagaagtgaaaaagctgaagcggttcattgctattattgcagtgtcatgttctgtaatagaaagtaaaaag

SEQ ID NO: 10460 - DNA, 1126 bp, Homo Sapiens
ggctggaccggtccggaattcccgggatgggcagggaagctccaggcaaagagcccagcaaacagcagcactcagctaaaaggaagactcacagaacacagttgaagaaggaaagtggcgatggacctcatcccaaatttggcggtggaaacctggcttctcctggctgtcagcctggtgctcctctatctatatgggacccgtacacatggactttttaagagactgggaattccagggcccacacctctgcctttgttgggaaatgttttgtcctatcgtcagggtctctggaaatttgacacagagtgctataaaaagtatggaaaaatgtggggaacgtatgaaggtcaactccctgtgctggccatcacagatcccgacgtgatcagaacagtgctagtgaaagaatgttattctgtcttcacaaatcgaaggtctttaggcccagtgggatttatgaaaagtgccatctctttagctgaggatgaagaatggaagagaatacggtcattgctgtctccaaccttcaccagcggaaaactcaaggagatgttccccatcattgcccagtatggagatgtattggtgagaaacttgaggcgggaagcagagaaaggcaagcctgtcaccttgaaagacatctttggggcctacagcatggatgtgattactggcacatcatttggagtgaacatcgactctctcaacaatccacaagacccctttgtggagagcactaagaagttcctaaaagttggttttcttagatcccattatttctctcaataatactctttccattccttaccccaggtttttggaagcattaaaatgtctcctctgttttcaaaaagatacattaaatttttttaggtaaatctggtaaacagaaatgaagaaaagtcggccttcacgacaaacaaaaagcaccgactagattttcctttcaggctgaatggatggactccccaaaattcaaaagaaacttgagtcccccaaaagctccggcctggaacctgggaactccgcagccccagtcaataaaacctttcaatttttgctgggccatgaaaaaccccccccgccagggggtctttccctttccccctttaaatggaacggg

SEQ ID NO: 10461 - DNA, 174 bp, Homo Sapiens
ctacgttgagaagttcaatagcattcataacaacagccaacatcgtgtgaatgtgtgtcaattggtactttacacagacagtatcttatttaatcctcacagacaaccctatgaagcaggtaccactgttgtttccatttgaagatgaaaaatagtgaccaggcacagtgactc

SEQ ID NO: 10462 - DNA, 235 bp, Homo Sapiens
cctagttttagaagtttcaatagcattttaatacacggactataataaccaaccagctggtatattattttgtccttttccattataattttcattcttgtaattagcaaccaagttaatgattgcattcaggattatctaaactgtttttacaaaaacaaaccccacgaatcaggagcctaacagctttctatttccttaattaaaaaaactgattctttctaactttttctta

SEQ ID NO: 10463 - DNA, 457 bp, Homo Sapiens
cctagttttagcagtttcaatagcatatgctgtactctgagaagcctctggaatgaagtcatgcttcccgcacccctgtctcctctttatattggcagtggataaatcgaaagtcagataactctactgtaccaaagctagttccatatagcaaacaggatctacaaggattaaggcacatctcttggcccaccgaagattcatctggatcctgtgttcaacccgtttcatccatgtatgaaagtgattcaaccgttaagtagccatttatgatataaattgaatacttcttccatatggtggcttgtagatagattggcagacctgtccccaaccccttccctgttgaccatggacaatggagggtttgctgtataaacttgactgaagggtttgcctttacgcttggggtggattactcaggcagcaatgtgctattgaaacttctaaaactagg

SEQ ID NO: 10464 - DNA, 521 bp, Homo Sapiens
cctagttttagaagtttcaatagcagcatgagcaaatgtacgccacacacacccagctctttttagagaaggatgaggaaattaagagtttgcaaaaaaccattgaacaaatcaaaacccagtggcatgaagaaagacaggacatgcaaacagataactctgatattttacaagaaacaaaagttcagagccttaatatagaaaagggaagtgaaaagcatgatgtatctaaagctgaaacggaaagattagtgaaaggaataaaagagcgagaactggagattaaacttctaaatgaaaagaatatatctttaactaaacagattgatcagttgtcccaagatgaagttggtaaactaactcagattattcagcagaaagatttggagatacaagctcttcatgctagaatttcttcaacttcccatactcagatgttgtttaccttcaacagcaactgcaggcttatctattgaaccttctaaaactaggggtaccagctcgattctaatcatgtcaac

SEQ ID NO: 10465 - DNA, 263 bp, Homo Sapiens
gatagatcgagctcggacccctagtttagaagtcaatagcataaagagacagagaaaaaatgtaagcctatctcaacctacagaatggagggcaactagaaccactgaaggggcttccataattccaaatttagaattggaataaaaataacaaagggcctcaatttctctaattggaccactgtctgggtgtttgtgtgtgggcctgcttggatgtgacacagagccccatgactggtgctatggaaacttctaaaactagg

SEQ ID NO: 10466 - DNA, 307 bp, Homo Sapiens
actagcatcgctgtcggggacagaagcggcttaggatgcgcccctgtgcgcatgaaactatgactgattctgggactaagggatgtgacgggaaagggacaggaagaaaaaaggaaatgggaaatcaagagcaaaaaacagcaaaggacaataaatcaattcaagaagatattaccatcactcccagggagtgcaaggtttctaaggagcaagctggctctcctcactcattgctgcctggggcttctcatactaggtgatattgaaacttctaaaagtaggtgctattgaaacttctaaaactagg

SEQ ID NO: 10467 - DNA, 705 bp, Homo Sapiens
acaggccgttgtacacttttaaacacctagaaagactagatgtttcaaactggacttaagttttccattatatacacagtagcattgaataaatggtatacatacataacacagactgtaatttgagtgtcttctaaataggaacattctggcctagaacccttccctttcccacctctaccaaccccgtggacagctataagccatctgtaatgcttagggggggttttaacaatttcacttgtttttaagaagtcttccctatgaattttaacacaaagtgtactcaatgtagtagtttactaattctacttttgtcatatactggcaacctttttaacatcgactagacgtaaattaggactcctatgtccgcttatatacactatatacacagcacagtaaatgaaaatgcagacataagggacaatggtcaatgtgcctcctcataaacacactggacactggtagaaagcctttgcacttctgtgctcctccttccccctgaaccagcacaaatatcaaaatgggtactgctcagagaattgatcaatttccaagacaaatatttcatatcaaaaggatagctacaaaatgtgtaatttactaacctcctacttttaacattactttgtgcacttctaaacatctagaaagactagatgcttcaaataaggacttaagtttgtccgctggtgtataccg

SEQ ID NO: 10468 - DNA, 503 bp, Homo Sapiens
gggaggctttgtcatggcggctgctgctgcacgctggaaccatgtgtgggtcggcaccgagactgggatcttgaaaggggtaaatcttcagcgaaaacaggcggcgaacttcacggccggaggacagccgcggcgcgaggaggcagtgagcgccctgtgttggggcaccggcggcgagacccagatgctggtgggctgcgcggacaggacggtgaagcacttcagcaccgaggatggcatattccagggtcagagacactgcccgggcggggagggcatgttccgtggcctcgcccaggccgacggcaccctcatcacatgtgtggattctgggattctcagagtctggcatgacaaggacaaggacacatcctctgacccactcctggaactgagagtgggccctgggagtgtgtaggatgcgccaagacccagcacacccccatgtggttgccacaggtgggaaagagaatgctttgaagatatgggacctgcagggctct

SEQ ID NO: 10469 - DNA, 1050 bp, Homo Sapiens
  misc_feature (467)..(510): n is a, c, g, or t
ggtgccgtcttctgatcttgcggatgaaaaggttgaaactgtttctcaaccatctgaaagcccaaaagataccatagataaaaccaaaaagcctcgtactcgaagatctagatttcattctccatctacaacttggtcacccaacaaagacactccacaagaaaagaagcggccccagtctccatctccaagaagagaaactgggaaagaaagcaggaagtctcaatcaccatctcctaagaatgagtcagccagaggccggaaaaaatcccgttctcagtccccaaaaaaggatattgcaagagaaaggaggcaatctcagtctcggtctccaaaaagggatactactagggaaagcagaagatctgaatcactgtccccaagaagagaaacttctagagagaacaaaagatctcagccaagagtgaaagattcttccccaggagaaaaatccaggtcccagagcnnnnnnnnnnnnnnnnnnnnnnnnnnnnnnnnnnnnnnnnnnnnaaggagaaccagaaagtggtctaggtccagatctcattctaggtccccctcaagatgtagaacaaaaagtaagagttcatcatttggtagaattgacagagatagttactctccccggtggaagggaagatgggcaaatgatggttggagatgtccacgaggaaatgatcggtacagaaagaatgacccagagaaacagaatgaaaatacaagaaaagaaaaaaatgacatccatctagatgctgatgagccaaattctgctgacaaacatagaaatgactgtcccaattggataacagaaaaaataaactctgggcctgatccaagaaccagaaatccagaaaagttgaaagagtctcattgggaagaaaatagaaatgaaaattcaggaaattcttggaataaaaactttggttctgcttgggtatctaaccgtggtagaggcagaggcaaccgtgcagaggcacttacagaagtagttttgccgataaagtatcaagaatgaactcggtggcatgtatcaaaaaccgctctcaggga

SEQ ID NO: 10470 - DNA, 613 bp, Homo Sapiens
  misc_feature (38)..(38): n is a, c, g, or t
gtagaaaggacagggaagccaagtctttctgaaaaaanaataatccatcaagtgggaagtcttttcagtttatgacacaatagcttcctgggcaacaaatctcaagtcctccatcagaaaggctaataaggccctctggctctcaattgcaatcaattgtactgtttcaagctttaatgagcttccctcacaggccaattattccagaagtctgtggatcccgctcccacacagcaagaggactcatggacgtctctagaacatatcttgtggcaattaaccagacttccgacacaatgggccaccaccagtgtgacagcaggacatcctaatatatggatcttgatttttaagtttcagtatctgaacttcgtaaattagtaacttttagctgggaaagtatagcatgaaaccagaggttctcagaatgactgtaagatagcttacatttcctctttttgcctttatctccccaactaaaatacaatgggggaagaagtctgcctatgatctttgaatgagctttttaaggaagaatattatatattgtttgctaaagcctattgaaataaagaatcatttaaatcttagaacccgcaaacccataaaaacc

SEQ ID NO: 10471 - DNA, 607 bp, Homo Sapiens
gggttcctgtttctgctcttggtgcaggatctgcagctactgctgcatcagaagaaatgtatgtgccaagagttgtaacctctgcacaacagaaagcaggaagaactattacagcccggatcacaggaagatgtgattttgcttcaaaaaatagaattagcagcagtttagctataatgggagtttctcctcccatgagctcagttgttgtggaaaaacatcatccagtcacagtgcaaaccattcctcaagcaactgcagcaaaatatccccggaccattcatcctgaaagtagtacctcagcttccagatcacttggaaccagatcagctcacacccagtctctcacaagtgttcattccataaaagtggttgactaaagtgaatatgtccatagtggggtcttttaatccctctggtcttaccaagggttagaagtcttttggttttaacttttccatattgttagaacatcatggagacatcatgttcatctgttcaaaattacaagaggctttttcaagctctaccatgctttgtaactatatgtagaaattattttaatgttattttttatttaagcaattaagtaaaacttttttaaatt

SEQ ID NO: 10472 - DNA, 433 bp, Homo Sapiens
tcaaaataaagattattagttactgaaggactgaaaaatcaaaaatcaacttcatgagatgctttaccaacaagtgttctcttttaatatttgactcagtaaaagtttttaagaaaagttaagtttgtgtttttatttgtgtatactctctagtgcttaaatgtatcaggatagaacttttctaaactaggtcagtcttttttccatatctatggttgaatacttcagttaaataaagcaatggtagatagcaaactatgttataattggcattttgggcacttcgttgcaattaattgctcaaaaaaagcatatctcaccacacttgatctctcgtttttccactctcatttatttcccttcactttcttcttggcttctgcaaagcagttgtttttcctttttccatagatgttaacaggggccgagctcc

SEQ ID NO: 10473 - DNA, 1080 bp, Homo Sapiens
  misc_feature (980)..(1027): n is a, c, g, or t
ggggtctcgacgtgtcaccggcggcgccgctgctgtggcaaaggaaggagctgactgggggagttcgaggcggcgggcggcggtgaccccggcctggaactgccccggtacggaagtgttccggggtccgtggggagcaggagagggaggcggcggaccgtcccgcgcggggcacgatgttgaacatgtggaaggtgcgcgagctggtggacaaagccaccaatgttgttatgaattattcagagatcgagtctaaggttcgagaggcaacgaacgatgatccttggggaccttctgggcaactcatgggagagattgccaaggctacatttatgtatgaacaatttccagaacttatgaacatgctttggtcacgaatgttaaaagacaacaaaaagaattggagaagagtttataagtcgttgctgctcctagcttacctcataaggaatggatcagagcgtgtagttacaagtgccagagaacacatttatgatttacgatccctggaaaattaccactttgtagatgagcatggtaaggatcaaggtataaactattcgacagaaggtgaaggaatcggttgaattggcccaggatgacgacaggcttcgtgaagagcgaacagaaagcaaagaagaacaaagacaagtatgttggggtttcctcagacagtgttggaggattcagatacagtgaaagatatgatcctgagcccaaatcaaaatgggatgaggagtgggataaaaacaagagtgcttttccattcagtgataaattaggtgagctgagtgataaaattggaagcacaattgatgacaccatcagcaagttccggaggaaagataaaaaagactctccacaaaaatgcagcgacagccgatgaggaaaagaaagccaaaaaaaggcaaaactccccaaaggtgaattcccagattaagaaggaacatgggtacgaaccaaccataattccatatctnnnnnnnnnnnnnnnnnnnnnnnnnnnnnnnnnnnnnnnnnnnnnnnnacggccaaataccttttccacaaacccattggaaaccttttggaaacaaacca

SEQ ID NO: 10474 - DNA, 346 bp, Homo Sapiens
tcggccatggtgctaggtgcagactataaagaggtgtgaggatcaacattttatgaaaaccagtgtcattctggatatagttcagatgctagtgcaaaggaagctcttggtatacggaaaaagtattcaacaataaattaggcatggttgcttccattttctgcctcacatacttttttttcgtggttaaagtgatataatgtctatgatattttagattggcagttgcaaactagtggtcctcaacgtgctttttatgacacctacaaggtctgaagactttgatttcatattaaaaatctgggtttcaggctgggtgtggtgttgcatgcctgtaatcccagca

SEQ ID NO: 10475 - DNA, 1016 bp, Homo Sapiens
  misc_feature (999)..(999): n is a, c, g, or t
cggtccggaattcccgggatgcgacgacggcgacactttgctacggagtgcatcggacgtcgaagcctagagtctctgcgtctttccctcttccgctgcctcattcctttccttcctagccttggtcgtcgccgccaccatgaacaagaagaagaaaccgttcctagggatgcccgcgcccctcggctacgtgccggggctgggccggggcgccactggcttcaccacgcggtcagacattgggcccgcccgtgatgcaaatgaccctgtggatgatcgccatgcacccccaggcaagagaaccgttggggaccagatgaagaaaaatcaggctgctgacgatgacgacgaggatctaaatgacaccaattacgatgagtttaatggctatgctgggagcctcttctcaagtggaccctacgagaaagatgatgaggaagcagatgctatctatgcagccctggataaaaggatggatgaaagaagaaaagaaagacgggagcaaagggagaaagaagaaaatagagaaatatcgtatggaacgccccaaaatccaacagcagttctcagacctcaagaggaagttggcagaagtcacagaagaagagtggctgagcatccccgaggttggcgatgccagaaataaacgtcagcggaacccacgctatgagaagctgacccctgttcctgacagtttctttgccaaacatttacagaccggagagaaccatacctcagtggatccccgacaaactcaatttggaggtcttaacacaccctatccaggtggactaaacactccatacccaggtggaatgacgccaggaactgatgacacctggcaccagtgagctggacatgaggaagattgggccaagcggaggaacactctgaatggacatgaagctgaacccggtgtctgaactccgtgagtggacagacccggcgtttgaccccaaaggctacctggagggatttaatttccaggatccccgaacnccgggagggaaaattca

SEQ ID NO: 10476 - DNA, 932 bp, Homo Sapiens
ggctgaacttacgatatctgccccaaacctctgtaaccccaactgaaatgaggagcttcctctcttcctgtgaaggatatgacagtccagcatcgatgcctgtgccctctggaaaaatttcctcctagcccttccagggccttatcataaaactctggatttagagtattcattgtgaaggcaactcccccttccccaagtttccttggagctgtatagctgggttctaagcttcaccatgcaaatcagaaattttatctctaagtacaggctgtgccgtgtctcacccacacccccctggggacttcagttccatttcaggttacctggggtataccttgatccctagagtgactggcagagtaagagaaggggagagataataggtgtgattattttaatatggaggtgggagtgtggttggagatagaaaggctcctccccaccatgtaatggcttcctctcagaattttattccaggctagcttgctgcaggtctgggtagttggatcatggctccactgggataggggtggaaagcttgcaggggagtagggttccagctctgggacatagtgctcaggaatttgaaaacgctgctatacttactctggttactacatgtcttccaatcccctttcccctacctgccttaaccaaggctcatactgtcctgtcctttacctcagatggagccaggaagctcagtgaaaggcttcctaaccatttgcactagagtctctgcagagagcaggtagagaagaacgtggcggtcccagagtgctagactgaccgtaataataaacctttgactcaacgcctctaagcagcaacacacacacaaacaaagaaccaaccaggggaccacccctcacaagagatcccccggagggggcacagcaatagccccacaccaccctggaacaaaaggc

SEQ ID NO: 10477 - DNA, 135 bp, Homo Sapiens
ggctcggtaccataatcgttctgcactacagaaaattgctagcttctaactttaaggatttaaagtgatgggtctggtaactgcattttagaactggaacatgctgctttccttccagatacacaatgtttgatg

SEQ ID NO: 10478 - DNA, 452 bp, Homo Sapiens
cgtgggccctagtcttagaagtatcaatagcatcacgcatgagccgctctgctgattaaaatcttcctggatagcgtctcccccacaatttcgtaaggagttgagatgatcttgtactttcacacatattctgtcaatcatctgctgggtggtgctggtgacaataccctgctgcaggcggtaggcctgctcttgaaggtatttactagtctcgtgatttcgtagcaggtagttttctatcttttgcagagcgtcttctgtttatacagggtttgtttatagggcttgagaagcatcatacataggaattggcataaatcttaatgtgtagttcttttccatagcaacagctatatcctgaaagccttgtgccagtgatgtcgttcttgtcccatattacagtcctgagcttagtgttgatctgcagtgctattgaaacttctaaaactagg

SEQ ID NO: 10479 - DNA, 288 bp, Homo Sapiens
tttctatgtatatgaattgcccccacctccagactgtgagacgggattaaatgagatgatgagaaagtgcctggaaaactgaagttcttcaaatataagggctgctattcctctaccttgattatggctactaaaggcctaagattaaacggaaatcgtgtttatttttacaaacatatttcaagtttgacaactctttcacactagggatgctagtcaacactattatccactaacacctacagtataagcaaagcaaaaaaatctttcttccatagaaaatatctg

SEQ ID NO: 10480 - DNA, 315 bp, Homo Sapiens
aatcgagctccggtacccctagtttagaaagtttcaatagcatctaatacagaatctggtatgcaatagtttttaaagaaagtgatgcttcaccctttcttctctctgcattccctaaaacggctagcacagagcctgacatgtggtaggtacaaacaaatacttggactggataattatgcatgaaatcccagacctcagggtgatcagggcttaagggggcagtggtaatggtagacacaggactgcggctatagtcacagaacaggcctcccaggcagcattcatcctgctattgaaacttctaaaactagg

SEQ ID NO: 10481 - DNA, 380 bp, Homo Sapiens
  misc_feature (221)..(281): n is a, c, g, or t
cctagttttagaagtttcaatagcaggtaacaccagcaggtaaatggcctcatgggcatcatcgacaactggaatgcttaaaggagtggcagggattctgttccagtcaactcaagctacgcagcaaggcaagctcagttgacagaatttcctgtaattcaaaagaaactaaaaattttctatggcttctattgatttatttatttagagacagggtatcnnnnnnnnnnnnnnnnnnnnnnnnnnnnnnnnnnnnnnnnnnnnnnnnnnnnnnnnnnnnntgggctcaagcgattccccccacctcagcctcgcaagtagctgagattacaggagtgagccatcatgccggcggtgctattgaaacttctaaaactatg

SEQ ID NO: 10482 - DNA, 356 bp, Homo Sapiens
aattctgagattgacttgtttttcttgtagcttccccttacatgtttagctaaatacggtgattcccagtaatgaaaatagtaattagactcaagagaggagctaaagaaactatgtgaactattgagagctgattgtccaatttggtattcattgaagtataaaatgccattttgatatagttaggtagaaatacaaatgagatattttgtggtttgttggttacaagaataaaacagatctttattattatttccctttaagaagaaatctgcaagataattcaggagaaatttttaactgtggagtgcccaggtagccagtttttcatttgttttaacataagataccacagc

SEQ ID NO: 10483 - DNA, 661 bp, Homo Sapiens
caggagtctgaatctcagacccaatcagctaagcacacagatttgcctaattgaatcagtcaggaacaggcttgaatcagtcgaggacgggcatcaagcagtcaccatccctgacgcccagcaattttccttcacccaaccaaagttccaggctcttcaaggaactgaccacagcagtgacttagcttttgacttcctcagccaacaaaatgataacagtgggccctgccctaaacagtgatgctgatttcattgattctttattgaagacagagcctggtaatgatgactggatgaaagacatcaatcttgatgaaatcttggggaacaagttcctaaagaagaaagggaagacaatttacaaactccaagcactaaaaggcagtatattacagaaactctgtagaggctgaactgttgatgttcaggtggactacatgaagataacatgcttaaaaatggaaagcagaaagtaactgcagtgatgaacattttggtccaaattcttgttttaaatcttacacctgaaagtaaaatattgggatcacttttccctgtctaaactccaggatacagtatccaatttatccaaacagaactgtggtgtcaatgtgtaattaattgtgtaaacatagccttcccaagtttctttttccctgga

SEQ ID NO: 10484 - DNA, 303 bp, Homo Sapiens
ctagttttagaagttcaatagcaaaggtaaagcaaaaaccggtgaactctcttaatgcagaatggccggggtccttatttattttttcctggtgtggatagttattagattacaagtaaaacttaaaattgattttttttaaagccggacattcatggcttagtatattttagttttctggtgaacgtttggaaaatagctttatggggatttaatttatatgccatataatcacccacttaaagtgtacagttcagtggattataatatattcacagagttgtgtaaccatcaacacaataa

SEQ ID NO: 10485 - DNA, 252 bp, Homo Sapiens
  misc_feature (234)..(234): n is a, c, g, or t
tagatcgagccggacccctagtttaaaagtttcaatagcagcttaatctaaaatctgatggtcctaatgataatgacgtttctagagccaagccacatggctctttctcaatctggtctcttaagggtctcaaagtctctaaggagaaaactaaattaacaagttagccatgcatcgtgtaagcaactcgtatcatacatagaaactggatagacaagtacgattactgctatngaaacttctaaaactagg

SEQ ID NO: 10486 - DNA, 305 bp, Homo Sapiens
tcgatcgagccggtacccctagtttagaagttcactaggataatggctgcaggtctatccatgtctggggcaatgacaggagagctacttgttagaggctaaataagtattctaattatctatctatagagtctctctatatcacagtttctttatccattggcccattgatgaacacctaggtggtgtctgtatctggactatggtgaatggtgctgcaataaactggggagtgcagagataatctcattcccttgggggatatacccagaagagggatggctattgaaacttctaaaactagg

SEQ ID NO: 10487 - DNA, 301 bp, Homo Sapiens
cgatcggccggtacccctagtttagaaggttcaatagcagtcttacatgtctaaaaatgcctttattctgtcctcattatgattaatggtttcagctgggtatagcaacctagatggaaagtaatttttactgagaacttggaaggcttggctccatggttttccataagtcagagtggctaggagagaaaatctgccaccattctgatactggttcctctgtagtgacatttttaatttttctggaaattttcaagaaattccccttatccttggtgctatggaaacttctaaaactagg

SEQ ID NO: 10488 - DNA, 258 bp, Homo Sapiens
tacccctagttttagaagttcaatagcataatatcacaatcaggaaatgatatgatacaacatatgtataattccatgccactttaccacacatggagtcatgcaacagtcgcaatcaaggtacagaactattctatcaccacaagaattaccctcattctacccctttattaaaagttctactcatccctctgcctctcccatctatacctagccctgggcaaccactaatctgctattgaaacttctaaaactagg

SEQ ID NO: 10489 - DNA, 239 bp, Homo Sapiens
tggagatctccggtagagtacagatcaatcaaatcaatagtgcagtctggtaaggaacaaaaattagccatgagcccaaagtatcaataaacggggagtgaagaaacccgttttatacaataaaaccaatgagtgtcaagctaaagtattgcttattcatgagccagttaaaacaaatcacaaaaggaaaactaatgttagctcgtgaaaaaaatgctattgaaacttctaaaactagg

SEQ ID NO: 10490 - DNA, 552 bp, Homo Sapiens
aggaagttttatgtatgtatataattgatcatttattatttgccatttaaattggctaaaattacatagaatgggttatttaatcaaatattagtatggcaatgagaccaccacttctcctgttgtccttcccagcttctccccaacctccccttttccctagtttataagacaggagaaaagggagaaagcaaaaagctggaaagaaacagaagtaagataaatagctagacgaccttggcgccaccacctggccctggtggttaaaatgataataatattaacccctgaccaaaacgactggtgttatctgtaaatcccagacattgtgtgagaaagcaccgtaaaactttttgtcctattagctgatgtgtgtagcccccagtcacgttcctcacgcttacttgatctattatgaccctttcacgtggaccccttagagttgtaagctcttaaaagggctaggaatttctttttcggggagctcggctcttaagacgcgagtctgccgacgctcccggccgaataaaaacctcttccttctttaaaaag

SEQ ID NO: 10491 - DNA, 833 bp, Homo Sapiens
  misc_feature (68)..(68): n is a, c, g, or t
  misc_feature (501)..(501): n is a, c, g, or t
  misc_feature (504)..(504): n is a, c, g, or t
  misc_feature (522)..(522): n is a, c, g, or t
  misc_feature (527)..(527): n is a, c, g, or t
  misc_feature (809)..(809): n is a, c, g, or t
caccacacacacggcacaagatggccggagaggcagcagcaccccgagctgtcaggcgttccgccgcnggccgcgaggcccgccggccggcggggagctacgcccggacggccagcaggcccgcgggagtggggctgccgcggctgaggcgaggcgggccgcgcgcgtcggcgtcacagcccgcggcagaggcgcccagggcggccgggcccacgacgccgaaagcgccgctgcggttgccgcctcggaggctcccccgggccccggcggctggacccggcgcgggcgggaggctcgggcgggcggtccggcccgggactcgggtttgggcgaccaggaggtgccggtggccgcgctcggacccggttctccaacggaggagctttttaacctctttccggtgaagtgggaactcatcttcatgatcgaatttaaaaagaacaatggaacccctgactacctttcaacaaaaaataaaacttggtttttttccctccctanaanaaaaaagcaagcaaaaanattanaatcccttgtcgggcccgccctcgggcccctcgaaagaagcttttctaagacccatttccttttgggcgcgccgcggcccccagttagggtaaaggggaaccctggggcccataacctgttcttccctaagggaaaacccctgggccccaggaccttaagggccctctgggacttctctccaccccatctaacaaaacgcgccccgcgggggagtataacccgaaggctgtgtctttgtaaacacatatacccacaaatagtgggaggttcttcctccgcgngccctgccatcactcggcggggct

SEQ ID NO: 10492 - DNA, 1528 bp, Homo Sapiens
caaggtgaccgtggtgagacggccccgctggacccctggtgctcctggtgctcctggtgcccctggcccgttggccctgctggcaagagtggtgatcgtggtgagactggtcctcctggtcccgccggtcctgtcggccctgttggcgcccgtggccccgccggaccccaaggcccccgtggtgacaagggtgagacaggcgaacagggcgacagaggcataaagggtcaccgtggcgttctctggcctccagggtccccctggccctcctggctctcctggtgaacaaggtccctctggagcctctggtcctgctggtccccgaggtccccctggctctgctggtgctcctggcaaagatggactcaacggtctccctggccccattgggccccctggtcctcgcggtcgcactggtgatgctggtcctgttggtccccccggccctcctggacctcctggtccccctggtcctcccagcgctggtttcgacttcagcttcctgccccagccacctcaagagaaggctcacgatggtggccgctactaccgggctgatgatgccaatgtggttcgtgaccgtgacctcgaggtggacaccaccctcaagagcctgagccagcagatcgagaacatccggagcccagagggcagccgcaagaaccccgcccgcacctgccgtgacctcaagatgtgccactctgactggaagagtggagagtactggattgaccccaaccaaggctgcaacctggatgccatcaaagtcttctgcaacatggagactggtgagacctgcgtgtaccccactcagcccagtgtggcccagaagaactggtacatcagcaagaaccccaaggacaagaggcatgtctggttcggcgagagcatgaccgatggattccagttcgagtatggcggccagggctccgaccctgccgatgtggccatccagctgaccttcctgcgcctgatgtccaccgaggcctcccagaacatcacctaccactgcaagaacagcgtggcctacatggaccagcagactggcaacctcaagaaggccctgctcctccagggctccaacgagatcgagatccgcgccgagggcaacagccgcttcacctacagcgtcactgtcgatggctgcacgagtcacaccggagcctggggcaagacagtgattgaatacaaaaccaccaagacctcccgcctgcccatcatcgatgtggcccccttggacgttggtgccccagaccaggaattcggcttcgacgttggccctgtctgcttcctgtaaactccctccatcccaacctggctccctcccacccaaccaactttccccccaacccggaaacagacaagcaacccaaactgaaccccctcaaaagccaaaaaatgggagacaatttcacatggactttggaaaatatttttttcctttgcattcatctctcaaacttagtttttatctttgaccaaccgaacatgaccaaaaaccaaaagtgcattcaaccttaccaaaaaa

SEQ ID NO: 10493 - DNA, 782 bp, Homo Sapiens
  misc_feature (712)..(720): n is a, c, g, or t
ggagcgggcagtatctgcagaactccacggcaagcagcagtaccgagtaccagtgtatcccagacagcaccatcccccaggaagactaccgctgctggccatcctaccaccacgggagctgcctcctttcagtgttcaacctggctgaggctgtggatgtctgtgagagccatgcccagtgtcgggcctttgtggtcaccaaccagaccacctggacaggtcggcagctggtctttttcaagactggatggagccaagtggtccctgatcccaacaagaccacatatgtgaaggcctctggctgacctatctgagggctcggctgaccagctgactatcctcagcagctgggcttgcctgtggagggagtgacttgcactggcagcactgcatgtcacctgggaacccctgcagacaaagctaacatcccagacagacagatgtgaccaggacaaacgtgcaataatgccaaatgttaaaatgtgagtttaccagcctagctatgggactgctggctccctagtccagaatcatgggggtatgactgcctctccaaccctgtgggctgtaagcaagctcaggctagtctccccactgggggctgtgccccctcctgggacgggtccgtgggcagccccatcactggggtccataatggtgagaatgtaactaaagcccctgctgctgctgctgcacatgccacaacaaggcnnnnnnnnnctgcctgggggacaatcccatcgtgggagtggttctcctcaccttaaggtctgggacaggga

SEQ ID NO: 10494 - DNA, 470 bp, Homo Sapiens
agggaccccctccccagcgctgagctgtacgtcctgtgccggatcctgcatgactggccagacgacaaagtccacaagttactcagcagggtcgccgaaagctgcaagccaggggccggcctgctgctggtggagacgctcctggataagaagaagagggtggcgcagcgcgccctgatgcagtcactgaacatgctggtgcagactgaaggcaaggagcggagcctgggcgagtatcagtgcttgctggagctgcacggcttccaccaggtgcaggtggtgcacttggggggtgtcctggatgccatcttggccaccaaagtggccccctgaagcccaggcagcatgttcattatagggatgtcctcccccaggctgcaggtggaccgcccggtccccaagtaccataggacagtcacataggagcgtgtagtcgtgactgaataaagaaagcaaaagcctgaagaaaa

SEQ ID NO: 10495 - DNA, 1081 bp, Homo Sapiens
ctcgagcggttcctgtcagggtcagccggcgggccccctgggtggtccacctgcaaatcgcggagcggcgccccagggatcgatggcgatgaactataacgcgaaggatgaagtggacggtgggcccccgtgtgctccggggggcaccgcgaagactcggagaccggataacacggccttcaaacagcaacggctgccagcttggcagcccatccttacggctggcacggtgctacctattttcttcatcatcggtctcatcttcattcccatcggcattggcatctttgtcacctccaacaacatccgcgagatcgagattgattataccggaacagagccttccagtccctgtaataaatgtttatctccggatgtgacaccttgcttttgtaccattaacttcacactggaaaagtcatttgagggcaacgtgtttatgtattatggactgtctaatttctatcaaaaccatcgtcgttacctgaaatctcgagatgatagtcaactaaatggagattctagtgctttgcttaatcccagtaaggaatgtgaaccttatcgaagaaatgaagacaaaccaattgctccttgtggagctattgccaacagcatgtttaatgatacattagaattgtttctcattggcaatgattcttatcctatacctatcgctttgaaaaagaaaggtattgcttggtggacagataaaaatgtgaaattcagaaatccccctggaggagacaacctggaagaacgatttaaaggtacaacaaagcctgtgaactggcttaaaccagtttacatgctggattctgacccagataataatggattcataaatgaggattttattgtttggatgcgtactgcagcattacctacttttcgcaagttgtatcgtcttatagaaaggaaaagtgatttacatccaacattaccagctggccgatactctttgaatgtcacatacagcagcagcatatctccctattatagaccagaatacaggaatatcgagcacttaagtaacttagctgactttacacaggtaataataaagagtgaggttcataaccag

SEQ ID NO: 10496 - DNA, 511 bp, Homo Sapiens
tcgatacacatgctgtgagatatacacttacattctgaagcgtgttatgcacggtccccaatgacctgcatgaaattgaacagcgagctaaatatagagtggaagcaagcaatttcttcaaccgtccttggaaaagtaatagttcaaccagatcagaatttcacaggatagattgctggtgttgtctcaatatcaacagcactgttattactacttgggtttttcctgtggctgaaaaagagaaagcaaattaaagatctgggcagtgaattagttcgctacgatgcaagagtacacactcctcatttggataggcttgtaagtgcccgaagtgtaagcccaactacagaaatggtttcaaatgaatctgtagactaccgagctacttttccagaagatcagtttcctaattcatctcagaacggttcatgccgacaagtgcagtatcctctgacagacatgtcccccatcctaacttagtggggactctgatatatccagtccagaattg

SEQ ID NO: 10497 - DNA, 1043 bp, Homo Sapiens
  misc_feature (527)..(527): n is a, c, g, or t
  misc_feature (571)..(571): n is a, c, g, or t
  misc_feature (813)..(821): n is a, c, g, or t
tgaaagctcgcactcttcccgagaaaggtgcctagggaagagttggtcagacagaaggtagtctgaatcttaaaggtttcagatgaatgtttgaagtagaacctgggaaatctgcttcctagggctgttagaaggaaactggtctcccttaaaattacgtcagcatctgaggcagtttcctaagggaatttcttttaaattcaaaagttcaactgcaggaataaatagctgtacaggactagatcttcccatccctcatcttttccccttccccgagtaacgactcaaaaaggcttctgaaattctactcagaatcggagccgtttgcattccaacaaggatcccttaagccaaatgctggtgtgtttgtgtagaatgtccctggggtaggggcggtagctgtggggagggaatgtggtgcaggggacacctgccctctgcccttgaaattgcaccataagatgctgcctatgtcactcacagtggtgctgatactatccgccaaagacaaattgtgaacacggaanaatggtcgttccctactgtacatcctcaggacagacttaactanacttggagacaggagattgttcagaccatattgtagtgggtggtgatcattgttttattttggggggagtctggtctattgagcagattgaaggttcccttattgtgcagggcttaattgactatgtctgaaagtttttactgagagctctaagaaaactattgaggaaaatgaaatggtattttgtagtaacaaggattattttttggctatttaggatatacatagcctgtagctttgtnnnnnnnnngatctttataaacaatatatgaatgtgccgtcttatttattgattactgtaaattaagatataaatggctatttgaataatttatacctgtgggaattaactggagtatttgttatttgactgttttctattaaggaatattaggcttggtgctatgatgaatgatcttgtaaaatcatgtgtattcttaagaaaatttttgaatataaatttcttgaactg

SEQ ID NO: 10498 - DNA, 1066 bp, Homo Sapiens
  misc_feature (909)..(919): n is a, c, g, or t
atttatcccccccctctctgccgctcgccccccaccatcgcgctccggcccggaattctcgggatcggctttggaatccaccagctacatccagctccctgaggcagagttgagaatggagagaatgttacctctcctggctctggggctcttggcggctgggttctgccctgctgtcctctgccaccctaacagcccacttgacgaggagaatctgacccaggagaaccaagaccgagggacacacgtggacctcggattagcctccgccaacgtggacttcgctttcagcctgtacaagcagttagtcctgaaggcccctgataagaatgtcatcttctccccactgagcatctccaccgccttggccttcctgtctctgggggcccataataccaccctgacagagattctcaaaggcctcaagttcaacctcacggagacttctgaggcagaaattcaccagagcttccagcacctcctgcgcaccctcaatcagtccagcgatgagctgcagctgagtatgggaaatgccatgtttgtcaaagagcaactcagtctgctggacaggttcacggaggatgccaagaggctgtatggctccgaggcctttgccactgactttcaggactcagctgcagctaagaagctcatcaacgactacgtgaagaatggaactagggggaaaatcacagatctgatcaaggaccttgactcgcagacaatgatggtcctggtgaattacatcttctttaaagccaaatgggagatgccctgtgacccccaagatactcatcagtcaaggttctacttgagcaagaaaacagtgggtaatggtgcccatgatgagtttgcatcccctgactatacccttactttccggggacaagggagctgtccctggcaccnnnnnnnnnnnctgaaagtaccccgggcaatggccagcggcacttctttcttccctcccggatccagaacaagaatgggagggaaggggaaaacccatggcttgcctcccccaaaacccctgaaaacgccgggggaaaaaaattctcgggggggttcc

SEQ ID NO: 10499 - DNA, 823 bp, Homo Sapiens
  misc_feature (310)..(310): n is a, c, g, or t
  misc_feature (543)..(543): n is a, c, g, or t
  misc_feature (670)..(670): n is a, c, g, or t
  misc_feature (759)..(759): n is a, c, g, or t
  misc_feature (799)..(799): n is a, c, g, or t
gggggggcctggcgtgtattcgaaaggaaggcgccggctgcgggaagatggcggctcagccgctgcggcatcgctcacgttgtgcaacgccgccccggggggacttttgtggtggcactgagagggcgattgaccaagcttcttttacgacctccatggagtgggatacgcaggtggtgaaggggtcctcgccgctcggccccgcagggctgggggctgaggagccagccgccggcccgcagctgccgtcttggctgcagcctgagaggtgcgctgtgttccagtgcgcacagtgtcacgcagtcctcgnccgactcggtgcacctcgcctgggaacctgtcgcggtccctcggggccgtggtcttctccagagttacaaataacgtcgttttggaagcgcccttcctagttggcattgaaggttcactcaaaggcagtacttacaaccttttattctgtggttcttgtgggattccccgttggtttccatctgtattctacccatgctgccctggctgccttgagaggtcacttctgccttntcagtgacaaaatggtgtgctatctcttaaaaacaaagccatagtaaatgcatcagagatggatattcaaaatgttcctctatcagaaaagattgcagagctgaaagaagagatagtgctaacgcancatcgctttaaatcactaatggagattctgagtgaagtgactccctgacagtccaagccagaaaactgatcctgtaccaaagccttgantgtcaagttcagggctttattgctgtcctcaacaacaggnggctgccttaaccattttcttgaa

SEQ ID NO: 10500 - DNA, 409 bp, Homo Sapiens
ccatccggcgcccaggctgtgatttccagtgtcaatgagacctccctcatgctggagtggacccctcccagcgacttgatataagtcgctgactgctcctggctctgttggccctcctgatgagtctcacccagggagttctgacagctctgcgtctcagtccagtgtgaaaaaagccagtattaaaatactgaaaaattttgatgaagcgataattgtggatgcggcaagtctggatccagaatctttatatcaacggacatatgccgggaagatgacatttggaagagtcagcgacttggggcaattcatccgagaatctgagcctgaacctgatgtaaggaaatcaaaaggatccatgttctcacaagctatgaagcaatgggtgcaaggcaatactgcatgaggc

SEQ ID NO: 10501 - DNA, 1286 bp, Homo Sapiens
gggcagttccaaaatggcggcaggggtggccgggtggggggttgaggcagaggagttcgaagatgctcctgatgtggagccgctggagcctacacttagcaacatcatcgagcagcgcagcctgaagtggatcttcgtcgggggcaagggtggtgtgggcaagaccacctgcagctgcagcctggcagtccagctctccaaggggcgtgagagtgttctgatcatctccacagacccagcacacaacatctcagatgcttttgaccagaagttctcaaaggtgcctaccaaggtcaaaggctatgacaacctctttgctatggagattgaccccagcctgggcgtggcggagctgcctgacgagttcttcgaggaggacaacatgctgagcatgggcaagaagatgatgcaggaggccatgagcgcatttcccggcatcgatgaggccatgagctatgccgaggtcatgaggctggtgaagggcatgaacttctcggtggtggtatttgacacggcacccacgggccacaccctgaggctgctcaacttccccaccatcgtggagcggggcctgggccggcttatgcagatcaagaaccagatcagccctttcatctcacagatgtgcaacatgctgggcctgggggacatgaacgcagaccagctggcctccaagctggaggagacgctgcccgtcatccgctcagtcagcgaacagttcaaggaccctgagcagacaactttcatctgcgtatgcattgctgagttcctgtccctgtatgagaccgagaggctgatccagggagctggccaagtgcaagattgacacacacaatataattgtccaaccagctggtcttccccgaccccgagaagccctgcaagatgtgtgaggcccgtcacaagatccaggccaagtatctggaccagatggaggacctgtatgaagacttccacatcgtgaagctgccgctgttaccccatgaggtgcggggggcagacaaggtcaacaccttctcggccctcctcctggagccctacaagccccccagtgcccagtagcacagctgccagccccaaccgctgccatttcacactcaccctccaccctccccaccccctcggggcagagtttgcacaaagtcccccccataatacagggggagccacttgggcaggaggcagggaggggtccattccccctggtggggctggtggggagctgtagttgccccctacctctcccacctcttgctcttcaataaaatgatcttaaactgcaaaaa

SEQ ID NO: 10502 - DNA, 415 bp, Homo Sapiens
atccatcagggagcttacacaagaaagattctccgtgaatataaagtgagtgacaaaacctgggaaaagtcagctctcttaaaacatcaaatagtacacatggggggaaagtcttatgattacaatgaaaaagggagtaatttcagccagaagtcacatcttacccagcttcggagagctcacacaggagaaaaaacctttgaatgtggtgaatgtgggaaaaccttctgggagaagtcaaacctcactcaacatcagagaacacacacaggagagaagccctatgaatgtactgaatgtgggaaagccttttgccagaaaccacacctgaccaccatcagcggacacatacacggagaaaaaccctatgaatgtaagccatgtggaaaaacttccgtcccgaaggtccaccctc

SEQ ID NO: 10503 - DNA, 432 bp, Homo Sapiens
gtggtatcttttcatgtctccctggggaggtgagccaggatcctatcatgtcacatttttctggaggtcttgtgccttttcaggaagtcggttcccttcgatgccagcttggggaccgcctcaacatcgaggtggacgctgcacccccggtggacctgaacagggtgctggaggagatgcggtgtcagtacgaggccatggtggaaggcaaaccgcagggacgtgaaggaatgggtcaactatgcaggtggggcttctcacgggtggggcatgggcttcctccaatatcccctagggaaggggaactctaagcctttcttcctttcccccaaaagtggcagaaatggctggaagcttttaatccgaatcagggtggcccacaaaggctcgtggaggcaaggctttcaaaaagctaacgccaagtcaagaaca

SEQ ID NO: 10504 - DNA, 191 bp, Homo Sapiens
tgtgactcctacacagccttcctgcattcctccgctgagtcatcttccctttcgcttggaacctagtgaaccagcaactgaaaggttggtctcacactacaccctcctccaccccttccctaatgggggccaccagcccctatgttcagtcatttcatggaaacttccaggactgggcagctcatttcccc

SEQ ID NO: 10505 - DNA, 316 bp, Homo Sapiens
cctagttttagaagtttcaatagcatggtgcctgacatacaacagagattttaaaaatacatcctcctttgtacctatgtgacaggcctgaattttcgagaaaaggattttattcttattctggttctccatttctagtcttaacaaattggcctctgacaaccatttagagaagaacattctgcactggccattcctctgtgggagcagattttgccaggtatgctcatgtatcggtgtgggcactctgattctaaggtagagcaaataacccaaaatatctcttgctgtggctattgaaacttctaaaactagg

SEQ ID NO: 10506 - DNA, 246 bp, Homo Sapiens
gggctcagagtctcatcctgtgtgaagctaattggatcccatgggcattaaatccctgaccagggcctcattagtacaagttctcctcaccagagctaaccagtgtgggtgctgatcttaataggttgctatttttgctgctggagactgaaagaagtatttagtctctatgttaccacacatagaaatagggaaaactttacaatgccttttctacctttcttctggtaaaacatgagtcagcga

SEQ ID NO: 10507 - DNA, 299 bp, Homo Sapiens
tcagagtagaaatagtaataacctaggtccctaagaaaaagtaagcatgttctgtttcacatattaacataataatccaaagcacaagaataagaaaaaaagaaagaaaagactgatatcaatacacacttatacagtgcacttagtagccagaaatctgcaacctcctatcaatcccagacgatactatcttttccagtcttaaagctccatcaactgaattgcaataaggtaaaaataataatagagctgaaaccatcacatactcatgtcataccgatggggatcctctaagagtc

SEQ ID NO: 10508 - DNA, 376 bp, Homo Sapiens
tcatcgagccggcaccatctatgtcgctgactggtcactgtgtaccccagagtcttcacagcctgcagcaaataaacctgtagaacttagcatttaacccaacttggactcaacttctttaaccaataattcctctcccacccccaggagaattgatgtttgcattcaggaagcactggtcagatccagggtcctgcctaatgtagaatccccctggagccctctctctgttggtcttttggccttgctgggacccaaacttctgggtgctcctagctagcaggtctgcaaaagtaatgtggaacaaacatgtattagtcacctgctatgtaccacacactcccacctttgtgatgctactgatcagcgacttgat

SEQ ID NO: 10509 - DNA, 216 bp, Homo Sapiens
tcgctgactccacggacgtgcctttaacaaatgctgtgaaggaattggctggaagtgaccaagacctgtgtgtgtgtactgatcagtttgattacttttatactcctgaagaagtaatgtgactttaaataaattttcgtatgccatttaggctatattctttgctctcggcataccaaatcttatttctgaccagttttcatttttaatatattt

SEQ ID NO: 10510 - DNA, 231 bp, Homo Sapiens
gagacagatagaatcgagccggtacccctagttttagaagtttcaatagcagaaaatgagccactcagaaatgataacaagagacaagtagaagataaacttgagaaacaggagaagcctgtaaatggtgaagataaaggagactcaggagttgatacccaaaacagtgaaggaaatgccgatgaagaagatccactgggacctaattgctattgaaacttctaaaactag

SEQ ID NO: 10511 - DNA, 563 bp, Homo Sapiens
aaaacgtgcgtcggctgagggcacaatcgcacttgcaagggcaggatctttaccccaaattcttcaagacatccaacggcttggataagatctagctcctcttgaatggcagggggtctgtctgttatcagttgtaagcagcacctggctagatccatgcagctatcagtgaggttggtagaagaattgaagtactctctgctggcagccaaaaccaagtcaatactcttttcgtagctgaccctgtagtggggtttccctttatgggctataccagctggaggattttctgaacaagcactgcagtgcatcatctgtccagccaggtggatgttttcaaggcgactagagcacagaaggctttctgtaaatatctcatagcaggcatcagaatctagacatgtgtatacattctgctgcatagttaacatgtcttgcagcaacgttctccaatgagactcactgacaggaggctgcttccggccagtgtgcctcgtcaatctaaccatcagcttgcgtgcctgctattgaaacttctaaaactagggggatctctagagtcg

SEQ ID NO: 10512 - DNA, 230 bp, Homo Sapiens
ctagttttagaagttcaatagcattgttcaaaataccagttgagacaacagatgtggagtgaagtctatgaaatatttactgagaaaaactacatcacacaaacacaaggtggcaagactttggtaaagaaggtacaagacttttaaaagacttaggtaagtatttaacattgccacaataactatgtactggttcctttataaacgtaaacaccactgattgtacatac

SEQ ID NO: 10513 - DNA, 354 bp, Homo Sapiens
cctagttttagaagtttcaatagcacctagttttagaagtccccagagaggacagaaaggggagaagcacatctcaaccccatgccatcccaccacatcatgtaaagtgtttctaggcttctctatataatacccagaaatgtgagcatacaaaaagtacaaggatgtgaaggttatcaaccagagagcaaattggtcaatgaggcaaatcatcacatatgtaaagaaaacagtcttcctggcataactccagagaacacacacacacatatacccatgcacacacccacagcaacaaatgtgtctggtctggtaagtttagaaagaatgctattgaaacttctaaaactatgg

SEQ ID NO: 10514 - DNA, 580 bp, Homo Sapiens
  misc_feature (452)..(496): n is a, c, g, or t
tgacaaaacaatactgactttccttccataaaagtaacaaaattggcattatatttgttggtgtgcagtgtctcttccaagtcaaaagttctttttccttcaatttcatcatcggaaatgccatcatcttcatagcgtcgtcgcatggtaccacgcaatctctggctgtaacgaatcctttcttcttcgggttccatctcatcactctctcgtgttgaaattactgtaaaggaaaccagctccagggctgccttccatcttcctccttaggaaccagactgcaacaacgagacgctgctagtgaaacttctaaacctagtttcagaagtttcaatagcatatatttggtagacacaaggtctccccatgtagcctaggtaggtctcagactcttggatttccgagggttcaaagtgacccgctcggcctccccccgtcctggggttgcaggnnnnnnnnnnnnnnnnnnnnnnnnnnnnnnnnnnnnnnnnnnnnnccgatgagcccttgtgcctggcttgacttctagaatgacgcgagattttgagctgttgctctgctgtctttcccagttcagtac

SEQ ID NO: 10515 - DNA, 366 bp, Homo Sapiens
ggatctcactggaagctatccaagagcccactgtcaccttctagaccacatgatagggctagacagctcagttcaccatgattctcttctgtcacctctgctggcacaccagtggcaaggcccagaatggcgacctctctttagctcaatttctgggcctgaggtgctcagactgcccccaagatcaaatctctcctggctgtagtaacccagtggaatgaatttggacatgccccaatgcttctatatgctaagtgaaatctgtgtctgtaatttgttggggggtggatagggtggggtctccatctactttttgtcaccatcatctgaaatggggaaatatgtaaataaatatatcagcaaagc

SEQ ID NO: 10516 - DNA, 496 bp, Homo Sapiens
tgcttcaaaaggaaactacagtcgtcgggaaggaacaagaggctccagttggagtgctcagaatactcctcgaggaaattacaatgaaagtcgtggaggccagagcaattttaacagaggccctcttccaccattacgaccccttagttcttacaggttaccgcccaagtcctcgggaccgtgcttctagaggtcgtgggggacttggaccttcctgggctagtgcaaatagcggcagtggaggctcaagaggaaagtttgttagtggaggcagtggtagaggtcgtcatgtacgctcctttacacgataaaaatccttttgggaacatcttaactgtatatgaacatttcacgaggacaataaaaataagacattgaaggaccaatttagacttagcagttatctggagacatctgagagaatatttttatctgaagaaagcagaatttgtttgatacctaacaagatttcaataaaaatccaaactttgtatgt

SEQ ID NO: 10517 - DNA, 549 bp, Homo Sapiens
atggtatttgctggccatgttttatttgtcctttttcttcaaacaggataaccaaagatacagacagtattcaataaaataaaatagatgaaacaaattctaagagactgcgatgccacatgctacgtttaacctaattttattcatgcttgccttgggatggggaatagatcattcagtaaaaacatacagtaaaaacaaaatgtcttatcatgtacaactttcaaactacaataatgatgtaccttaattacttccatgcacacaagtctaacatttgtttttttaaaaaataaacacaattaagacttctaggagcattttataataaagtaattcctaattaatttttctttgtagatagatcaagcacctccaaaatacaaattcctatacacagtgagcacgttacttaaaatgaacacttaagtaaattaagtacgtggacagccttaggataagctgacattatagatgcagctaggtaggcaacaaaccatagtgccaaatggaaaaagtatatttgcaaataaattttaaaaactaagt

SEQ ID NO: 10518 - DNA, 367 bp, Homo Sapiens
  misc_feature (173)..(213): n is a, c, g, or t
actgctggtcttgatagccattaatatatgtttgtattatgttatttttcaactaaatcgcagttggaaaaaaacatatttaatattatgcccttggatctgttactgcatcactagcacttgtgatgcaatagaacacttcgcctgtactgaaagggccaagagtaaatgcnnnnnnnnnnnnnnnnnnnnnnnnnnnnnnnnnnnnnnnnnaaaacatgtctatagagttggcagttaatgctgaatttgtcaaataccccttccaaaattatacttgtatttaaaaaataaatggatctacctaatttctattgatttatattgcagccctgtcttattaaagtggtatgtttttaagtgtaaa

SEQ ID NO: 10519 - DNA, 315 bp, Homo Sapiens
gtacacatttttatccattttacattctaaagcagtgtaagttgtatattactgtttcttatgtacaaggaacaacaataaatcatatggaaatttatatttatacttactgtatccatgcttatttgttctctactggctttatgtcatgaagtatatgcgtaaataccattcataaatcaatatagcatatacaaaaataaattacagtaagtcatagcaacattcacagtttgtatgtgattgagaaagactgagttgctcaggcctaggcttagaatttgctgcgtttgtggaataaaagaacaaaatgat

SEQ ID NO: 10520 - DNA, 1140 bp, Homo Sapiens
  misc_feature (552)..(552): n is a, c, g, or t
  misc_feature (565)..(565): n is a, c, g, or t
ggggaatcaaagcggcgcattgaggcagtgcgctgctggtcccagcatgaatgcgggccccggctgtgaaccctgcaccaagcgaccccgctggggcgccgctacaacttcgccggctgcttcggacgcccggagctttcccagcaggcagaggcgcgtcctcgaccccaaggacgctcacgtgcagttcagggtcccaccgtcctcgccagcctgcgtcccagggcgggcgggacagcacagaggcagcgccacctcgcttgttttcaaacaaaagactattaccagttggatggacactaaaggaatcaagacagcggaatcagaaagtttggatagtaaagaaaacaacaatacaagaatagaatccatgatgagttctgtacaaaaagataacttttaccaacataatgtagaaaaattagaaaatgtttctcagctaagtcttgataagtcacccactgaaaaaagtacacagtatttgaaccagcatcagactgcagcaatgtgtaagtggcaaaatgaagggaaacacacggagcagcttttggnaagtgaacctcanacagtaaccctggtaccagagcagtttagtaatgctaacattgatcggtcacctcaaaatgatgatcacagtgacacagatagtgaagagaatagagacaatcaacagtttctcacaactgtaaagcttgcaaatgcaaagcagactacagaagatgaacaggccagagaagccaaaagccaccagaagtgcagcaagtcttgcgatcctggggaagactgtgcaagttgtcagcaagatgagatagatgtggtgccagagagtccattgtcagatgttggctctgaggatgttggtactgggccaaaaaatgacaacaaattgactagacaagaaagttgcctaggaaattctcctccatttgagaaggaaagtgaacccgagtcaccgatggatgtggataattctaaaaatagttgtcaagactcagaagcagatgaggagacaagtccaggttttgatgaacaagaagatggtagttcctcccaaacagcaaataaaccttcaaggttccaagcaagagacgctgacattgaatttaggaaacggtactctactaagggcggtaaaagctt

SEQ ID NO: 10521 - DNA, 380 bp, Homo Sapiens
gcacgaggtttttttgtacaggggtaagttgggggttttcagggagcctgttaggtgcctccttcttttctttcctcaatctatgcaagcggctctggccgccatcatctcctgggatgccagagggctgcctctccagcggcttgggccggggaggggacactccagttctctagcatggcctgaggtatggggtatgtgcatgtggaggccagggtaaggtgaatggggaggctgggaggactggtgttgccctttggagcttggtgaggagggtgggcctagggcttggcgagtgccacatctggcaggtttggaaatttccaaataaatccttttgtctattaggacttgaatcactccttccttgaaatccttgt

SEQ ID NO: 10522 - DNA, 1752 bp, Homo Sapiens
gggattcgttttgtgattaagaaacatgagcttctgaattcaacacgtgaagatatacagcttgataagccagcttcaggagtaaaggaagaatggtatgccagaatcactaaattaagaaagatggtggatcagcttttctgcaaaaaaatttgcggaacccttggggagcactgaagccaaggctgtaccgtaccaaaaatttgaggcacacccgaatgatctgtacgtggaaggactgccagaaaacattcctttccgaagtccctcatggtatggaatcccaaggctggaaaaaatcattcaagtgggcaatcgaattaaatttgttattaaaagaccagaacttctgactcacagtaccactgaagttactcagccaagaacgaatacaccagtcaaagaagattggaatgtcagaattaccaagctacggaagcaagtggaagagatttttaatttgaaatttgctcaagctcttggactcaccgaggcagtaaaagtaccatatcctgtgtttgaatcaaacccggagttcttctatgtggaaggcttgccagaggggattcccttccgaagccctacctggtttggaattccacgacttgaaaggatcgtccacgggagtaataaaatcaagttcgttgttaaaaaacctgaactagttatttcctacttgcctcctgggatggctagtaaaataaacactaaagctttgcagtcccccaaaagaccacgaagtcctgggagtaattcaaaggttcctgaaattgaggtcaccgtggaaggccctaataacaacaatcctcaaacctcagctgttcgaaccccgacccagactaacggttctaacgttcccttcaagccacgagggagagagttttcctttgaggcctggaatgccaaaatcacggacctaaaacagaaagttgaaaatctcttcaatgagaaatgtggggaagctcttggccttaaacaagctgtgaaggtgccgttcgcgttatttgagtctttcccggaagacttttatgtggaaggcttacctgagggtgtgccattccgaagaccatcgacttttggcattccgaggctggagaagatactcagaaacaaagccaaaattaagttcatcattaaaaagcccgaaatgtttgagacggcgattaaggagagcacctcctctaagagccctcccagaaaaataaattcatcacccaatgttaatactactgcatcaggtgttgaagaccttaacatcattcaggtgacaattccagatgatgataatgaaagactctcgaaagttgaaaaagctagacagctaagagaacaagtgaatgacctctttagtcggaaatttggtgaagctattggtatgggttttcctgtgaaagttccctacaggaaaatcacaattaaccctggctgtgtggtggttgatggcatgcccccgggggtgtccttcaaagcccccagctacctggaaatcagctccatgagaaggatcttagactctgccgagtttatcaaattcacggtcattagaccatttccaggacttgtgattaataaccagctggttgatcagagtgagtcagaaggccccgtgatacaagaatcagctgaaccaagccagttggaagttccagccacagaagaaataaaagagactgatggaagctctcagatcaagcaagaaccagaccccaagtggtagacctcttccctcctaggcttaaagtatcagtggtt

SEQ ID NO: 10523 - DNA, 807 bp, Homo Sapiens
  misc_feature (779)..(780): n is a, c, g, or t
gggcgggctacctcagttctcgggcgtacggcgcggcctgtcctactgctgccggcgccgcggccgtcatggggttcctgaaactgattgagattgagaactttaagtcgtacaagggtcgacagattatcggaccatttcagaggttcaccgccatcattggacccaatggctctggtaagtcaaatctcatggatgccatcagctttgtgctaggtgaaaaaaccagcaacctgcgggtaaagaccctgcgggacctgatccatggagctcctgtgggcaagccagctgccaaccgggcctttgtcagcatggtctactctgaggagggtgctgaggaccgtacctttgcccgtgtcattgtaggaggttcttctgagtacaagatcaacaacaaagtggtccaactacatgagtacagtgaggaattagagaagttgggcattctcatcaaagctcgtaacttcctcgttttccagggtgctgtggaatctattgccatgaagaacccccaaagagaggacagctctatttgaagagattagtcgttctggggagctggcgcaggagtatgacaagcgaaaaaaggaaatggtgaaggctgaaagaggacacacagtttaattaccatcgcaagaaaaatattgcggctgaacgcaaggaagcaaagcagggagaaggaagagaggctgaccggtaccagcgccctgaagggatgaagtagtacgggcctcagggtacaagctgcagcttcttttaagcttttacccataatgaanngtgggaaattgaaggaaagctcaacca

SEQ ID NO: 10524 - DNA, 596 bp, Homo Sapiens
tcctgattcctgacatcaatattatagttttattatagtaacaaatagttgttacagtgagacctacacacatttacagaattatatttaaattcatatagaatatttacatttttaagttatatttttgaaattagaagacgaagtacagctgaagtttgataacaaagaaatatatataagacaaaaatagacaagagttaacaataaaaacacaactatctgttgacataacatatggaaactttttgtcagaaagctacatcttcttaatctgattgtccaaatcattaaaatatggatgattcagtgccattttgccagaaattcgtttggctggatcatagattaacattttcgagagcaaatccaagccattttcatccaagtttttgacatgggatgctaggcttcctggtttccatttgggaaatgtattcttatagtcctgtaaagattccacttctggccacacttcattattgggagtgcccaaagctctgaaaatcctgaagagatgatcaatttgctgaatccccatggaaaagtggtttcttagttgctagttcagcaaataaggtggctatactccaaat

SEQ ID NO: 10525 - DNA, 720 bp, Homo Sapiens
  misc_feature (89)..(89): n is a, c, g, or t
  misc_feature (151)..(151): n is a, c, g, or t
ccttcatgtcgtttatccacaattctagctccttctttattagaagactctttctttactgtaccattgcttacatcagtagctgctgntgctactggctgagcaatattagcaggtggctttagtttcatcagttcattaagactattanttttcagtagatctttaagctgaacttggtcttttgaaggtgcagaggtcatggcatttcgtactgttggtgctgagactgacggccgtgtgcttgcagtagtctggataaacttagttaaagtgatggtttgcctgttggttgttacaggtggtgttttagtcattacaattgtagatcccaagggtggaagatgatttatttgattcagcacaaatgttgtagtagatggaggctgctgcctcacatttaatagtgctggagtaggtacagtctctggttcttgtttaacaggaactgctgcttcggtctccaaacctagttctaatgcactaagtggcactgactgctgaactgacggggtaggcattggagttgcaagccctgcatctccaccatcaatatcaaagaggtcattcggactaattccactctcactcaaagcagcaagcagtaaatcttgccctggctccaccattttccccgcgggacccggcgccaggacagctcctcccgggaggtgtgagtttgaaggaccagaggcgactggagcggaggcggcggtggcg

SEQ ID NO: 10526 - DNA, 286 bp, Homo Sapiens
gggaagggtgtgggtgctgggatgggggtgaatttcaagttgaaacacgatgatgtggtctgcttgctctctgcttagacaggctttaagaccaattggattttcatggaggccaggacagagagtggtaattgatggcttgtgtacagacaagcatttatccaggttgcgttatccaaactgatttgttaaagctccaggtcacgttcttacactaagaaaatcattcagtaaacatgagacaagtttaggaaaaactaataaaataaacctgtcttaaacttta

SEQ ID NO: 10527 - DNA, 869 bp, Homo Sapiens
gggggttcttctggggtgctaatcaggcccctgttatgcttagggggagccctggtgctacttgcttgaagttttcagtgtaagtaccctgatgccttttggaccttgggatcagatcaagagttttggagatcaggtaccaaggaaataaggacagtctagctgcctcaagtgaggggccctttgcatagctctccttccccctcactgaagctgggtagcctattggggttgagagggaaaatgtgaaatctcagaatttatctcccttagaagagagccagtaacttatgtacaaggatgaaagaaaggtcgcagcagtagctttggggaaagggaggaagatatggcacttctccaaccccggaaaacattgcttttgaaaactgctgataaaatatgagccggttattacttctgtttgggagactgtgctctctgtggtgcctctcttggctctactccacagataccagacctcttctaagaggatgagcagaccagctttgaggttgacctgtttctctttgtctgccttcccaaaacaccagcccccaggaagacattaagcagccttaagcttaaattcctactccctcttccaaatttggctcacttgccttagatccaaggcagggaaaggaaaagaaggggggtctctggctttattactcccctaagtctttactctgacttccccaaacccagaaagattttctccacagtgttcatttgaaagaggagtattttgtcccattttccccttcctcattatcaaacagccccagtcttccttgtctctgctaagaaagtagaggcatgatgatctgcctctcaactgccctaagtcctagctaagtatcagggga

SEQ ID NO: 10528 - DNA, 385 bp, Homo Sapiens
gggagattgttatctatcaggagcttcgcatggaagcttttgtcgtctaccgctggcaaggagatgcccgccaaaaagctctgaaggacttgctgaaatgggtcttagagggtaaaatccagtacaaggaatatatcattgaaggatttgaaaacatgccagctgcatttatgggaatgctgaaaggagataatttggggaagacaatagtgaaagcatgaaaaagaggacacatggaatctggaggccatttagatgattagttaatttgtttttcaccatttagcaaaaatgtatactaccttaaatgtcttaagaaatagtactcataatgagtttgagctacttaataaaatacatttaagtggtatacaaacaccacaag

SEQ ID NO: 10529 - DNA, 1108 bp, Homo Sapiens
tggtaccgggagtgtttcaggcctgcagccctgagccctgcctgcaggctgtgaagatgaccgacctttctgataatcccatccatgaaagtatgtgggaactggaggtagaagatttacacaggaatattccttagagtatgttggaactgtcgttaaaaacaaccaaaatcccgaaactatttagaagcttataatgatgtggatttcatggacacttttcaatgcgtatttttcaaatgcttctcagagagccttgctttggttgaccaaggagtccggatgtaggaatgtttaaatcctcggatacttcagtgacacagcctctgctgccccttgctttgcctgtgtttgctgatgaaaagcagatgcttgtgtttcattttccttcctggtttgtgtgtgttaattctctctctctgtctcagacacagaagtctcatgttgcattttccaaattttatgagtgatgatactttttccattactgctgcgtccctgttttacaatgcaaaatttaagtacggtcattgcccatggtgattaaagtgtggttatgggcaggaagacagactgtgtaaaaaaggaatgacatcctggctcctcatcttcttcatcagcaactaccataaccagtttgcgagtcaaatggcatttcctaacggcaggcatggcggcccctgaaagacaacagctccctttctgcttcggacaccactcaaacatttagacgcagctctatcccttttcctagctagagaaggtgatgccttcttccattactcagagatgttgagacgttttcagaatttcttgttgaaatgaaaaacatcaagataaaggacgcctttcaggcattagctaaacttccacttcataactttcggcgagacatggtgagcctcctggtgtagagttcttttgtctttgtatggaatgactttttgctgtgatggttttgaatgttgggtttctgctgtctgcttagtacccatgcctgaattttttgagattgtaaatatcaaaggagttagattgtgttctgacatggttgtagactttcacctggattattgatattctacttctaataaatttttaataggca

SEQ ID NO: 10530 - DNA, 1734 bp, Homo Sapiens
  misc_feature (86)..(126): n is a, c, g, or t
  misc_feature (840)..(840): n is a, c, g, or t
  misc_feature (1039)..(1062): n is a, c, g, or t
  misc_feature (1511)..(1533): n is a, c, g, or t
  misc_feature (1535)..(1537): n is a, c, g, or t
cctcaaatagatagatatatatttttcccttaaatgagatgaaatgagtggcgtcctggggtggagggaggcgctggctggagtcnnnnnnnnnnnnnnnnnnnnnnnnnnnnnnnnnnnnnnnnncacccatcactcaacgttgctactgtcgaaggtgtggcactgaaagtccccgtcaacgtactccatgcctggcagcttcatcccgtacttgtccacgcaccagcagatgccacgcttgcggccacgggaaggtttgcactgctttctcttgtagaatcctttgcggtcacaattgggcaggtacacagcacggggcaccatgcgtgggctggctttgagctcctgcagggaagcctccatgtgtctgcggcaggggccctgctcagactcctgtctcatctcaggtgcagagatgatccgggggtgggcagtgttctcggctcccccgacaaacttggactgggtcagcttctttctgcggtccttcttcactgcttcagccttcagctcggagatgcgggtgtgtttgggccggaagatcttgggggagtaggtctcctcggccatctcagaggtggtgggctcctcgtgctcacgggagtctctctcgatcttgacttgctcgcggtagctcttttcgttgaggcaaaccccgcggccgtgcagcagggcgtgcagcggcttctcctcgtcctgccgggggaggcagcgcagcccctgggcgcagcgctcggtgtagacgccgcacgactgcccctcggccagggcgcaggtcatgcagcagccgcagcccgggctccttgaccagctcgcagcccagggggctgggggggncacatggagagggctttctcgtcgcagggctcgcagtgcacgaaggagcccaggctctgggccggccccgcataggcggccagcagcaggaggaccgcggtgagcaacaccatcttctcttagtcgccccctttacctcggggtggggcaggagagcgagagtgcagggataaaggggccaagaggggcccccggagannnnnnnnnnnnnnnnnnnnnnnnaaaatttctggcaggtagagcaggtgccctcccccagacacttgcaaaaatgtagagagaggtggagggctggggtgcctgcgagcaggtcccagttgcaagaattaaagccttgcaacaggttgggggaagcagggcagcgccaggtgcacgcagtgagcggaggccggagaaaccctcaagcctgagcgggtcagaattataggggaaaaaaagccacaaaattgttcacccccaagcaaccaccgaaataatgagatcggatgcagtggagatggcgttgggggtgggagagaaaaatggatttatctttaaaatttttgcttaaaatctaaaatacaccccgctttctaaccctcagctgccagcggtgcgcggcgccgcagaacaggtaagaggcgttggctgcagccgagagggtgggagaaaatgttgaaatcaagaaattnnnnnnnnnnnnnnnnnnnnnnncnnncccaaaccctaacacctcttttctcccactttgccacctcctcttcgaaattcgcaggttctacgcgaagtccggagaagggtgaaaacggaggaggggtaatgaaaaggagcaaaaaagggaaaaagcccacactgctttgcagctctttcctagctcttttcccctgcagaagttatcccggaaattccggaccg

SEQ ID NO: 10531 - DNA, 359 bp, Homo Sapiens
tcatcgagctcggcaccatcttatcgctgactgggcataccaggacgccatattggcgcggctgcaaagccaacttgatcgcctgttgctccaacaccacagacagcaccaagcgcacctgctccatcagcccacgaaaactggcgccctgatcaccgtgttggtaatgaacgttcaactgcgcacgcttactgtcactggcgaacgttgataactcaccgagcagggacaccagcgcacggaacactgcttcgggccgcacccgagcctggctcaggcagtggcgcagctccagctcggtacgattgattacttgcagcatcaggaagtcagcgacaagatgggccgagctcgattat

SEQ ID NO: 10532 - DNA, 756 bp, Homo Sapiens
gggttttgagcacactactatcactttggatagtcactccatttatatttttataaacttccattagagaatcattaaggctgtttaatatctgctctggatattacgcattggctttttgttgcctagtgctacaaaccttcctgtgggactcagtgtcttcaggcaatgattgtgtatcctgttacagatggttgtgaaacaagaaagaaccactcttctttgaaaaaaaactcttggaagcttttgccagctatttggggggtaggaggaatattagcaactgtattggttgtctacagatacagaattgcctgttgtgagggaactgattgttttgttgggaaaagaaatttaccaggagaaagagttttgtgctgtattgtgagagatctcgcctctcagttaaatgagccctgggttaaagtcagtgtgaagggcagctgtgtgcgggcacgagccagagtgtctgcctcagactagatttgacttgagttctttatgacccaggactctggataatgtgaatttgctttcctatttaactagaagatacatgtactatagatcattgtctcattttagtgattgttccttaaactagtgaaactagtggatttctcttcttcctctttattttttgcatgttaaatgtgaaccttagtgtatttgtattttgtagaaaataatgaaaaattttaatggagaatgatttaaaaacatttacaatacattatttttgcatctgaaaaaaaa

SEQ ID NO: 10533 - DNA, 192 bp, Homo Sapiens
ggcgtccatccagatcgaagtgttagcagcttgagattaaccatctgtgctagtacaccgtacaacatagtctcgaactgtggagacctgttccgtttcattatatgttcaaaaggtcttaagaaatccttctggaatctgaagttagcaagctcccctttctctaagaacttcattgacaactgccttaag

SEQ ID NO: 10534 - DNA, 1975 bp, Homo Sapiens
aactttgaaaagaatgctgaggtagaaggctagtagcatatacagagagctccaggtgagagagctagagcttactaaccttcaggagaatgggagtgaagtcagtcaagtgaaagagacttggaaggagaagtgcagatagttgaggagaaaagttagctgaagcttcagaggaggcagtctctgttcagagaagtatgcaagaaactgtaaataagttacaccaaaaggaggaacagtttaacatgctgtcttcgtgacttggagaagctgagagaaaacttagcagatatggaggcaaaatttagagagaaagatgagagagaagagcagctgataaaggcaaaggaaaaacgtggaaaatgacattgcagaaataagtgaagatgtcaggagataactcttctcagctgacaaaaatgaacgatgaattacgtctgaaagaaagagatgtagaagaattacagctaaaacttacaaaggctaatgaaaatgcaagttttctgcaaaaaagtatggaggacatgactgtcaaagctgaacagagccagcaagaagcagctaaaaagcatgaggaagaaaagaaagaatgggagaggaaattgtcggacctggaaaagaaaatggaaacaagccacaaccagtgtcaggagctgaaagccaggtatgagagagccacttctgagacaaaaaccaagcatgaagaaatcctacagaacctccagaagacgctgctggacacagaggacaagctgaagggcgcacgggaggagaacagtggcttgctgcaggagctggaggagctgagaaaagcaagccgacaaagccaaagctgctcaaacagcggaagatgccatgcagataatggaacagatgaccaaagagaagactgagactctggcctccttggaggacaccaagcaaacaaatgcaaaactacagaatgaattggacacacttaaagaaaacaacttgaaaaatgtggaagagctgaacaaatcaaaagaactcctgactgtagagaatcaaaaaatggaagaatttaggaaagaaatagaaaccctaaagcaggcagcagctcagaagtcccagcagctttcagcgttgcaagaagagaacgttaaacttgctgaggagctggggagaagcagggacgaagcacaagtcatcaaaagctggaagaagaaagatctgtgctcaataatcagttgttagaaatgaaaaaaagagaatccaagttcataaaagacgcagatgaagagaaagcttccttgcagaaatccatcagtataactagtgccttactcacagaaaaggatgccgagctggagaaactgagaaatgaggtcacagtgctcaggggagaaaacgcctctgccaagtccttgcattcagttgttcagactctagagtctgataaggtgaagctcgagctcaaggtaaagaacttggagcttcaactcaaagaaaacaagaggcagctcagcagctcctcaggtaatacagacactcaggcagacgaggatgaaagagcccaggagagtcagatggatttcctaaattcagtaatagtggaccttcaaaggaagaatcaagacctcaagatgaaggtggagatgatgtcagaagcagccctgaatgggaacggggatgacctaaacaattatgacagtgatgatcaggagaaacagtccaagaagaaacctcgcctcttctgtgacatttgtgactgctttgatctccacgacacagaggattgtcctacccaggcacagatgtcagaggaccctccccattccacacaccatggcagtcggggtgaggaacgcccatactgtgaaatctgtgagatgtttggacactgggccaccaactgcaatgacgacgaaaccttctgatgaagcctccagtggagaactgggcttgctcagacgcactcgcattgacacaacgtaacaccagcattgtgtgtgca

SEQ ID NO: 10535 - DNA, 474 bp, Homo Sapiens
atgatccactttaatactgcttgtctggctggatgatccactttaatactgcttgtcaggctggatgatccactttaatactgcttgtctggctggatgatccactttaatactgcttgtctggctggatgatccactttaatactgcttgtctggctggatgatccactttaatactccaaggatgcaaccagatgtgtgcaggctacctcttccagccagacaagcagtattaaagtggatcatccagccagacaagcagtattaaagtggatcatccagccagacaagcagtattaaagtggatcatccagccagacaagcagtattaaagtggatcatccagccagacaagcagtattaaagtggatcatccagccagacaagcagtattaaagtggatcatccagccagacaagcagtattaaagtggatcatccagccagacagcagtataaagtggccgagtcgatg

SEQ ID NO: 10536 - DNA, 1344 bp, Homo Sapiens
  misc_feature (1035)..(1240): n is a, c, g, or t
ggacatcagccaaagttgtccacaagctcatggatgaggtccactccgaacgttggtggtgttgccgcgtgcagcttcttcaccatctcgctgaccaacttgtaggaaatccaacgaacagaagaaactttgtcggcacacagattcagagcaatgggacgtaaatagtcataaacatctctgggactatataactctagaagtaaaatcagctgttcagccagttcagctcgaaaccgccaatttctactattatctgtcaccaaaaactcctgaagttgataaagatattctcttcttttgtcaatatgaagaagcttcagaaaatcatgcaagtgtttaagaacacctatcctgacttcatcgaggtctattaaaaatccattaaaaaatggaacccagatctgcagctgtcaattgatctccaagaataactgcaagctcgtggatggagaatgctagagttcgtcgaactttccactgcatgtctgagcccagagtctacactacgtctctctcaggcagtgccaagttctgtcttccgagtgtcaaggccacaccagggaggctatatgcacagtgcttagcaatttcagtgtcaaccgtctgtgcacgagaagggtcagtcatagataaatactgatctaacaacgcctgaggtacaacatcttgtactttagttctcctttcctcatcagggctaaaactgctattgttgctcaagtctgaatcgctgtgaatatagtgaagagtggagtccatattctcaacagcatcgctgattaaaggcacagaatcttcttgatttattttacaatttggtagctcatttatatccagttcatcttgcaaatcacttctcttttctatactgatggtctcttcatgtgcatccaggctggaagcacgtagtgcagcggacagcacttccacttgtgctttaacatctggatcatcaatatggggctctagattttctatcatatcttccagttcctttctggtggccatggtggcctgtggttaagccggcannnnnnnnnnnnnnnnnnnnnnnnnnnnnnnnnnnnnnnnnnnnnnnnnnnnnnnnnnnnnnnnnnnnnnnnnnnnnnnnnnnnnnnnnnnnnnnnnnnnnnnnnnnnnnnnnnnnnnnnnnnnnnnnnnnnnnnnnnnnnnnnnnnnnnnnnnnnnnnnnnnnnnnnnnnnnnnnnnnnnnnnnnnnnnnnnnnnnnnnnnnnnntccagtctgaggtattttgttacaatagcacaaacagactaagaatcaatcaccccacgtacccattcaccaaacaggaaggcagctgccgctcctgtaggcac

SEQ ID NO: 10537 - DNA, 486 bp, Homo Sapiens
actttcttgctttcatttgaacatttaataaaaatgtttaggttgatatcttaaagttgtcagtgaaatctcagatttacataacagtttgcatccagtagtttttttgagtaacacaaacatcagtatagccaaatgttaactcttatcactttttgtgttaataacaaagtaatatttgtaatatagtgtccctgaataactataaaaacttcttggaattattttgtttttaaaataaaacactatttaataactggtatcatagcccttcaaaagacacattctgaaatgctatcagtcagggggcaaaagttgttttagttcagtttattttttaatatgtcctgagttctttctgttcataaaattatgatcttatgacagctgtaacttttaattaataatattaacaaatcattagtgagttacttgtataataatcacgggatcctctagacgaccacagcatcaaggttcaccggc

SEQ ID NO: 10538 - DNA, 671 bp, Homo Sapiens
gtagatatcataatctaatcaagttcagtggatgttacaggaaaattggcttgcatagtggagacggcccaaggcatagcacaagaacccccatcgtcagtaatccgagattagcgaactcatggatggctcttataccagaagaagatagagtatgccagagtgtatttgagagaaaataccctaataaccccttttccagtttaacttattggtggtgatatagaagttcagcaccgagaacgtattctttctattgatggatggatctattttcaggcccctgtaaagatagctgtcattttcaagcagctgagagttctcattgattcagttttaagaaaaaagcttgaaaatccaaagatgtcccttgaaaatgacaagattctgcagatcattacggaattgataaaaacagagaataactgaaactgaaattcatggtcaactgctttaaaaattaagatgaagatacagtcatgaaattatctgaaaatgggtcatcacattaagtatttcattacttaaaatgttggtactagccattaacttaaaggtggtgggaaaaaagcacatactttaaacatgtataattttctagttcctttttaatgatgattattctgaatgtatttgccactacatttacaataaattctttggtattatgc

SEQ ID NO: 10539 - DNA, 386 bp, Homo Sapiens
  misc_feature (111)..(210): n is a, c, g, or t
ctagtttagaagttcattgctgcctggggtctactgaagctaggtgctatgaacactcctagtctagaagtttcaatagcagactaattgttgagtaactttttgtagtannnnnnnnnnnnnnnnnnnnnnnnnnnnnnnnnnnnnnnnnnnnnnnnnnnnnnnnnnnnnnnnnnnnnnnnnnnnnnnnnnnnnnnnnnnnnnnnnnnnatgagccgaggtgctcacggcctgaaccttttattaagagtggtaaatataaagtgttaaggtgaactgtaaagcataaattctcttgaaacagaggtttaaatctctttctatatgtcgcattcttgcggtgcctattaattttactgttgctgatagaaacttctaaaactagg

SEQ ID NO: 10540 - DNA, 465 bp, Homo Sapiens
tgatgatagttaaggagagttggccataagtcagttgaaggagttttattggtttacccctaagaaaattttatatttaaagcagagggaaagaagccattgaagatggaaatagctcttctgatttatttctcattctttattaacactattactctctccctcttatccaagacagatacctcagccattagcaagctctgtcagtttttttcttttcttatgcctgtcttattctttctctcttggtttatgcttcagagcacttgaaaaaccagtatcactaaaatctaatttttgtcaaattatcttcaaaaattgtatggctctttttattgtattgagtgtcccttaactctcagcattttttgtagtttggcagtagactttctgacattctctcttatttccatatcccagtgaaatcattgttccatttcagctagaacaatctatagtgtcccc

SEQ ID NO: 10541 - DNA, 278 bp, Homo Sapiens
tgagccggcccgattctactggttgatcagaaagccgatcatttggcacttttcacaaagtagccatcaccatggagcctatcaaataattacatattttacatattagcaacacttactaatttgacactgtattcagaaacgtaacaaacagaaaatatcaaaacacaaaatcaataggtattatgttaatattaggttctcctgagtttcatttcctttgatataagggatttcatttattttaaataaacagactaaatgtgcgaattcccact

SEQ ID NO: 10542 - DNA, 147 bp, Homo Sapiens
ccaaacatacatcttttcctctgtcctcacacaagtggttcacacctgcaggagggtatcagctcatttggcctcctatccccttctttggatgtacatctcagtcacctgctattgaaacttctaaaactaggggtatcactcggg

SEQ ID NO: 10543 - DNA, 213 bp, Homo Sapiens
caagtaactttagcaatgagtgacatattacataggaatttagtgtcaatttcatgtgtttaaaaacatcatgggaaaaatgcttagaggttactattttgactacaaagttgagtttttttctgtagttaccataatttcattgaagcaaatgaatgagtttgagaggtttgtttttatagttgtgttgtgtactttgttaataaatccggg

SEQ ID NO: 10544 - DNA, 335 bp, Homo Sapiens
cctagttttagaagtttcaatagcaatagtcacagttagcctcaagatgtcaaatctgaatctggaccagggtgcacaatactggtgaagctcagtaagattcaaaggttacttagaatggctgtttctgttaggctaatagtgttgcttagagcaacaggattctgttggatgggaaatctgtatgtaaacagcaggtatgagccagatatcttgcagcagctatgtggcaagggaaaggtggtggtggctataatctgcatggctggagaataaacaaatattgatgtgggactttaaactatggcaatgctattgaaacttctaaaactagg

SEQ ID NO: 10545 - DNA, 433 bp, Homo Sapiens
  misc_feature (253)..(270): n is a, c, g, or t
gagctcggtacccctgattattaaacaaaggaacttcaacaatacatggcctcatctgaccatgataaaataaatttaaattgtgagaaaaaagtctatttactgtgcttagggtaacacagttttatttcctggattgtcggctcaaatattcttcaagggtaaaaaattaaaatttaggcttaaaaagtaagcaagacagaatcgttaaaacatacagcatttcattcaaacaattaactgtttatgcccnnnnnnnnnnnnnnnnnngacttacctcagtctgtaagagcagcacatgaaagttggagatggattgtctattaatgcctagaaactcgaatttacttgtcagggtatttgccagttctccaatctgaaactacaatgcaaaaaagaaaaaaagtaaaactagggtactttgtataataaa

SEQ ID NO: 10546 - DNA, 535 bp, Homo Sapiens
ccccgtgattcttatacaaagtaaccaaggaggttgttgctgtatctagatgctggagcatttagaaaaggaaaatcattcctgatggacttcatgttgagatacatgtacaaccaggaatcagttgattgggttggagactacaatgaaccattgactggtttttcatggagaggtggatctgaacgagagaccacaggaattcagatatggagtgaaatcttccttatcaataaacctgatggtaaaaaggttgcagtgttattgatggatactcagggaacctttgatagtcagtcaactttgagagattcagccacagtatttgcccttagcacaatgatcagctcaatacaggtatgaaataagcccattttgatgatgtttctttaactaaaaattatgagtatatgtgtttctacatacatgttataattagataaacaacagaaattgggaatcatatatattgtttgactcaattagcatacgagttctcgtgatttctgtgagagtggtagtgtttttggtactg

SEQ ID NO: 10547 - DNA, 447 bp, Homo Sapiens
aaggacctgggagcgagagctgatcctacgttggatcaaagcgtcggtctgagaggaactcattgaaaatgggaagcttcccttcatggccactgcttcggaacctgtgccacctgctgcgggttggaatcagttcccgacaccatgagctcattctccagagactccagcatgcgaagtcggtgatccacagtcggcagtttccattcagatttcttaacgcccatgatgccattgatgccctcgaggctcaactcagaaatcaagcattgccctttccttcgaatatcacactgatgaggcggcatactaactagccctgcacacgcacacgtcccagagcggcaggtttctttgccaactaagccgtcagcagcttcgtatggcaatgcggatacctgtgtcgtctgagcagctcaagagggcacaactgagagtacacaaggc

SEQ ID NO: 10548 - DNA, 308 bp, Homo Sapiens
  misc_feature (254)..(263): n is a, c, g, or t
cctagttttagaagtttccatagccggccttgggtctcaatctcagctgcccccggataacccgagaagctttgtagcccggtgccatggtgtgtgagggaggctgaggtggggggtggggaattcccgggagctctcccctggaccgagggcttggggaatggcccacgccaagccatgcctgatgaccccgtccttagaaaaagaagtgtgtagtgttacagctctgttagaatttgtctagcccccgtttnnnnnnnnnngaacaggaatacgtgtgtgtgtgctattgaacgttctaaaactag

SEQ ID NO: 10549 - DNA, 244 bp, Homo Sapiens
acaggggacatgagagaagcagatgagggaagggatgcagagtggtcagtgataatgatgaattgacgttcttaccagatacatttctgattacaagctaaaaagaataggatctctccagcctgtgtatgtctcctcttccctggaggagagccaggagtcatattattcattaatctatgtcttaccccaagtttcctactaaaaaaagaaaggattctgagtccaagttacatgctattga

SEQ ID NO: 10550 - DNA, 187 bp, Homo Sapiens
ggaacaggtggaacccatccatccctattcccaagggccacttacaactctaagggtggttacaggattaactaccagttcattttcaaaatgctgctttgaactcagagggttgatacttttaatttgtaattttttgtaaaactttttacaaaatagtaaagtatttcaccagaataccagttcc

SEQ ID NO: 10551 - DNA, 430 bp, Homo Sapiens
ggcaggtcacccttacaagccagataatgtggaggtcagaaccccaaggaagggagtgagacctccactcccagtgggggacctggccacccatccttggggacctgagaaagcgtacttcaccttggggtgaaggctgggtggggccagagggaccagtgccctcctcagtgcttaggggcagagccacctgcagcaatggtatctgcatatcagcccctctccaccttctttctcccgctgaatcatttccctcaaagcccaagagctgtcactgcttctttctccctgggaagaatgcgtggactctgcctggtgatagactgaagccagaacagtgccacaccctcgccttaattccttgctaggtgttctcagatttatgagacttcttagtcaaatatgagggaggttggatgtggtggcttgt

SEQ ID NO: 10552 - DNA, 892 bp, Homo Sapiens
  misc_feature (182)..(195): n is a, c, g, or t
  misc_feature (211)..(273): n is a, c, g, or t
  misc_feature (279)..(336): n is a, c, g, or t
  misc_feature (366)..(375): n is a, c, g, or t
  misc_feature (395)..(410): n is a, c, g, or t
  misc_feature (451)..(466): n is a, c, g, or t
  misc_feature (512)..(546): n is a, c, g, or t
  misc_feature (571)..(606): n is a, c, g, or t
  misc_feature (609)..(613): n is a, c, g, or t
agagatttattttttctctaaaggcgcggcacagaggttttttagatcgtccccctcggggggattttagtgtttttcttctctgcccgcgttttgtagagagggtcgcccacctggcgcggggggaaaaatttcttataaaaaaatttcccgccctttttttcgaaaaaaggggaccacannnnnnnnnnnnnnatattttgtatttttnnnnnnnnnnnnnnnnnnnnnnnnnnnnnnnnnnnnnnnnnnnnnnnnnnnnnnnnnnnnnnncccccnnnnnnnnnnnnnnnnnnnnnnnnnnnnnnnnnnnnnnnnnnnnnnnnnnnnnnnnnngaaacccacaccccttgtctggtccccggnnnnnnnnnnggaagaaacggttgtccccnnnnnnnnnnnnnnnnggggcccccccccccaacaaaattgtttaaaaaattttttnnnnnnnnnnnnnnnncgaaaaaaggggatattgttttttatgtgttgttgaggaggggtgnnnnnnnnnnnnnnnnnnnnnnnnnnnnnnnnnnnggtttgtgtggtttgtgttgggggnnnnnnnnnnnnnnnnnnnnnnnnnnnnnnnnnnnntgnnnnnttatttgagcaatttattttttttcaaagaaatccatgcaaagagagaacgacagaaggggagggagtgagagagaaagacatggtaaccatgttctagcagccaaacataggagaataatttggcacaacttgatggttttttttctttctttgcaaaaggacaatctatatgctaccactaaaatgtatcttcctccaaaagataccatttgattttcgaaaacataacacatggttagtcctctacttcatggctggaggaggtatacaggataac

SEQ ID NO: 10553 - DNA, 536 bp, Homo Sapiens
acagcagcctcattctgcagacttaacatctgtcaaataaccttcctgaaaaggaaagttattggaggaatccaggccaaacaacaagtagaatagagccatctaaagttattaataatgagttcagggaaatagatgaattttttcctggcatagtcaatatttatatctcacaacaagtcaaaaataattttccatttggaaaacaaaacacaccatgactgtaattgttaaggcatataatcatgaacttcacatgctccctcaacaaacgttactgctctagggaaatcatagaaaaggaccctcttattccccaggggatcaaagcaagtccccttaggaatttcatgtgtgccatgggtctgtttttatttcacagtgactagtcatatactggagtagctctgttgttcattatttgtaacaggtccatgtaacagtcaagttagcattcaagcaattatggatgtgatactatgatgtacttttgttatgattgtatatgattaataacaaagttattattcttacta

SEQ ID NO: 10554 - DNA, 547 bp, Homo Sapiens
aggcttctggaaaacagtgtgtgctctactttgatggaaacatggcaaggaatttaaagacaggaatgtattaatattattgaaggtgtgttcgtaacctctgattctgtggacttgccactttctccaaacgctcggttcctttgaagatttcttctgaacgtgtgtgcgcacgctgggcgggttcgtgcatacatgcggggaccccagactgtcagcacagggaagatggatcccatcctaatttttatcacctgaaggttggaaccagtgagggactgggagagagtgatttataagcaccaatatcaacttcatgtggatttttgacaaggaggggtagtttgtaatttcatttaaattcttttcagcagctggaaatattgcactatctgaaacactgaatctccttttgtaactggtgttcactgacaccttgatggctcttgatggctctaaaaagttgtaggattttttgtttttgtagctaacttatggattgagatgtgatcaaaggctttattaaatttgtacttcagcataaaaa

SEQ ID NO: 10555 - DNA, 532 bp, Homo Sapiens
gggagatgggctctggtcgggagccggcccaggaggaaggccatgcgtctctgggtctcttctcgcccaagtgaggcctgtgtgcccgccttccgtgatgcagcctccgagctcccagctcctccagcagccgacaggaggcccgtcaagatgcaggcaggcattgccaccccagggatgaagacagcagcccaggcaaaggccaagaccacaggagcctcccggtctcatcctgcaaaagctaaaggctgccagaggccccccaagatccgtaactacaacattatggactgacttcctccccccaccccgccccactaaggggtgctcggggcctccgcatggtgcctgtgctttcacctacgtgttgtgggggggtgtgggcacagcgtgcagggtggaggcagggagctgcagggcaggctcccaaatgctgctgaggcgaccctgctgactgaaggcctccctgagcacagggcccattaaaaccaggttcctccctggggcgtctgcttggccttgccatatgcaa

SEQ ID NO: 10556 - DNA, 172 bp, Homo Sapiens
ggatgttagatgctttgaaactccatatcagaagaaataactttataacaattttttttaataatgaaaaatattttcgtgacaagtgagctctaaattctctttattgtaaaagagatgtaaaggttttatattctaaatcctagtaaaattgacagtgatttttaaatat

SEQ ID NO: 10557 - DNA, 1214 bp, Homo Sapiens
cacggggagcgcccattgtgaaaaagctacaagggcaaaagtggaaggtgccctttgggaatctctggaaattttgggggtttgagaaaagaagccaattgccagagggggagggaattagaaggttccggaagtgtaaccaccggggttccccgaaggttcagggtgtgaagggtccaaatacacggggcccttaaggtattgcccagggaataataaggtggggaagggccaattcggccagtggccagtggtagttgttctggtttcgggcatggatgacgactgagccatttgggagctcatagggctggcattcatcaggattgaaatcattttcctgctggggctgaccgtaggggaatgccgctgcccgcacttccgtagcgccaggaggcaccatgatcatcgctgaggagacagaagactccgtcccgctccagcgtcccatggccacacacgatgaggcggcccttccgtggctcccgctgtttctgaataccagagcccggtccaggggcaaacacttcagtgccaatatccagggagagattccggggtgtgctccaggaaacaccatcatccttgctccataccaacatggtagaggccacctggcagccggccttgtgagcacaaagggagtagaaaagaaatactactcctgtctcaacatcgctcactactgccccaaggttcagcccatcggggacatccccatcattgacaatgaacgctgtaggagaccatgtgctgccctggtccatggacctccgcagggcgatgaacttggccccctcatcggatgaggacattttcctcgcctcagcaaaggcgagaagagtgccccgcggagtggctgtgatgagcgggatgcggaaggtgtccactgagccgatctgtctcccgctcacccacagcagttgctccatggtcaccagcggctgcaccagaccgaagtcgttctcagccttggaccaggaggctgccagagacagcagcaggaagatcgcggcaaacacccaaaccctacagcctccccagaagcccagaatccgcggcccccagcgtctgtccgggagcgccgtgctgggtcgctccccagtcatctctccccgcagctgccgcgaccctggcagatcccgggaattccggaccggtaccagcctctgggggtggctggttaaataagggggaggaaataaacggggggg

SEQ ID NO: 10558 - DNA, 1340 bp, Homo Sapiens
ccttaatttgggggaggatatattccaacttgggggaagggtgaaggcattttagctctgaagctcaatcatgacatttctagagagttctgcagtgcccccgcattggacaggacaggatggaagagtgtgctggactggctggattccccagtgtcaagctggcagcgctcctgaggttcttgagtgtttatcaactcagcaggtcaaaagtctgcagacactgggtggagcagcagtaagccacaaaactaacagttgtcttccactggtgcagccctgccattggcgtctctctcaagggaaagagcttggggtagacgatggtaaacataggctcactacaccgatgacagtgccccagagggcagtgcagcagctctaggagacttctgggtaatgagattggagacaggaaagttcaaatctttcagcaagctgtggtaggtatgatacagccctctcatagccaattcctgcagagggaggacgtgatcatgctccgtccctatggccttcacctcagctgggaggaaaacggttcgctgccctgatgaaaaggaaagcagcttcacctcggaaacttgaatgggagcaccacagccactgcacccgatgactttattgtacagataagatggcaagcctttcaggtgaatgttgttatccacgtatacatactgtagttctcgagatcgacctaaatcaagtggcaaaaatgcaagacggtttccagccatggagagctcattgaggctgggcagctggcagagatggcgcggcacataccatagacgatttcggtccacagtgaggtactgcagagaaaggcacatgtgaagcctctcgggtaaagttagcaaacgattggtagaaatgtctagtgtctgcagctccttcaaatcgccaacctctggaggtaggaattgcagttggttattagctaatcgaagatgacgtaaagctctcagacgaccaatttctgggcaaacaatttctaaggcattgtcactaagatccagacattggagttttacaagagacccaatggcttccggaaccacaactatgttatttgagtgcaggtatagttccacaaggtttggaagcttctgagcaaggttttctggcaaggatgtcagggagttccttttcatatagagtctctccaagtactgcagtccctcatctttcagtaactccaatggaaaatggtgcagattcctataatttaagaacaaattcttgtgcttttctagccttgccacagagatcgtcttacaaagtttggacgccatgactgaatatatcccatcaggcacgctgcagcactatatctt

SEQ ID NO: 10559 - DNA, 510 bp, Homo Sapiens
  misc_feature (182)..(220): n is a, c, g, or t
ccagaatatactacatactctctacatctccatatcttctgtacatgttccttcctcttcctgaaacactgttcccttctcttacaggtccacgaaaactcctactcattctgtaagtgtccaacccttaaataccaactccttcccacaatttctctcattttgaagccccaggaatatannnnnnnnnnnnnnnnnnnnnnnnnnnnnnnnnnnnnnntaaccttgctttaaaacagtagcatatactatggtcattgaacttaatctctctggtgttagaaatttactttacaaaattgtgttaagacttttggaaaaagaaaatgaaactgctgtggtaaaaaccaagtttgtttcaaaaaagtaggcaattatttggctgttatattttctttgaaaactgcaataatttatatatttgtattgctctgcttgggaactgtatatatgcttgtctactatttttaattttacaacaataaaataagtattttgttatctgctaaa

SEQ ID NO: 10560 - DNA, 375 bp, Homo Sapiens
  misc_feature (132)..(132): n is a, c, g, or t
  misc_feature (238)..(238): n is a, c, g, or t
ggggacaatcctgaagtgggcaagaaagctagaaactcaagcaaatttgagctgaggaaaagcccagttttcagtgatgaggattctgaccttgactttgatatcagcaaattggaacagcagagcaaggtngcaaaacaaaggacagggaaaaccaagagaaaagtccataatagacgagaattcttccactctctgaatggaggctatttagaaacagagaaaagaagaggacganagatgatatgatgatgagtcagttaaaagtccagaaatgtgacaacaaagatttttttgatccattgaaagtgatgaagaactagcaagtgatcatgatgatgagctggggtccaacaagatgatgaaaatggctgg

SEQ ID NO: 10561 - DNA, 848 bp, Homo Sapiens
taacggtctaggtacgaggcctgggtgtgtaatcggcacgaggggaggactgtgggccacgcaggggctggcggtggcgctggctctgagcgtgctgccgggcagccgggcgctgcggccgggcgactgcgaagtttgtatttcttatctgggaagattttaccaggacctcaaagacagagatgtcacattctcaccagccactattgaaaacgaacttataaagttctgccgggaagcaagaggcaaagagaatcggttgtgctactatatcggggccacagatgatgcagccaccaaaatcatcaatgaggtatcaaagcctctggcccaccacatccctgtggagaagatctgtgagaagcttaagaagaaggacagccagatatgtgagcttaagtatgacaagcagatcgacctgagcacagtggacctgaagaagctccgagttaaagagctgaagaagattctggatgactggggggagacatgcaaaggctgtgcagaaaagtctgactacatccggaagataaatgaactgatgcctaaatatgcccccaaggcagccagtgcacggaccgatttgtagtctgctcaatctctgttgcacctgagggggaaaaaacagttcaactgcttactcccaaaacagcctttttgtaatttattttttaagtgggctcctgacaatactgtatcagatgtgaagcctggagctttcctgatgatgctggccctacagtacccccatgaggggattcccttccttctgttgctggtgtactctaggacttcaaagtgtgtctgggatttttttattaaagaaaaaaaatttctagctgtcaaaa

SEQ ID NO: 10562 - DNA, 740 bp, Homo Sapiens
gggagggggactatgaggaggtgctcgagcctgaagattcttctttttcttctgctctggctggatcacagggctgcccggctggggctggggctggggctgtggctctggggatctcagctgtggctctatatgattaccaagaagagggaagtgatgagctttcctttgatccggacgacgtaatcactgacattgagatggtggacgagggctggtggcggggacgttgccatggccactttggactcttccctgcaaattatgtcaagcttctggagtgactagagctcactgtctactgcaactgtgatttcccatgtccaaagtggctctgcctccaccccctccctattcctgctgcaaatgtctaaccagatgaggttctggacaaacttccctctcctgcttcattaagggcttggggcagagacagcatggggaaggaggtccccttccccaagagtcctctctatcctggatgagctcatgaacatttctcttgtgttcctgactccttcccaatgaacacctctctgccaccccaagctctgctctcctcctctgtgagctctgggcttcccagtttgtttacccgggaaagtacgtctagattgtgtggtttgcctcattgtgctatttgcccactttccttccctgaagaaatatctgtgaaccttctttctgttcagtcctaaaattcgaaataaagtgagactatggttcacctgtaaaaaaaa

SEQ ID NO: 10563 - DNA, 674 bp, Homo Sapiens
  misc_feature (183)..(198): n is a, c, g, or t
  misc_feature (427)..(436): n is a, c, g, or t
ggagatccagccaggggcttccctaaagcagtgcagcaccggcccagggcatcactagacaggccctaattaagttttttttaaaaagcctgtgtatttattttagaatcatgtttttctgtatattaacttgggggatatcgttaatatttaggatataagatttgagaacagccatcttcnnnnnnnnnnnnnnnnttgactcaagaaagtacaagtaaactatacacctttttttcataagttttaggaactgtagtaatgtggcttagaaagtataatggcctaaatgttttcaaaatgtaagttcctgtggagaagaattgtttatattgcaaacggggggactgaggggaacctgtaggtttaaaacagtatgtttgtcagccaactgatttaaaaggcctttaactgttttggttgttgnnnnnnnnnnaagccactctccccttcctatgaggaagaattgagaggggcacctatttctgtaaaatccccaaattggtgttgatgattttgagcttgaatgttttcatacctgattaaaacttggtttattctaatttctgtatcatatcatctgaggtttacgtggtaactagtcttataacatggatgtatcttttttttgttgttcatctaaagctttttaatccaataaatacagagtttgc

SEQ ID NO: 10564 - DNA, 205 bp, Homo Sapiens
acaatagtgaaaagaataagagcagattaaacattcatttacctgtaacatattatttattttaaaaatgtcatgtgaggtaaggctgctgtgtattctaattggctaaaataaaaggtttaagtgagaataaaggaacacagatataacacaaaatagcaagtgggaatctaagtttttctaatagaaagttgaaatggcaaac

SEQ ID NO: 10565 - DNA, 811 bp, Homo Sapiens
gggacgtgacgccggtgccgggcgaacatggcggcggccaccggaccctcgttttggctggggaatgaaaccctgaaggtgccgctggcgctctttgccttgaaccggcagcgcctgtgtgagcggctgcggaagaaccctgctgtgcaggccggctccatcgtggtcctgcagggcggggaggagactcagcgctactgcaccgacaccggggtcctcttccgccaggagtccttctttcactgggcgttcggtgtcactgagccaggctgctatggtgtcatcgatgttgacactgggaagtcgaccctgtttgtgcccaggcttcctgccagccatgccacctggatgggaaagatccattccaaggagcacttcaaggagaagtatgccgtggacgacgtccagtacgtagatgagattgccagcgtcctgacgtcacagaagccctctgtcctcctcactttgcgtggcgtcaacacggacagcggcagtgtctgcagggaggcctcctttgacggcatcagcaagttcgaagtcaacaataccattcttcacccagagatcgttgagtgccgagtgtttaagacggaatatggagctggaggttctgcgctataccaataaaatctccagcgaaggcccaccggtgaggtaaatgaaaggctgtaaaaagggggaatgaaagaatattgagttggaaagccttctttcaaacaattactgcttactccccggggggggcaatgggcccccaggttccttacacccgggattttgggggaaatgggggaaaaaactcagcccgggg

SEQ ID NO: 10566 - DNA, 301 bp, Homo Sapiens
ctggggggcctctacccaaaatcgaagacttttaaaagaaatttaattatcatacttttcactagcaatgctttaagttatttttaaaaaaatgggagtagcatacttaagatgcttaaagagtgaaccaaggagctaaggatgcagcaaaagtgactttgagatacaaagtactctgacaaattatactcaccatggaagaataagaacttcataaggaacctaccaaaggacatgcttcagacaaccaaaataactagagagccatcaatctaaagactggtggtgggcattaaacata

SEQ ID NO: 10567 - DNA, 552 bp, Homo Sapiens
  misc_feature (262)..(262): n is a, c, g, or t
ggggcggactcaatgaccacggcgatttcgtaacgcccccgttccgaaagtgttcttctgggcagtgcaaccccgacggcgcggagctatgtagcccctgcggcggcggagccgtgacccctactcccgccgcgggcgggggcagaaccccgtggcgctgcagagagaactgtccagtctggcgtcacaacccctgtctcgcctcctggatgagctggaggtgctggaagagctgattgtactgctggaccctgagcctggngccaggtgggggtatggcccatggcactactcgacacctggccgcaagatatgggctgcctgctgcctggtccacctttgcctattcgctgaggccgagtcgctcgccgctgcgggctctgattgagatggtggtggcaagggagccctctgcctccctgggccagcttggcacacacctcgcccagctagggcgggcagatgcattgcgggtgctgtccaagcttggctcatctggggtttgctgggcttaacacccaataaagaactttgctgactactaagcccagt

SEQ ID NO: 10568 - DNA, 342 bp, Homo Sapiens
agaagagttgtcaatatgctggtccattgaacgaattaatgacatctctttcttaaaattcaaagttttgattgattaaattttgaggtacataagaaatgaatagaaaccaaagattttcctgattttctctctaagaaataaatccaaaatttctggtttaaatttactttaaataataaacaaaaaacatttgatctgcattgttctcatcacaatttaagagactatattcagctatgaatgccatatacggttttgttctgatatttgacccagatttagcataaccaggtaaaccaggactttttacaagatcactataatggttactttgtttaa

SEQ ID NO: 10569 - DNA, 917 bp, Homo Sapiens
  misc_feature (525)..(533): n is a, c, g, or t
ggggccaatgggagtatggcagggctggagggagtgcctgggtctcagggctgctgtggagttcgcacctccagctcgggccgatgtggaagctttggagagctgaagagggcgcggcggcgctcggaggcgcgctcttcctgctgctcttcgcgctaggggtccgccagctgctgaagcagaggtggccgatgggcttccccccggggccgccggggctgccatttatcggcaacatctattccctggcagcctcatccgagcttccccatgtctacatgagaaagccagagccaggtgtacggagaggtacagcccccacggggccccgggcaaggaaggccgcccaggctgggccccggctggccaaggcccttcctgggttggacttatggcccccccctgggcccgactaatccgggacctctccgtgtgcccggctgcccctttgagggacaacccgcttcccggggtctggaaaggggagaagtcctcgacgccgtgccccctttgcaagggggaagnnnnnnnnntgcgggtggacccacttccgggccgagggctccaaggggatccccgccttgaattttcccgctaaacgctcgagctccttgctcctgccccttgccccgtttgggttccccacccgcccctccaatttaagacccacgggatggcaaacacggctttcacgggccgtgcgccctcgccagaccccctcctcatactttcattgggcaaactcgactcggcactttttgtttatcaaccagcgcgcacacactctcttttattccctacttttgtcgcggacagcctttctcccttgtgatattcctccctgttgctcagcccgcatgttttgctaaatatccccctcccttaccgttctcacccgcccttgtcatcgcctatcg

SEQ ID NO: 10570 - DNA, 354 bp, Homo Sapiens
agatggattggtggatgatactactacctgaattcaatttacaaaggatcaattcctctaaagggacacatttatgtctgtattttttatcaacatttatacgaataagtctatttaaactaaaatcatttatcctgataacacacacgtaaactttaaagatctcaatgaccacattagttgagactcagctgattccattttgaatggtatctttcacccctatgtgttaaaacatcaatgatatcaacttttaacaaacaagactacaagaaacaggcaaaaacaaaacaacaaataccaaccttgaagtcagtatgtctttttatatggagttacttagtaaaataatca

SEQ ID NO: 10571 - DNA, 208 bp, Homo Sapiens
gttcaatatgatgactctaaaagttaaaggcacagatcaaactacttttagagataacgtaacgggtaattataagagtaaactatactatctgaatatgtaagatcaactatctagaatcctggtagcacttataatacagaaaattgcaaattatataattaaagaaataaacagtatcacaatccatttttatatgttcatcata

SEQ ID NO: 10572 - DNA, 441 bp, Homo Sapiens
ttcacactggagaaaggccttacaagtgtggagaatgtgggaaatcttttggtcaaaagggcaacctcgttcaccatcagcgaggtcatactggagaaaggccctatgagtgcaaggaatgtgggaaatcatttaggtacagatcccaccacactgaacaccagagacttcacactggggaaagaccttacaattgtagggaatgtgggaaattatttaacaggaagtatcatcttctggttcatgagagagttcacactggagaaaggccatatgcgtgtgaggtatgtgggaaattatttggcaataagcacagcgtgactatacatcagaggattcacactggagaaaggccgtatgaatgcagtgaatgtgggaaatcatttctttccagctctgcgcttcatgttcataaaagagttcattctggacaaaagcctt

SEQ ID NO: 10573 - DNA, 326 bp, Homo Sapiens
cagatcaatatgatgaacataaggattggggttgttcatcattcccatcttaagaggctgggggcctctcaatcctgtatgtcctcccatctggggagagccctgctgaagaggctcagtcagtaagtagccagcacttcccatgcctgggtttgggtactgcatattctgtcgccctcggcctgctccaattgaaccgttcatgacttgattaggcattatcccttgaccattgcctgcagtccaacattccaggattcatgcccgcattcattcctgtgtcattcccatggcagatgatttactggactgttcatatattaata

SEQ ID NO: 10574 - DNA, 509 bp, Homo Sapiens
tgaaggatacccacaagaagctgcagcattttttctaccctcccactccctacagattcagcccctctcgagaggctgggtacgatttccactgggagtcacaagtaagtaatgggagccccagggagagctcttttaaagaattctgagattaaaagtttttcagatagaaaatatacaatatctcatggactggcagtttgagagaacttccctagtcaattttaaaagctagctttcttacatgtttctgaaaacatcaaccttaatattgataatgttttaagataatttatttattgtacacatgaccataaggagcatattctaagctgaacatacttatttggtctactgtacaaacaaatcatatttagaggagtatgtgcttacaactatatcttgtgtataactgattctcaaattgtgaaataaatgtagtcattattaaacttttggaatgcaaaattacaggtaatttttacaacacacagcaaatatctgtatag

SEQ ID NO: 10575 - DNA, 254 bp, Homo Sapiens
cacccggccactctagtcatctgatcttgaaccttcagtcttcggagaaggtccttaagacccaccattggtacaggaattaacttttcagaatcagggttatctaccttggcctgttgccagataataggatcaacaccagcaggaggattctgtaaaagctgtttgatctgtgcaggagaaagttctgttctagtcatagaaagggttacaccaagttgctgcaattgtgattctatatcggcttgttcaaa

SEQ ID NO: 10576 - DNA, 444 bp, Homo Sapiens
atgagcatttctggtcctgctgcatgagtgaggaagaaggtaccgtgaagaatgtgaaaaatagggctactattttgacactgccacgcctgctgagtttggaatgtgaccttcccggctgtctggtgtggcacagtgaagagcacagactggagttagagctgtaaccttggacaagtttacttagcagtcactaagtatttattgattatgtattagtctctagagatataggagtaaactcatggcatttattttctattagatggtgtagaaaataaaaaaccaagcaaatacaggtgacccttgcacaaacacagggttaggggtgcctgtcccctgcacagtcaaaaatctggatataacctttgactttctaaaaacttaactactagtagcctactgttgactgggagtcttctgttaatacaaacagtttattaa

SEQ ID NO: 10577 - DNA, 372 bp, Homo Sapiens
tgcttactaacccagtgtgaattactgctgcagagaaaatgataaatcacgtggtctcttttcaagaacagaggttaatacaggactgcaataagactactcctggtttgatcagaaatatgttacaattaaatgaaaatccacaggatgaaaaatcatgtgagaaacagcatcgatgtttcttcccaacagtccacaaccctgtgtgcaaccagtggctgtttttcacacaaccgttccacgacgtgcaccgttccacgacgtgtgtggtgtgtggaccaggggctgtttttcatacgaccattccacgatgtgtgcagtgtgtgtggacgatgctgtgcgtgcagaccctgcccacacactggtaagtaa

SEQ ID NO: 10578 - DNA, 243 bp, Homo Sapiens
actggaaattagagcagtacaaaaaataagaaaaaatcacctcaaatcccaatacccagagcccaactgttagcgtggtgaacattttcccaatactttatatacacatctatacttgctgttttataatctccttttaaacttttattgagcaatatgtcatggatgtctttcctggtcagtaaatacaggtttgtattatcgttttttaaatgagtctctagcagttcatcatattgactg

SEQ ID NO: 10579 - DNA, 398 bp, Homo Sapiens
tgcttacttaacccagtgtggaggaaggcatgcctagaataatcagggaggacttcacagagtggttatttataggggaagcagagacataccagtaagagggaatagcatatgcaagtggccagaaatccttggctagctatctgggaggagtggggttgtcaggagataaaggtataaagataggcttatatgccgcgctgtatagttgaatgtttttactattacaaaattttacagatgccctcagtttctccctttattcatttttctatgacatctttattgttggtcttcatttagtctttccttccagtctatcctgtgtaaaattacttcctacttccaaaatgagaaatactgggttaagtaagcacacactggttaagtaagcgagg

SEQ ID NO: 10580 - DNA, 565 bp, Homo Sapiens
tcttcaaatttaaatttattaagacattcagctatgtctgtcagtctacatccaaatttgctactaaaaataaaataaagtcacatcccacattaggaataccgaggtctgaaaaacactttttgagccaagcctattgtataaataaatgactagtttcttttcatatcaaaattcccataaaaaattacattcccccctccccagttctacctgtagccatgatgaatgtaaaaatttaaatatgacacatccttgtcaaagaaaaggtgcaaagtctattaacagctttaaaagtggcatttgcagagtgtgatcatacagttatgtactcattcccaaagtgcaaatattgccataatttaacactgttttgattcagttgcaagaattaaacattacacaggattgaaaagtacacccagggcctctatcagtgccctaaagcccttcccactttggtctccttcactaaagcagactccaaagtgttcatcagagttttagtttacttcacacagccagcgaagtatacaacatatttaacaaaagtttcatatacatc

SEQ ID NO: 10581 - DNA, 132 bp, Homo Sapiens
tagactgtaagaaattgatgaaggaccgttatgtactacagtaaagagtttagatattatccttggtcatcaaagcgtttataagcagaaaaataacaaatatcaaaacattgtttagatcagcagttctca

SEQ ID NO: 10582 - DNA, 196 bp, Homo Sapiens
tcacatagacattgtaaactctacatgtcaaaaactagagccaccatgcccagccgatccatttacattcttctccatcttagttgatggcaactttatcccttcgagtttgttcagatccaaagcttttgagtcttctctccctttccgtcaggaaattattttggctctacctgcaaccatatgcagattcatc

SEQ ID NO: 10583 - DNA, 1126 bp, Homo Sapiens
  misc_feature (857)..(877): n is a, c, g, or t
tgtatgtgtgtgagagagagagaggcaggcacactgaaattgcacgcttttctctttggtcttgtggggctttatccatacagcaagatgctggctgtgacctttccaatccagacatctgagccattgcgacagggacctcttttcccacttcacttcgtgttttgttggttctgaacagaaaagcttgaactcagtgttattccctgagccctttcagttactgttctctagcccttgtgtattttccagaagagcaatgttaagttccaccgagcaagcgatgggggaatgggtgaatgaagtgtcgcagctgctggagaggcactggctcccacagaaggccttctttttctctgtgttcaggccccatccaacacaaagcgttttcctattattttaagtctcactggggtatttattttctcagcaattaaatgtgtcaggaaatgccctgagtcctcgattctcttcttcctacaggacagctgcctacacttctccttcctgagtctagataaacacagagaatggctagaatacttactagaatttgctcaagatgcagctccaatcccaacccaatatgataagcatttcatggagcgtgactacactggttatgtactgcctctgaatgcccacaagaaatacttctgcctcttcaagccccaaaagacagtcgaagaggaggaagccatagggtcgtgcagtgatgttgactcttccctctacctgggtgaatctcgagggaaaccttcctgtggccttggatccaggcccatcaaaggaaagttgagcaagctctctttatggatggaacgcctgctggagggctccttacagaggttttatannnnnnnnnnnnnnnnnnnnnactgagaggattttccaaagagatttgaactcttcagactttttaacatgcccctgtgaacaggtattttcagaactcaaacttaccacaatgaacagagtatagattttagattgctcttctagaaccatggctagaagaatctttcctttgtcctgttctaacctaggaatgaaaaacaccaccagtttgaatcgcctagatgaaaatcttttcctctgactgttatttttccccacattcatcacc

SEQ ID NO: 10584 - DNA, 533 bp, Homo Sapiens
gctttagaagtggcagcctggtcttgggaaagagatgagaagggggatgtaggagagggcagccttgtcacatcttcttctgttgctgctacctctttctggctagataagcttgaagccagttggcttgcgtccgggcttggtgcaggggtgctgaccacattgtttggagttctcttaatgtcttcaacatctccattatacttccaagcatcatccatcgtgtaagatctggggagtgatgagattccccttgtctgagagcccaagggtcttggtgtgaccacagatgttaacctgactgtatcagttttccggtaacttctggggagagaagctgaaacacgagttgattccatttgtgtgctccgtgaacgcagagaagacaaagaggctgggctttgttcttccacaggactttgagaaggaagctgaatttcagttgttacacggtcctctctttttgcaaaagtggtagaatcttctttgggaatttctgaaggataagttgctcccttctcttactactctct

SEQ ID NO: 10585 - DNA, 179 bp, Homo Sapiens
gggggttcgaatccggagtgcccaacatggcggcggccgtaaggtgcatgggtagagccttgatacatcatcaaaggcatagcctttccaagatggtttatcagacatcactttgttcttgttctgtaaacatccgagtgcccaacagacattttgctgctgctacaaagtctgcaaag

SEQ ID NO: 10586 - DNA, 367 bp, Homo Sapiens
ggatttcagctttttccccaagattttttgcttgggaggagacagattagactggattcggagtcttgattttgcaaaggtaacaaaagacatgtttttttataagacttttcatcataagtttattttattcaacagaaaccaaaatctaatataatggaaaaaataaagatctgtgataaatctgatctgtgtggataaacacaattagaaagatttaaagattaagtattgaaacaaactacccaaaatattttaatactgatttgtaaaaatttcagtacatttttcttctttgcttaattctactgggtcctgtttttcatcaaaacattctatcatgttagtatacaatagccaaaaaaaa

SEQ ID NO: 10587 - DNA, 326 bp, Homo Sapiens
cacacctgatggtgtgactcggccgacgcgagcgccgcgcttcgcttcagctgctagctggcccaagggaggcgaccgcggagggtggcgaggggcggccaggacccgcagccccggggccgggccggtccggaccgccagggagggcaggtcagtgggcagatcgcgtccgcgggattcaatctctgcccgctctgataacagtccttttccctggcgctcacttcgtgcctggcacccggctgggcgcctcaagaccgttgtctcttcgatcgcttctttggacttggcgaccatttcagagatgtcttccagaagtaccaaaa

SEQ ID NO: 10588 - DNA, 433 bp, Homo Sapiens
  misc_feature (60)..(70): n is a, c, g, or t
ggtgcgctatgattaaaaccattcatatagagttagtctttacaactactattctgttannnnnnnnnnnaatctgacaacatttgtcctaagtaagataagcaaaaaaattcttcaactccttttggcaagaaaactgtaacagaaaataaattttgaatgtgtacttaagtctttattatatttgaaacaattttttttcaattttaaaagctgaatgaagacaacttaggttgctaacctagttcaaaatgaaattatttagataccaatttttaaaatactggagagaatttatatgtctttttccagagttctgatgataagcatttggagtgcatttattcctccagataataaatgtgtgttcagaactttttgtgttttttaaggcattaataaagccttcgataatattaaatacaaaatggaa

SEQ ID NO: 10589 - DNA, 829 bp, Homo Sapiens
agtcagatccacattgtaggacagtacagcagtacattgtggctgatgaatgcctattgggcttcagccccggaaacctgacacctcagtgacatctcaggccacccagactctggcccttcagctgcagaatgccgaaacacagactgagagggaggtgccggagccagggacagccgcctcaggtcctggtgaaggtgagggttcagagtatggtgccagtggagaagatgcgctcagcaggatccagaggctgatggcggagggcggcatgacagccgtggtgcagcgggagcagagcaccaccatggcctccatgggcggcttcggcaacaacatcatcgtcagccaccgcattcaccgcagctctcagacgggcactgaacctggtgccgcccacacctcctcaccccagccctccacctctcggggactgctcccagaggccgggcaactggcagagcgaggcctaagcccccggacagcttcctgggaccagcctggtacccctgggcgggagccaacccagccaaccctgccctcttcctcccctgtccccattcctgtttcccttcccagcgctgagggaccaaccctccactgcgagttgaccaataacaaccacctttctggatggtggcagcaacaggggggacgctgcaggccctagggggagaccacggaacaggtagagaccaaccttgcactggtgcctcccctcgaacggccagcagaaaaccggactcccagctgactgggaactggacatgtggaaaagctgctggctgcatcaggaaacagaaggagaaaaagggtcagggtggaaaag

SEQ ID NO: 10590 - DNA, 335 bp, Homo Sapiens
gggtcactctgagacgatctggggtcaggagggaggtgcagccctctccttacaattcatcacctgaacaaagacactcgaccttctgcagagggtcagggctatcccctggttggtgacctttgcacagctcactgtgggacctgagagctggctaaaatctcagggaaaggagcatagccctggggatagcgagaggcttgagaatggggccgcttgggggagggaagaggcagcccggcgaggggcaagcgggggacccagccgggctgggcccctgggccccgggtctgtacaatacggtttgctataaaactcaaaatcttccagccggt

SEQ ID NO: 10591 - DNA, 971 bp, Homo Sapiens
gggaatatgagctaggtccggatcctgttagacaccggcgggcgcgagccgttgcagttctctttgggtgatcgctccttccctcttcaacggatccctccccgcctccatcctcgttctgtgggagagaccagccttctggtgctgcagtcaggaatggagcttgacagcgctctggaagccccatcgcaggaagactctaatttgtccgaggagttgtctcactccgcctttggacaggccttctccaagattttacactgtcttgcccgcccggaggcacgacgaggcaacgtaaaagatgcagttcttaaagacctcggtgatctaatagaagccacagaatttgataggttatttgaggggactggtgcacggctccgcggaatgccggagacactggggcaggtagcaaaagccctggagaagtatgcagccccctccaaggaggaggaaggtggaggtgatgggcactccgaagcggccgagaaagcagccccaagttgggttactgtttcttaaactgttaggggaaagttgagacctgctaagaattccctgggtcggccctgcatggcagacgggcctgcatcacttggcagggacccgtttatattttttgccatcaccacacagcttggagcaaccatggaccacctccgagaatctcgggaagttggctagggaggggctcacctcactgcttcaagttactgaatgcggttctgtggcaggattcctacattggagacacatgacagcatgagaacagggagactttccggtgatactaggggcttctcaaaaagccgacttgtattacggaatcctgggaagaattaaaccctcgcatcaaacatgtttttctcattggactctgcaacaggtcactcgggccctggctgaacccagctctggaagggtacttcccgcatcattggtcatttccgatgacttccaaattgaaacca

SEQ ID NO: 10592 - DNA, 1826 bp, Homo Sapiens
aatctctggaccctatttctagacttccgtggttcgctactaaagcttttgtgtctctgttcaccttccttatggctcccactttgggcccgcctgtttcgccttcgcctgccttagtccacgctctgtgtggacgcaccagaaagttttcatcccctggccagaccttaccaaactgcagggactgccctattacgactatccagcagctctcgcctcatctcattacgtatctcgaccagtgttctggacagactcgttcccgagagccttgtgccttaagagaaaggacacactgaggtgtttcctacccgacatcgtggtccgtgctctccacactatctttcgagctgaacgtccaggcctttgcaggagggggccatgggggctccgaatgggatgcagccccatgctgtccctgataaatccagtgtgcactctgatgaagtctgggtggatagtggtctacgggctggcagctaccatgatccaagagggcctgacttgggagggcttccagacagctgaaggctgctaccgtaccgtgtgggagcgcctgggtctggccttccagaccccagaggcatactgccatgcacgcgacgtgttccgctcactggcctacatcgcggccactgagcatatgggccatgcagctagccctgcaacagcagcagcacaaaaaggcctcctggccaaaagtcaaacagggcacaggactaaggacagggcctatgtttggaccaaaggaagccatggcaaacctgagcccagagtgagccgtctgaactgtgggagggaagtgctaacagcccagcctccagcctggcctttcctccttcccctctgaacctcctgcaaccctgagccatcaggacaatcataccccttcccttctctccacccaattgtgccagtaaatgggggttgagggtgacctaggcagcattagaatcacttatttatttctttcctcacctgttccctgactgcgtgaaatgttcagggaggtcagttgatttccccaggtacattcatggtgtgacagacacatgggtacaaataaaagacccagaaagccattaagtgtggtgtgtttgagccctcagtcgtcctgacagggcacaggagctgcggccagcccttgcccaccgctttttatttggacacagatggggagccccccaggctcctgctgagaccccccacatatcctcatatctagcctgagtatctgtcctgcaaaatgacagaggggctaccagtaggaagccatcctcccttccttgtgagatttgcctgcagggggaggatgggacctcggcagagaggctctgagaagaggtcagggaatggccactccaggggaggctctgcactgggagcctgaggcatgtaatgcagcaggcaggaagtgttgccaggggcctggagtacacagtctgagccgtccaaccactggtgtgtgctgtctttcggcacttctgactgcagggcaggcagctccagctggtaagggtcctcactggggagggcacgaagctggcgggacaacactccatgctcagctggcaaggctcccccttgtgtcagaggagtacatagcaggtacaaggaggaggcagaaggagactagttactgaccaagatgcagcgtgctgctgctgctggttttcgtcttgattactctcaatcaccatgtgtcctggagtttcctcagttgatctagaagggacaaattctgttcctccaggaatgctgtactctgttctccgaatgctccatattctgggctgtgtatttccaagaccctgctctctaaaccc

SEQ ID NO: 10593 - DNA, 1236 bp, Homo Sapiens
aaaccgggcagtaactataacgtggttctaaggtagcgaggcctgggtggcgaattcggcacgagggggaggggaggcgatggagtgtggcactttggcggggaaggggcggctcagccctcgggccctcgcccgccctctccgggtctggagcgtctcctcgcgccatccctgcaccgccagggggaacgtgcccatcgcagccgaggccagagggacccccgtccagcagagactggaaccctggtctctggccaccgcccccatccctcccccagctcctaacgccttctcttctgtgcccccatctccagaggaggctgcggaggaggaggaggaagcccccgaagagccggagccggtggcagagccagaagaggaacgccccaaaccaagcccgcctcagctgggaccctccacgttcaggagcctcccggggctggcggctacctcactggacggcacatcccggaggtgggaggtggctcagggaggtcgggccactcatggtctctgtgttactggccactcagccgccccgtggtgcctcctttgatcccgccaaagatcccagaaggggagcgcgtagacttcgatgacatccaccgcaagcgcatggagaaatgacctgctggagctgcaagacactcatcgatgtacatttcgagcagcggacagaaggaggaagaggagctggttgccttgaaggagcgcattgagcggcgccggtcagaagagagccgaagcacggcgcttcagaaactgaggaaggaacgcggacgtcagggctaaaactaggcggaggagacgatgaggcacggagaggcagaggccaaagacacgggcacagacgatggatgcaagaaaaagaaggggcaggccaaccatgggggccatttggacggcaacaggccaaggcacaacagaaccgtggcaagcggagacgggccggagcattacagtgccgttccatacgagagggaaaaggcccggtggacattggaacaacagtggggcgcagaacaccatctcgtggacaacaacacccagaaaaacgttgatggatcgggtaacccgcgagggatcagtaatagcgcacacgaagggaagagataagcggagaatgatgacatcgatggagacacagcatcaagcgacaacaacgatggagagtggaggaaacaatgacaggaattgagacaaacacagacgaacaaatgagttctacgaagaccc

SEQ ID NO: 10594 - DNA, 478 bp, Homo Sapiens
ggggtgtagttttccccggcaggacggtagaagtcgtggtttgtgcgcggccaggcgctggagcctccgctgccgggagcaatcagaccttccagctgcctctcatgtacttgtctgttgggggcttgtgttgatcaggagtgaattcacagtctaccatgaattggaaggttcttgagcacgtgcccctgctgctgtatatcttggcagcaaaaacattaattctctgcctgacatttgctggggtgaaaatgtatcaaagaaaaaggttggaggcaaaacaacaaaaactggaggctgaaaggaagaagcaatcagagaaaaaagataactgaagattctgccatgtaaatgtcagcttgagtggactccagctgagaagaaagagaagaaagacttaattattgaataatttgtcagaggataaactcccaacctagacctttcacttaaaatagtgtgaatttgtatatgtttt

SEQ ID NO: 10595 - DNA, 888 bp, Homo Sapiens
  misc_feature (155)..(267): n is a, c, g, or t
  misc_feature (277)..(277): n is a, c, g, or t
  misc_feature (401)..(409): n is a, c, g, or t
  misc_feature (810)..(848): n is a, c, g, or t
cctttgccaacctccgttctatttatgtgcaagcagtttggattcaagttcttgtatctgtctgttctgggacctggggattgtgagggttccctcacagccagcacgacccccagaaagaggcgtcccacaataaacacgtcacctgctcttgnnnnnnnnnnnnnnnnnnnnnnnnnnnnnnnnnnnnnnnnnnnnnnnnnnnnnnnnnnnnnnnnnnnnnnnnnnnnnnnnnnnnnnnnnnnnnnnnnnnnnnnnnnnnnnnnnggaagtctcntttggccctcggcaaaactttttaaaccaataaggttgggggccgggccccaaaaagaattggaacaggataaaggttggttctcgggccattttgtcacggcaaagggttggcatttcttccnnnnnnnnncccccgggggaaaagagggggtttggaaaccttcaaaaggaatttcgaggggcttcattgtttttttacaaccggacttgcgcctcgcggaattactgtgtccccccaccaggcactcccccgactttttgttctaattaaaagggtttttgaccctaatgaaaccccggaaataaggaatttgtaaccctggaatggaaaaggtgcgcaaaaacatgggccctgtgcaaataaatttgtcccatggggcaaaccccgggggccaaaaagttgaaaattttcgcccggtttgattgagaactgggagaaaatcccccaagggttccttataaaacaaaagaaggtttatcaaaaaaccctttgcggaaataggcgaaaaattgttgcggaaaaggcccccnnnnnnnnnnnnnnnnnnnnnnnnnnnnnnnnnnnnnnngacgcgggggatacctctccgggagcggtaaaaccaggtg

SEQ ID NO: 10596 - DNA, 950 bp, Homo Sapiens
  misc_feature (430)..(593): n is a, c, g, or t
  misc_feature (612)..(621): n is a, c, g, or t
  misc_feature (741)..(749): n is a, c, g, or t
  misc_feature (795)..(874): n is a, c, g, or t
  misc_feature (894)..(902): n is a, c, g, or t
gatgcatcgtgtcgatgatcagacgaagtattatagagatagctttgatagtagtttgtgcactgcgtcatcattctgcactctttggaatggattataatgagaagaagtaattgaaccacccccgttgttagatgtgataagtgtggtactgatctactggcgagcgatgaaaatgttgcagggagagtcagcagaggcatttgtagctaaacatgctatgcatcagactggccatttatgaagatgaagaatacagtcagctttgtgaaatagtattgcaagcaagccccgtgggcaaatttgtattgagtccatctgtaatttgctcagtgatggcagacaagatggctgtctggttttgagacacactttaattttatgttaacttgttaaatctttttaaaaattaaaaaatttttatgattgnnnnnnnnnnnnnnnnnnnnnnnnnnnnnnnnnnnnnnnnnnnnnnnnnnnnnnnnnnnnnnnnnnnnnnnnnnnnnnnnnnnnnnnnnnnnnnnnnnnnnnnnnnnnnnnnnnnnnnnnnnnnnnnnnnnnnnnnnnnnnnnnnnnnnnnnnnnnnnnnnnnnccctttttggcaacacccnnnnnnnnnnaaaaaaggggcctgaaaaagaggtcttttttaaaaagttgtgggggggcctttttttaggaggtgggagcgggaaaaaagaccttccgtgtggttttttggaaaaaaaccccttctttcnnnnnnnnnagaattttgtgggcccacccccccccaattatattattcctgcggnnnnnnnnnnnnnnnnnnnnnnnnnnnnnnnnnnnnnnnnnnnnnnnnnnnnnnnnnnnnnnnnnnnnnnnnnnnnnnnnttctttctcttcggcggggnnnnnnnnnaaaaaaaatattcttcccccggggaggccgcggggccacccaccaggc

SEQ ID NO: 10597 - DNA, 878 bp, Homo Sapiens
  misc_feature (64)..(64): n is a, c, g, or t
  misc_feature (778)..(778): n is a, c, g, or t
  misc_feature (814)..(814): n is a, c, g, or t
  misc_feature (836)..(836): n is a, c, g, or t
ttccatgctctaatttcaaaaaaccaagattggggatttcattaagaatctaaataaaaattcnacaatggtgggtgaaatctgtccacttttcagccccaatccaatataaatcccgcagttataatgcataaacaattcaaaataaagtttataatggaaatgtcaacaagtcataactactacccattactactgatgggttccactatactcaacctgggcacagcagatgtgcacatctgatagacagactgcttagaaaattaaagctatcagagctataaataaggaatacataaatatgaacatagcaatgccaaagcattagagctgttaaaaaaagtgaataagatgtgatgtaaacacatctgatagttctctctgtaagccactttccactgatttataaagctatggttttataattcttttaaaaagtaaaatttttctacactgctgcatgcagtaatttcattgtacattctcaactacaatgcaatcttcaaaccctcttgcagagcttgacatatctcatcagaatttctccagaaagtcagcttgtcatattttcagcagccttcagtgcttcagtagccttgcgaagctccttaataaccgatgataaagcttctgggttaattccttgttcacaaagccgtacacaaatagacagagtttccatatctaagccagtattcaaaattcttgaaatctcaagcagaacgtccatggtctcccgcaccgcattcagattcgccgttccggccgccgccgncgccccagcaccgccgctactcgccatggctaaggncgagggaggcgggagaagggcntgacccggaactggagcgccttcctctctccgaggcaatcac

SEQ ID NO: 10598 - DNA, 312 bp, Homo Sapiens
cagagttaatatgatgaactacaaatttgagatacccgcttcagaaccaaatcttaaagaaccactggctttcagttatcggcccccttatgcattaacaactatacaaggcaataatatagcttacgttattttaaaatagactatgtcttctgtatgaaactggagagacaataaacatcaccatgtcccagtttctgtaaacgagtaatgactattttccacatcaacttttaccaatgcgtaagcattactccatgtgctgtaattacagtgtctcactcacctgaagccgagttcatcatattgact

SEQ ID NO: 10599 - DNA, 1251 bp, Homo Sapiens
gttctgtgtagatagagatggtgtcaaggaggtgcaggatggagatgggagatttcatggagcctggtcagccagctctgtaccaggttgaacaccgaggagctgtcaaagtatttggagtttcttcattgtaaggagtaagggcttccaagatggggcaggtagtccgtacagcctaccaggaacatgttgtgttttctttattttttaaaatcattatattgagttgtgttttcagcactatattggtcaagatagccaagcagtttgtataatttctgtcactagtgtcatacagttttctggtcaacatgtgtgatctttgtgtctcctttttgccaagcacattctgattttcttgttggaacacaggtctagtttctaaaggacaaattttttgttccttgtcttttttctgtaagggacaagatttgtcgtttttgtaagaaatgagatgcaggaaagaaaaccaaatcccattcctgcaccccagtccaataagcagataccacttaagataggagtctaaactccacagaaaaggataataccaagagcttgtattgttaccttagtcacttgcctagcagtgtgtggctttaaaaactagagatttttcagtcttagtctgcaaactggcatttccgattttccagcataaaaatccacctgtgtctgctgaatgtgtatgtatgtgctcactgtggctttagattctgtccctggggttagccctgtgggccctgacaggaagggaggaagcctggtgaatttagtgagcagctggcctgggtcacagtgacctgacctcaaaccagcttaaggctttaagtcctctctcagaacttggcatttccaacttcttcctttccgggtgagagaagaagcggagaagggttcagtgtagccactctgggctcatagggacacttggtcactccagagtttttaatagctcccaggaggtgatattattttcagtgctcagctgaaatacccaaccccaggaataagaactcccatttcaaacagttctggccaatctgagccctgcttttgtgattgctcatccaattgtcctccactagaagggctaagcttgactgcccttagcccggccagccccgtaatgtgtgttttgttcagccattattatgccaaaaattcactagttgagctggtttgttttaggataggaaatgaaattgcctctcacgtgaccggagtggcccgagtctgctcctattgtga

SEQ ID NO: 10600 - DNA, 227 bp, Homo Sapiens
tgatgaacctccatgtatttgtaacctagctttatgactagaatttcttgtaatttttatagcccatttttttcctgagaaatctgaaactagagatatttaattatgaaaagtcaaagatgttacctatatttacaatatcttgtagtcagttattttagtagaacataactggagatttgccttcaggtatttcctcaattttgcatagttcatcatattgactg

SEQ ID NO: 10601 - DNA, 822 bp, Homo Sapiens
atctgcgtggtcatcaaagtttatctgggcatcaaaaacaggcaacttgtcctttggagttttcaccaaagggatccctttcccactggagtagcatcaattttcaggaagagattatacagcttcgtaatttgaatctgcagcctggctttcaaaaggcccaacgaagcctagattttcgggccatccgctgagcttggctgtcctttattccttcaaaaatgtcaatttgctccttaaaaatgagctccgggtttgaagcagccacctcttcaatgtcgacgcccccctgggggctgcccaccagcacggggccattgcaggaccggtccatcagaattgccaggtaggtttctctggaaatatccaaggcttcagcaaccatcaccttgttaactttcacaccttcttttggagtttgttttgtcgctagattgtacccaatcatctgtttagccagctgtcccacaacattagggtcttttgttaaatgaacacctcctttcaaaccactattgaagacaccttttcctcttcctccagctaagatctgggcttttaaaacaatttcttttgcatttagtctcttagcagcctcgagagcttcatttgcagtgtctgctacaaagaatctttgaactctcactccgttgtcagacatcagtttcttgctctggtattcctgcaggttcagccatcttctggaggttaattgaactgcctgggacccggccgccaggaagcggggccgcagcgctagggctcgcagaagcttcccggcctgcgctgctacgggggacgccatcttaaacaggaaactcg

SEQ ID NO: 10602 - DNA, 157 bp, Homo Sapiens
ttatatatgaacatgatgaacctgacattgtgaacataaaatctgggaatctgtattctacccatggaagtgtgaaggaataaagagaaaggaacagaatgtctccaaagtagcaaatttgatcactttcagattttattatctattataatcaaaa

SEQ ID NO: 10603 - DNA, 300 bp, Homo Sapiens
ctcaattctcagtctcaacttctctcccgtagattgaaaaactaaaatctaaacagtagcttttgagtttgatgagataccctaaagtcattctcacattttaaagaaatgccaaaaactaaacaaatgaataacatgaccaagcatatcgcaagaaacgaaaaaaaattcattataaggaaaacacatatatgtgctatgtaacaattgtaagttattacagggaataacatgaaagacaactgaaacagcgtatctttcaaaggatgaaaacttgtcaaactcgttcatatattgaat

SEQ ID NO: 10604 - DNA, 433 bp, Homo Sapiens
ctgcttgtcctgctctggtcaatattcctaatgaaaagttaatgaactgagaatctatctctagtgatatgcctttctcactggtctttcagtatgattacccctaaaccaccaaaactgctgcctgagactggtggcaagactttaacctttcgggcattcaacacttgttagaagaaaagcttgatgtaatgcaaatcgtataaactctaaaaccaggcagacttgaaattccaccctaacccattaattttagaatttacacaatagctaatctttattttctcatctatatgaaaatccacatcaaaaggctgttatgaggtctaaatgaacatataaacaggagggcaccattcacagctcccaaccgagagtaggcattctactcactggttgctcagttatgtgaaaataaagtatggagattctg

SEQ ID NO: 10605 - DNA, 405 bp, Homo Sapiens
catgcaaatatgatgaactgggtatatacctacaaaagtagtacactacagtgataacttatcaagctgggaatgttagtgatcataatggtggctacccatcctcattgattattactgatagaagaaagtaatcaaactgtattgaacaatgaaatatagcagatgtaataaatatcgcttgagtgtactctatgataattacaaagttctgagacaggactgaccaagacaagggcagccccatggacatgcacagattgagtctgaatgggcaccacagaacatttacagtagggagctaaaggtaaagataaagtttagcatctaggtaagtcattatgtcaggaaacagtgagttagtggttatctctaagtggtgaatttttaagaaatttttactcc

SEQ ID NO: 10606 - DNA, 338 bp, Homo Sapiens
gcacttggaacagaagacttgaactctggaaatacatttgttgttcttggacatcataaacatgttagttctcccaagttaatgcaaaaacttatcctttatgtctgtaaaaatgccaacaaggaatcattcttagtcctgccttcccctctcaaattcagctggttcatcagaagatcccatcagcctcatcctcagggtgcatcccgtttccctgacttctctccctatcatggcatcactgttgggcccaagccaccacagtgccctgcttggattatagtagtcaccctttagctgtcttcctagtttttctgttatgagctgagaccatcgtt

SEQ ID NO: 10607 - DNA, 496 bp, Homo Sapiens
aagcgtgagcctctctttgattgcctgtactctggcagaggccagcgactaagcaggctctctgtccgcgagtccatgatgtacaggtagcggttgtcaaacagcagggcaaagatatctccaaacccaacgcaaggccaagtttgcaatgctcaggagtctgtgatgaccctgagaatatcataactggcaaagtcccactggtagagaccaagtgcagagaactacagacaatgtatgtgccagtcaaaatgaagtcttggctgcaggcagatacgtctagcctcagagacagacaatgtctttaagcacttacagttgatttctctcccaattggcccaatcttaatctcatatttgtctgcacttaagaggatgtagtctccaggactgtgcagagagacttgactttgcacttctcgaaactaccttggtgacccattccgtgtgcccgtgaatgtgttcaggcatgtcccagcagataaagaagacgtcc

SEQ ID NO: 10608 - DNA, 552 bp, Homo Sapiens
caagttattagaaaaataaagaaaaatcaaatatacaatgatacattaacataaaaagaaggaaaatcttggagggtgggcgtgggaactcaggaccccagagtggcgagtggtgtggggagggagagcctctctcccccttttctgtgtgagaggaactcttagtgtctggtgcagctattaaatgtgcaatgtgtcaagtagcttgttttacacgctacaacatagctcatttgtaacccattgtataagctgtgtatttacaaatataacacaacaatttaacttttccttagaatacaaaaagtcatgcatggtctggggaactatatgcttttccatttttaagtcaggactgcaatactgattccagttaatgagcagctaagatccaatctgtctaatacagtgaccccctagccatccgggcctggcaatatacaatttttttcccctccaagtttgtaacactccccttccagaaaggcattgtgcaacacaggattatttttaaatgattctgaatttgaattaactttttggagaattctg

SEQ ID NO: 10609 - DNA, 774 bp, Homo Sapiens
  misc_feature (554)..(572): n is a, c, g, or t
gcggccgcaagcaaaaccaagcgcgatatgcagctagcacccttcatatccatccccgttctcagcgggacaacaccatggacagccgttttcagagcctccagcatttgcacaccactactcaccctctctgctgctggcatgttggtagagtcatccctgtaatcaagaaatggcctgtggaatgttattgttcaacgttgtttacagctcttaaaacatggtgaggaatgcctaagtcttagtgaccaaacgtgaccttgaaagcagacatagcatgacagaccttcctagagtgtttggtcgggttcacagtgaccgagagtcaggtccagcacacacctgggaaagggatgctgccccaagggggaccaaaagggccggacgttacagggtgaaaccctctgacccctcgcgacaccgtaggacttgacttttgtttagtctttctaagaaatagatcatggagccaagtgaagtgcactttgtcaaatgtaagggtctgctttgttcttgttgcttttctgttttttaaccttttgttccgccatttnnnnnnnnnnnnnnnnnnngcttatgtttcttgtcaaatgcagaaatgttccttccgccactcactgaagttttgcattctggcttgtgcagtttttattgtctgtgtcagacgtacagccagacatgttctctattggcatttttccgattctgttcagatgacagcgaccgccttttcattccccccgccacctgtactcaccctcacgctctttgaag

SEQ ID NO: 10610 - DNA, 637 bp, Homo Sapiens
  misc_feature (374)..(502): n is a, c, g, or t
  misc_feature (512)..(524): n is a, c, g, or t
cttaaaacacggtacttagcaatcgggttgccagcaaagcactggatgcaagccttgccttccagaagcttaccagtcgggttgccagcaaagcagtggatgcaagacttgccctccaggagcttaccatcacaacgaagaagacaaataaatgcataatatatagacgacataaatccatactgtacacatttaagaataaacagtccagtagtaagaggcagtacatattcaatctgctgagaaatgtagacaataactactataagaatcctaatgctacagaagtcactggctgctgggaaaccggggaaaacttggctatggacgtgggggcttgtgtcggactctgaataaagagcagaatgattggnnnnnnnnnnnnnnnnnnnnnnnnnnnnnnnnnnnnnnnnnnnnnnnnnnnnnnnnnnnnnnnnnnnnnnnnnnnnnnnnnnnnnnnnnnnnnnnnnnnnnnnnnnnnnnnnnnnnnnnnnnnnnnnnncctttggggnnnnnnnnnnnnntgaaaaattttttaaaacctttttttgggcgcggggccccaaaaggaaggggaaatgggccaaactggttcccagaaaaaactgggccctaaaccacggcttggattcccccc

SEQ ID NO: 10611 - DNA, 1104 bp, Homo Sapiens
  misc_feature (470)..(562): n is a, c, g, or t
  misc_feature (809)..(818): n is a, c, g, or t
tttttcagtatttggggagggtggtttgagcagcatctattgacaatttcattagtggggatgtttctattgaaaacagagttaggaagtcataaaatgttcctgcaatataaggtaataataccaccagcgtttatcttactgttttcatgttctaagtgcatgcatctgagtaaaaggatctgggctgcagtccagtctgagagatgccagcaaaggcttcctaggccagttcagtccagtaaatccctcttcgatcttctcttccacacagacagcagtgatgagcatgcccatgaactcacatgattattttggggaaaatgaaagagttgtattctttttgaggtagtaattccactttcaggggcaaatacattttgattattttatcacccttcagtgagttgtttttgttctttaatcaaggatgtatgtttgaagtaagaagtaaagcataaagtatatgnnnnnnnnnnnnnnnnnnnnnnnnnnnnnnnnnnnnnnnnnnnnnnnnnnnnnnnnnnnnnnnnnnnnnnnnnnnnnnnnnnnnnnnnnnnnncaagaagctcccccaaaacctccaaaaaagcttccaaaaccattaagttaggcgaacgtggcccaaaaatggaatccaaagagatcctgagttgttactagggcgagcctgcccacaaataaagacttgcctcccgcaactaaaagccccccgccgatacccaaggggttcgaaggaatctactggatctttcaaggggattccgggcaatctcgataggaatttacgcaacacccatccccttttnnnnnnnnnnttgtaattcatcaaaaatttggtggaattgaaaaccatctcggccgacatgaaaaccctcaaaaaggcgtaggataaatcgaattgccccctgggataaaaaaatttgcccctgtggggaaaatatattgcgcaacagggtgaacaaagggggcccaaaaagtgagtccaaaattgggccaaaatctcaacccccaagatggggggggaaacactcccccaggggaatttgtctttttacaccaccattttatggttaccctagggcacaacccctttttctggcg

SEQ ID NO: 10612 - DNA, 474 bp, Homo Sapiens
ccttttgggatttgtcaccatccttccattcctcgggtcttctattttgggtgttgttcaagtgaaggaagagatgttccctcctaatttctctctagcccattataacctgctatcttggggcaacttttgatgtatgacatgtcacccttcccaacttggtctcctccaacatgctgtcttcatgtggagccctcaccacaatccctgactccggtcatttgtgcctttctcttgtcatctctgtacactacttatattcactgtgggttgggggagctaattttaagcatgttcagtggcagctcccctccagtttcagtgtcactgttaaaatttatcaaaaagcaacttcactaggggttttcttaagggataaaggccttttacagaagctaaacccttccccacatgtggtagaatgtgctcttctatatctactcctcaataaagcatgttctctgctcaaaaaaa

SEQ ID NO: 10613 - DNA, 748 bp, Homo Sapiens
ggcaagccacgtggggcaccttggcttcccggcaggaggtggacacccagccagaggcctggctcaaggtgacctcaccttcaccatgggcttcctgggtgcgcgggcctgagcgcaggttgttttgtacatattggaatatgtgttaacttatgccccgcatcccaactcacacggaagcacgggtcttgtctcagtctcttcgctgcatttggaaagcagtctcctctcgggccagcgccgggctgaggtgtccagaggcggcggcagctggcagtgccctcagcccccaagtgtccagcctggcacttcccattcaggccacctgctttgggtcaacagttcctttgccagcagcatctcctaaattgtaaggactctgtccaccggggccctcccagggctgtgaggacggaaacaggcagggagtggagctaacagcttagtcaccaggacccccagacctgcaaacgtcccctcctggaaggggaagccaggaacagcagaactgcccacaaaacaaggctgtgaacttttcgggaactggaactgtttaacttgaacccaggattgtttaaagctttatttatttatagcttcttcttaaaaaaaagtgttgaagaaattttttggttattcatacaaaaaaatgagttgatgatggaaaagcaagtcataatcatctaattgtttttgtctaggtcgagaatgaatgttagctgatgaaataaaccctgacaaggagaaa

SEQ ID NO: 10614 - DNA, 605 bp, Homo Sapiens
gtcgcagacctcgtcttctgtagccaaaatggggacaagatggccatgacagaggagcaaaagttatggctacaggattggctgatcttggttttgatgtggacataggccctcttttccagactcctcgtgaagtggcccagcaggctgtggatgcggatgtgcatgctgtgggcataagcaccctcgctgctggtcataaaaccctagttcctgaactcatcaaagaacttaactcccttggacggccagatattcttgtcatgtgtggaggggtgataccacctcaggattatgaatttctgtttgaagttggtgtttccaatgtatttggtcctgggactcgaattccaaaggctgccgttcaggtgcttgatgatattgagaagtgtttggaaaagaagcagcaatctgtataatatcctctttttgttttagcttttgtctaaaatattattttagttatgatcaaagaagagagtaaagctatgtcttcaatttaatttcaatacctgatttgtactttccttgaaagctttactttaaaataccttacttataggcctggtgtcatgctataagtatgtacatacagtttcaccttc

SEQ ID NO: 10615 - DNA, 365 bp, Homo Sapiens
aagggcataagagagtagccacttccaaacgtccctccaaaaaatctgaaacgagttactattctaatgcgctgggcatgaatccaattcagaaccaatctggtgggcccctcatggctcagaaatactctgggtagggctggctgttactgcagtcacggacgctgagttatgtacagagagtacgtcaggaaagtggcctgttcaggagcctcagataagtatttgtacttgagaccacctcacacaatctgtatgggcccaaccctgatctcaaacctccttccctctgcccaaagctgtccttcctatggcatgaggggtgggggtcccaggacgtgcctcatacatgacttgagcttgtc

SEQ ID NO: 10616 - DNA, 870 bp, Homo Sapiens
  misc_feature (685)..(693): n is a, c, g, or t
  misc_feature (717)..(731): n is a, c, g, or t
gggggggctgagtgctcagtggagagcggggagttgtgtccaccttgccgacgtcgctagccgtggggctgtcctgggaaggcggacggcgagcgcccggtgtccgcactcggccgcctgccgtgcccgtctgcgcccgtgtcatcctcactcgggacgcagggaccgtttttaaatcacaggggcgtgtgtcagcctgccctaggacttcatgtctatatatttccccattcactgccccgactatctgagatcggccaagatgactgaggtgatgatgaacacccagcccatggaggagatcggcctcagcccccgcaaggatggcctttcctaccagatcttcccagacccgtcagattttgaccgctgctgcaaaactgaaggaccgtctgcccctcatagtggtggaacccacagaaggggaggtggagagcggggagctccggtggcccccctgaggagtttcctgggcccaggaggatgagcaagattaactgcgaagagaccgccgaaagaaattaagagcagtagagtccccttgggactcccatgggtcataccagccagcatctgtttcctgaactggggtttttccctcctgacgggagaaagaaagggagccgcatttgttcctggaatgcccaaacgagggttccctgtttggcccccggccgaatccccnnnnnnnnnttttccttttctttttcttggccnnnnnnnnnnnnnnnggaaaattgccccagcaaagggggaccctccttacaaattttgccaggcccctcctggaaaaggaacgctcctttcaaccccgggcgggtttttgggctctccctggaaaccaccccccccgtttttgagccaccaacc

SEQ ID NO: 10617 - DNA, 734 bp, Homo Sapiens
gggagcttcttggataaggtggccaatgggttggcagtcatggccatccagagcctgcacccttgcccctcagagctctgctgcagggcctgcgtgagcttttaccactgggcgatggtggctgtgacgggcggcgtgggcgtggccgctgccctgtgtctctgtaccctcctgctgtggccgacccgcctgcgacgctgggaccgtgatgcccggccctgactcctgacagcctcctgcacctgtgcaagggaactgtggggacgcacgaggatgccccccagggccttggggaaaagcccccactgcccctcactcttctctggacccccaccctccatcctcacccagctcccgggggtggggtcgggtgagggcagcagggatgcccgccagggacttgcaaggaccccctgggttttgagggtgtcccattctcaactctaatccatcccagccctctggaggatttggggtgcccctctcggcagggaacaggaagtaggaatcccagaagggtctgggggaaccctaacactgagctcagtccagttcacccctcacctccagcctgggggtctccagacactgccagggccccctcaggacggctggagcctggaggagacagccacggggtggtgggctgggcctggaccccaccgtggtgggcagcagggctgcccggcaggcttggtggactctgctggcagcaaataaagagatgacggcag

SEQ ID NO: 10618 - DNA, 568 bp, Homo Sapiens
gttcgtggtgtaaagcacctgattccttgattgtgattttttcaaagttagacaatggcccaaagtcagaatgcaatcaatgtgtagttcacaagtagatgtcatttactaaagaatgatacacccatatgctatatacagcttaactcacagaactgtaaaagacaattataaaataattcaacatgtccatctttttagtgataataaaagaaagcatggtattaaactatcatagaagtagacagaaaaagaaaaaaggactcatggcattattaatataattagtgctttacatgtgttagttatacatattagaagcatatttgcctagtaaggctagtagaaccacatttcccaaagtgtgctccttaaacactcatgccttatgattttctaccaaaagtaaaaagggttgtattaagtcagaggaagatgcctctccattttccctctctttatcagaggttcacatgcctgtctgcacattaaaagctctgggaagacctgttgtaaagggacaagttgaggttgtaaaatctgcatttaaataaacatctttgatcac

SEQ ID NO: 10619 - DNA, 1056 bp, Homo Sapiens
gggagtgggcagggtcacagggcaaggtcccgcgggccgctgggtgcggcgacttccgtgctcccggcgagcgggcggagagcgggggccgcactggggagtgtgggctgggccgcagatgtcatgtggcctgtgttttggaccgtggttcgtacctatgctccttatgtcacattccctgttgccttcgtggtcggggctgtgggttaccacctggaatggttcatcaggggaaaggacccccagcccgtggaggaggaaaagagcatctcagagcgccgggaggatcgcaagctggatgagcttctaggcaaggaccacacgcaggtggtgagccttaaggacaagctagaatttgccccgaaagctgtgctgaacagaaaccgcccagagaagaattaatggaggacacagggccctatggtcctactgtgggtggtgacttgtcctgctaccatgttgacagagccccagaacccacatctaattggctttgttgcttattctggcccttcccacaccacacagccacacaaatactggctgctccttgatggccaggcagacccagcagcagccgaggggccagtgaagaggaaggccgcatctgttgtgtggtggccacaagcactcaggcatctgagtttactggtgcactgctgggaggagagttatgagatgaacattggctgtcaatctctgtgggcaggcggtttggcctctagtgggaatggctgggatttgggcgttgcctttaggagggatacctgcatgtctagttccagtctgcactggaaagaattcaaatatgcacctggctcccttcactattttgccctatcctttgtgctcattcttactgaaatctgtcttgtcagctcaggaatgggattcccccaggaaggaaagcacttttctgttctgggaagcccagactgttcacatttggggcagggacgaacatgtgcctcgtgaatttgcttgaaaacagtcaccatcttctacccccatcactgtatagtgaaaaacctgattaaagtggtatctgagaaccat

SEQ ID NO: 10620 - DNA, 750 bp, Homo Sapiens
gggggattacaggcgtgagcaatcgtgcccagccttgttcttaattttgtatcatccagtcatcgctaatattacacgcaccttctcacttaatcctcacgacaagcctgtgaggcagatgctcattgttcccatcttgatgaaacttgagtctcagggaagtgaagtgacttgcccagggtcactcaggtagagttgagattcaaacccacatgtggctccaaagtctgcatctggatttgggggtgcttttttgccatgccaccctcacctctctccctgcctgtttttccccaaagtggaaaggaaggcctttcaaaccagagtgtctcactcccctctgacctccagaccagatggggcatgagccagccagctcagccaggctccctgtgtcctgggaggaagtgtccccatcccccatgccccttatggggagggagggcgtctgatgcttctctctctggcctccccccccatcctgtcaggcacaggtgacgggggcagcccatgcgagcccttctcctgctgctctgggagggccagttccacattgagccagcctggtcccatggaaaatgatggcctgggctttctgaggccttatctgatgcctctgcagttcatgtcccccaccaggcctcgaggctcagggtgggagagggccccgggctgccctgtcactcctctaacacttccctcccctgtccccaacatgccctgtaataaaattagagaagactaaaaaaa

SEQ ID NO: 10621 - DNA, 876 bp, Homo Sapiens
ggggggaagggccccggaggcgggcacttggggggaaagttgagacgtgattaccgggttgggcgggccccatctgggaggggtttgtgggtgaactcggggtccaccgcccgctgaggagatggatgaggatgggcttcctctcatggggtcaggcatagacctgaccaaggtgccagctattcaacagaaaagaacggtggcttttctaaaccaatttgtggtgcacactgtacagttcatcaaccgcttttctaccagtttgtgaggaagaaactggcagacctttcacttcgtatccaacaaattgaaacaactctcaatattttagatgcaaagttgtcatctatcccaggcctagatgatgtcacagttgaagtatctcctttaaatgtcaccagtgtcacaaatggagcacatcctgaagccacttcagagcaaccacagcagaacagtacacaagactctggactacaggaaagtgaagtatcagcagaaaatatcttaactgtagccaaggatccaagatatgccagatatctcaaaatggttcaagtgggtgtaccagtgatggcaataagaaacaaaatgatatcagaaggactagacccagatcttcttgagaggccagatgctccagtgcctgatggcgaaagtgagaaaactgtagaagaaagttcagatagcgaatcttcttttagtgattaagcttaattttgataagaattacatatgcatgcataggggtacatttacattctgtaagagattgagcctgaactctcttagtcataaaaacatcaaatggccacatgtccactaccaagcttcttctatgctaaaaaaataataataaagcagttttaacctgccagt

SEQ ID NO: 10622 - DNA, 525 bp, Homo Sapiens
ggtggagaacaggtttggcagttctctaccagtggaccaatcttttcatccccgtgtacctcaccatcagagcaaaaaatattttttggttcccatgattgctttatctactgttgtaacatgaaaggtcacctgcagtggaaattggaaactactttcaagggtctaatgcaacaccgtttgcttttccaaaacgacaatggcaggcaatgaaatgttgctggcagcagcatctactgatgggaaagtgtggatcttggaatctcagagtggacaattgcaaagtgtttatgaacttcctggagaagtcttctcttctcctgtggtcctggaatcaatgctcattattgggtgtagagataattatgtttattgtctggatttattgggtggcaatcaaaaataatcaaatacagtccttatttgtataacaaatgtgagatatttgaaaatattttaccattatacatcatgtggacttattttatattaaagaaagaagattatattttggctaagaaacgg

SEQ ID NO: 10623 - DNA, 240 bp, Homo Sapiens
gtttacaaaaaataaaagattccaggaagctttgagctagggattgaaaccataaaggtgatgtgaaaagctcatcattattttgttgtgacttcaagagtacaagtgttcaggtagaaatatttcgtgaagcattgctccacaattctgcattctttctttacttattcttgcttaagttctgaccactttctgaacataatttgttgaatgatggtatcttaaaatgaattttgtttc

SEQ ID NO: 10624 - DNA, 394 bp, Homo Sapiens
gcaggaaaacaggaaattactaccatgaagtgtttcaggttcaggttcccatggcatcaacctcctgagccaggtcggttgagggaaagcataccgaggctctaggaaagcaggaaggaggtgcagaatgtggctagaaagccaggagtgagagaaatagatggatcaaaaaaattgtcacagaatcaagagcccataccaggacttcaggctctccctgcagaactacagcctgttaaccttgagaaacacacctctttctcctccccagcaccctcttggaaagataaagaaactatactccttgttcctagactctatggcaacccatgagccggaatctatactcaatacaaaaaaaggggcaaaaatccaagcaggttgtaaacttttc

SEQ ID NO: 10625 - DNA, 815 bp, Homo Sapiens
ggtaaccacttttatgtgaagcccagagttgcagttaacaattttggagtgaagcactatgctggagaggtgcaatatgatgtccgaggtatcttggagaagaacagagatacatttcgagatgaccttctcaatttgctaagagaaaaccgattggactttatctacgatcgttttgaacaatgtttcaagccgcaacaaccaggataccttgaaatgtggaagcaaacatcggcggcctacagtcagctcacagttcaaggactcactgcattccttaatggcaacgctaagctcctctaatcctttctttgttcgctgtatcaagccaaacatgcagaagatgccagaccagtttgaccaggcggttgtgctgaaccagctgcagtactcagggatgctggagactgtgagaatccgcaaagctgggtatgcggtccgaagaccctttcaggacttttacaaaagggtataaagtgctgatgaggaatctggctctgcctgaggacgtccgagggaagtgcacgagcctgctgcagctctatgatgcctccaacagcgagtggcagctgggggaagaccaaggttctttcttcaagaatccttggaaacagaaacctggagaagcggaggggaagaggaagtgagcccacgcggccatggtgattcgggcccatgtcttgggcttcttagcacgaaaacaatacagaaaggtcctttattgtgtggtgatcatacagaagaatttcagagcattccttctgaggaggagattaatgcacctgaaaaggcagccatagatttccagcagcacg

SEQ ID NO: 10626 - DNA, 238 bp, Homo Sapiens
agccggcccaacttctcagatacacagctccagtctacaacagctccagttacaacagctccagttacaacagctcccataagataaaggggggtgaggaggtacacagtcgaggcaagaaaaagatctatttaggattcagcttgtccacgtctcccacagcgcttaagcttcatacttgtacagtcacttcatccatcagcgcttgtatctgctgtggcttgactgttgtaactga

SEQ ID NO: 10627 - DNA, 291 bp, Homo Sapiens
aagcaaattcagagcagctcacgaagacagaaataatatctaacctttagaagaaatgttctatattcggctatcatacatgttccaggttggaaaactgaaagcccaagcaatttggtaaaatgaatatcaacacatcactatacaaggcaagttaacaagtttatctggtaacataacctagactttgaatttctttctctatttttaaaaattaaataacactattaaaatcctaaataccaaacaaattaaaaactctagccaatagtctcccctcgactcatcaat

SEQ ID NO: 10628 - DNA, 327 bp, Homo Sapiens
caagttattagaaaagaaaagagtgaaatactgatgcagactgtgacacggatgagcctcgaaaacatgatgccaaatggaagaagcctcacacaaaagaccacatactatacgatgtcacttacatgaaatgccaggatagccagatgtaccgagacacgatgtagatttgtggctgctgagggccggaagtgggtaatggggggcttgggggcttaggagtgaagctaagaacttgggaagttttctttttaggttaatgggaatgttctaaaactgtatgatggcggtacaactctataaataaaacgctgatttacactttgt

SEQ ID NO: 10629 - DNA, 401 bp, Homo Sapiens
tgacagtgtcttaataagccagccttaaaagtgacgtaacatcatttctgccttatttcattggtcacgacggacaacccgatgtggaaggagacatcacaaggacaggaatactgggaagcaggtattgttggtggctgtctcggacgctggttctcatagaagtagatgtattattttagtacaataagtgcagacgatcagctagcaggatgtggtttttgcttgtcctgcctctgatttccgatctaaattgccactctcctcccaatatccctttcactagcaatttcccttccaagttgtgcctttatagggccctctcctcctacacacaattttataaagtgcatttactcagccagataacaaacattttagcacctaccctgcacagctag

SEQ ID NO: 10630 - DNA, 500 bp, Homo Sapiens
cgccacccgacccgctggagacagtcgtccctctggttgttggtgcaggtgccgcactggccctcggtgttgttgtggaagaggctgtagggcagccgggcctggaagacttggcattgaaggtgacgctcacgcccagggcaggaatgtccacacgcatggtggtggtccccagcacagacacaagcacgccgttcctgctgaaaccgctgctcaccggaatttggtcaagcaggatcaggccctcctccttcccatgcaccatggtgacagtgaggacgatatccatggacttgtagtggatgctgagggcgcgggggcagcgggcggcagcggcagtggcagaggccgtgcagtggtggttgtccaggtagaggctgagattcccaaagcgtgcatggatctctctcatgaggacataggtgcagttgccccggaaggtgtaagaggtgccgtcaaaggtggaatagtgggagccgacccaaatgcatgcacccagg

SEQ ID NO: 10631 - DNA, 344 bp, Homo Sapiens
aatgaggtgagatctgggtacagaccccaaaacagtcaaaggaagaggagaggagcccctcttccttgaatcagcggcctggctggagcctctccccaagggcacagatgaggccacagtcaggtagagcagggacaaccatgacagaaggagaggacatgacctaaggaggaccagctcacctgagtcggggtagacctccttcaggggatatatcacctgctcccgaagggtcccgtcagtgaagaatggctttgtggcaggaatagcaccccatgggggccaaagtccgtcagcatctgcactgagccccgtgtactcgtccagaggccattctatggttg

SEQ ID NO: 10632 - DNA, 582 bp, Homo Sapiens
taggggatgtactcttcccttctgtatttttgaaagagttagtgacagattgtaagtacttcttaaatgctcttagaaaatttaatagtgaatcgattgagagaggaatacggaaattgctccaaagtggagattctaaacaaggctatgggagaaagcaaaaaactcttccattgcaacatttgatggtcatttgtactttcaggcatgtactaacataacatcataacagcctctttaatggaatggagggaattctctaacgggagacctagagtaagtcagtccttcattctatggagaaaaaggaaacctgtgaagataaagtgaatatactttgtccctggaaaacacattgctcagttctggagcggctttctctccagatctctgtgcgctggggaacttagatttgctttctactgtccaaatataaactttggtcattctccacctcccctatccctttccccacagctactcacttagtttaagtcccgttgtctctatcagttaacctcttgtggttatataggtttctgttcaaacataaagtcttttattaacaccattctatggttg

SEQ ID NO: 10633 - DNA, 458 bp, Homo Sapiens
ggcggacggacaacatagaatggccgagaactacatttgtaagtgggcaagatagcacatgccccttctctaaattcaatacatcgttgtataaagccaagaggtatgaaatgaactatttcatagccaagaaagggtgaaaaaagccacaattataggcaatccaggctctattttaagtactgcacacttgagtgtaaggggatatcagaaaggagaaaaattgctagaaatgcagtattttagccttaataacagaatcatgtctcatctcttgctgcagcgttgggaatagataacaattttatcaacaacacctgtatacatgactcacctattcacctcattcctagccacctttggttgggtgagtataaggaaaaatgaaacaaacttcttgtatgacaggaactcatgattttctatatacattttgcattctatgctgtcggtccgcg

SEQ ID NO: 10634 - DNA, 454 bp, Homo Sapiens
gcgacagccggggccaacgcatgtggtgggctttcctggcctcctccatggtgactttcttcgggggcctcttcatcatcttgctctggcggacgctcaagtacctgtggaccgtgtgctgccactgcgggggcaaaacgaaggccacccactttgggtccccggaaatgccaccaacagcgcggaactggaacgggagtccgcctgaggccccggttttacgcggagcgtcttccctggcgctcgagggggctaaatgtcgtcggctttaactattcctggggcaaacgcccaccggcactgaggctggcgacaccttcgatgtatggttgctaggctcactgcctggtctgtagtcgtgtccctagagatgtcttcccttccccacagccactggctggagtgggggacccgacactgatagaaaactgcagaataaaaaagaaagaactgg

SEQ ID NO: 10635 - DNA, 855 bp, Homo Sapiens
ggggactccgactcctggcttgttcagagaaggagagccccgactcctggatccctgggagtcccagcggccatggggacgcgaagcagccccgaggaggggaccccgccgccgctggtcccggaatgcgacgtggaggtccagccccagggccatcccgaggagtcccgggaacaggaggcatccgaagtcctggcggaaccttcgagccgcgggggagctgagcagcaggcagaggaagaagaagtgggagaaggcagcagcactgagagcagccgcgacgcgcccgaggctacgcctccgatagctatggcggccacacctcccgcatccacctcttcgcgggaaggggtgcgaggggcggcgcggcgcctgcaaggacagcagctggaggcattgactcgtgtggccctgatggagcagcgagtgaaggagctacagcgccagaggaaggagctgaggatcgagatggaggtggaggtggccttgctgcggggtgagctggctggggagcgagtggccgctcgccgggaggaggagcagctgcgggagctgctggagcagcaggcggcctcggagcagcgcgggcgccagcagcgggaacaggtctgtttggctcaccgggtcttcatcagcagtgtccttcctgggtccatgggatgttggtggtgctcctagccacctgcggcccccggggttgtccccaatccccaaaggaagacatttgggctcccggaaaaaaagggagggggccaaatgcccccccctgggttttccttcctcccctcccgtggggcagaattttctggggctcctcccttttggtcccccgggccgcgtggcgccattccaagc

SEQ ID NO: 10636 - DNA, 1013 bp, Homo Sapiens
gatgcgcacctcgggaaaagctcgcttctgagtggagggcctctccagaccctgtcccctgacgtcttgcccgggcaatactcgggtgggcaagctgcacacgccaggccgaactaacacaggcagccgtgaggcgtccaacggcgctctgttgtggcaagcagctgcagccactgcccaagatcacagctcaggacgcaagtgccaggagcagcggtgctgggtacactgggcacacgtaggactggagtccccagcacggacctggcccagccccggggcactttgccccaggctgtcaaggctgcccaggcacctggagtcatcacaggtgtgaccccagcccgtcctcctatcccggtcaccatcccctcggtgggagtggtgaaccccatcctggccagccctccaacgctgggtctcctggagcccaagaaggagaaggaagaagaggagctgtttcccgagtcagagcggccagagatgctgagcgagcaggagcacatgagcatctcgggcagtagcgcccgacacatggtgatgcagaagctgctccgcaagcaggagtctacagtgatggttctgcgcaacatggtggaccccaaggacatcgatgatgacctggaaggggaggtgacagaggagtgtggcaagttcggggccgtgaaccgcgtcatcatctaccaagagaaacaaggcgaggaggaggatgcagaaatcattgtcaagatctttgtggagttttccatagcctctgagactcataaggccatccaggccctcaatggccgctggtttgctggccgcaaggtggtggctgaagtgtacgaccaggagcgttttgataacagtgacctctctgcgtgacagtggtccctctccccggacttgcacttgttccttgtttcctctgggttttatagtgatacagtggtgtccccggggccaggcgcgctctgcccagcccagcctacagtgcggataaaggtgcggatgctgctggccctgaaaac

SEQ ID NO: 10637 - DNA, 302 bp, Homo Sapiens
gaaaatgttgtcatgactccttgtcctacatctgcatttcaaagtaatgccttgcctacactctctgccagtggagccagaaatgacagcccaacacagataccagtgtcctcagatgtctgcagattaacacctgcatgatcactgttcttgcttttttgggaagagacactttgttgcaaccctttttcaagtacttgaaagttgaaaatttgaaatcttggtattgatcatgctttaaggtttatgtaaagaaagtgtactgatgttcttacattaaagctttacaaagatttaaacta

SEQ ID NO: 10638 - DNA, 847 bp, Homo Sapiens
  misc_feature (190)..(214): n is a, c, g, or t
  misc_feature (590)..(711): n is a, c, g, or t
  misc_feature (721)..(737): n is a, c, g, or t
aggacaataaaacttgagccttgactttaggaagattataaactggttacagagataaagacaaacctgaaagactagtaatataaaacacttaagagtataagcacccaacaaaagacataaacagccaatagtatttggtaactcaggagaaaggaaaaaatcacagactcagtttagacagaaatcnnnnnnnnnnnnnnnnnnnnnnnnnatgaatggtatatttattacattattttgaaagagaattagtgtgttatgtggataatgttatatacagcccaagtggatgtttctatttggcaaggaaggtaggatttctgaaactcaggccttaacctataggttggaagacaagaccaattgaagagttaggaaatgtgagtttttgttacttctgttattccagtcttggtttcattgtctcagttctttatttgtaaaatcttgtgcctaaaagtttttttgcttaattatgaagtagacatgcatgtttacatttatgtaaaatatttgctgtgtaaagtattttttgtttattctcttaaaagatcactatatttaaataaaagtgaaggtcagcaacnnnnnnnnnnnnnnnnnnnnnnnnnnnnnnnnnnnnnnnnnnnnnnnnnnnnnnnnnnnnnnnnnnnnnnnnnnnnnnnnnnnnnnnnnnnnnnnnnnnnnnnnnnnnnnnnnnnnnnnnnnaaactgtttnnnnnnnnnnnnnnnnnaaaacttttgctagaattttctttggggcggggcgcccgggggaaaccgaaagttgggaacaattcttcacgaaaaacccagggcattactggatgtttgaacccccccc

SEQ ID NO: 10639 - DNA, 233 bp, Homo Sapiens
gagaggggagcaggacctctccctcctccagatccctgcctcctagtgccagcccctcacacgccttcatcctgaaacaggaagaggacggcaccaagttgggggtgctggatgaaagagacgaggggtgatctgtgagtcccatgtaaactttgtacattggaatatttatgtttgtgtacatatttgatgtgtgtgtgtatgatgagccaataaaccagactgtgtgcgtg

SEQ ID NO: 10640 - DNA, 350 bp, Homo Sapiens
tagatgatttcaggttataaaaccagaagtacaattcaacaaaaaaggagtaagtcatcaatataaatattagcaaacgagatattgctacatctctatttaaagtaaaatacaaccgattttaaagttcctgaaaccatagccatattttgacatttcacaaagaatggttctagtctactagagtacatttggctaagtagataacttacctaaatttgctccaaagctaaatcacaagtaaacatatttatgtttaaaacacagaaataaataacttaagatttttatctaagcggtcagtgttgtgttggaaagatatatctataaataaactttgaactgatttc

SEQ ID NO: 10641 - DNA, 918 bp, Homo Sapiens
  misc_feature (17)..(17): n is a, c, g, or t
  misc_feature (682)..(682): n is a, c, g, or t
  misc_feature (686)..(687): n is a, c, g, or t
  misc_feature (692)..(692): n is a, c, g, or t
  misc_feature (694)..(694): n is a, c, g, or t
ctggaccggtccggttncccgggatgaaagctggggccttggaaggtgtgccaatatctgggtgtttaggggaccagtctgctgcattggtgggacaaatgtgcttccagattggacaagccaaaaatacgtatggaacaggatgtttcttactatgtaatacaggccataagtgtgtattttctgatcatggccttctcaccacagtggcttacaaacttggcagagacaaaccagtatattatgctttggaaggttctgtagctatagctggtgctgttattcgctggctaagagacaatcttggaattataaagacctcagaagaaattgaaaaacttgctaaagaagtaggtacttcttatggctgctacttcgtccaagcattttcggggttatatgcaccttattgggagcccagcgcaagagggataatctgtggactcactcagttcaccaataaatgccatattgcttttgctgcattagaagctgtttgtttccaaactcgagagattttggatgccatgaatcgagactgtggaattccactcagtcatttgcaggtagatggaggaatgaccagcaacaaaattcttatgcagctacaagcagacattctgtatattccagtagtgaaaccctcaatgcccgaaacaactgcactaggcgctgcatggcnatgnnggctnangagggggttggtgtgtggagtcttgaacctgaggatttgtcagcatgtcacaatggagcggtttgaacctcagatcaatgctgaagaaagcgaaatccgttactccacatggaagaaagctgtgatgaagtcaattggttgggttacaactcagtctccagaaagtggtatcccataaataataccacctcacggatttccaagatgcaagctttttaatgtga

SEQ ID NO: 10642 - DNA, 578 bp, Homo Sapiens
tgttaccgactccattactgccccaggtgtgcttccagctgtgcccgctcctccatggcctgctgtaactgctggttagcatcaggcgcttcacaccggcttgaaaactgttgaagcaggagttccgtcatctctaacttcttttgcaattcttccaagttaagctgcatgccagccttctcagtcactaggacccgaagcttctcttccaattctgatttctcttgcttcaggtcctcattgctttgggtgttcttgtataactccagcctgagggcgtctctctctttggttaactccttgttgtacctgtctgccttcttctgctgcgtggagacagcagagagagcccgctccaactctcccacacgccgccgggaatactgcaggcggctggccagatcttcagactctccttctttctgcctggcagcatgctgagtgtgagccagggctgtctgtaactcagctttctctgatacgaggatccctatggtctgaatgtgaacctttgggaggaaacccaagcaagtgctgaaaaagaaggaaagaaacattctccagagaggggcggacag

SEQ ID NO: 10643 - DNA, 560 bp, Homo Sapiens
cataactttgggatgtcttgatcccctctcctttttctcttcaggaatcacgggtctgatgcggcaaaggatgaagttttaggatgctctgggtcacaacgctctgccccctggcgtttagagatagttgcccagtgggctttgccatacactggcaccagtgtgttgaagtctgaggcccagctattcacaggtctttctgccggatcctccaaaagtccaagagtagggtcagatttagggctacacagaatccgcttaacttcatcaatgccaactaagaggaggcgataatagaagagacctcggtcccgtacagccatatctttttcttcctctatgcagtaatacaacaaacgtcctagcatgtcctggcactcagcaggtcgggagaggaaaaggcgcagcaaagcagtgagcagctccatcttaacagctggaaatgtttccgacttcacattctcaacaaagtccgcgtaacacataaggagcattaggaattctttccccatggacaccaagtagccaaataagtgcttgcttcccctcactatcttgct

SEQ ID NO: 10644 - DNA, 177 bp, Homo Sapiens
ttccagcctgggcgacagagtgagactccatctcaaaaaacacaaacaaatacaaaaactaaggaagccttaataaagtacagccttaagttaataataatgtattggccgggcacagtggcagagcaagactccgtctcggaaaaaaatagaaatatcgtatcttagtaatgtgac

SEQ ID NO: 10645 - DNA, 609 bp, Homo Sapiens
  misc_feature (575)..(575): n is a, c, g, or t
cctttcagagtagcatttcagagtgctgggatacaggtgtgatccactgcacccagcaaaacccagacttcttaccaacctctgaggcctgtgtgatctggtcctggctgcccctccatcattctgtctctcccttactccactcaagccgcatgggttccttgctgcttctggatcctggcataacttcttcctgcccaagggcctttgtagttgctcttttctctgcctgaaatgttctgcccctagtatttcctttctgaggcctacatttggttcagcttgctggtcacctcctctgagagactttccttgaccttcagtttaaagtagccatgctatttctaatccctctccagtcttcttgtagttttgtcatagcaacagcctctacctggaattttctttttgtttgtgtacttgtttttgtctgtctcttctattagaatataagccccatgattatagggcgtttggtttgttcatcattgtatctccagtgtctgcagctgttctttgcaggtagtaaacattcagtgaatactttttgaataaattattaaacatatgaacanaacctaagacatgaaaagctgaggaccatcgttg

SEQ ID NO: 10646 - DNA, 364 bp, Homo Sapiens
tacacttggcactgtaacatgtctgtatatacacacaagtatgtgctaggatcatcgggaagctaaggctggaacaagaggaatcctgcacacttttattgggcgtgaaataaaagcttctcaaaacaacacctacacttaattaacccgcaacaccctgatttttcctatctgatccactttctttcttccatttaaagaaatttaaatgttgggcttgcccatctaactcatgtactcatgataggatgaagctgcatgagctgaaagtaacaaatgtctgggggtctggagacttggaccaatcttgctctgctttgcactgcactgatttttataaatttagacactgagacttgtcggc

SEQ ID NO: 10647 - DNA, 173 bp, Homo Sapiens
agtccactctataggatcccctagcgtatggaataaattataagtcgttggggaaggaacagattatttgatgaagggggttgtgaaattgggtattttaaaaaatctatttatatctttgctttggtgacacaccaaaatatctttcatacggattggatttaagtatatat

SEQ ID NO: 10648 - DNA, 299 bp, Homo Sapiens
tgcattaggggcaggtggggtggtggtgctctgtagcctttaggacttctagaatcaggcttctgggccaccttcttagcaggtgtatacctctttgttccagactgactttctgtctcacaatatcttcactatttccacagttgcagccaagacaggaaactgaaagctgaggccagaagggtggtgtactggggggaggggaaaattgagtgtcactttggaaaactggggcccccatctaaggattgctgcctctgtagattcaaaagcaataaaacagcagctcattaactctt

SEQ ID NO: 10649 - DNA, 407 bp, Homo Sapiens
acaaaacccacatggtagcactaagcctaggcgaggacccatcacctgtaggcttaatggggtcttggcctccacagcaccagcagagggcctagaggtgagacagaaatggccgaccaaacacacccttcaccctgtttacaacagcccaacttcccttgcacgtatcctcaaggagagcagcaaaaccatctcttcaagcaatgctttcctttagtttattgttcttcttaataaccaagtaatctggagccaagtcattcctcagccttcctcctccctgcatcaaactcaagcttcctcccacacccctctctccaactaagatgcacagcctgttcccatccctcctctgtccctctcttcgtcactggcctgtccccacccttccttctttctctttcttt

SEQ ID NO: 10650 - DNA, 604 bp, Homo Sapiens
caagaaggaaggagctggctatcacctgatttgctcatggtcggcgtcatgatgggagtcggctacgtgatggcgacttccatggtatgatggctgcaacagtgttgtcaataagtcatgtcaacagacttaaaagttgaatctcgaatgttctgctccaggcgaacaacccaagttggtgggaattcgtgaacagcgggttacaggactaatgatttgtattctaatgggcctctctgtgttcatgacttcagtcctaaagttgattccaatgcctgttctgtatggtgttttcctttatatgggagtttcctcattaaaaggaatccagttatttgaccgtataaaattatttggaatggctgctaagcatcagcctgatttgatatacctccgttatgtgccgctctggaaggtccatattttcacagtcattcagcttacttgtttggtccttttatgggtgataaaagtttcagctgctgcagtggtttttcccatgatggttcttgcattagtgtttgtgcgcaaactcatggacctgtgtttcacgaagagagaacttagttggcttgatgatcttatgccagaaagtaagagaaag

SEQ ID NO: 10651 - DNA, 866 bp, Homo Sapiens
  misc_feature (631)..(669): n is a, c, g, or t
  misc_feature (726)..(736): n is a, c, g, or t
  misc_feature (772)..(812): n is a, c, g, or t
ggggcgcgcgggacaagcgcccgtttccggcggctgctccttccgccgttgcgtgaaaaatggctactggggttggtaacggttgcgtctgacgcgggctggagtgacctgcggcgccgccgagggcccagtttgatcgacatacgtctagcaaacactgcaggcggtgtttgaagatggcccagaactcggtgtcgctgtccgccggcgatcaagccaacaggatggcccaccgatcctcccaaggagatctcaacccgtcggccatggcttgggcaatggtctccggagatagcttcctggttactaggctggatccgaatcagccgggacctcggccaccagcgcgacccagcgttcgggccgacagacgtcgagtccctgtcggtggccgcagccggagccgaagccgccaaggcagattctcgccttaccccatcccacgcgtcaagctcgacctcttaccaagtgcgctgccgcccccgtctggttgccatggaaactgctcttccaccccgaaaccccatccgcaaaacgaatgccctcccctcacttccctcacaatagtaaggcctcttctccccctttgccctctctccccgctctctcctacccattaaccttcctttgnnnnnnnnnnnnnnnnnnnnnnnnnnnnnnnnnnnnnnntattcccttattgtttccccggcttctacccccgttcaatccattccgttcactatnnnnnnnnnnnacttaatttcatcctttcatgtttctacatcttggnnnnnnnnnnnnnnnnnnnnnnnnnnnnnnnnnnnnnnnnngcgaactaaccaaacacccccccgctatgagattgtggttacacctgttcctct

SEQ ID NO: 10652 - DNA, 1313 bp, Homo Sapiens
  misc_feature (62)..(62): n is a, c, g, or t
  misc_feature (100)..(100): n is a, c, g, or t
  misc_feature (750)..(750): n is a, c, g, or t
  misc_feature (899)..(962): n is a, c, g, or t
  misc_feature (1087)..(1095): n is a, c, g, or t
atggatggagccaggaaagcatgaaagtgagaacccaccatggaagagatggtgtggttgtnttggaatatgcttggccccatgggaaagtggcactatnatgaaggtgtggtttgttaaagggaagtgtgtcactttgtgggtggactttgaggtcctatgctcactcaagctctgccctgtaaggagagaccctcctcctggttgcctgtggaagagaatccccttctgtctgtcttcagatcaagatgcagaactctcgggctggtgagatggctcagtgggtaagagcacccgactgctcttccgaaggtcaggagttcaaatcccagcaaccacatggtggctcacaaccatccgtaacgagatctgactccctcttctggagtgtctgaagacagctacagtgtacttacatataataaataaataaatctttatacaaaaattacacccaatagaacaccaataccttgcctggctgcccttggcccccggaaaagtttccccaaatattttcctttggccccgcggcccccgaaagcgaacggtgaacagggtcaatatcccgcctcccttagccacatttctggcacatggactaaggcgccctggaatccccccccaacaaaaacacacatccccgcgcgcctaccctataccatcccccccacccaaccatcccttatatgccactcccctccacgccgcatttaccgcggcctttctacatcccagaggacgccacancgcgggcgcttcggatattcaaatattcacatccacccgcaccgccccctcgtaaatcccttccaccccatccgtgccttaccccatctttgacacaccctctaccctccccgtgcacatgtccttcccacccaagcctagtttcgccnnnnnnnnnnnnnnnnnnnnnnnnnnnnnnnnnnnnnnnnnnnnnnnnnnnnnnnnnnnnnnnnttctcattttaataaaccggtgccatattacgccaactcccgccccaaatacatagcacaccaccccttattactagcacgccgcatatccccttccgccccccattatccccttatctcaccannnnnnnnnttctccgtgtctgtgttcccaaacttcttgttatgtttcgccgacaccgctataagaccacgcatggcgtccaccccgcttctcgtgcccactcttaatatggctccgcaccccgcagcgtatatccttctagaatacgctcctccacccgccctaccccttatatttaaatttaacgcccacactctctttctgttattccgtgcgccacaccacct

SEQ ID NO: 10653 - DNA, 810 bp, Homo Sapiens
  misc_feature (192)..(224): n is a, c, g, or t
  misc_feature (606)..(621): n is a, c, g, or t
ggggagaccgttgaccaggctgagggctgacacagagcacctcggaagtgagaaggcaggcttcccagtaccagagaggaatggacgtggcgtgcagaagcgggagggaataaaagccacctgggtagggaagtcctctgaccaacagcccatccttttgcagtgccctgttccagggtcatgtggccaccnnnnnnnnnnnnnnnnnnnnnnnnnnnnnnnnnccatggcgccccccacccggctgcggacctccaggaaaactttccaagcgtactcgaagaaatccaaactgaaggagacagaggcatgtggagagaagacaacccgttcgctggctcccgctgtcctcctggctcatgaggtggcttctatgtggtccagaagctgggggcgaggacctgtagcctcatgaaggcctgccaggcacaggatccggagctccacactcctcccaaaaatccctggtctcctccgggggcccttcagctgctgaagggggatggggtggacaccattatcctagcaggggacatatgtggaactcaccagacccacctgcagcaccatttcaaaataaaagtaaaattttccagcttaatccannnnnnnnnnnnnnnngcctttattccctggtcggccgccctcgggcccccaaaaaacctttctaaaccctcccgttttgggggccccggccccctttagggtaagggaacttgggcccctagccggtttccctagagaaaaccccgggctccgggaccacccggtcgggacttcttccccccaccaaaaaagccccccggcccg

SEQ ID NO: 10654 - DNA, 760 bp, Homo Sapiens
agtgaaaatggcaattgcaaggcgggggggcggggatacggtccgggcaacggtttttttcttatcccaatggaaaggaagttttaatggtttcaaaattggtcttgggcggttcccaaggaatttccccttcccgcccttgacattggttgcggtaggcctcctggtcctcgaaaatactttgcccgcataagtgcagccttctgttcatagggctttttttctgcttcgtcagttggggaccacattttccccagcagccttggccacctgcacccacggtccagtcggggttctcttgcttcagcatagcatagtggtcccgggagaagagcaggaaggaggatgggggcttccgcggtgcctttgggtccctctttcttctctttcttctcttgcctatgtaattcatcatttcttgctggtaccgggctttatcgagctctgctagggcttcatactttgccttttcgtgctttgagatggatctccatttttctgaacactttctagagaattctttaaagccaaggtaggtatttggctgttgctccttgaatttgtttctgaaattcagcataaaatggatgtaagaagacacattcaccttgggccttagctggtctttttcccccatgtttatacaaccataatgtccttcgctggaccctgctgatctggatagcagagatttctgtctctgcacccgaggagcaatctagaaggtgccctacttatggtgaaatttcctctgtgtccc

SEQ ID NO: 10655 - DNA, 836 bp, Homo Sapiens
  misc_feature (421)..(471): n is a, c, g, or t
  misc_feature (561)..(570): n is a, c, g, or t
  misc_feature (577)..(720): n is a, c, g, or t
ggggggatggggaggatgagtctcccccgcccaatctcccatgtctgtggtgaagtccatcgaggtagtgctgccccaagatgcggtctacctggccggctctatcatagacgggcaggtggtcctcaccctcaacagtaccctcgtggaccccgtcgtgaaggtggagcttgtcggtaggggttacgttcagtggaacgaacaaattggagagacccgtgattataccagacatgttactcccaataatacggcagattacgtacataaataccaaacattcccaataaaaagctcccgcccaccttcaacagtaagatcggccaccctctcctactctttgcatgacctgtgcttgcacccccatcataccctgccccccaacaagctgcacctgcctgctccaaggggacttcctgannnnnnnnnnnnnnnnnnnnnnnnnnnnnnnnnnnnnnnnnnnnnnnnnnntatccatcaccctgctctttcccctcttgctaccctcacccttccttcaacctttcctctcatctctttacccccaaccctacctttctnnnnnnnnnnttattgnnnnnnnnnnnnnnnnnnnnnnnnnnnnnnnnnnnnnnnnnnnnnnnnnnnnnnnnnnnnnnnnnnnnnnnnnnnnnnnnnnnnnnnnnnnnnnnnnnnnnnnnnnnnnnnnnnnnnnnnnnnnnnnnnnnnnnnnnnnnnnnnataatcctctttctccccccctccccaaccttctttcaacccatacccccggcataaccctcacccatttcttcccctccttcccctttttattttcccccacctctctctttcct

SEQ ID NO: 10656 - DNA, 715 bp, Homo Sapiens
gggagggccgttgggcagttacacggcggagggcggagggcggagggcggaggcgtcccggtgagccgatcaagatggagcggcgaggccgaatggcgaagacgcccaccggccaaacgcatcaatccccggtgtctaagagagaaaggaagcctagcatgttcgagaaggagtcatatgcacagatcttaagagaaagactgagagagtcttttcatgatgttcagtacgtggaacctccgtttgatgactcaattgctgatgtaggcaaagaatggaaaagtgccctggcaaaattaaagtttgctaattcatacagaatggagccactgaagaaatttcaagcacatttggtagaaactaaaatccagcagatattaaaggacagtcttaaagatgtcaaatatgatgacaaagcccctcatttgtcacttgaattggcagatcgaatattggcagcagtcaaagaatttgcataccatcgttataaattcattatacaagtattatttatttcaaaagactggtcaagcaataaatattgccagcagatggatccgggatgtggcatgggacaactgggtagaagctaaacatgaaacagagtcttaccggggattggccctgggtggtttggtcccctattgggaaaaagcccaagacccaccattttcacccccccatccttcaaaaataattggttttttacttccgc

SEQ ID NO: 10657 - DNA, 972 bp, Homo Sapiens
  misc_feature (41)..(41): n is a, c, g, or t
  misc_feature (306)..(329): n is a, c, g, or t
ttgaggtggaacgcgcgcaatataatggtgtggaaagaaanttatgggaaaggcaagaagttgtggtaaacgaggatagtatggccggagcatatatatgttaggtatccgggacgatgaagaaaacaaaggggggagtgtggagagaaatacaatacaacgaggggggtaaaagaagggaaaccagggcgggacggaggaaaacaccggcgaagtaacacgcggagtcaacacactgggttttgacagatctcgcgatataaaagacggaagggggtgtgatgggggtacgcgaaaaagttaaannnnnnnnnnnnnnnnnnnnnnnnaaaaggggaagacaaaagggttaatttggagggggtgcaggagggagaaagagtgggaaaagaaaaagtgggaaaaattatgggtgtggtgggcgccacgataaaatgaaaccaatggtgggagaggggagggtaattagtagggcgggggaaatgggaccggaggaagtggaggttatctggggggggtatacaaggagtgcggtcggaaaacaaatagggggcgtagggaataacagccggtgcgggttaaacggaaatggggatagagcacggggcagacacggcacaggcagacagggcggttcccatggcaggatagtagcgtccatgtaaatatcggggtttacagtcaggacagacccataacctgcgtggaactctgggtcgttttacaggacagtcacggctccttccacagcatctaccgcgctccctcccgccttgaggattttgtagccctcggttgccgctctggcgatgccctcgcgcaccagctctttccggttggctgagatgttgcttgctccgccaccatggactaccaccacgagactcacatcgatggaggctcggactggcggcgccacggtgccgcgggcgcacgccatgatgtcaaactggccaagccaccaggcagccc

SEQ ID NO: 10658 - DNA, 760 bp, Homo Sapiens
ttcaggtgcgaggctgggtggtgaatcggccgagggtgaagctgggggagctcgtcgccgccgccggcggctagcgggcgtccgcgccatggagcgctacgcggccgccttggaggaggtggcggacggtgcccggcagcaggagcgacactaccagttgctgtcggcgctacagagcctggtgaaggagttgcccagctctttccagcagcgcctgtcctacaccacgctcagcgacctggccctggcgcttctcgacggcaccgtgttcgaaatcgtgcaggggctactggagatccagcacctcaccgaaaagagcctgtacaaccagcgcctgcgcctacagaacgagcaccgagtgctcaggcaggcgctgcggcagaagcaccaggaagcccagcaggcctgccggccccacaacctgcctgtggttcaggcggctcagcagcgagaactgagaggccgtggaacaccggatccgtgaggagcagcgggcgatggaccagaagatcatcctggagctggaccggaaggtggctgaccagcagagcacactggagaaggcgggggtggctggcttctacgtgaccaccaacccacaggagctgatgctgcagatgaacctgctggaactcatccgaaagctgcagcagaggggctgccgggcagggaatgcagccctgggactgggggtcctggccgtcgcctgtggccgtgtggcgaaatgcgcctggccacatagccgggcgaaagctggcag

SEQ ID NO: 10659 - DNA, 590 bp, Homo Sapiens
ttttcaattagtgcttttattgagcaaaacttaatgctggtgatgtcttaaatcactgtccctggggctggctttcttgagcggcaagttctttgtggtggccaagttcttgctggtgtctacccttctgctacaccctttcgtagatcctagtgctgacaacattgttcatggtgcactccactaccatttttccatccacaatttttcttttaattgttgtctgtttgccaagccatttttggacctggatcattgacccaccttcaaaggttataaggctcttcacttttcggttgtctgcagtggtctcttcaaattcttcccccaacttgaaagagatctccgtgttcctgcatgcacttcctgcttggatgtccatcctttccccattgaaactaatactaacgcttggctttattaaacatgcgactttccggggctcacattccactcccagttctctcacgtaattctcaaagttttcgctggagatcagtttccaggtgcctaagaagggctcaatcatcgtgcacagctttctgggcagaccaggcattcacaaccgaaaaccatgaagtgtgggcccc

SEQ ID NO: 10660 - DNA, 585 bp, Homo Sapiens
aggtctctgctatcagactaggagagtcatgtctccctcgttagactgggaaggtggtggctcactcattagactaggagggtggtgtctctgccattcgactgggaagacagcgtctcctctatcagactgggagggccacattcccccaacaatgaaccgggaagatgatgtctcctccattaaactaggcaggtggtgtctcctccatcaacctgggagggtggtgccccccccaccagactggaagggtggcatctcccatatcaaactgggaaagtcacatctcccccatcagactggggaggcagcatctcctccatcagactaggagggccacatccccgccacaatgaactgggaaggtgtctcctccatcagcctgggagggtggcatctcctccatcagactgggagggcggcatctcctccatcagactgggagggccaaataccccaccccattgaactgggaaggtgccgtctcctctatcaaactggaaggctggtgtccctccacatccaatcggaaggtggcatctgccacatcagactgggagagaggtgttccctctattatactga

SEQ ID NO: 10661 - DNA, 730 bp, Homo Sapiens
aaggagaggaaggaaggaaacagacagtctttaatgggccagaggctgatttaggctgttcagacattgttaagctgctcagcatctgaagttcaaagaggctgagaacaaaccggttaggaaatggcagaagggggttgggacctaggtgagcagcccgtcaggagcccactgggtggcttgcactcctagccccaagtgcaatatacaggtgaggcgcctgcagaattttcattaggctgagttcatttctggaagcagggaattggcatccacttaaccatccctaatgcctgccttttcatgtatgtctgcacttacttctggccttccccggatgcagtatgtgattcctggaaggggtctcctgtacgtcgtagttctgtcatcttcaggcaacccaggatgacatgatttctggaaatttccctgatttctttctgcttcaccctccctcttttgctagaagggatcggcttaggcagccattgtggtgttcattcaacatgtccagtacagcctgttactgcagtttctccaagtcccacggtccgtgcagtctactcccttttttgaaccgagcggtacctggcgcgaagtctgagccttctcctgaagtgggttgatttgtcccagggtcatcaccgcttgagggtggcctaagccagatctcacgtcacagagctggctctcctccatttgcctccctcgctcttgcctcctgtaggcc

SEQ ID NO: 10662 - DNA, 566 bp, Homo Sapiens
caaggacaaagacagagacagaagcaaggacaaagacagagacggactgaatggggtggcccttgctctcctctatcttggaagacacacctcaggtcccaagagaccaccaggagccaagtatgccaagagtctgcctgcagcattggcaggaaggacgccagaggacaggggtcgcagagcatgagctttgggaggtgacggcatgatgaggcaacaaggagcctcctctggctgtggggctgcccagcctggcctgcctctgaaggccatgcccagcttgcccctacctccccatctcaccccttttagttttcagtttaggtctgcagaccgggttcaggccccagcatgccacctcttgtgccatcgctctccctgtggcctaagtccccagctctggaagtggatgatggtgagtacctcacctaccagggctgcattcacatgtcagggatgggacataggcaaggctcctcccgcctatggacccccaatcttagctcttcccaacaccccaagaaacagtctgagcaaatcagctcttctcctccttccttctttct

SEQ ID NO: 10663 - DNA, 283 bp, Homo Sapiens
aaagaaagagaaagaaggaaggtttccatctttggcaaatacttcccagtagactggaagtttgcagtgaacatgtgtttgctttccagctgaacccatttcttacatttgaggaacgcttcaccatacgggtcttggcaagaggcagggccacatgggccagatactggcattcctcagccttcctaccagctagagcgtggccagccaggtgcaatgactctggagtgtgcaatgcttaaagtatgaaaggagagtggaaaattcactttggtgatggcag

SEQ ID NO: 10664 - DNA, 490 bp, Homo Sapiens
aaagaaagagaaagaaggaaggtgagatactgaaagtcaggtccttcgggaatgtagggagcttattgctttgccaggggatggagagatgctgcctattgctggggttcctgactctcagctgaggggcacctgaggttctgggcagagctacttgcccttgaaagcatattttttggcagaatctcttgaagtccctatgtatgtctgtagaaggcttggtatagtatgacccacatgcctttgcaaagccattgtgtcaggccaggaggctgaggcccagggagagcacttggggccagaatctctcagtagaggctacagacccaggattggcattcataacccaggccccctgaatcattactgcctttctcttctgggatgttgaacagaggctggtgttcaggcctgagcctcactgctaggcacgtatgtcctcattttcctttctcatctctctccccatccctacaatactctgctcact

SEQ ID NO: 10665 - DNA, 308 bp, Homo Sapiens
gtactgataatgagtgctagctatactgctggacagagtcatggttggctgggtagataaggagtcttgctccaggcatcgcagattctcttcgtcatttaaaggtgtggagagagaaaacaacttccgccctggatggaacgtggtccttatacccatgacaggaaaaccaagtctgtacccaggattgttcctttttaccactccttgtagactggtacggcctgtgcagaacttagcattgggcaaagaagagctaattggaactatggaacagatcttcatgaatgtcgctatctttgaggatg

SEQ ID NO: 10666 - DNA, 456 bp, Homo Sapiens
ccatagacatgatatagactaattccccatttttcacaagaggaaaccatccttatgacttaccttaaagtttttttgttctgttttgaaggaaaccatgtgcttcatgaaacctacagttgacaagagaatgtacagctaagagaaaagcttaagaggccacactattcgcggaatggctttagaggcagatgaagtggtctttgaccacagttgattgaaccagagcacttattgcttaaagaataacagagttctagagctggggggttcttgggccatgctccgtgtgtggataaggaaagaaatactgtttctgggactctcccacagtcacaaagctgttttcactgtggcccctacatctctaaacttttcgctattactcctatgcagccttccggattactgctgtctatcttcttgctccactcactatcagactccggatatact

SEQ ID NO: 10667 - DNA, 304 bp, Homo Sapiens
atgagccactgtgcccagcccaggctctgggaatattgagataaataagatgcttctatccatttattcaagcacatattggtcaccgactgtgtgcctggcactcatgtcacaaagataagttcctgattcggtacacttactgagcacctgctgtgtgcagggagctgagctatgggatgggaatgggagtaaacaaggtacttttcacttttatctttttttcctcactgctagacggtgtgggaacttctcactcattggcttctttcccacacacctgaagagcactgactgtgtgccg

SEQ ID NO: 10668 - DNA, 586 bp, Homo Sapiens
gatgtagatcgagctgcatgtcttcatccttgtcactggccggtcatctcagtgcctcctggcttggaaaaacccttgcgggatggttgctttggactcactgttcaccaggtgatgaggacagaacttcttgagtactccattgttctcattctcatcaattttcctctggtcataaatccttacaaactgatctcgtccacccactgcaaactggtgggtattggcaggattcacatagatcgtatacagccccactttcttctctttctcttttgtcaccaccagtttcgacgctgggcggtcttgtctcaggtcaatggtgaaaacaactgcatcttcacctgcagataagaacgtacagggagagtctggttccagtgccaacttgtgggacgctcccttgtgctgagccacacgttttgtattcttgcaacactgtgtggcagacagttctgctactcgaacctgcccgtcacgggcacacatggccagagtagaatcaccactgttaggaagaaacggggccgtggaacacattactttgtaggccactctcaaagtccagtagctggcgcgcgccagt

SEQ ID NO: 10669 - DNA, 942 bp, Homo Sapiens
acccctcaagaaggtccccaccccaccctccgcccaagccatagaatcacagttcagtggaatattctccctggtactagatcaatccctccaccttccttcctacccctttttccttgacaatcccaacactgtccccctgcagcctccctggccctcccaaagcagcatccaccgccaggaagaggcagctgcacagttgtagttccacctccagagacctatttcttttcctcagccctcctagtctttcggccgcctagtctctatggtggccctttaatttcgtatagggaaagaaagagaaaagggagaggtgggagagatttcctagtgcaatacaaccaaaaaatatttttaaagtcttgaaaaataaacataaagcagccttcttcccccaggcaactaaacagaaagaggtttggttttgtttactgcgacatacacatgaaatcgagtatacagtccatgcagtagcacagccattggagaggacatcctgatgctggctccagtgcaaaacagtcccagcaacgccgcctgcttgccatcgctgccgccgccactgacaccttcaccatggccacctagcctgacttgaagaggaggattgcaacttgacccaagtaaaaatagatgaagtgctttgtctcgtgtgtgacgtagctgccaaaatttcggcccacgatacaatgccaggtagggttatatttcttgtcaaattccttcttgatataggcagcaatgtccttctctatattgtacttctccatggcctgcgtggcgcagtcaacggcatcctgttgcatgtcctcagacatgtctgcgttcttgatcactgccttccggtcagacatggtgtgacacttcacggaggcgagtacgcactgggccctggggaggagcgatggcccgaggcagagcacaggcaggggcggtgtt

SEQ ID NO: 10670 - DNA, 788 bp, Homo Sapiens
gggggcatggaggagcgcggcgattccgagccgacccccggctgcagcggcctgggtccgggcggtgttcgcggctttggcgacggcggtggagctccttcgtgggcccctgaggacgcctggatgggcactcaccctaagtatctagaaatgatggaattagatataggagatgccacccaagtttatgtagcgttcttggtttacctggacctcatggaaagcaaaagctggcatgaagtaaactgtgtaggattaccagaactccagctcatctgccttgttggtactgagatagaaggggaggggttacagactgtggtgcctacccccatcactgcttccctcagccataacaggataagggagatcttgaaggcatctcgaaagttgcaaggtgatccagatttgccgatgtcttttactttggccatagtggagtctgattctacaatagtctattataaacttactgatggatttatgctgccagaccctcagaatatttctcttagaagatgacatccatgtttcctgatgcttgttttattcatacaagattggatttgagacccatcagactgcttcatcttttatctcagaaatagggttgacgtacatagtgagggttgacttccccattccataaggttttcattctgaagagtaaaacttccccaggtagaagactttctccttcttacaaaaatatagggtgatttctttaaaactttgttatctagagacagtttaattacagttatatacaggttatgctaggatgtatc

SEQ ID NO: 10671 - DNA, 787 bp, Homo Sapiens
  misc_feature (677)..(677): n is a, c, g, or t
gggacaccagaccatcatcaccaccaagagcaggtgggcaggctttcgtccctcctcctccaatccaggtcagctgcagcctcaatccagaacctcctgatctcctggcaccatggttcgctaccgaatgaggagccccagtgagggtccgcaccaggggcctggacaagaccatgaacgcgaggagcaggggcaggggcaagggctgagcccagagcgcgtagaggactatgggaggacacacaggggccaccaccaccacagacacaggcgctgctctcgtaagaggctacataggatccacaagaggcgtcggtcatgcagaaggcggaggagacactcctgccgccacaggaggcggcatcgcagaggctgcagaagatcccgaaagaggaggagatgcaggtgcaggaaatgtaggaggcaccatcactaagcctcccccaggcctgtccattctgcctggagcccaaggaagtcacttgccccaaggaatagtcacctgcccaagcaacatcatgtgaagccacaccaccattccatgtcaaggcctgagccctgaactggcaaaggagccacaagatccgagtactgaacccaaccaccctgcccaataaagcttggacccgggaaaaaaccccccttccccttgggacccttacgggagccaaaaaccnttccctgttggggccgccttgggccccctaaaaaactttttataaaaaaattctcttttgggcgcgcggggccccctttgggaaagggaaaatggggccaataacgggtt

SEQ ID NO: 10672 - DNA, 1071 bp, Homo Sapiens
gggacctgtgctgcggagtcagcagtaaggctcaacatgtccaccgtcaaggagcagctgattcagaacctagttccggaagataaactttcccggtgtaagattactgtggtcggagttggaaatgtgggcatggcgtgtgctattagtattttactgaagggtttggctgatgaacttgcccttgttgacgctgatacgaacaaactgaggggagaggcactggatcttctgcacggcagtcttttccttagcactccaaaaatcgtctttggaaaagattacaatgtatctgccaactccaaactggttattatcacagctggtgcaagaatggtgtctggagaaactcgccttgacctgctccaacgtaatgtcgctatcatgaaagccattgttccgggcattgtccaaaacagtccggactgtaaaataattatcgtcactaacccagtggatattttgacatacgtggtttggaagataagcggcttccctgtaggccgtgtgatcggaagtggctgcaacctaaactcagcacgttttcgttacctgatcgcggagaaactgggggtcaaccctacaaactcgccacggctgggttcttgggagaaaatgggggactccaatgtgcccatatggagtggtgtaaacgttgctggcgtaactctgaagtcactgaacccagcaataggaactgactcagataaggaacactggaaaaatgttcacaagcaggtggtggaaggcggctatgaggtccttaacatgaagggctatacctcttgggctatcgggctgtctgtgactgatctggcgcgatccatcttgaagaatcttaagagagtgcatcctgttaccacgctggttaagggcttccatgggataaagggaaaagggcttcctcagaatcccttgtgtccttgggacaaagtggtatcccacactttgtgaaaccccacatgaacccctctaagaccgaagggtctcctcccagaaaaaagggtggacacactctggcaattccccttaaacggaccctggggtttccccaaattcgcccaccttttc

SEQ ID NO: 10673 - DNA, 789 bp, Homo Sapiens
  misc_feature (579)..(588): n is a, c, g, or t
gggatgacaagacagtcaaagtgtggtcaactcatcgccagagattcctgttttccctgacccagcacatcaactgggtccgctgtgccaagttctcccctgacgggcggctcatcgtgtctgccagtgatgacaagactgtcaagctgtgggacaagaccagccgggaatgtatccactcatactgtgagcacggcggttttgtcacctacgtggacttccaccccagtggtacctgcattgctgctgccggcatggacaacacagtgaaggtgtgggacgcgcggactcaccggctgctgcagcattatcagttgcacagtgcagcagtgaacgggctctctttccacccgtcgggaaactacctgatcacagcctccagtgactcaaccctgaagatcctggacctgatggagggccggctgctctacacactccacgggcaccagggaccagccaccaccgttgccttttcaagaacgggggagtatttcgcttctggaggctccgatgaacaagtgatggtctggaagagtaactttgacattgttgatcatggagacatgaaagcacggaggnnnnnnnnnntaacccgctcttctgggaactctggcagaaaacaggatcctggagtcagtttcaagccgagccccagggagtccatccaccatgccctcaaaacactgtaccagcacccctggaaacacattcctggggcccaacttggaacatcctccccgcaaacagggggtcctttctggggacacacccactggacccttaacacaa

SEQ ID NO: 10674 - DNA, 798 bp, Homo Sapiens
  misc_feature (581)..(592): n is a, c, g, or t
  misc_feature (596)..(596): n is a, c, g, or t
  misc_feature (601)..(604): n is a, c, g, or t
  misc_feature (607)..(610): n is a, c, g, or t
  misc_feature (612)..(612): n is a, c, g, or t
  misc_feature (614)..(615): n is a, c, g, or t
  misc_feature (630)..(630): n is a, c, g, or t
ggggaggggcggggccgctgcgcacttaagggcggttgggcaaggcgagctcagacctcgtcagtgctgttgccgagtgaagtgcttgccgccgagctgcccttcagacttctgccgccatggcctgcagacctagaagcccacccggttatgggagtcgccgcgacggtggtgcgagcccgcggtcccctgcgagatggagtctcggacggaagcgcagagcggacggaagggaccggaagcccgaggactccgaggaaggcgagctccagactgcggaccaccgacctgaaagctttacaactcctgaaggccataaaccccgttccagatgctctgactgggcaagtgcagttgaagaagatgaaatgaggaccagagttaacaaagaaatggcaagatacaaaagaaaactcctcataaacgactttggaagagagagaaaatcatcatcggggaacccctgattcaaaaggagcctatgtccttcagtgcctgctgatgtgcagacggatgaaagtgtcttgatgacaagggagaagcatatacctcggaaacttatagccccctacgtctgtccnnnnnnnnnnnnccanaccannnnctnnnntncnncccttccaaccactnctatcccccccttcccccgcgttttctatccccgttttccttggtccccccgtgagcttttccacacaccccttttttttctccgccctcctatcattttcgccccgcacttccccttaccccccgctgccccccattgttctcacccctttttcgcctggctcccct

SEQ ID NO: 10675 - DNA, 650 bp, Homo Sapiens
gggggaggctagacgggccgctgcgagaagtcgctctggctcgccttccgctctctatggtcgggagcgcgagcccctcctcttcccggaacgagccctcttgctcgacgcgcgcgcagcgctaggagggagttccgtttccggtctggtggctttcgatttttggcgttcagtagtcgcggttggtgggtaacaaccgagccaagatgttgcggaatctgctggcccttcgtcagattgcccagaggaccatcagcaccacttcacgaaggcattttgaaaacaaggttccagagaaacaaaagctgtttcaggaggataatgggatgccagttcatctgaaaggcggggcatctgatgccctcctctacagagccacaatggctctgacgcttggtggcacagcctatgccatctatctgttaagctaatggctgcatttcccaagaagcagaactaatgtcgtcatcccaagtcttcacgtggttcaagtttcatcaacgctccgatggaccaggaatctgatgagtaactgagctcttctttggggaatcaatatttattgatgtgtattaactgctgccaataaagcaatccttaaccattttgtgtctcccttttcacttgagaataaattcctggtaatacca

SEQ ID NO: 10676 - DNA, 900 bp, Homo Sapiens
gggaggtgagggacggcttacagaacactgagacggtcttaaaataggatattctgaataaccttgagtcgtgtgaccttgaggatgatgaccttatgttggatgtggatttgccggaggacgcacctcttgaaaatgtggagtgtgacaatatgaaccgctttgaccgaacagacagaaatgtacgacagtcgcaggacggattttggaaaaggccaccccagaggtggagtggacaggaccattaccacctcagccaccctgaccactatcatcaccatggaaaaagtgacttgagcagaggctctccctatagagaatctcctttgggtcattttgaaagctatggagggaccccctttttcccggttcaaaagatgtttgtatatgtgcccgacaacacagtggattcctggatgagatgacccctccggcacatggttccaggaattgcaccagctgtgcaacacgccttttaccttgaaactccagcgtcccgtttaccacacccattgacggaaagtgggatcattggcattgacgtttcccgctccttctttgcccatcccagcccccgaagtcctcaagcaacgcccgcttcgcatttttttaccaaatggaaacaatttccctaccaatgaaaatactccccccacttttcaccgccgcggaaaccctccccctccataatactggtaccccaccccccacctccctcttattagcacccccgctttggttaaccccccaacgattaaacctgtgtgagtccgcccatccccttaaccgaaggtgaaagcgcgggccgccatcttggctcgcgctacaaatctactcccccccgtatcgtctttttgtaataaccccggaattttccttcttcttccttccgccccctcc

SEQ ID NO: 10677 - DNA, 858 bp, Homo Sapiens
ggggaggacgggcagggcacgcactggccccggcgcccacccgcacccctccccagagcactgacacggctcccgggacctcggcaggatggaagagaagctgaagaaaaccaagatcatctttgtggtgggtgggcctggctcagggaagggcacccagtgtgagaagatcgtgcagaagtatggctacacccacctctccaccggggacctcctgcggtccgaggtcagctcaggctcggccaggggcaagaagctgtcggaaatcatggagaaggggcagctggttccactggagacagtgttggacatgctccgggatgccatggtggccaaagtcaatacttccaaaggcttcctgattgatggctacccgcgggaggtgcagcaaggagaagagtttgagcgacggattggacagcccacactgctgctgtatgtggacgcaggccctgagaccatgacccagcggctcttgaaacgtggagagaccagcgggcgtgtggacgacaatgaggagaccatcaaaaagcggctggagacctattacaaggccacagaacccgtcatcgccttctatgagaaacgtggcattgtgcgcaaggtcaacgctgagggctccgtggacagtgtcttctcccaggtctgcacccacctggacgccctaaagtagcaacgctggagccgcttccccagctcagagccccgccccaccccgtcctgattagaggtcctcctggcctgagcgcagcgcctccaccctgccctgctgagcacagacggaggaagccgcttatcctgttttcatggacagctgagcactaaaggaatttctaaggacatttggttttactgctt

SEQ ID NO: 10678 - DNA, 1093 bp, Homo Sapiens
ctgacgaggaccccaggccactctgagaagaccttggagtagggacaaggctgcagggcctctttcgggtttccttggacagtgccatggctccagtgctctggtgtcacccaggacacagccactcggggccccgctgccccagctgatccccactcattccacacctcttctcatcctcagtgatgtgaaggtgggaaggaaaggagcttggcattgggagcccttcaagaaggtaccagaaggaaccctccagtcctgctctctggccacacctgtgcaggcagctgagaggcagcgtgcagccctactgtcccttactggggcagcagagggcttcggaggcagaagtgaggcctggggtttggggggaaaggtcagctcagtgctgttccaccttttagggaggatactgaggggaccaggatgggagaatgaggagtaaaatgctcacggcaaagtcagcagcactggtaagccaagactgagaaatacaaggttgcttgtctgaccccaatctgcttgaaacctgactctgcttctctcatttgtcttcctaccctactcacataattcactcattgactcactcattcaccagatatttattgacctgctattataagctttacatcctcccatgttgtcctggcatgtgcagtatacacggtctaactcatctctccccagatctctcagaaccttgagcttgggaattgaactggggtcacctgtgtcctttcttatggactcgcaggattttagaaccctaatgcaccctggagggtagctgggccagacttctcatttcacaggtgaggagactggtgccccacagggattaagtgccttgcccaaggtcaggcttatctccagagggaggtgccctggactggggcccagatgttcagggacctgcctacagctcatttcccagttgtgggctgccttagttagttatgagaccagggaccggctgggaacgagacgagctccaggtcaccacttggagagggttcacttggtcggaagaccctggtcagattcggcctttccatggcttcagttccgcatacggctagggaaagacacg

SEQ ID NO: 10679 - DNA, 1281 bp, Homo Sapiens
gggggagtgggaaagaggggggctaatcatagtgaagaaatataagctcgtgtcatgagttagcgtgcggttatccgcaagctcaatgggggtgggagagattggggggggagcggcaagcgatgtgtaggggatgttgccgcggtcacagccaatagcgtagtggcgctcgggccttagcgggggctttattttcgaaaaatcgctgatgcggccgtcccgatgtgaagtgcgttatagacgtagatattggctctactggatagtgaaggacgggtaagggttgcggggaacgccaattctctcgtagactaagtccggtaacgtttctgaggccttagaatgggaaggtttggaagcccaaaagtctgcccccctttacctggggggcgccaacatttcgcggaacctggggaaacccccaggttgggggcccccccttgttccgcgtgtggccttcgtaccacccaccaacggttgggattccagcaggcttccagtcccctccaccaggcatttaggaggtaagctgaagtgtgattcaaggcaatttaggggggggccactgtaggcccttttccccctcttcttcaagggggggaaagggtgcatgccctctgcctttttccctgcacttctctggcgtagcaaactctctgtgaggtttggcagctcttgtaccagcttagcctggcacaggggctggggtagggaaaaggcccctactggagcaggaagaggcaaggactactccagacagagggattcaaaggggaagaaaaaggtcatggggaaacacttcacaggacagcagtatctcagccagagatggcagagatctcaacactcacacagctgcttgagggcacctagatgtgaaggatacaccagagaatagcaggcaactctgatgcagatcagtggtacctgccctggggcaggagaaggagaaatggtgtgccattcatttgccatctctggtctcagtcacacatgattcagtacttaacattctttgtgaaccaacttatctgagagatttaaggtaagggctaaaagagtgggctaggtatggaagatgaagggacctgcaggacaatgaactagcttcaaagaaaaacagcaagaagcaaagccctaaccatcctatccatcttggtctgagtcattctgttgtcccagaaaactgcttggcacaaacactggctaataccctggcaagtttgcaacagcagaacattcagcatatagaatggctctacacagtacatagtagttatg

SEQ ID NO: 10680 - DNA, 552 bp, Homo Sapiens
ggttccccggggttcagtgcttccccggggagcatgttgagggggtctgggtggcccctgctcggagagatgggctgggagacctgcacaagggaaaaaaaccacgaggaggagatgaaaggctgtttctcctccaagccctgtcctgagggcttcgggagcccctcctgggacccagaagaggccgaggctgctggtcagggccaggtcgtgccgggaggaggaggagagagtcggctgtgtggtggctccaccgccccggcctggcctggttagctggaaggtggaggggcctgttggacccctagcccaggtgcagtgccctctggcggaagaggagctgatagaaaaagatcgtataaaccgtcccggagatccaaatagagtttctctctcaaataaatcggctctggaggctagccttgcctctctctatcctcaggcccccaagaaaataatttaaactctaagaaagtgctcctggctgctttttgggaggagggggttagggaggggatcatgttcgtgctttttggagctcacgtgctaggg

SEQ ID NO: 10681 - DNA, 519 bp, Homo Sapiens
tccaggtgcacaacaagtcacagttggacattcagccccaggtgaacatcaggccatgggtggataaacagtccacaggtggacatcaggtcaaaggtgaacatcagtactcaggtggacatcaggctccaggttgacatcaagcccaaggtggacactgaactagaggtttacatcaggccccaggttgacacccaggctcaggtggacaataggccccaggtggatacctaggcccctagtaaacctcagattctaggttgacattcaggcccccagtagtcatttggccccaagtggacactcaggagccaggttcacatgatgtcttaaatggacaccaagggcccagtttgatacccaatcctatgtgggtgccaggtccaaggttacactcaagccccaagtggacaccaggccactaggtgaataatacaaactccaggtggtcattaggccccagaatgacaccagtccccaggttaacaggaagcccccagtgggtacctaggcgctata

SEQ ID NO: 10682 - DNA, 347 bp, Homo Sapiens
tgagaagcagtcggcagctgagctagacctcgtcctgcagcgacatcagaacctccaggaaaagctggcggaagagatgctaggacttgcccggagcctcaagaccaataccctggccgcccagagtgtcatcaagaaggacaaccagaccctgtcacactcactgaaaatggcggaccagaacctggagaaactgaagacggagtcagagcgtctggagcagcacacgcagaagtcagtcaactggctgctctgggccatgctcattatcgtctgcttcatcttcattagcatgatcctcttcattcgaatcatgcctaaactcaaataaagacccccgcccacct

SEQ ID NO: 10683 - DNA, 552 bp, Homo Sapiens
gggaggtcctcactggccatggtctgtgaggtcctggtcctctttgacttcataattcctaggggccactagtatctataagaggaagagggtgctggctcccaggccacagcccacaaaattccacctgctcacaggttggctggctcgacccaggtggtgtcccctgctctgagccagctcccggccaagccagcaccatggccacataccgatgctgccgcagcaaaagcaggagcagatgccgccgtcgcaggcgaagatgtcgcagacggaggaggcgatgctgccggcggaggaggcgaagatgctgccgtcgccgccgctcatacaccataaggtgtaaaaaatactagatgcacagaatagcaagtccatcaaaactcctgcgtgagaattttaccagacttcaagagcatctcgccacatcttgaaaaatgccaccgtccgatgaaaaacaggagcctgctaaggaacaatgccacctgtcaataaatgttgaaaactcatcgcaaaataacccacccataaataaaaaataatcttgtcgag

SEQ ID NO: 10684 - DNA, 238 bp, Homo Sapiens
acttgcatcccacaggccgggcagatgattttccagggggcatccaaggtaccttggttttcacccggacactccgccgcacattcacagtgtcccctttcattcctcgcttgtgagatttctggctgctggtcgctgatggtttcgggagtttttttatgtggacgtggacaggggtgttctcatccacgtgaacatgtaaggggggagttgaaggagcggtccttcatgtgctgtc

SEQ ID NO: 10685 - DNA, 415 bp, Homo Sapiens
cggtgggtctgcagaaggctttaggtctcccccaacccccttacctttcacagaggaacctttcatcaggataaatgattattgctgccctgtgggtcttgctcaatactgttcatacctggagagagaagggattgaaacatctcctttatgtgtgactttcccaaatttttaaaaattggtaatggtttaggccccttaaatactgtgtagcaggatgaagtctaccattaccagctgggtcaccttggatgggtctgtcaacatctaagcctcagttccctcacctgtaaaaatgagggtagtccctacctcataagggatattgtgaggatggaaagcgaaagtgtgagaaaatacctcccaagtgcctggtacatagtgggtgctaaataaaccaaattttgtctgcaaa

SEQ ID NO: 10686 - DNA, 1436 bp, Homo Sapiens
  misc_feature (115)..(115): n is a, c, g, or t
  misc_feature (167)..(167): n is a, c, g, or t
  misc_feature (219)..(219): n is a, c, g, or t
  misc_feature (277)..(277): n is a, c, g, or t
  misc_feature (293)..(293): n is a, c, g, or t
  misc_feature (303)..(303): n is a, c, g, or t
  misc_feature (314)..(314): n is a, c, g, or t
  misc_feature (555)..(555): n is a, c, g, or t
  misc_feature (673)..(683): n is a, c, g, or t
accgcatgcgggtgcgcgcggccataactatcgcggtgcgcgtcgacgtgacaagagtcgtcttgtctatatatttgcggagggctcgcacacgcagagggtgtgtggttcttantatatcgccgatagcgcggggcgcgagagatatagaacttgctctcgtgagnctcgtatcgcgcggagagcggagcgcggtgcggatcacgtgatagtcgcgtngtcttcgttagtgacgcacatgtcacgcgcgctgtgtcgccacaggagttgtagtcgntgcgtcttctttccgncgtagcgganggtcgtccacncgctctcgagagattggagagtgtggaccctcgtcgaccgcatctgtgtctcgtggggccgacagagaagagggcgcctctttgaattgtgcacgcattgttctgccagcaccggcgggtcggccgtcgtctcccgattgcagacacctccgcgcctagaggggctgcctggcgtcgtgcgcggcgttcaaattcttcactcagtcagtcgcgggagtgcgttccggcgctttgggagaanaatcgcggagcgtttgcgaagacgccgttcgccggggttaaattgcacccctttcaacgaagcgttccgcattccgggggactccgggttgcagtacaagggcttgtgggtatgaccnnnnnnnnnnncggtttgttttggtgggggggacgagatcgccccggccccttggtccaaggccgcacgggatctcccttcggggacccaagattagggaaccagtgttcgggtctaccttcggtggggcccggcgcggcgcaaacagaaatggtcctaggaaaggtttctccgagggccggaggcgggccggccatgttcctcctcgcccgcgccctcgcttccctggggttcaaagtttatttcaagtcacagaaaatatacaaactaagacaataaaatgaagtgattttgttctgagagaaggtgatgggagtcctccacctggcactgatttgagtcattcaagggttaggatgcaggtcatcttttttcaatatttcaacaaaattatagaatttccagatttcttgccaggtatttttgaaaacctatcaaggtgctccagtggatttctgtatttgttcctttaaaatcaggatactctgcctttgctcaggaggcaacatggcaatctggtctgcagtcagttgtagaacctgcataatcaaagcagccttctcatgatcctgtggagtgacttggttctgcccgggactaaagccgccagggggcttgccaccctgtatacttgctccttgcattcctgttccctgcatgactgggacctgtctggatccctgggggacaaccgcccccatgttaattggactgggaccctgcattccactaggtataagaactttggggccaggtactgaacc

SEQ ID NO: 10687 - DNA, 378 bp, Homo Sapiens
ataaaggttttgcatttcatatttattatcagtgcttcaatatagaatgttttgtaatgattagcaacattgtaaacaccaccaggtttttccaacactaactgctagtcttttccagtaaatattttttccccagacaaaataaccaaacctaacacaatttcaagagatggtgataccatcagcataataacccaaattacaaaaatggcaatacttaaaatcatgcatattatttcaccatttcataaaacttattttaaaatttctacaaactttcccagtgtaaaagactcctcaaaagctgcatgataacattaaactacaaaattcactttggaaaagtagggagttatttttctaattttggctttaaga

SEQ ID NO: 10688 - DNA, 524 bp, Homo Sapiens
tatgcgcctaggtcgtgactgggacaaactgcgtcgggggccacgtggaggccctcgagtctggggttttccgcagcgatatcccttgccggtttaggatgaatcctgccgcctttgacttcctgctgcgagcgggttgagaagaccttgcgccacgcccttgaggaagaggagaaagtgcctgtggagcaagtcaccaactttgaagaggtgtgtgatgagattaagagcaagcttgcctccctgaaggacgttcccagccgcatcgagtgtccactcatctaccacctggacgtgggggccatgtaccccaacatcatcctgaccaaccgcctgcaggtgagactttacttcccgtgtcagagtcggagctctctctgcccagccctaagtgctttctcacccctcccagccctctgccatggtggacgaagccacctgtgctgcctgtgacttcaataagcctggagcaaactgccagcggaagatggcctggcagtggaggggcgagttcatgccagcca

SEQ ID NO: 10689 - DNA, 575 bp, Homo Sapiens
aatcgcagaactgctatatcaggaggacaacagcaactagcttttgatccccaactaggcacagctcctgaaattgctgtgatgtcaacaggagaagagacaccatatttacaaaaagaagcgatcaactttagtacatgacagtgcaggagttttcatgccctcaactacaccaaaacccaacacaaccaatgttttcacttctgctgtagaccaaactattaccccagagctcccagaagagaaggacaagactgacagcctaagggaaccataagaagttgccctgatcattcagacattttgggaaaaagatgtggccatgccttggatataattttaggctattagcttcctcaatgctagtatcagttctttggaatacatgaaatatcttgactcttctcctaaatttgtttttacttatacatgttattaaactctttaaatatgtcatagaaaataatacaatcatgtaatgagtcttgtcttacaaaattatatgtctcttcaaatatcctatcattgtataatatggaatataataacacagaataaagctagtatcattaaaa

SEQ ID NO: 10690 - DNA, 386 bp, Homo Sapiens
  misc_feature (294)..(333): n is a, c, g, or t
cagtagatcgagtgatcctgtaacgctgacatagattacatggaatatggatctatcatttatggcaacaattcagaatgtgatagctatcctggacatcactaagagacttccattccagcaatagtttattgcaatgtatttagtcaaatgaattatcaattcacaacataatgaatacacagaaagtatccaagcacaagtgaaatttatgttttaaaacagaaaaaagtttgttatttcttttatcacattatagtttaaacagtagaaaatgtatagttgtgcatctcnnnnnnnnnnnnnnnnnnnnnnnnnnnnnnnnnnnnnnnnttacactatttactgtggggtgaaacactggtgaaacactatttactatgggg

SEQ ID NO: 10691 - DNA, 409 bp, Homo Sapiens
  misc_feature (295)..(348): n is a, c, g, or t
  misc_feature (351)..(351): n is a, c, g, or t
ttgtgattcttctctcaccagtcatgataacaacacttttaagatttaagatgttgtcttacagaggagcttagtacaaatgctttctttttttcaaaaagagaaatttatgagaaagctggtcttcaatgatcttaattaagaactgtcaaagctaaaggcagaaaaactgcctggtcactcactgctcatctcttcaaagttacctggattatccctattagtcactgaaaatgacctaacaaaggaccccagcaggtgatggcagttagtaattttaaaatatgacacaagnnnnnnnnnnnnnnnnnnnnnnnnnnnnnnnnnnnnnnnnnnnnnnnnnnnnnncgngtgcccgacaatcatttctccagtttccaacaacaggtaaattaaggagtatgtgttt

SEQ ID NO: 10692 - DNA, 476 bp, Homo Sapiens
  misc_feature (74)..(74): n is a, c, g, or t
acaccttgcatatttagaaggggagaatctggaacttcgagattatcagctagaaggtcttaatctggctagcntcattcctggtgcaaaaataatagtgtaatccttgctgatgaaatgggcctaggaaagaccatccagaccatatcattcctctcctacctgttccaccaacaccagctgtatggcccctttcttatagtcgtccctttatccaccctcacctcatggcagagagagtttgaaatctgggcaccagagattaacgtagtggtttacataggtgacctgatgagcagaaatacgatacgggaatatgaatggattcattcccaaaccaaaagattgaagttcaacgcacttataacggcatatgagatcctcttgaaagataagcctgtgctgggcagtattaactgggcctttcagggagtggatgaagcccatcggttgaagaatgatcctctcaggtattt

SEQ ID NO: 10693 - DNA, 366 bp, Homo Sapiens
  misc_feature (356)..(356): n is a, c, g, or t
gcttcttgcgcttcttctcctgctgtcccagccacaggtcatgtccttgagtttcacaagtagcctctttggctttctcacacgtggtgaagagtggcaaacagactttctgttctccaactcacttttttcttccctagcagaggagatcccactgcttatagctcaggaaatttaagcctcaactgcaacagtggctggaaaccttttctagtagcagaattttataactcacagaaagaatttggtcttaaggtccctgcaatcagtgtcaagcctgatttctgcagtgccactcacttcaatgccaggcatgtgggatcagacagcagggaatttgctatcaaaagagctgngtctgaatcc

SEQ ID NO: 10694 - DNA, 504 bp, Homo Sapiens
cccccatacagagttaggggggctacagccatctcaaccagccccatcagttccctaagtgttcccctcaacatccccatcagtgattctgaagcctctgcttgtccccaaggatagggaactcactgcttctcttccctggccagctgtgatgctgaattctggagatgtgctgaccctcagccacggctatcaaaatatggagcttttgattcatgttctaccatctgcaaattccaagacagacagttgccataaggactcaccaatgggggttactgggaagtgttggatgggtcagcttgtttggccctttctagactgatagaaataactatcatgtaacattttcagagttttgcaatgtaaaagagaaaggctctatcctgatctgatggtatgagggattcctcactggaggacatatcaggacggcaaggccagccctttctgtagagggtctagtctagtcaagggctcattcctcaaataaacttcctaacc

SEQ ID NO: 10695 - DNA, 230 bp, Homo Sapiens
cccaaaaagacctgaggctcaaccactcccaggacttcctgcttcaccaaaacaaggtgaaccttaaagacactgtgtgttttatagttttgttgcctaaagagttttcttcctgaaactctacgattaaacaaaaacccgttgaactggagctcgggcctgcaagtccaggccactggtaacgtgcacaccccggggaatggaggagccgtttctctgtatgaggatgg

SEQ ID NO: 10696 - DNA, 588 bp, Homo Sapiens
caccagaataggttcaccgctaatagcccatcggacaatatatctccctcagagttccttccccccgaaatcctgcttcctgctgtccctgctcctccagaacttggacctcctggggatgcaagagcccttgactttcctgcagctcctcagatggcagctcttccccctgcctgatagtcccactttcagcgccttcattctggttggtctctgcaggatgctcttcgcagggagaataatatctggtctgaccagagttatctgaagaggtttcctcttcttcttctgcctgtccagatcccaatgtcaaagaagtaagtcctggccaaaattccacctcctcttcttcgcctcccaggtcactggaaaatggggccatgtctagatgctcactctgaatgaggcaggcccagagctctgggggagctagagtccttgcttgtcggcctgctaggctctggggtaccgcctcccagtgttccggagtgtcacaggcctaagccaacaaggctttcctgattgggacaatccacatcagcgagaacccttacttgggaaaaaaagcggtgtacctgtaaggtgcgt

SEQ ID NO: 10697 - DNA, 801 bp, Homo Sapiens
cgctgaagaagacgccctctgcctccggcctcctggtgctggcctccgccatgcgggggtgcccccgagaagccctccagccgcacctggcagccatcgccacagagctggcacaggcccacatctgccaggcatctgaaaacgacctctacctggagcgcctgctgctgtgtgtgcaggctctggtgtctgtgtgtcatgaggactgtggcgtggccagcctgcagctcttggacgtgctgctgacaatagtggccctcgcaggtgctaccggcctgagggacaaggcacaggagacgatggactcactggccatggtggagggtgtcagcagctgccaggacctctaccgcaagcacattggtcccctcctggagcgggtgaccgcgtcgcaccttgactggaccgcacactcgccggagctcctgcagttcagtgtcatcgtcgcacagtcaggccctgccctgggagaagccctgccacacgtcgtgcccacgctgagggcctgtctgcagccctcccaagacccgcagatgcgcctgaagctgttctccatcctgtccaccgtgctgctcagagccacggacaccatcaactcccaggggcagtttcccagctacctcgagacggtgacaaaggacatcctggcccccaatctgcagtggcatgcggggaggacagccgcggccatccgcacggctgccgtgtcctgcctctgggcgctcaccagcagcgaggtcctgtcggcagagcagatacgggacgtgcaaggaaacactgatgcccaggtcctgaccacct

SEQ ID NO: 10698 - DNA, 855 bp, Homo Sapiens
  misc_feature (534)..(537): n is a, c, g, or t
  misc_feature (539)..(540): n is a, c, g, or t
  misc_feature (547)..(547): n is a, c, g, or t
  misc_feature (719)..(719): n is a, c, g, or t
  misc_feature (727)..(727): n is a, c, g, or t
  misc_feature (760)..(761): n is a, c, g, or t
ggggtcgcagggcgcggcgggttccagcgcggggatggcgctgtccgcggaggaccgggcgctggtgcgcgccctgtggaagaagctgggcagcaacgtcggcgtctacacgacagaggccctggaaaggaccttcctggctttccccgccacgaagacctacttctcccacctggacctgagccccggctcctcacaagtcagagcccacggccagaaggtggcggacgcgctgagcctcgccgtggagcgcctggacgacctaccccacgcgctgtccgcgctgagccacctgcacgcgtgccagctgcgagtggacccggccagcttccagctcctgggccactgcctgctggtaaccctcgcccggcactaccccggagacttcagccccgcgctgcaggcgtcgctggacaagttcctgagccacgttatctcggcgctggtttccgagtaccgctgaactgtgggtgggtggccgcgggatccccaggcgaccttccccgtgtttgagtaaagcctctcccaggagcnnnnannaaaaatntacacaacaccaccgacaacggggttagccgcccgccccactacaatcgcgcccgcgcaaccacacttttccttgtgcgggcggcctccgcccccctcaagaagcttttttaaaaacctttccctttgggcgggggcgggccccaagaaaggggacaaaggaaacaaggggnccctatangtggtgttttgccccaggccagaccccccgggnnaaaaaagaaaatatttttgtcatgcgggatattctccttcacgcccagaaataaaacgcgaggcgccccccccgggggcgaggggggaaacact

SEQ ID NO: 10699 - DNA, 332 bp, Homo Sapiens
gcatcaagaattaataaatacagtgtatcattattttaaagacatgtttagggaaaaaaccagcttctcttccccttaaagttattggtggagggagggcaagagaggaagagatggcagctttttaagtgaaattttaatcttatctatcttttgttcattttgagtccccaaataaaatatttctgtactttaatttcttaatcactattgtcagcttggttgctacacatttaattacaatataaagttgacattgaggatgaagaaacttaattatactttttcttatttctatttaaccaataagatgttaatagcaaattagaaca

SEQ ID NO: 10700 - DNA, 497 bp, Homo Sapiens
tgctactactatgtgcaggaacccttggtcacatgtgacatgtctgtgggaagctcccagagtttggtttggtccctggttttcagtcttgctgagactctgtctggatttgcctgcagagtttggataaaaaatggcaggttgggtaaccctccctgttcatcccatgttagctccaaagcatttcccaccctccatctaccccttccagaagcaaaaacaaaccatgactgaggcaggcatggagttgggcgttaggggcaggcagagggcctttgctacactgctgacagctatagggagccccaggtaatggcatgagatagctggtgttagggctatctcaggcaatatggccacacctgggtctttatgcatgaagataatgtaaaggtttttattaaaaaatatatatatgtataaataaatgatctagatattttcctctttttctgaagctactttcttaaaaaataaataaaatgtttatagcaaaa

SEQ ID NO: 10701 - DNA, 430 bp, Homo Sapiens
  misc_feature (157)..(157): n is a, c, g, or t
ggctcacctggagtcccacatggttatccacactggggagaagaatcttaagtgtgattactgtgacaagttgtttatgcggaggcaggacctcaagcagcacgtgctcatccacaactcaagaacgccagatcaagtgtcccaagtgtgataagcntgttcttgagaacaaatcacttaaagaagcatctcaattctcatgaaggaaaacgggattatgtctgtgaaaaatgtacaaaggcttatctaaccaaataccatctcacccgccacctgaaaacctgcaaagggcccacctccagttcgtcagcaccagaggaggaagaagaggatgactcagaagaggaagatctagcagactctgtggggacagaagactgtaggattaacagtgctgtgtattcagcggatgagtctctttctgcacata

SEQ ID NO: 10702 - DNA, 397 bp, Homo Sapiens
  misc_feature (19)..(19): n is a, c, g, or t
  misc_feature (150)..(150): n is a, c, g, or t
ccatctgtgagtgactttngacatgagagaatttcactatatcagagcaagctagaaattgtttcccttctactgggcacaatacacgcattgatttttgcctggaataagtggatagatataaaacaatttgtatggtatacacctccnacttttatgatagctgttttccttccaattgttgtcctgatatttaaaagcatactattcctgccatgcttgaggaagaagatactgaagattagacatggttgggaagacgtcaccaaaattaacaaaactgagatatgttcccagttgtagaattactgtttacacacatttttgttcaatattgatatattttatcaccaacatttcaagtttgtatttgttaataaaatgattattcaaggat

SEQ ID NO: 10703 - DNA, 494 bp, Homo Sapiens
ctcgaccctgagtttcgagaactggatcttgccagacgaaagcgagaggaagaggaggagcgaagtaggagcttgagtcaggagctggttggagttgatggtggtggtactggctgttccatccctggattgtcaggtgtcctaacagcatcggagccaggatattctttgcatcggcctgaggaagtatctgtgatgcccaagaaatccattttgaagaagcggattgaggtggacataatggagccctccatgcaggtctctgctgcatttcttgtagggcctcttgctagtctccctaatatcttaaagcctgcttactttcctgtgggctatgttcctaatggtatctttgtaatatgtgctggaccgacattgtgagctacaccttctaggactctccaaacgaaactgtaggccttttaatgcatcagtagagggttctattgctgtatattaggctttatattaataaatagatattttggagagta

SEQ ID NO: 10704 - DNA, 914 bp, Homo Sapiens
aacggaacttacgtctttaaataaaattaaaaaaatcagtattctggaatgcaaagtgcttgtgttttttttagcagaaaatctgccatgattatttttttaatgaataaggattttccacaaaacaggcttgctctacatgctagatttttaaacagttcagtgacacaatatgctaactacatacacaacagataatatagtaagaaaacactcaacctgatgaaaagttaaaatcttcattaatacactgaaaattgacataactcatgcctttaaaatcaaaaatacaaaaattaaatgttttcctaaaaagatttccttattttaaggattcatttgaaaatgaagctgcatgtaatttgtacagtaagttgtacaagtaaacaggtaatatacataaaaaattaattgacatactcctcaattatcagttgtccacctttaatttccaatactgtactttcttaacaagcatacaaaatatcaaacttctctttagaaaaagtgccgttctttgacatcctttacacaaaaacagtctgagcctgtggcatgttaatgcagttgagaggcaaagcatacgaacttttacaaattctaccttccataaaaagcctcccgaaaaggagattacacgccactataaaaatatcaacctcttgtggtagctgcattagagaaccaaggcttgaagactattttcatatagcatagaaaaaccactatgagagcatattaactgcattggtggcttgggagtgtactgtgccacaggattatgcatagctactgttaggtaccaagactgttatacagttttaaattgattgtaactgagagcataacagaggtactaccagcccatgcaaaataactaaaaatactgagtcactgtgctgaatacttcattc

SEQ ID NO: 10705 - DNA, 597 bp, Homo Sapiens
  misc_feature (533)..(541): n is a, c, g, or t
tagactacaattaacattcactttattcagttttgtcctctcaacttagaaggcaacaaatgaccacattaaaaagggagcatttcagaatatatatacataaaattggtctgggtaccctaaggtgtttgcgttgatagaaaattgacaccccaaactaagtgttctacttagcttctacaatagttattcctagaccttagattagtcattacatttttatttaaggtactatgttactttcatgactacaaaatgaggcactcgtacaaaacaggaatgaaaacatacatatactgtcttgtctttatgtcgtattaatgccaaagatattgtcagggattattttaaagaagcccttactcatgatggctatttttaaaaatggcacaggacagtaacaggctgaaaagaaaacacctggttgaggggacaaattaagtaaatacaagacagcttaaccaaggaagtcagcgaatctccacaaatgaggcttttaataatactttactggtaagacattttagttgggnnnnnnnnngatggctgaataacatcctaaagaagtattttaaatataatcttttaattttacaa

SEQ ID NO: 10706 - DNA, 519 bp, Homo Sapiens
tggctcggtgactcactaggaggaattcccccgtaaggcaacagtccttgagtgccaggctatgcccatgagcaccagtatggtctgagaaggttggagtctggcaaacaaggccaagggctctgttgttgggctcacaagtaccttgactatcgcccacaggtgatggaggacgaggagaaggccatggagatcttgggcaacacggaagctgcgcagcctccatcccccatccgctgctgatggctccgcctccgctgcttggcagctactagcattatctgtggctgctctcgcctgggagtcatggctctggtgtttgccatcaaggtgaggagtgcaattcccatgggaatgggggtgggtataaggcaatggtttcatgtatctgatctatctacattgaccagtcactgaatacctatcagtgctctgggcctagtgccagaatataagaataagacagggttccttgtcgtacagacgacccataatcttatgaaagagctcatgctcaaa

SEQ ID NO: 10707 - DNA, 774 bp, Homo Sapiens
ggccgggccgcctggcatgtcgtgctgtgcctgtgtactcagcgagggcttgtttgctccattatcttccagccggatacagagtgaatagttaaccacacttaggtcaaataggatctaaatttttgttcctgctccgtgtaaagaggccagtgtttgtgtgttgcaagcagccttggaatagtaactcttctcatttgtttgggatctggccaccaagttccagaatgatacacggatcagtgcagaagttcatcaggctctcggaccttagggctgttggagaaggcttcagcagcagaactgatggtgaaggctcgtgttctccatcctcaactttctttgcttcgatcatacacaagaatacatttggaagggcaaaaaaatgaacactgtcgttcattgcagccgtgttttgtgacacagatgcacagtctgctgtgaagaccttctctcaagtggcatttgggagtccatgccagatcatggtgcttcatgagagactgacagctatcaggggttgtggcacttagtgaggactctcctcccccagtgtgtgctgatgacacatacacacctgacaatagcttgagtcttctctgttccttttactctgtagccaacatacacatgatttaaaaccctttctaaatatctatcatggttcatccttgtccaaatgcagagtcagagctatttgtacttcattattatttccaaggcgaatagttggctttctttttgcaaaaataattaaaatttttgtatgttgca

SEQ ID NO: 10708 - DNA, 1276 bp, Homo Sapiens
  misc_feature (848)..(961): n is a, c, g, or t
  misc_feature (969)..(988): n is a, c, g, or t
  misc_feature (1071)..(1080): n is a, c, g, or t
gggggcctccctagtgcgggctggcagtgcgggcagagcccggctgagaggggcggccctggaggagacggaggccgcgggtgggcccgaggcgcaagaggaagatgaggacgaagaagaggcgctgccgcactccgaggccatggacgtgttccaggagggtctggctatggtggtgcaggacccgctgctctgcgatctgccgatccaggttactctggaagaagtcaactcccaaatagccctagaatacggccaggcaatgacggtccgagtgtgcaagatggatggagaagtaatgcccgtggttgtagtgcagagtgccacagtcctggacctgaagaaggccatccagagatacgtgcagctcaagcaggagcgtgaagggggcattcagcacatcagctggtcctacgtgtggaggacgtaccatctgacctctgcaggagagaaactcacggaagacagaaagaagctccgagactacggcatccggaatcgagacgaggtttccttcatcaaaaagctgaggcaaaagtgagcctccagacaggacaacgctcttcatcactggtggctgagctttttcccagcaggaatgggtcctcgaatcatcgtgcctctttcacagaaaggacgttgtggtggcctcaccccaggcatgcccaacaggaactgtcagcataaacctgggggccctcaggactaggacagggtgagccagtgctccctcctttcatgtacttggcctgagactgacctctccctaggtccaaatgccctagtcacatggcagacccacggcctggcccactgtataaaataaacctgtttgcttcttagtttgnnnnnnnnnnnnnnnnnnnnnnnnnnnnnnnnnnnnnnnnnnnnnnnnnnnnnnnnnnnnnnnnnnnnnnnnnnnnnnnnnnnnnnnnnnnnnnnnnnnnnnnnnnnnnnnnnncactctgnnnnnnnnnnnnnnnnnnnnaaaaaaacttttcaaaccctcttcttgtgtgcggggcgccccccggcgcaaagaaaattttctaaaactttttctcggggagnnnnnnnnnntagaaaagggcatcgggccccaccccgtataaccacaggaagcgcgaaaacccaaaatgtttggtacaaatcccccaacaaaataaaacggggccgctggccgggaaccctttttttaggaaacacaccccagggcgtctttttgaagtataattcccggggctcctaaacaacgaggcgaccaaaagggggggcg

SEQ ID NO: 10709 - DNA, 642 bp, Homo Sapiens
  misc_feature (203)..(205): n is a, c, g, or t
  misc_feature (208)..(208): n is a, c, g, or t
  misc_feature (215)..(215): n is a, c, g, or t
  misc_feature (217)..(217): n is a, c, g, or t
  misc_feature (219)..(220): n is a, c, g, or t
  misc_feature (235)..(235): n is a, c, g, or t
  misc_feature (251)..(251): n is a, c, g, or t
gcggctgggtaccactgcttggcgtgcgagagcgcgctctgtgggcagaaagctctgagtcaacatctggagtcggccatgcacaaacacagaacaatcacgagagcagcaagaacgcaaaagagcaccctagtttattccctccctctgcctgcttccccgatcctagccccgcttctccctcgcagtctgccgctcactcnnncgncagcccncntnncccctggccgccgcncccctcctcccgtccnccccacgcctccaggaagtcttggccgcaagtggtctcccgggcttcggcagcgaagcccccttcttttcctcctctctcctcatcttcaacggttacctcaagttcatgcagcacctcaggggttcagccctcgatgccaacagacgactattcggaggagtctgacacggatctcagccaaaagtccgacggaccggcgagcccggtggagggtcccaaagaccccagctgccccaaggacagtggtctgaccagtgtaggaacggacaccttcagattgtaagctttgaagatgaacaatacaaacaaatgaatttaaatacaaaaattaataacaaaccaatttcaaaaatagactaactgcaattccaaagcttctaaccaaaaaa

SEQ ID NO: 10710 - DNA, 520 bp, Homo Sapiens
ggccagttttctcagaaagcctttctgactgatctcagcattacctctttggaaaaggaaggtagttcaagaaatgaagagctgttgatgggatgattgaagaaacagctatgagaggattggctcccatcttttgttactcttgggacatcctgtcatctgagaatgaacaaagaccaattttttgtgtgtgaagcttaagggtcatatgtttgcttgtattttttaatgctaatcttgtgaaaataattgacaggcgaaagaaaactctatttagatgcatattactgtacatgggactatgcttttctcaaagccccattaactgcttcctataattttgatagtgggaccacatacgtaaaaatctctcatttgtgtggagtcatttctgatttcaggggagatccttgtgtttatcagaaagggcagaagtaggggaagaataatttggtatccttatctagtgtttgattgtcaatgctggagaaaaatatctgtaagagtgtttatacagtac

SEQ ID NO: 10711 - DNA, 786 bp, Homo Sapiens
  misc_feature (340)..(460): n is a, c, g, or t
  misc_feature (487)..(511): n is a, c, g, or t
  misc_feature (561)..(619): n is a, c, g, or t
tttgcaccagttgcctgcaggttggatggaacacagtgccccacttttctgcaagtagctggcttgtaaagggtgaacagagccatgggaggaaggtctggcattgggatgccgccctggggacatacgaaccgcctccttccaccattgtgcactatgggaggccgctgctgcgtggagcacttaaagtccagcctccaggaccggatgcccctcctgtctcccgctcccatcgtgcccttaaatgccagatctgttggagggaagagagaagaggtaggaagaaaggtgatgaaaactcctggtcattccttgaataaacttgattttatttaatagnnnnnnnnnnnnnnnnnnnnnnnnnnnnnnnnnnnnnnnnnnnnnnnnnnnnnnnnnnnnnnnnnnnnnnnnnnnnnnnnnnnnnnnnnnnnnnnnnnnnnnnnnnnnnnnnnnnnnnnnnctttttggggcccccctcgccccctcnnnnnnnnnnnnnnnnnnnnnnnnnggggccggggccccaaagggaaaggaaaaggggcaaaactttttcccaannnnnnnnnnnnnnnnnnnnnnnnnnnnnnnnnnnnnnnnnnnnnnnnnnnnnnnnnnnccaacgttttaaaaaaatcccaagggggtcttgggggcctttcggggttttttcacgggggccccagggaactccaatttaattttcccccccgccggcccttttttggaaaacggggggaattttttaaacctttcggccaaaagggaacccctccaaaggggttt

SEQ ID NO: 10712 - DNA, 537 bp, Homo Sapiens
  misc_feature (23)..(23): n is a, c, g, or t
  misc_feature (46)..(56): n is a, c, g, or t
agtttgatcaaattgaccgcttntcatgagacaaccagatgctgtnnnnnnnnnnncagcactgggatgtgttgaggagggggcagtttgctgtgctctgttctgtctgctgctctctctgggggccgcacaatgtccgcacacatcacggaggggagaaaggcatcagtaccaaacggaacaacctcttttttctacattgtccatacccggacatgtgaggctctattatcaacaggtggtgagaaaaattctgtttttattcgctttctggtaacttctgtaggccctggctcaaggacttagcatttcgtctcatgtacatctttttcttaagtgttctttgccatttctggaattgtccttggtttttccttagctcataggtcatagatgcagaaatatagtatttaaggcatccgcatccagcatcagatggctttgcatccagaaaaacattgataactcagtttgaagcaccaagcatgtgtaatatggctctatacaatataataaatgcataatgttaagtttttt

SEQ ID NO: 10713 - DNA, 1004 bp, Homo Sapiens
  misc_feature (43)..(43): n is a, c, g, or t
gatctgaactgaacctgttttccttgatgatgcctaaactacnatccatagtttctggtgaacctgtaatacagttctgaaagtacagttttatataataagatgctgatctctttattctttcaagtaagagtgctagtgaacaaatagtgttacttgccttgggattttttgaacgtttgtaaaatgctgtcttcctagtccaaacagctgcagctttgggcatttttctttttaattattcttcctctgactttgtatcccttaatacctacactctccaattgtaagagaaagggggcagggaagcaatatagcttccattctaaggctgtattcccgttatgaattactagctgattacagttcagagcattgatcctggaatgtgtgctggagaaatttaaaatactggggttttttgtttaatggtgcctatttagagttggaagttgaacagctgttgcattacatacttttgcttttttattgaaattttgaaatcaaacgtcttgatttttctgttctgttgaattgctatgttcaggatgttctagggggtgggggcagggactcttttcgtaataagcacttgttttattttgtgtgtgtggagtataaaggctacacccttattgtaaaaaaataataataataaaatgaaagaaacaatcaccacaccattattaaactgtaacttgtctacgtaaatcgtcactaggaactatttgctgtgggcatacctctattctgtacacggtcaatgagccaggtgccttactgttcaacggcacccaaaggaacataactactatcttgcaacgattcccgaatagctgtcctgtgggcccttgctgactattttcagcacttcagggtgtgtacggcccgatgaaaggctcacctgcaaaacgagggttaaatctcataagaaccactaacacgttttcccaaacaaaagggcccaacataccagccaatcctccgctgcacgcccaaagcag

SEQ ID NO: 10714 - DNA, 524 bp, Homo Sapiens
gcacatcctgcgggagaaggaacagggatcggcaggaagccagccttccccagtgactgcatgatctggcagggcttagagcacccaactgttggcttattcaggcagcagatttactgagcacctcccctgtgccaggcccttagcacaaccaggggttggccacctacggcccacaggtcaaatccggcccaccacctgtgttcataaataaagttttattggcactgagccacagccacttgtttacagagactgtctgtggtcgcttttgtgctgcagcagcagaactgggtagtcccagcagaaactgttgtgcaaggccaagatttactgtctagccctttgtagaaacatttgccagctcctgctgtaggtagctgtgatggaattgttcactgtaaataaagaaaaaggaaaatccctgctcttgggaccttctagtggaggacggcagtaattccagaaacagttagaggtactgcctctggtgtgctgtgggtggcagattcagatcctcagac

SEQ ID NO: 10715 - DNA, 769 bp, Homo Sapiens
gggagtcaacgcctgcctcctctcgagcgtcctcagcgcagccgccgcccgcggagccagcacgaacgagcccagcaccggccggatggagcgtccgcaacccgacagcatgccccaggatttgtcagaggccctgaaggaggccaccaaaggaggtgcacacccaggcagagaatgctgagttcatgaggaactttcagaagggccaggtgacccgagacggcttcaagctggtgatggcctccctgtaccacatctatgtggccctggaggaggagattgagcgcaacaaggagagcccagtcttcgcccctgtctacttcccagaagagctgcaccgcaaggctgccctggagcaggacctggccttctggtacgggccccgctggcaggaggtcatcccctacacaccagccatgcagcgctatgtgaagcggctccacgaggtggggcgcacagagcccgagctgctggtggcccacgcctacacccgctacctgggtgacctgtctgggggccaggtgctcaaaaagattgcccagaaagccctggacctgcccagctactggcgagggcctggccttattaaccttccccaacattgccagtgccaccaagttcaagcagctctaccgctcccgcatgaactccctggagatgactcccgcagtcaggcagagggtgatagaagaggccaagactgcgttcctgctcaacatcagcttctttgaggagttgcaagagctgctgaccccctgacaccagggac

SEQ ID NO: 10716 - DNA, 919 bp, Homo Sapiens
cgctacaggatgaagagtcttcaattatcccaaggaccagcctaaaacaccttgatcttttaggacattaataatttcaaaattggatgacttgatgaatatccgtaggaaactagaacttctaaaacactttaggcaacacaagccagcagaaagacaggtgagtggaagcccaggttttaaaaaggcctatttcaggaccttctcaaaatctatgtctgatctagggcaacctgctgacccaacactcctcagacttccaagactaaataaaataccctccctctaagtatcccaaaggttgacttgcaagcaacacttttacgggaagtgtgccttcactacatcaagtcagcactgcagagctccctaaggtctcaggtacccagctaagacatatgaaagtatactgactggtaaggacaaagaagaaggtttgtttctaattctgaccaaaatatcaaaatatatatggtgtctccttaatgctggaagtgatatgaaggaagaacttgattacttcaattaagttatcaagttgaggcccataaatttctaaaattcctaaatgtttgtcattttctactgaggaaacagaagaaaggaatctgatttgctttggacaaaaaaaataagtgatatatttattacacaacattctgaaatcttaatcactgtacctctttaagcacagcacaaactgtagctggtgctacttaacaagcattacaactttcttttttaaaagcaattcttgaatccaagaactaaaagaaagaaattaaagctgtagagaatgctccaacttcagaggtctcatactataccgtgaatcgtgtctgtcacctggaaaccagagtgctccagcacgatcgcatggacactttgcatccagagggggatcctctggaacagctat

SEQ ID NO: 10717 - DNA, 189 bp, Homo Sapiens
  misc_feature (41)..(72): n is a, c, g, or t
tctggatgcaagtgtcgtgtagtacgattctagtgatgagnnnnnnnnnnnnnnnnnnnnnnnnnnnnnnnngggagccagcgggctgtcccagtgtttgcacataagctcacttctgaagatcaaaggtgtgttcttccctagctggcttagtacacttgcatccagaggggatcctcaagagcagct

SEQ ID NO: 10718 - DNA, 344 bp, Homo Sapiens
ggctgtgaatgtcgatgcctggtcgtatgctgtcccgggttacaactgagtgcgcgtttaccggaatctggtacggtaacggctggcggggcgttatcctgagccacgatgtgcatgagtatggcaatgagagccctggggtttctatgtggagaacagactaaagggagcaaggtcagaagtggggacaactgttaagagcctatcataaacatccagccgagacataataaaagtttgggccagaataacagtagaggtatggtcagattcagtatatatcaaaattaggatataggtaggaacataaagagatgagagcctgagccctgggagagtccact

SEQ ID NO: 10719 - DNA, 340 bp, Homo Sapiens
gggtgggagaagataattcagcccataacaactggtaacagaccaagtgattccaattctttcccattatagctggattaaagctggtggatgttaacaatgtaccatttaattttgatcattgacttctgtatttatttatcaacatctatgagacatgtaaacttacaaagtagatgattgcgaaagaactgaaataaatactaaacaaatgtttaactaaataggaatttctcgtaatgagaaatttctagacatgcgcagatggaggccacatcccgagcaggtatactactggagtcgtcgcctgcagaagactactgttcagtcatgactcttc

SEQ ID NO: 10720 - DNA, 797 bp, Homo Sapiens
tcggatgcaagtgtctgaataacatccatttgtgatcagatgagctggtagaagtttccaaaatgtataagaaaatttctttaaagaacacctcaatgggcatcttcaggatgtgtctggaaatgtgacaacaaagtaagaaatatagaaagagaaagctcaaaaacctctggaacagatgagactccatttttggagagtgcaacacaaagatacggcttaatagcattaataaacatctcattagtcctgaaaataggtcctgcattctgcagaatggatagaagtaactgcaaggaaagaatcttggatcgtagttcatgagacttgggatctggtggtccatctgacagtggtttcattgacagtttacacaatgacctgaatactagaaaggcatccttttgtaaaatgtgggaaaacttagcaccaggtgaaggtcctgaagaatttccagattcctgagtatcattggaagagactgacaatctatcatcaggtaaggatggtgtatatgcaacagaaatgggtgttcctggaataccatttgctagaatattttcactgtcactaccatcctctatagttccaatgttgccatctgcacttgcatttatagtagtcccttctcacatatctccaacaacaatgttcaccatttcttctacaatgttctgtacaatgtcttgtggcttttcctcacaatcatggttttctccgtcatataacacttcatttttagataatgtttcagctgcagttgcctgatcagcttcgtctggaagtataaagcttga

SEQ ID NO: 10721 - DNA, 498 bp, Homo Sapiens
gtcggatgcgagtgccatgccgttagataatgttaagtgcagtatacttttttcttccacatgtggaggactagtggttactgtgttgatgaaagagcaggagcatcttttcttgtgtgttcattcatgcaaaattttgccctcttgaaaaatgaacaaagatcatagccagaaggtatttatcatgcagttaaccacaagaaatcttgaatgagatcatcatcaagtaacttaaataaaacagttattttctgacactttatcaccagagtcattctttaggacacttagcattattatgtatgcatttttctttttcatataattgccaactattttgaagaatgggatgcttcagattaacgtcttgggagggagacacaatctacttgaccctgatttaaaggaatagtggaagtgggtggttcttcaccacacatgtgattgttactagggattcttcatagactctgtcatagctgaagtatgatatttggc

SEQ ID NO: 10722 - DNA, 779 bp, Homo Sapiens
actgagaatttaaaatacactgagtcacaaggttttgcctaaaaaaaagatagagaggaaatgtgctgggactgtacttcagcatcctctgtttttcctctgaatagtttaaataaaatcataatatttactacaaactctgtggacacgctcacacagagtccaggacggcaataaattagtattatgcaaattgttttccacagaaatacagtccctcttgtgtatcttcaatagcccaccagggaagggcagggcgggtgtctaggaggcacaattagaccagattgtactccttcaggttcaactggaggatggtgtccttgacggcagcaaagacaaagcggatattctcggatgtctgtggcgcacgtgaagtgggagtagataattttgtcactgtctgggttcaggtccacgaacatcttcagaatgaattctcgggctgcctgggcatctctctggggtccatcatattctgggaagtagtcgactagatgggaatacatgattttctcctctagaagatctttcttgtttaagaacagaataaccgaggagttctggaaccaggggtatgtgataattgttctaaagagagccttgctttcctccattcggttctcattgtctgactccacgagaacttgatcatattcactaagcgctactagaaacatgatagaggtgacattttcaaagcagtgtatccattttcttctctctgacctttggccccctacatcgaccattctgaaaatgacactttgcatccagag

SEQ ID NO: 10723 - DNA, 621 bp, Homo Sapiens
cacggtgggaacataggattaattccctcacactgatcatttctctcactcccacatcaccatttaaacttctatcataagcactcatcactttctacttatcattactggtttacaagtctgtcttagtcattagacatggaattcctccagggtggatacaaagtgccttattcatctctttatccttggtactgcacaccgcagacaccaagtggatgcttagtaaaatgtctggtaaatgtcaccttctcgagccaactcgctcagctccatggcatgatccacctccccttccaactgttcctcagctgctatagtatcctcttcatcctccgctaggaaagagacagaagcaagattaatagggatagaggctagaggcacaggacacagtccaaatgaaacagatgagaaagcctgaaaggttaggtccagacaattcattcaaggggtaaggggcaataggacaaaccgaacagccctgaccttcctcttcgttggcagtaaactcttcatcatcttcatctggatgccaaggctgtttgttgcgctgtgtgacagcagagggtgggggctttatctgtatggcaaaagataaaaaagggaagggtctaaggt

SEQ ID NO: 10724 - DNA, 443 bp, Homo Sapiens
tctggatgcaatgtgtccctgattcttcctatctgcttccctgtgacctacaagatgagtttcaactttttaatcaccttagagtcttgatcttttcagggttggtcgctttttaggttggggagacttttgttacaatgatgtcgaatttaggtttctatgctttggttcttagaacatgttgctgactagctggcctttgtactgacatgttgagatggaaaggatgttgcccatctgttaaaaagccaatagcaactgcctacctgttggggctgttcccaaccttgttcagctctaccacaggagaatacagggtttctggtgtggtcttctgggccaccctctgttgttcatcctcactcatcctcccagaattactccatcctttggaagatttgaaattttacactgaaatctgtcaagacactttgcatccggag

SEQ ID NO: 10725 - DNA, 428 bp, Homo Sapiens
ccgtcggatgcagaggtcccatcctgggtaagacagcatctctcaggcaggctcctagtccctttaatactctccctttgacagcttccttgctttccagtatgaacagatgtctcaggctcaccttgcctgagctgtgaaacaggaggaggaagagatccagcccagtgggtctttaaaactgtgagctccttgagggcaaaatgcaagtgttttctctctggtgtttttgcatggaacctgcctggctcagggctaggcgctgggtctagggatgggctcctagatacccgtggctcatcagggaggcaggcgcagggaaggctgagatctggaagcttgacaaggtatctctctgtctgaaaatgctggggccctcctccccatagggactagtaggagcaaagcttgacactttgcatccagag

SEQ ID NO: 10726 - DNA, 780 bp, Homo Sapiens
  misc_feature (687)..(695): n is a, c, g, or t
ctctggatgcaaagtgtcctggccggtggcagggaggctggtgggcacttctgctcttcttgaagggagctcggtgccctgctcaggctcgatcaccgctcccctccagctgatgaccgtcctctgcggatctccttccgggcggggatccacaggggccttcttgccatttttagtggcctcctcctgggtcccatccttcagctctgggctgggggctctaatctgcaggtgagctggtccccgctggatgtgtctttgctgtctgctgtgacgaaatctcaggtaagttctcagggtcgcatgtccgccttctgaggagctggtaagacgggtggactttgctggttttaacccacgcaatttcgtggcctcatcttctgctcttccctctagcctgaaagcacagagcgtttctcaactggtcagtccaaggtgtgatcgtagaacgatggacgtccacagaaaacgcagacaaggcaaaggaggaagagaactcatagtctcgcgaatcgccatgccgagcaggttgctgtgccatgttccgtgccagcagcgagcgccctcaccaactcttgctgttgtcactagctctcgccaagctcagagtcaccgagatgaagtcccgatgaggcggcgcggcgcggtcgggtacatgactacacgtggtggcgaccgccacagggnnnnnnnnnactggcggcgtcaaggaacgtccaggacctgagaggaaccgagacactccgcttctccagcccttcgcacggcagccatcgcagc

SEQ ID NO: 10727 - DNA, 530 bp, Homo Sapiens
atctagagggtcccctcggatgcaagtgtctaacaggaatacttattagaacggtaatgacgttgctagattttccttgtaaagatccctgtgtatctagttggtctcttgaagcaatctgagtgggaaaggaaagtgaaagaaatgttttatgccagctgcctctggtatacccattaaggggagtctctacattaatgctctacataattgggtcagactgatgagaggcaatagatttccaatgctgatgagatccagagcccgggagcccatttatggctggacattcacccagcaagacgctgacgtggcagcaaacacggctccaatgtccagcttacctcatagttatcccttcaatccttctggatgagatgggtctgagagatgagactgtactgaaatcacaagagctataactgccagagaaaaattaaatggggtcttcaagtagtgactgagccagcaaactaagtggccaagagggagacaagagcagctcctaaagaaggtggaagtcaagcaat

SEQ ID NO: 10728 - DNA, 433 bp, Homo Sapiens
tggtgtctagaggatcccggatgcaagtgtcagaggaatgggcagcacagaggttgatgaatcactttccaggcggagggaccacagtaacaacagcaagggctgtgagtagagtggctgagtgagggtggagtgagacgagtatgaggcaggtagatgggaactgggtgatgtaggataagggaggccattatgagaaattcaaatattcagtgaacatgtgacactactgaaaaagtcaagagaagggggcagtgtagcctgattcaagttacaaaagatggctagtggtcgccatatggagactagttcaggaggaaacaggagtggaagcaggaaaagcaacgaggacaggctgctgctctaggccagacgagagtccccgatggtcaaaccagacaccttgcatcgagaggacacttggcatccagag

SEQ ID NO: 10729 - DNA, 389 bp, Homo Sapiens
aaacagagtcttgctatgttgcccaggcaggtcttaaattccccagctcaagctatcctccctcctgcctctgcctccttaagtgcttaggattacacggcgtgacgacacacctggcctcataagattattgaggatattcaatgagattgtgcctctaaagcaggatttctcaatcttagttctcttgacactttggaccgggtaattcttcatcatgatgtgctgtcctgtgacatagtagatttagtagcatccctggcttctatcctgtaggtgccagtaatatcctctgggttgtgacaaccaaaaagtctctaaatgttgccacaagtagcctgggggcaaaatcatcctttgttgaaaaccactgctctgaagccttcaaa

SEQ ID NO: 10730 - DNA, 517 bp, Homo Sapiens
  misc_feature (385)..(459): n is a, c, g, or t
tttttgatataagaggcgatttattatgggaattggatgacaaagttatggaggctgaaaagtcccacaatctgccatctgcaagctggaagacctggaaagccaatggtgtaattcattccaagtccaaagacctgaggaccaggtgagccaatggtgtaatgtctcggagtctgaaggcctccaggagctctgatgtctgagaagttggatgtcccagctcaagaaaggagagaattcaccttttcttcacctttttgttctatttgcgccctcagtggattcgatgatggccaccccatggcagacatctgggcagcagcgagggtctgaggaggttgggaacttctttgtccttggtccagtcacaatgctcctataaatnnnnnnnnnnnnnnnnnnnnnnnnnnnnnnnnnnnnnnnnnnnnnnnnnnnnnnnnnnnnnnnnnnnnnnnnnnngacctatagcgttgtgcccatggcctcccagttagggattattgagtggcttgaaaat

SEQ ID NO: 10731 - DNA, 420 bp, Homo Sapiens
attgccaccaaaaggcaagaaattgagagcacaacaaatctagagagttgagaattgccgaaatcaccatctacagcaacaattacaggaatctcagcaaatgcttggaagacttattccagaaaaacagatactcaatgaccaattaaaacaagttcagcagaacagtttgcacagagattcacttgttacacttaaaagagccttagaagcaaaagaactagctcggcaggcacctacgagaccaactggatgaagtggagaaagaaactagatcaaaactacaggagattgatattttcaataatcagctgaaggaactaagagaaatacacaataagcaacaactccagaagcaaaagtccatggaggctgaacgactgaaacagaaagaacaagaacgaaagatcatagaattag

SEQ ID NO: 10732 - DNA, 651 bp, Homo Sapiens
ggattaaatgtctaggcttccatttaaaattatatgaatggtttgggatctttttgcactgagcaattttatttcaggcttccagctgtccctgtgagttatcctggacatttcgatggtttttggtaaggccaaactctgataagcaaaacagagaatactgacgtatacttaaccatatgtgtaactgatacttggcaccatggaatttttcattgagttatttcctcattcttttaaaaaataagggactataaatcagttatgtagtatcttttgtttttgtagctgattccttaactttcttgtatgcctctagtaatttcagagattaaatattgctttaaactgtgatactttgatttgctagattgacaaaactgatactaatataattaagttcatctttgaaatacatctttgtgcgtagagccaaaaaaagagataaaattaataatagttcacttgttatttgagattaatttggcatttgaaatgatcattttattttacaatcatttataatgaatcaatgttccagttagctttaaaaggtatacggtgctaattagtaaaatattgaaggcaatattttactgctagcttgcaaagtcatcagagtttaaaaaataaaatatatgaaaatatgta

SEQ ID NO: 10733 - DNA, 537 bp, Homo Sapiens
agcggccgcattccccaaactcaagcactgatctgaagaagcctctgtgatccacctcgaagaacgcctttctgtaccggtcccgcacacctacagctcactctcacaaagaccccaccttggagtaaacggacagacgcttcccaccagctgggctgggctggctgcagagagcatgcacttgaagttgtatcactccgcccctgcctcacaggcaccttttgacttttgggtggtggagtgagaataagaaggcaccttaccctacatcacggaacccccaaacactctctctgactagccacccgagactgccccgctctcccttcccacacttctggggtgcggcagcgctagctcttagccctgtgggtgaacagcggccttgcaaccacattgaggcggcagggagatcatgactccagccgctggggtctgaaaattcttctcctccatcccaccctgccagatggagaagatgcggctcacttgcttctacagaccctctcccctggggagggggtgggggagcaggct

SEQ ID NO: 10734 - DNA, 469 bp, Homo Sapiens
tatagaaaacataaaggaactttaatatccaaacattcagggtaaagaatactggattaatcacccattaagtgtaaatcacttcaggttctttacagtaccagaaagtaaaatctaaattttgcatattgcagagaatgaaaccattttaaaaactttaatttccttacctgatactaataccagtatgatttttagacggaaaaactaagagtaagatttaaaccaaagatagaggtgttcctgaaatgtgaatttgttcagtagtaaccttttcatcatgagtactgataccactttcttctcagaaagtagtcaatgtacattttaagatttgtgcaataagccaatatgctggataataaaaactgttattactggagatagtcaaaatgaaagaaaactatttaaattatttatgcccaaataatttaccctgcagtccatgagatgcacaggaaataatttt

SEQ ID NO: 10735 - DNA, 722 bp, Homo Sapiens
gcacgcaaggatgagtatgggccatgggcccctgtagagctgcttacctggtgattgaccatgcaccttacaatttctgaacagttaaccctatagaagcatgctttatatgagtgtcttctgggaagaggaaccttcttaatctcttctgtgggattttcaaaatgctaaagactcacactgcagcaatcatcccagatgattaaattcaaagaaataggttcacaacaggaatatactgaagaactagagtgtcactgctggtgaactgtggcacggttgctcaacacatcacctcggacaaattcaggaagcatttctttagcccacaagtccagacccaggtgctctgtatgtttgtttttaatattcatcatatccaagttcactctgtcttcctgagcagtggaagatcatattgctgtaacttcttttaagtagttgatgtggaaaacattttaaagtgaatttgtcaaaatgctggttttgtgttttatccaacttttgtgcatatatataaagtatgtcatggcatggtttgcttaggagttcagagttccttcatcatcgaaatagtgattaagtgatcccagaacaaggaatactagagtaaaaagcacctctttttcacaaaacgagttgtgatttttgttttaaacaaggtggatccatgtaaactatttttcctttttttatgaacaggacagtaatttttcttctgt

SEQ ID NO: 10736 - DNA, 1067 bp, Homo Sapiens
  misc_feature (225)..(253): n is a, c, g, or t
  misc_feature (878)..(892): n is a, c, g, or t
ttcttccattgaccatttagtgttgagtactgtatgtgttttgttaattctatacaggtatctgttagatattaaaggtgagaattagggcaggttaatcaaaaatggggaaggggaaatggtaaccaaaaagtaaccccatggtaaggtttatatgagtatatgtgaatatagagctagggaaaaaagcccccccaaatacctttttaacccctctgattggcnnnnnnnnnnnnnnnnnnnnnnnnnnnnngaaaccttagggaagattgaagattcatcccatacttctatataccatgcttaaaaatcacgtcattctttaaacaaaaatactcaagatcatttatatttatttggagagaaaactgtcctaatttagaatttccctcaaatctgagggacttttaagaaatgctaacagatttttctggaggaaatttagacaaaacaatgtcatttagtagaatatttcagtatttaagtggaatttcagtatactgtactatcctttataagtcattaaaataatgtttcatcaaatggttaaatggaccactggtttcttagagaaatgtttttaggcttaattcattcaattgtcaagtacacttagtcttaatacactcaggtttgaacagattattctgaatattaaaatttaatccattcttaatattttaaaacttttgttaagaaaaactgccagtttgtgcttttgaaatgtctgttttgacatcatagtctagtaaaattttgacagtgcatatgtactgttactaaaagctttatatgaaattattaatgtgaagtttttcatttataattcaaggaaggatttcctgaaaacatttcaagggatttatgtctacatattnnnnnnnnnnnnnnnatatatatgtaatatgcatacacagatgcatatgtgtatatataatgaaatttatgttgctggtatttggcattttaaagtgatcaagattcattaggcaaactttggtttaagtaaacatatgttcaaaatcagattaacagatacaggtttcatagagaacaaaggtgatcat

SEQ ID NO: 10737 - DNA, 485 bp, Homo Sapiens
gtgtggtaaactgatatttaaaaaaggaaaggagaaaaatcccgcctcctgtttacagactgaaaaattattgctttttatactactgagatcctaagttaagactctccaaagcaaacatttggtttaaatcatttatctgatgtaaataaaaggtaaagaaacttgtagtgttctccacataatggaaaatgtacaaatgcctagttgtgttgcccatcaattttgtatattttcataattttaattgttgaaaattgcattatattttgcaatcactatgttcaatctggatttgtctttcattttaacttttaatataaaaaggggtttcaatgtatctacaggcttgttattgaaacttcctacttatttgatgtgatttattaatataggaagtatatattcttccttaagtaagtgaagcatagcaaatctactttaaactggatgggttaatttatataaacattttcattttaaaa

SEQ ID NO: 10738 - DNA, 747 bp, Homo Sapiens
  misc_feature (179)..(179): n is a, c, g, or t
gccggacctaggtataatctacatcgagatccagggtcactcagctcctcgagatgccacacccagaccaaagttggcaacaatcagtcagaaaatctgcagagaatccacatgtgtaccagagacaccatctccctcctcctggtccccctggagaggactattcacacaggaggtanttctttggaatgtgaagcccaatgccagtcgggcagccaaggatagaagaaggtggtatccttataattactccagactctcctatccagcctgttgggaatggacccagtgatacaaacctgtcctggaattctacctggagaccagagctggcctgaaaattactggtgtgacttttaattagttcaggtctaatcaggtttctttattgttcccttatgtattcaagcttaaggaaaaattgcattgctgtttacctctttgctgataaatttgcagtaattacagcattgcaggaaaaacaatctgttattccagtcttaaatttttctaaaagaagacaatattttagaactgaagcattgagaacttcccttgcaaattatttttaaaattctatcttgtttttctatgtatttctttctgactagacttgtgatatgcgtgtgtttatgtacagaaatttttagtgtttttgttatgttctgttattgacccaaaggccatctttattttctataactgttcaaaatttatattaaaatctacttaggagataataaaaaa

SEQ ID NO: 10739 - DNA, 868 bp, Homo Sapiens
cttcctgccaaaatgacaacctgaatatataacctatacgggaaggcttgacccaaaatcgtatcaacgcagactgggaaagggtgcttagggccgtaactgggatgcccacaagcacttttccactagcattcacaatttacagctagaatgctactcatgccttatacctgctggttatacagtgagccaaaaagtcagctctgcacacacaatccactcagctcacttacttacatctgatggtggctccgtgtatgagagacataggaatcgagacttctggaactagacataactggtatataactaacttgccttcacttaaacaagctgagtgatcttataagtagatttcgtagcccctctcagttctgttttctcctctgtaaaatgggaaaagaaccctccccacgccccacagggcttcactagtatacatatgaaataagtacataatgtgtgcagcatgctcagcacatcagaagcacaaaggacatgcttgataaaacagctgtgaaaagtgagatcatgtggcaatgcagatctttaagtgtgacaggttacagcgcgcctgccaatccaaggaactgtggtatctggctgggacgggaaccacacaggaaagacgggtgagcttcaatatcccatgctgtcatacgtcactttagaacacgtgcaatctaggacgcactctaggtctgccctaatgcccactccaacgtcacctcagagatcctctcccccgcaccccagctcacatggacccctgtcccttcttcgtgacttcttgatgaatgtgcctctagtatgccccgagaccactgggtgtccgtgtgctgcagcgtttatgacacttgcatccaga

SEQ ID NO: 10740 - DNA, 435 bp, Homo Sapiens
ctaaagtgtctaattcaatagcatttagtgcactcacagtgtcgtgctaccttcgtcactatctaggtccggaacattttcaccatcccgggaggaaaccccatactgattagcagtcgctcctcagtcccacctccccacagctgctgaaagccaccaatccgctatgcatctcttcagattggcctgttctggaaatttcgtataaaaggacagtacactatgtgacactttggcatctgacctctttcattcagtatcatgcattcaaggttcatccacagcgtagtagggatcactgcttcattcctttttatggctgtgtaatactccattgaatggatggaccacattttgtttatcctttcatctggaaatatatagcttgaggttgttttcatacggttggctactgtgaataaggccgccatgaac

SEQ ID NO: 10741 - DNA, 498 bp, Homo Sapiens
aggtacatttctactcgttcttagatagtaaaaagcaccagtctcataaaggtgccactcagttttagccatgtctacactgaaattgcaaaagtacttttagggagcaggagtttattagacatctagttatctgtctgtctgttcatctatctatctgtctgctgtatgagaggtaggactggattaaatgaccactgaactcactgaatccagatcattcatatcatcaacaaaagctctagggggaggtcacgttgtgaatgcttaaaacatattattttcttcaacaaccatatcgctaaactaatatatccagagattttgcacaattcgtgttgaaccttccaaaacaaaaataaagacctgtccaaaagttttgacaaaaatactgattgctcccaaataaagtgcttctaagctttgtgtagacatagtttaactgatttgtaaaaatagcttaagcatgttgagaatgaagtaaaagttttcccatgt

SEQ ID NO: 10742 - DNA, 1071 bp, Homo Sapiens
  misc_feature (718)..(718): n is a, c, g, or t
ggtccggaattttcgggatcgcaggccaggccaaagccctggtacccgcgcggtgcgggcctcagtctgcggccatgggggcgtccgcgcggctgctgcgagcggtgatcatgggggccccgggctcgggcaagggcaccgtgtcgtcgcgcatcactacacacttcgagctgaagcacctctccagcggggacctgctccgggacaacatgctgcggggcacagaaattggcgtgttagccaaggctttcattgaccaagggaaactcatcccagatgatgtcatgactcggctggcccttcatgagctgaaaaatctcacccagtatagctggctgttggatggttttccaaggacacttccacaggcagaagccctagatagagcttatcagatcgacacagtgattaacctgaatgtgccctttgaggtcattaaacaacgccttactgctcgctggattcatcccgccagtggccgagtctataacattgaattcaaccctcccaaaactgtgggcattgatgacctgactggggagcctctcattcagcgtgaggatgataaaccagagacggttatcaagagactaaaggcttatgaagaccaaacaaagccagtcctggaatattaccagaaaaaaggggtgctggaaacattctccggaacagaaaccaacaagatttggccctatgtatatgctttcctacaaactanagttccacaaagaagccagaaagcttcagttactccatgaggagaaatgtgtgtaactattaatagtaagatgggcaaacctcctagtccttgcatttagaagctgcttttcctaagactcctagtatgtatgaattctttgaaaattatattacttttatttctactgattttattttggatactaaggatgtgccaaaatgattccggatactaaggaggcatcggttggaaatcatcataggtggtggaatgcaagttattcttccaaaaacatcagccgaagttctgaaaccttttaaaacatttggtttagaggccaaaattaaaaagagcgcttttgggggagacat

SEQ ID NO: 10743 - DNA, 489 bp, Homo Sapiens
  misc_feature (57)..(110): n is a, c, g, or t
  misc_feature (131)..(299): n is a, c, g, or t
agagtcatctgaggtcatatgtttatactgggaaagtttttcgagagaggttctcannnnnnnnnnnnnnnnnnnnnnnnnnnnnnnnnnnnnnnnnnnnnnnnnnnnnngaccatgtaggctcaggtcannnnnnnnnnnnnnnnnnnnnnnnnnnnnnnnnnnnnnnnnnnnnnnnnnnnnnnnnnnnnnnnnnnnnnnnnnnnnnnnnnnnnnnnnnnnnnnnnnnnnnnnnnnnnnnnnnnnnnnnnnnnnnnnnnnnnnnnnnnnnnnnnnnnnnnnnnnnnnnnnnnnnnnnncgtgtgagccactgtgcatagccttgaaattgtatcaacaagctttttatactctgttacattaaaatccattgatttgtcctgcaatttgaatggaacttttactcatgcatgatttttataacatcatgcactgaccatctggaaaatactggttccagagaattacgtatatcatccaatttttatc

SEQ ID NO: 10744 - DNA, 268 bp, Homo Sapiens
  misc_feature (45)..(151): n is a, c, g, or t
ccccgagaggtgggccacgggtgtgcgccatcacgcccagctaannnnnnnnnnnnnnnnnnnnnnnnnnnnnnnnnnnnnnnnnnnnnnnnnnnnnnnnnnnnnnnnnnnnnnnnnnnnnnnnnnnnnnnnnnnnnnnnnnnnnnnnnnnttcaggcctggccaacagcaactatcttaataagaacattcattgactcaagtaattgcaagtccagaagtagacaggtttgggattatttgggtgcacccattctgaaccagtcat

SEQ ID NO: 10745 - DNA, 545 bp, Homo Sapiens
aagtcgaagagggggatctcatgcttgtgagtaaggagactttgggagggaaaagtgatggagtgatgtggtgcaaagggatctggtgatccaactctgtgtgtccctgcaactccgtaagcccagcagggaagatgacctcctggcccctaagcaggcggaaggcaggtggccgccgccggagcaatggtgcaaacagctcttctccagtgtggtccccgtgctgctgggggacccagaggaggagccgggtgggcggcacctcctggacctcaattgctttttgtccgacatctcggacactctcttcaccatgactcagtccggcccttcgcccctgcagctgccgcctgaggatgcctacgtcggcaatgctgacatgatccagccggacctgacgccactgcagccaagcctggatgacttcatggacatctcagatttctttaccaactcccgcctcccacagccgcccatgccttcaaacttcccagagccccccagcttcagccccgtggttgactcactcttcagcagtgggaccg

SEQ ID NO: 10746 - DNA, 728 bp, Homo Sapiens
gagaggtgggaccacgggggctaaaatggggcgaggggagtcgaacagacacacagccacaaactctgaggcccggctcttcagaaaagcatgctcaggggacccttggcactcagtggggagccaaggcctgtgcaacacagctgaacgcacacagacactgggatgggggcgcccggtgcccacgccaagtcctggcgcaaaccagaggcgtcagccagacagatgccaggcaggccggtggggtccttgtgggacacgggtctccccttctccgggctcgcgggggactggtccaggagggggagccgtgccggcaggggcaggcgcgacgggcgcggccctcatagcaccttgcagcagttgatgcagccgttctgggagccgtagcgcttctgcagcgcggcgcgcgtggccgtctcgaagacctcgcgcacgccttccttggtcttggcagagcactcgaggtagtcgtaggcttggatgcgcacggccatggcgcggccgtcatccgtgcgcacgggttcctgcttcatgcgggccagctctgtgcggacatgctcgtcgtgcgcaggtcttttttgttggccaccaggatgatgggcacattgggacagaagtgcttcacctcggggacccacttctcggggatgttctccagcgagtccgggctgtccaccgagaagcacatgagaatgacgtcggtgtccgggtaggagagcggccgc

SEQ ID NO: 10747 - DNA, 444 bp, Homo Sapiens
atcagaggatcccggagcacgggagcagaggagagaaccctctgagagggggaagaaagaatgagtaagaataactgaagaccttttgagaatccacaaatcttgtagctgcagcgggattcttcatgcatggtgattagccataaactagaaacagaaagaggccccatgcttttcttctgggacagtgaaagagatggaaacctcagctatcccatctcactctccagccagcctcaagtcctggggtggaggcagcattcaaggggagcacaaaatagatggagtcctgggaagtgggagaatataggcaggaggctgtcacgggaatcagaaatgaccctgggtggcttctcggacaggcctgcatcattctggaaacttcttcactttagcctccaagaaacaagcatcccgtggtcccacctctcgggtaccgagctc

SEQ ID NO: 10748 - DNA, 166 bp, Homo Sapiens
gcggcttccttgcagatgaagtgggttggaagcagccaatgaatctgagtgtttggaaaaatgagtctgaaactccattttttcttgggtttactgtaatatttccattacccaagactttcaggaaaaactggctacaagaaaaagagctatacaaataaaaaaa

SEQ ID NO: 10749 - DNA, 460 bp, Homo Sapiens
  misc_feature (17)..(17): n is a, c, g, or t
gtaaaatctgagacccnggatttttcaaagaattcttgctggtgagaaacctaacaaatgtaatgaatgtggcaaggtcttctggcacaattctcacattgtacaatattgcaaaaattcatgcttgagagaaacaaaaacactgagagtgggaaaccattatgacttcaaacattcatcaacatcagagaatccatactaaagagcatttataataattatatgtgatagagattttccgcaggccaaagtctcactaggcatcaaaaacttttttgatgaaaccatacaaatgtaacgtgcatgcttaagcttttacccaggcatcaaaaccggaacatcacagggtttatactggagagtaactacacaaagataatgtaataagcctttcagtgtaatattcatgattttgtcgtgagagatccactcaataaaaaccaggcaaatgtagtgaaaa

SEQ ID NO: 10750 - DNA, 644 bp, Homo Sapiens
aaaacacatatatttaatgtacagaattggaaaaaggacttcttgataataaacatatttcatgtaaacacaagctttcaatatctatgaatatttcattgcaaatacaccctaagttacttcttctctacataaaggagaaactccaagttctgctctttaggaagacatggagggcaagcaataccttaggaacaaccattgctatttctcccctttccttgggtgacctaacattttacagggactaacgacataaagaaatattagattccattgagtttaaacacaaatttcccactgagggcattaaatatttgatgcttatgagtgtgaataaataaatattaggtataaggcagattccaaaaccaactgaagtatgaaaacaaattggcatagatacctaacagtcagtaaaattaaatttcactactgagtatatgctacatgcttccttttctactccagtgggttctgctttttttgtctaaggtcttctgctggactctaagacagtcaattgcttaacatcaccaggttttttgtcaggggatttattttggaaataaaccaacttcttttttattaaagatcaaggttgtcttttttgctacatgcttctttccaatacatattgactc

SEQ ID NO: 10751 - DNA, 995 bp, Homo Sapiens
ttcccaggtcattacaaagaaaaagtgttatttcacgtaagagttaacacctttttaactaccagcgatttgacccatgccacgaagggaaaggatttcttgagaaaaccccaatatctaaggaaatggccccaatttatttatacttggagcaggacagagattaagggaacagtggacacctacactggagttgtcactcctggatctatcttggtggtgccttcagtccatgaaaagtgaattgtacagtaaagatggggtcagcatgggaggaggaccagcttataggagttaccagcctaaggctgtctggttcttagctcagagggaatcagaagctgagagtagaaagtagtcttctaattttagaacgttttccttccccgcatttatttaattttcccatggtggttaacagtaaatccctaaaagactgatttagttcattcatttattccagcaacaaatatttgagaacacactgtgtcccagacactgttctaaggactggcagcgaagtccaagacaaacagtccctaccttcagcaagtttgcagtcaagcaggatgcggatgctgagcattacaagggaaatgattattctgagagaggaagtatggggtgctatgggaacatacaaccagggacctaattttatgggaaagggaccagcccagatccaacacttgctctcccagtttacctccagtaggttctttttaacttgaactaatcttgtttggtggggtacacagtgaggaaaaagaagagctagtgacaaaatctaactcccttctcagtcttaagcaaggtgaaggcaagggagtagaagatatcaagggagtgagtggtggtagccaccaaaggagatagcagactgaggccctaaaaaaagaaaggaaatctaaatctatccagcaggaccagagaaagagtgctgagggtgattagatggaatccctgcatgtactctcccggcattctgaaaagaa

SEQ ID NO: 10752 - DNA, 524 bp, Homo Sapiens
ttttacttcacattatgatttattaatacatccaaaagaaagaaagaaaaatgattttgtcacactatatacagataatacatacagtgtttcatacacatattacatcagtttttacacaagaaaaatatacataaaaatgtaaacttttgtatacaaaaacccttaaacaaattaaacaaggaccagataacaaaaggagaccaattcattattatttcatcaaatttttaaaacagtaatacagtacattcattgagatatatatggaaaatgtgagccatctcttcttgtttaaagggaaattacaaaccaaaagtcaatcgcctcccaagacgtggtcctcccagcaatgccgcacccaatgccacaagtatgcctgtccaccagaactgggggctcttaccaaaacctgcccatctcctcatcttgctcctacagtctgtgcagaaacaagtggctcctaacttttgtgcatataattaaactcccagccactatgaacacaaatacagaggagagat

SEQ ID NO: 10753 - DNA, 553 bp, Homo Sapiens
  misc_feature (461)..(505): n is a, c, g, or t
ttcttccttaagtgaaagttatgctgcatcgaattgtaactgaaagtatagatccaacacatagagactgggttctagagagttctggtctatagaaaccccaaaactaaaatctctcataactcaagtatggaatactttttttaaagaaattcttatcatgggtgttgtaataatgaagacgaatttgactttatgcagtgttctgcagcatgcctcccccacatctcatagcaccaggttgtgtctgacctgacataccctgcagctctcagctggctgcagtaacattttgtgggagaaagaggagctggagttacagaaatgattgtatcttggttctcagtttttagcccttgagaggacatacttttccagcctcatgggtatggcactcttaattaaaatttcagtgactgtttactggatgaggcagatttttcacatttttgcaaattaannnnnnnnnnnnnnnnnnnnnnnnnnnnnnnnnnnnnnnnnnnnngtaaaagcaagtgaaattttaataaacttctgtaattaccaaaaaaaa

SEQ ID NO: 10754 - DNA, 383 bp, Homo Sapiens
ccttaataccccaagctactgggggagcttgagccaccgagattccttgaccccaaaggggttgggcctatgttgactggaaatcacaccactgtactccagcctggatgacagagtggagactctgtttcaaaaaaacagaaaagaaaatatagtttgattcttcatttttttaaatttgcaaatctcaggataaagtttgctaagtaaattagtaatgtactatagatataactgtacaaaaattgttcaacctaaaacaatctgtaattgcttattgttttattgtatactctttgtctttttaagacccctaatagccttttgtaacttgatggcttaaaaatacttaataaatctgccatttcaaatttcaaaaaaaa

SEQ ID NO: 10755 - DNA, 347 bp, Homo Sapiens
ccttacttgcaggactgaggaatgaaattgagaaagaacctttaatcattagaaaaggacccaataaaactatacttaaatggatcattaatggggatttttttacattcgtgtgggatagagaataatcccatgggaaacaaacacattttgaatattttttaaagaagtagttctgattctaattttactgtatgtttaggcatcattaaggacctctgatttgaaggtagatttatgtgccagggactccaaattcatgacatgttttaaggctccatattccatgcaaaaatggacttactgagcatggtggtaataataagtatgtaaaaaatagataacta

SEQ ID NO: 10756 - DNA, 556 bp, Homo Sapiens
actttcagcgcagccggcgtttctgttaccccggccgcggctcttggcggcgggagaggcgcagtggctgcaggctgcccactgccggccacaagggagcagcgttccgcgccgccgcccaccggccctcccgccagctcctcagcctgctccctgggaggcaggctccagaagtcaccccgacggggggccttattaagtgcgagaagcctctccagcgagtcttccccgtgtgtcctcatctgcggcaggcaggagagggggagcaaacaggaaattccacagctgcctccagaaacattaaccacccctctctagtcttactggtattttttgtttccttaataaagctccagtctccctcatttgagcaatactctcatttcctctgatgtctggatgatcggcagggcaggaatctgagcgctggccccgtggtgaggccatgttctcataatcaggctccagccagaaaaataagaaacaccgcaacaggcttcagtatcagggctgaaactgctggatgaataaactatttattaaaaacggaaaaaaa

SEQ ID NO: 10757 - DNA, 679 bp, Homo Sapiens
ttaaacaaatcagcagtgctcttcctgttccaccaagccttatttatcttccaaaataacagcaatccaaaaatctgtgttcatggagatttcacagataatactgcctgtggtttctctcaccccgttctgcctcatgctctcgataaagttaattattttttatcaaatttgattgttttcccagcaccttctttacttgaaaacagttgctctgcagacactagaatattctggggctgaaatgtagtcatgcccatctaccgtgggctctgcgccacctttctcaccctgcatgccttctaccaccacctcactgcccacacctgtggctcatgccaagccggcttctctatccactgttacatctagtagcaaaggcaaaaactcgtctggctccttttgtcattaactgccaaggtgataggtccaccactgacgggcttccgtcccaacttagtagctctgatctgcctcctagacaaatgcttaccaggtttggcccatcagtaaatacctggtttcattccgctgttactcagcaataggaactgtccttaatagcaaaatctaccttgtacattttgtaatgctgtcatcaatttgctagtttcctgagtaaatcaggtatgccttgcccccatgaaaacctggtgtaacaatatccaaactaaaaaat

SEQ ID NO: 10758 - DNA, 211 bp, Homo Sapiens
cgtgggttccttgcagagcggacaataaagtggcaggcctgtccccccaccccttaatgctgagcccagccacgtgacttgctgtctctccctccgtgcctttggctgtgccatggctgcgcctgcaggagggatgcaagagaccacagagcagaacacaggtccgacctctgcaccatgagcatcccctcggccttagcagcccgcgggg

SEQ ID NO: 10759 - DNA, 409 bp, Homo Sapiens
catcggaacccaatgagccctgatcaccccaattcaaacaggcgttcttctccaaattttctggcacttaccaagtgagacactcatttgacatttatcacattttgtcctttatggccagttatttgttactgtgtttgcattgcccttgccaatgtgatgataatactgtcctctttccatagaacactgtcttctcccctttccagctgtccaactcctactgaacactcccaggcgcagctcagtagtcacgcccttccctgggcacccacaatggctttttgtgcgtcataatttgagtcaattaaccagaatgccctccctataaggctagaaaatctatctacaaagtcttagcatctctggagatgtctagctcattgggttccggtgggggtcctctaaa

SEQ ID NO: 10760 - DNA, 421 bp, Homo Sapiens
gacccctcacccgacggggggaggggaagaacaccaatgtcctagctgtattatgattctgcagtgaagacattgcatgttgttttcactactgtacacttgacctgcacatgcgagaaaaaggtggaatgtttaaaacaccataatcagctcagggtatttgccaatctgagataaaagtgggatgggagagtgtgtccttcagatcaagggtactaaagtccctttcgctgcagtgagtgagaggtatgttgtgtgtgaatgtacggatgtgtgtttgcgcgcatgttcgtgcatgtgtgactgtgcatgttatgtttctccatgtgggcaaagatttgaaatgtaagcttttatttattattttagaatgtgacataatgagcagccaccccgtcgggtggagcgggtaccgagctcg

SEQ ID NO: 10761 - DNA, 152 bp, Homo Sapiens
ctccacccgacggggtggggccatcatcagaatttgcacaggctgctgggaagagccatggctgtctgctgggaactctgctggggcaagcaagccctttgactctcctgcccatctcaagaatatttctaaaatgttttaaccagcaagtt

SEQ ID NO: 10762 - DNA, 553 bp, Homo Sapiens
gttgatccccgacccgacggagtggggaaggagaatggtggtggccatttccacacacagtttgttgtgtgctcagcacggctggatgcggatcggaagcactcgctgactgactcacagaagaggacagaagctgctaaggaaggcagcggagttcaaagagcaggctccaaccgggggctgggatgacggacacacagcctcgattccagggggaaaaagtcttagtcgatactaattaaaaagtgttaatgatttttgaaaatcagattacatctataaaagatgaaaagcaaacacttaaaacaatctaacgggggaacataaaataataaaaaatcaaatgcagatgggatttcacaaagaggagatttgaatcttttggtctaaatcagccaatattttaacattaactataaattattaaaatatagtttgcttatgcccatccttaaaatgcagaatctttgaggaaaaatataggcatatcaggaatacagactcttgtaaaaaatttaaaaagtcagtaccaccccgtcgggcgggtaccgag

SEQ ID NO: 10763 - DNA, 586 bp, Homo Sapiens
gctctagtggatccccgctccacccgacggggtggctgacgaggaggagcctgacgaggaggacggttagccctgcgtcagtgccctgcagatgatgggcagcaacgactatggctgtgatggcgatgaggacgacggctactgaagtgtggcctccaggcaggtgatgtcctggcagggggcctcgcgggtctcctcagcatcagacgggcttccaggaccgcagcaggcaggccccagcgccgagactcctggtgacaggtggcacctgtcccacagccctcgtcccatgtggaacttaccattgggattgtgtttctattcagcaagggaaaccggaccaagcgtctgcatgtgtgtgatcagatgtgggccgggtgtgtgcagggctgggtcccgctgcctgccgtcgactcatccaaggaccctccaaggctggcagtgtggtgttgctactattaaggaaacaggcttggggcagccccactgctggtccaagtgtgtggagggctgagtgtgctggccctgtgactcaggaccagctctggagtctccagcccaccctccgcgccgtcccaaagcacag

SEQ ID NO: 10764 - DNA, 202 bp, Homo Sapiens
ccgctgccgtacagttgcgtgtgtttcctcaggccagtgctggtgtgcgctcccagcaacatcgcagtggaccagctgactgagaagatccacatgtcgggcctgaaggtggtgaggctctgtgccaagagcagagaggccatcgactcccccgtgtccttcctggctctgaacaaccagatccgcaactggtacggcggga

SEQ ID NO: 10765 - DNA, 450 bp, Homo Sapiens
cccgccgtaccagttgcggtgtaaattcgaatcccccatgggacgcaaaataaatgtggactcacatttattgcggtattgtgttgggaagaaaagtgccatcatcaccttagaaattaagacgaattcaatccaactcacattgcagtatttacacagtagctctttttccaatggtcaaatgaactcacagattggtcttggttactgtataaaaacctacaactactaccagggcatcccttcttacagacatgctttcacttttcagaattacaagtgtgtggcaggcaataaataatgtagataaaggatttgaaaaaaatatatatatctgcctgaggcctcctgagtggtgcagtggtctaaggcattgcattgctgtgccactaggattctgggttcgagtccaggctctgttgcagccggccgcaacatggtacggcgggg

SEQ ID NO: 10766 - DNA, 514 bp, Homo Sapiens
aacgatgggtgctgtggtcctctgcaggccctcaccccttaacttcctcatacagactggcactgggcagggcctctcatgtggcagccacatgtggcgttgtgaggccaccccatgtggggtctgtggtgagagtcctgtaggatccctgctcaagcagcacagaggaaggggcaagacgtggcctgtaggcactgtctcagcctgcagagaagaaagtgaggccgggagcctgagcctgggctggagccttctcccctccccagttggactaggggcagtgttaattttgaaaaggtgtgggtccctgtgtcctcttccaggggtccaagggaacaggagaggtcactgggcctgttttctccctcctgaccctgcatctcccaccccgtgtatcatagggaactttcaccttaaaatctttctaagcaaagtgtgaataggatttttactccctttgtacagtattctgagaaacgcaaataaaagggcaacatgtttctgttgaaaaaaa

SEQ ID NO: 10767 - DNA, 574 bp, Homo Sapiens
  misc_feature (491)..(509): n is a, c, g, or t
ccccctccagtttgactgggataccagtggccttactaacccctttagatgctagtgagagttccactcttctgaaccttgatttcttgggcccgtggatgacagtagctctagcagcagcaccacaatcccaggtgtggatccggagttgtatgagttaacaacttctaagctggaaatctccacctcaagcctcaaagtgactgatgcatttgcaagactcatgtctacagtagagaagacaagcacatctaccagtaggaaaccgaaaagagaagagcacctaagtgaagaagctatcaaggtgatcgctggccttcctgacttaacattcatgcatgccaaggtgttgatgttcccagccacgttaacaccttccacaagctctcaagaaaaagcagacggataactgatgtgaattggacagtttctattgcttttccttttttccatcccttccctaccatcaaaagcatacctgctctaatttnnnnnnnnnnnnnnnnnnnttcaagttcagctgatttgttggtaagccgcgcagtcagatcgggggatctctagagtcggcttc

SEQ ID NO: 10768 - DNA, 394 bp, Homo Sapiens
ggaatgtaatttcaatctttttcttgatatatggcttgagaatgataatgtaaaaggaattcttctcttacttcaataaaatgggttttaacataactttagattcagttaaatatacaatattgaatacctatagttgactttgggatggggactttttcaagtcattaagagtgtttgtttaaggtgatctcattgatggtagttctcagccgtctcaaaaactgcaagctaatcagtcagacattctttaatgaccccaattttttcactttaattgttaccatgttttctatttttactgatttttgctaaagcatgtaagagtgaatttattatagcagtaatcttgtgtttctcctgatgtgcaataaatcaataattcaccagcaaa

SEQ ID NO: 10769 - DNA, 311 bp, Homo Sapiens
tatcagtggctttatgaagtaaagttaaaacaacattaggaaatgtgaaaatatttgtgtttgttttgtctgactaacttgctgctaaatgctatctttaggtgtgtgaaagttctttgatatgttattgtccttttacatcttgttaaatagccattgcttttgagaatcagatagtgtgttgtttaggggttaattgtgtctatatctttcaaaaacttttatattatgtattataagaagttacagtagtaccattttgattagtctgaatgttttcaggccttgaaataaattttgactaagtgaaa

SEQ ID NO: 10770 - DNA, 477 bp, Homo Sapiens
  misc_feature (14)..(14): n is a, c, g, or t
atctgcgctgtccntgcagaaagccacatctacccaaagggttgcgcgcagggcatacagaaagtggctgcacaacacccttattttccatattgggcatttgctggggcgtcggcctactcgagctcgggttcatgacgctctcgatattcctgtgcagaaacctggaccacgtctacaaccggctcgctcgataccgttaagccccgccctccccaaagtcccgccccgcccccgtcacgtgcgctgggcacttccctgctgcctgtaaaaatttgtttaatccccagttcgcctggagccctcagccttcacattcccctggggaacaaagtggatgcgtgcccctgctgctgtcacctctcccacgggacctggggctttcgtccacagcttcctgtccccatctgtcggccaaccaccacccacaagattatttttcacccaaacctcaaataaatcccctgcgtttttggt

SEQ ID NO: 10771 - DNA, 249 bp, Homo Sapiens
gaaaatgtacaaaatatctatcactactgagaggaggttaatatttctgtgtagaaatgaaaattggtttgtttttagtatttagtgtagatgtacacattccagcaaatgtatttgcaattatgtggttgatgcggtgtgatataaatgtactttttcaatgtatacttgcacttttaaaatgccgtgttttgtgcttgacaataaatgatatgaaacctcctgtgtcggtaagttgaatatgtggta

SEQ ID NO: 10772 - DNA, 469 bp, Homo Sapiens
ttgcctcttccggacattcatgcttgtgtcccaagcattcccttggtgaattgtcacgtgagtggggccagtaagagtgaagtctgctccttgaatccaagccccatctggggcttctctaacaaatctgtagtaagtatacggactccagggagagaggctgggcttctctctctcatttgttccttgtggaacaaatgggcaaaagaagtgtgaaaatgtgggtgtttatgtctgtgtatatgtattttttacttcatgcatggcttctcctccaacttcctcctgcacttaaaaagggccaggttccaaattagacttgtaaatatggtgttagtgtttgacactactcctggatagttccaaacatcttccttgtggcaggtttcctggctgagcccgagcttccctccctgtttattgtgttcatgatcagtatgtgtttccatataaaacttttcacaacgga

SEQ ID NO: 10773 - DNA, 512 bp, Homo Sapiens
tgggcccatatgtgtgaggagcttgtctaattatgtaggaagcaatagatctcggtagttacgtattgggcagatacttactgtatgaatgaaagaacatcacagtaatcacaatatcagagctgaattatcctcagtgtagcttcttggaattcagtttctggaactagagatagagcatttattaaaaaaaactcctgttgagactgtgtcttatgaacctctgaaacgtacaagccttcacaagtttaactaaattgggattaatctttctgtagttatctgcataattcttgtttttctttccatctggctcctgggttgacaatttgtggaaacaactctattgctactatttaaaaaaaatcagaaatctttccctttaagctatgttaaattcaaactattcctgctattcctgttttgtcaaagaattatatttttcaaaatatgtttatttgtttgatgggtcccaggaaacactaataaaaaccacagagaccagcctggaa

SEQ ID NO: 10774 - DNA, 505 bp, Homo Sapiens
  misc_feature (312)..(312): n is a, c, g, or t
  misc_feature (318)..(318): n is a, c, g, or t
  misc_feature (334)..(334): n is a, c, g, or t
  misc_feature (368)..(368): n is a, c, g, or t
  misc_feature (376)..(376): n is a, c, g, or t
  misc_feature (396)..(396): n is a, c, g, or t
  misc_feature (406)..(406): n is a, c, g, or t
aacgtgaccactagcctcctggagccagagagtggggctcgtttgccggttgctccagcccggcgcccagccatcttccctgagccagccggcgggtggtgggcatgcctgcctcaccttcatcagggggtggccaggaggggcccagactgtgaatcctgtgctctgcccgtgaccgccccccgccccatcaatcccattgcataggtttagagagagcacgtgtgaccactggcattcatttggggggtgggagattttggctgaagccgccccagccttagtccccagggccaagcgctggggggcaanacgggnatcagggaaggggggnaattttggcaaaaggcagaatatgggaatggggnaggtaggncccacccgttaataaacgtnatagacatgncgtcaaaaaccggaagtattttctgtacatgtttggttaattttttttgtacatgatttttgtatgtttccttttcaataaaatcagataaaaacagtg

SEQ ID NO: 10775 - DNA, 184 bp, Homo Sapiens
gcattgtatgtcaaaagcgcttgttctttcgtgcatgtgtaagatttaatggttccattgtattatttgaccatgacattttggagaaacattcccagctgtaatgttgtgtatggtagttctcactggatgctagagttttcaaaaccactattcttctaataaattttgttgtgaaaaactg

SEQ ID NO: 10776 - DNA, 307 bp, Homo Sapiens
gaggtgatctagaggaccccccgccgtaccagttgcggagacttgctttcattcagccacatgagcattagtgaggttgggcactgatgttgggcgattaggtctggcttgcagtcgacgttccataggtgtttgatagggttgaggtcagagctctgtgcaggccagtcaagttcttccacaccgatctcaacaaaccatttatgtatggacctcgctttgtgcacaggggcattgtcacgctggaacaggaaaaggccttcccgcaactggtacggcgggcggatcctctagatcacccagcaca

SEQ ID NO: 10777 - DNA, 176 bp, Homo Sapiens
gagctcaggtaccccccaacgtaccagttgcgtacgtgtaggtatgtacggcaaggaccaaatcggaaaagatagatgctagacctacaaagatagatgctttgtaggttagcagtaaacctttaaatcatacctagccttagccgcaactgtacggcggcaggatcctctagagc

SEQ ID NO: 10778 - DNA, 241 bp, Homo Sapiens
gtgcttagaggatctcccgccgtacagttgcggccggctgtgacagagctggacttgaaccaggttctctagtggcacagctaccactgtgattcagtgccttagaccatcacaccactcgggggtcccgaacgaaaaggcatttttaaacaaatgaccctgctatacaatgcattcgaaacgtgtgcttcccaaagagataaatatgcccgctcacgcaactggtacggcggggggtacc

SEQ ID NO: 10779 - DNA, 321 bp, Homo Sapiens
gtcctcccgctcgtacagttgcgacatgtgggacgctgacgctaaggtgcgctcgatggccaagccggtgccggcaaggctggagggcgaacgcctgctattcgaccgcccccgaatatggcgtcgcgccggggcaggcggcggtgctgtatgccggcgaccgcgtgctgggcggcggatggatcgaggggacggaggcggcgtaacagctcctccccgtaccggggaggaacttgcagctatcgcacgcaccgcctacagccccgacccgatgctgcccgcgaatatccaatgtccgcaacatgtacagcggataaccct

SEQ ID NO: 10780 - DNA, 415 bp, Homo Sapiens
cccccgccgtaccagttgcggaggaggcgagcaccatagggagcaccgttgaaaggatcacggatgtgcagattaaataagtggcaaaaccattctcagttgtcaaaaatggccaaaaacacatccctatatttccgtattatagagggcaggagccttccagtcaaagacgtgtaagtatgtcttaattgtacttattcaacaggcagcaattactcctatttgcttatttatgtttctcgtggtgtgaagtactcgtatactaggatgtacacttgtttggaagttaataatacctttgttttacagcacttattgagatattgatggtaaaatgtgactccaagtagcctagacttgacaggtgtttaagatatttctatcaataatgtatttcgcacttgtacggcgtacg

SEQ ID NO: 10781 - DNA, 172 bp, Homo Sapiens
ctgccgtacagttgcggagtccattacaaaagatgaatcctgaattcaaacatggtcgtagaaatgtgcacatgggtttattgtcatatgccaagacaggggaacttgcttcattcatcatgcatgcatatttacacatccgttccacctacagcgcaactggtacggcggg

SEQ ID NO: 10782 - DNA, 207 bp, Homo Sapiens
gctatccgccgtaccagttgcggttcccatcaagaagatggtatctccttcttttacatagccatgatcgagtgcataggctaaaccaaaaggtaccgcaacggaaaccatatttccataatccgtaacgagattaaggtacttgtcttcatctacacccagttttcccataaaccaacaggaagagcgcaacttggtacgagcggg

SEQ ID NO: 10783 - DNA, 227 bp, Homo Sapiens
gcggtgattgaggatccccccgcgtacagttgcgccagatggaagtgtaaccttcactccagacaagcagttggtaggcaaaccagatccagtcaccgtaaaacgcgtggataagaacggtactccagtcactgcgacttacagtccagagtttactaaggtgactccaactggaacaggcgcaactagcacaggtcctcaaggacttccgcaactggtacggcggg

SEQ ID NO: 10784 - DNA, 187 bp, Homo Sapiens
ccgcaggcgatcactgtgcacctgcaagccggcactgagtgaagatcgcgacgacggcatcggcaatcgcatctggatgttggccgttcgaacgacggagccaaagctcccaccagaattcagcgtcggcatcgctcaatccggtcgaaagcaacgcgcaactgtacgcgggagatcctctagatca

SEQ ID NO: 10785 - DNA, 363 bp, Homo Sapiens
cccgccgtaccagtgtgcggaggatcggcgtcaagacccaggctctgagctgggtgtcgagcttggagggaaacatatagtgttgaatgctgaactatagtcaatgaacagcattctaacatactgtaggttttcctcttgtccagatgtgttaattgcgatagaaatggcctcttccgtggatctgttgcagtggtaggcaaattggagtgggtccggtgtgtctggcatgctgtccttgatgtggaccatgatcagcctcttgaagcacttcatgatgaccagggtgagtgtgacggggcgatagtcatttggcaatgtcaacattgtttttcttcgcaactgtacgcgataaagctccgc

SEQ ID NO: 10786 - DNA, 613 bp, Homo Sapiens
  misc_feature (75)..(75): n is a, c, g, or t
  misc_feature (488)..(503): n is a, c, g, or t
tgcgggaagtgtaagccaaggccgcctgaaggcgaggagacgagtttctcgtgtccccccaagattctgaaggcncagctccaagtctgacgagaggggagggcactacactgttccgccgagtgtttgtggtggcagctgggactgttgaggtgtgaacgtggccctgaagaggccacagcacgccgattcgtcatacagccggcatccgccaccgagaccaccaagctcacagccgactcccaccccagctaccacactgacgggttcaactaaatccaggaggagctgtggtcagaggaggagccggcgcctggccacgccaaccttagaatcatgaactgtagtcacagagatgggaaggcagcctcctgcctgccctggccttgctggggcccctcctgcctccacgcccacccagcgtcgacccttgacccacgaagtgcgtagcatgcagtatttaaagcagtgtagctacggtcttctgnnnnnnnnnnnnnnnnaatagcatgtatggggttctgttccatgtctgtgttgtggacattccgcggcatgaccgcgtgaactgcacggtggagctgcctcagggctgtcggtccggtcaacttgt

SEQ ID NO: 10787 - DNA, 549 bp, Homo Sapiens
  misc_feature (166)..(166): n is a, c, g, or t
  misc_feature (187)..(187): n is a, c, g, or t
cggtaggaaggcaacaaaacgtgggaacctggtgactaagggcctggtgcaaggacttgggaaatgtcattgataatagatggtgggttttcccccctttagaaatgttggatattaagtgatataaacacttcttttaactccgaaaatcttctgagaaatcacnaaaattcacggtatgcttggnaacgattgagattttcttaggtagatgctgaatagcctagacatccaaagttggtgtgaaccaaaatagagtcagctgacccagcatcagccacactctgggttggaaaatgtttgcctgttggaattaatttaagcttaagtatatatcaacattattttattgtgcaattaaaacaatacaaattcatggttttttaaagttaaaaattctaaccactgtaacaacagtttttgtgttattttctgtattaaacatcttgttgcacgcatttgaggtcatcagggtgcaaaatttgtattcctgaaaatgtcatatattttcattaataaataacctaaatatgataaaacataaaaaaa

SEQ ID NO: 10788 - DNA, 394 bp, Homo Sapiens
caaatgcattctttttatttgagaaggatgatctcaaggcagtgccctttgggaaagatgtctttcatcatcatgtacatcaggatcaaccattactttcagcaaagtacaaaaatacacacgtcagtgacttccgtacaataaatacataatcatgcatcccacaataaaaggcaccgaaaactggtcacttagtagtcataaaaattactagctacattaacaaagccaccaaaattatctgtacaaggaaatgtaacaatatattccaaaggtgaaaacacataaaacatctttaaaatagtaggcaataaatatctcaattgtatatatttttaaaattatgccattgtaaacagcatgtaaacaaacaaaaactcacgttgtcttacca

SEQ ID NO: 10789 - DNA, 301 bp, Homo Sapiens
gcagtagggaagggtaggagaaactgcctggtgggactgtgataaaagagcctgcaagagggtataaaatctccatatatctaaggccatctggggcttcactttctcttgccagcccacactcagcctctaccaacttataaactatctagcccagttattcttatggcattcatgagtcaaccttatgtaagcaagtgctcatgccccttttttcctagcaagggagggtatctcttacatttctggctatttggttgtctttccacttcagttctctggcagattcaagaaaagtcat

SEQ ID NO: 10790 - DNA, 348 bp, Homo Sapiens
ataaatgactttcaacaaggcatatagtctcttgtaatatatatgtatactattacattgtacagaatctgtacttatgtttggtgtgtaatataccaattagttttatataatatcctcataagctattctaatttttgagagaaacacaaaaagttatagattgatagtctgtataatattagacaaaatagtaagctttataaaaagttatttttggtaaatggtaaggaatttggggtggaatgtgatgagattaaaatgtagctttggtataacttcatgtgtatttcaaaatatactgaacgtcaacatgatttgaataaagaaaatgtattttctacttga

SEQ ID NO: 10791 - DNA, 569 bp, Homo Sapiens
ttcccgcattactgctgtttaatagaacgtgattagtcatcgccgagaagaaagcatattagccgaggaggtagtcacgcggcacgcgccggtgattgccacgatgtgattgcaatactcttagaagcaccatattatcccagacatgttctttcaagcccttggagccctctctaaattcactgtcatcatttagtatctgtttaatttttcagtccaaagagaggaaatcagtcgctgagtattatttgactccggtctccttggtgcaaaaacaaaatgggaaaaataaataagaataactcagaaactcaaaaggaaaccacaaattcagctaataatagcatttcgagtatatttcgtaaactaaggaaatacacaaaaggctgttttttccgactgtaagagatatttgatgtccttttgccgaggtggatgtgttagtctcaggccctcctggaccacgttgcccaagtcacacaggcttctgtgttatgtatttagataagatgtgtgaaaatatatttgaataaaagaagttcataaatatgcattgatttttgtacaga

SEQ ID NO: 10792 - DNA, 398 bp, Homo Sapiens
  misc_feature (196)..(322): n is a, c, g, or t
tgcgcgctccagcgtcgactgcaggatcgccagggtgcgggcgctactcagggccacagggcctaggtcctcccccactggcccccctaataaagtgggcgcgagaggaggctgctgtgtgtttcctgccccagcctggctccctcgttgctgggctttcggggctggccagtggggacagtcagggactggagannnnnnnnnnnnnnnnnnnnnnnnnnnnnnnnnnnnnnnnnnnnnnnnnnnnnnnnnnnnnnnnnnnnnnnnnnnnnnnnnnnnnnnnnnnnnnnnnnnnnnnnnnnnnnnnnnnnnnnnnnnnnnntagcctggcgtggtggcccatgcatatagtcccagctacttgtaaggctgaggtgagaggacacttgtgcccagga

SEQ ID NO: 10793 - DNA, 569 bp, Homo Sapiens
gatagctccctgagctgggccatctgacttctacctcccatgtttgctctcccaactcattagctcctgggcagcatcctcctgagccacatgtgcaggtactggaaaacctccatcttggctcccagagctctaggaactcttcatcacaactagatttgcctcttctaagtgtctatgagcttgcaccatatttaataaattgggaatgggtttggggtattaatgcaatgtgtggtggttgtattggagcagggggaattgataaaggagagtggttgctgttaatattatcttatctattgggtggtatgtgaaatattgtacatagacctgatgagttgtgggaccagatgtcatctctggtcagagtttacttgctatatagactgtacttatgtgtgaagtttgcaagcttgctttagggctgagccctggactcccagcagcagcacagttcagcattgtgtggctggttgtttcctggctgtccccagcaagtgtaggagtggtgggcctgaactgggccattgatcagactaaataaattaagcagttaacataactgg

SEQ ID NO: 10794 - DNA, 288 bp, Homo Sapiens
cccgccgtaccagttgcggaccgtggtgcaagagaggcagaacagatgaataaattacagagcacatgggaaaatagagtttctgatatgatcaacagaaaaaatagcctacatgaaagtaagggagagagaaaacattgctgtttttagttgaagttagttacaagtgaagtgtcctggctttacatcagttcaaacaatgtacttgtgactggagcgaatgcctggaagctactgtatgtgggagaccagatcagctcaatcagacctcgcaactggtacggcggg

SEQ ID NO: 10795 - DNA, 283 bp, Homo Sapiens
gctggagacgccacggtgtgcggacggtgagccgtctgaccccttctcgacgacggtcccgacccactcgtcggtggcgccgatgaagcgggcgacgtccagcgacgaaggacgctggtacaccgtgccgggcgagtcgtcctgcagcacccgcccctcaccgagcaccagcagacggatgcgcaggctcatcgcctcatgctgatcgtgcgtgacgtagacagcggttaagtggaccttctcgtgcagcgccaggagctcatcgcgcaactggtacggcggg

SEQ ID NO: 10796 - DNA, 203 bp, Homo Sapiens
tcccgtcgttactcaaccgaacatctaccgctcaccgaaaacataccacacagtactcctagacttgatcttctgtggtcaccaccactgagaccaggtcacacagtcactcccagcttcacgtcgttcgatcaccaccacagagatcacctcacacagacttacctgttcggtggagcgagaggggagctctagagcgacct

SEQ ID NO: 10797 - DNA, 192 bp, Homo Sapiens
ctcaccgaacatctacccctcaaccgaacatcgtcctcgtcctcctcctcagtgcatcacctctgggcgctccagctcagccccccgcggagcggggctcgtctacaaactctgcttccccttccatgaggtccacggggctctcctgagaacccgtggtgtcaccaccaccagtgtacggttgagcggaga

SEQ ID NO: 10798 - DNA, 199 bp, Homo Sapiens
ccctctccgctcaaccgaacagagcggtctgggatagagcctgaactttgggtcccttggggcccaacaggcaaggttcagatctgggctctaccacaaaccatctgtgtaacctgaacctccctagtcttcagtttcctcatctgctttaaaaaattgctagatcatagttctatataaatgttcggttgagcggaga

SEQ ID NO: 10799 - DNA, 434 bp, Homo Sapiens
tttccgcgcaaccgtacacggagcttctgccttgccctgggtcctcaggcagctgctgggccaagcacacagccaaagggggacacctgtgcccagggaaaaagggacatgtggccaacagccctgattctccaacctcgtctccaaatgggcagggcgtgctaacctgtaggccatgggcctggagtctggtcagggcccccagggcagttcagacaggcaatgggtataggtggtcgccagcagctccagccagtggtgtgggtgcagctccaggtagcacagcaaagtctcgatggctgggggcagaccagggctcagcggacgcggggacagcccctcttcacccctgtggcttaccccaggttcggaggagcgcagcgatccgctctgtgtcctcgcgccggttgcagtaaatgataatggaatcgaaa

SEQ ID NO: 10800 - DNA, 92 bp, Homo Sapiens
ctctagaggaccccctctccgctcaaccgaacatataggacctgctatgtgtaccaggtccctaaaacggaaacatgaaaaagcatagtcct

SEQ ID NO: 10801 - DNA, 419 bp, Homo Sapiens
agctgaaaacctaagtcctttatgtggaaaacagaacatcattagaacaaaggacagagtatgaacacctgggcttaagaaatctagtatttcatgctgggaatgagacataggccatgaaaaaaatgatccccaagtgtgaacaaaagatgctcttctgtggaccactgcatgagcttttatactaccgacctggtttttaaatagagtttgctattagagcattgaattggagagaaggcctccctagccagcacttgtatatacgcatctataaattgtccgtgttcatacatttgaggggaaaacaccataaggtttcgtttctgtatacaatcctggcattatgtccactgtgtatagaagtagattaagagccatataagtttgaaggaaacactaatacctcgtcactatga

SEQ ID NO: 10802 - DNA, 226 bp, Homo Sapiens
ctagtatgaaagtataatgttagctagaataaattatatgtggtctacattgttgaattagtttatttctaattattttatgagatttagtctttagtctgtgttggtagagagtgcactggtctcattgttgcggcctccctcctaataatgtaggaaaaacttgaccatttttggctgattcaataaatgcagataatgacaactaatgttttattcttaacat

SEQ ID NO: 10803 - DNA, 763 bp, Homo Sapiens
gtggcacgtagtcattagcctgtgcactctcttccttggctgtttggtgctggctcctggggactacaaatcccagagtgcggtgtgcccggcctcatttctgagtagatcccgcttgggggacggtggtgtatggttacggagctgtgcgtcttgggacatgtagtagcccaggtcggcttgtcactcgactgtgagatggggagattttgtcttttgatttatccctgtagggctggcagggattgtagatgaagggggaatgatctgagccttggttcccctgacacgtcttgctagccccagggttagagtgggcagggcagagccgcgcagcacctgggagcggtacctttcccttgggcagcctggggtcccaggaacaagccagggcgagtggcatgtctgcctgagcagggtgtggccccagaaagctgaggagtgtgggctggcagagagcttcgagggcaaggccacccgcgggggcgtgtgtgtggtggggcttggcatgtgatggcagctccaggcatgccgctgcttgtatggctttctttggcctctgaccctgctgcccattctttccaacatcacagatgaactgcctctcctcctccctgcctggggagcccagtggccagggaggggagtggtggagccagtcgctgtaacactgagcctcagagacgaaccaaaaccagctgggctgagctcagatccagggggaaatgctggaagtcaataaaactgagttttgagagcttga

SEQ ID NO: 10804 - DNA, 526 bp, Homo Sapiens
tggggtccccctccatattagaatttggagaaaaaattgtgcccagggaagaccttgtggacgattttaacatcatcacggagggcaccgcgtccgtgctgcagcgccggtcccccaatgaggagtacgtggaggtggggcgcctgggaccctctgactacttcggggagattgcactgctgctgaaccggccccgggcggccactgtcgtggcccgggggcccctcaagtgtgtgaagctggaccggccccgcttcgagcgtgtgctggggccctgctctgagatcctcaagaggaacattcagcgttacaacagcttcatctccctcaccgtctgagcacagctcccgccctgcagccccagctccccagtgtggtggccgtgccctgctcgtctgtgtcgggggcccgggagccgctgtgtgaggtgtgggccgggtggggctgggtcccggcagcgtgaggactgccccttccccggactcactttttggaataaatgatcaccttgtgcatttccaaatca

SEQ ID NO: 10805 - DNA, 364 bp, Homo Sapiens
ctttatgagtttgtttggttttataaggcatttcaatgtacattctataaatacaagcactccatttgcaaacagatcttaagctaatattttctttcccattcatcttgccctccccctcctcccgccagctttaaagttcagtggagaagccagatggcaattcagacaaaggtatactcttcctgcttcatgggtggtggcacgggaatagatagcccttagccctttccctcccagtcccagctgagccctcagaccacttgcttcccacataacaatgtcgcctccatttccgaggaacatccttgcgtagagaatgaaatatgctgcaatcatttctgcatccttactcctcaccccc

SEQ ID NO: 10806 - DNA, 620 bp, Homo Sapiens
  misc_feature (13)..(13): n is a, c, g, or t
ctgagcttttcanagtcccgaaatggaggcggagaggtggaccgcgtggactatgacagacagtccgggagtgcagtcatcacgtttgtggagattggagtggctgacaagattttgaaaaagaaagaataccctctttatataaatcaaacctgccatagagttactgtttctccatacacagaaatacactggaaaaagtatcagatattttcaggaacatctaagaggacagtgcttctgacaggaatggaaggcattcaaatggatgaagaaattgtggaggatttaattaacattcactttcaacgggcaaagaatggaggtggagaagtagatgtggtcaagtgttctctaggtcaacctcacatagcatactttgaagaatagacttaacagaatcatgaaaactatagctttttaacccggattactgtaaatgtttgacaaaaatgaatatgcttttccttaaaaaatgaaaactttaatttttaccatccatttatgtttagatacaaaacttatttccatgtttctgaatcttctttgtttcaaatggtgctgcatgttttcaactacaataagtgcactgtaataaaaagttttgtatataaaaaaaa

SEQ ID NO: 10807 - DNA, 227 bp, Homo Sapiens
acagaaaacttagcttgtgtaattctgttagtttcagatttctctcctgtttttgcaaattgtgggaaagattgacaatgcaaatgtgtcaaagacatactgttgggtgcaatattaacaatattaaatgcaaatttctttggataaattatttctatattctgtaaatctgagatttaatgtatattttgtttaaaaaaatgatttagtaaaatctttgaaaagta

SEQ ID NO: 10808 - DNA, 626 bp, Homo Sapiens
gcaggataattttaagtgtatatattttaactgcactggtacattgaacatgtcagtgtcgatgccactggaccaacagagcattttgtggctatagggtgcctgataataatgtcttgatttttctttgggattcaactatatcgaaggtttttcccccagcagtatgggggcgtacaggtgatcgatcattaatgtcattgcaattgttattttttaaaataaatttataaaaataaccgaaaagtaatgtgacttttgaggaatctgcaactcctgggttctagtttgtgtttccagtgttgaaattttgatctcccccgacaagacttgtctgcatggacggtgtctctgtaaacagtatcaaacttgtaatgtctgagcctcttagctttatctccccttaatttcttcccttttggcccttccaccctgttgaggagattttttctgtcacctgcaggctgatcatacatttgatgctactactgaaagtgtttatcaaaatgtgatgaagtaattccatgaggaaaattagccgttatcacaaaaacagccttaagtattgtagaatttcaggtagtgaagatgtactatttacgttttgttagattttgttttggcag

SEQ ID NO: 10809 - DNA, 439 bp, Homo Sapiens
ggtgatctagaggatcccgcttacttaaccagtgtgaaatgtaaacccaaactaatttgaaaacaaatccaaatagggaaatgaaagataaaacatccctcattcattttataaaatagtaaattaaaattaagtttgcttctatgtttttaggttttttagaataaaatataagtgtcatgaaaatgagatattttgtatttagtaagcacacaagtgtttggaaatcaaacaacaaacttctgaataattcacaaagaaacatcaaaataaaacttagaatacattttgaattgaaagataaacatctgaagtgctgaaagaatagagatggctttagtctcgaaacttacatataaaaacattgaaatttcaatcagatggcaatgggtatgtgatttgataatctactttaaagtttatacaaaactgagaaccc

SEQ ID NO: 10810 - DNA, 426 bp, Homo Sapiens
ccgggaggcatggaggacgcacagggccccgagccagggcaggccagactccaggattgggaggaccaggtccgctgcgacatccgccagttcctgtccctgaggccagaggagaagttctccagcagggctgtggcccgcatcttccacggcatcggaagcccctgctacccggcccaggtgtacgggcaggaccgacgcttctggagaaaatacctgcacctgagcttccatgccctggtgggcctggccacggaagagctcctgcaggtggcccgctgactgcactgcattgggggatgtcgggtagagctggggttgtcagaggctagggcagtgactgaggacctgggcaaaacctgccacagggtgtgggaacgaggaggctccaaaatgcagaataaaaaatgctcacttagtttttaa

SEQ ID NO: 10811 - DNA, 314 bp, Homo Sapiens
gccttgtagtaactcaggttggtgtgtcccaaggacataatatgtgtccagaccctggcatacccgaaaggggcaaaagactaggctcggatttcaggttaggatccagcgtccagttcacctgcaacgagggctatgacctgcaagggtccaaacggatcacctgtatgaaagtgagcgacatgtttgcggcttggagcgaccacaggccagtcctccgagcccgcatgtgtgatgcccaccttcgaggccctcgggcatcatcacctcccccaatttccccattcagtatgaaacaatgcacactgggttaa

SEQ ID NO: 10812 - DNA, 498 bp, Homo Sapiens
  misc_feature (441)..(441): n is a, c, g, or t
actttaagacgtcttgctttccttaagaaagcaacacttttctttttatttatttataaaggctaaccatatccatttgtcaatattttcggctttaaggaaaatagtttaaaaaacataaaaaggtaaatacactcaagagtaactgctattaaacagttctgaacaggcagaaaatgtagactttcctttaacagaaaatgttaaatctgtaatagcagcataatttatatatagaaaaaagctggttttgaaaacccagatttatacccaaaacattttttttctgtacaactgcgtttacactgggaaataagtttcttcacattatgttcattcccatcaggtacaggtgtgagcttgagtttgatcagccagccctgagcgcaagctcagcgctcagcacaatcttcaatccaacaccatggcagaaagcgcatntagatctttcatgtatgggtgggccaccaagatctggtctattttcagtctttgctc

SEQ ID NO: 10813 - DNA, 458 bp, Homo Sapiens
cgcacagagaccacaagagtatggcagcacctgctgatggtggtgcctgggaacagcaagacacagcgaggctccccaacctttaggggaacacatgtgcacgaagctttggttcacaggcgcatctggctggctaagggcaacagtcacagtcaaatgactattcacagctgcagacaggaggcaagacagaagcaagtgtctaattatagcaatttgagttgagggtttcttttttaaaggtcaacagaagccaaccttggtcacacaggtagtgagggaaggatatgttgtgggcggcccacaggccaacattgttttccgccaggctgggcggacgccacaatggacatcttgggcttctttcgagtctcctccctttcctcagctagcctcttcatctcctcttggagcttgctgaggatgtgcaggttgggcttgttcttcttggcatactg

SEQ ID NO: 10814 - DNA, 449 bp, Homo Sapiens
tgaggataccctatctaatactatgccgaggactctgtctcctctgcttgcctccgtgctccctgcgaggtcacaggcccctcctttggggtgctggggacacgctgagactgtatttagagaaagggtctgggagagagaaactcctgccccttccccctgggatggttgccaaggggttgagacaggcaccccatggaatgtggggagcatctgctccgggtccaccagcaagagacgttgaatgccagtgtgttttgatctctgttttaaaatctcaggccttttgggatgatttctttgatgttctgaagcgacggttctgaagtgccgctaggtggggctctcttcattgacctgatgagcctttcgtttgggacgcgtttctcagggaaattctttttctgttctcttgggctgtttttcctagtatagggggaccgagctcg

SEQ ID NO: 10815 - DNA, 254 bp, Homo Sapiens
cgactcttaggatccccattcactgagagatgaactgctcctgggcatgtgtcacatggcattttacatagacactcccaacacttgaggcaccacaatagcaacaggaggtggctacaaagctattatagtagtacagaatgtactacagttagttttaaatagttatgatttaataatatgtctttacatgactggagtgtgaacggcaccatgtaaggtctgtatgtgtgtgcatagtattacatagtgtg

SEQ ID NO: 10816 - DNA, 392 bp, Homo Sapiens
atgtgccgtggtagtacaagtactatataaaacagtattcccaattcttctctcttgatatcttagtaggatgactatcattcatatcattcacaaataagctataatcactgaatgcattgtcattgttattttgaacaaactgttctgttagatcaataaataataagaaaaatttaatattttaccttctttttttctttcctaatgctcttccattatttttaatacagatctgagtttctgccgatatatttttcttctctctgaagaactttttaaaatattacttgcaaggcaagtctactggtgacaaattttctccatttttgttggtctcagaaagtctttagtatttactacttcactttaaaaaattgtggcaaaatata

SEQ ID NO: 10817 - DNA, 420 bp, Homo Sapiens
gtataagacttgatgccgaattcgtcgacaacctgagtctgagtcctgccaggtagtcatatgctcgtctcaaggacttagccatgcatgcctcagaatcactgcattgcaggaatctgcgcatggctcattacatcagacgtaatctgccgcaaaaatcttgacggtctccgcaaaatgggataacttggcgaaacgccaagctaatacatgaaccaaccggatgttctctgttccggcggcagggcaacctgctgccatgggacgtccagcgaatgaatgaaagtaaaaccaatgccttcaccggcagtaacactcagaagtgttgattcaattcattccgtgcgaaagccgggttaaatacccggcgtctatcgacgaacaacagccctatcagacagcgatggccgcgaagtggac

SEQ ID NO: 10818 - DNA, 425 bp, Homo Sapiens
cactagagctcccccgttatgcaccgtggtatgatccttctatgactaatatgttgaaagtttttgatcatgaagggatgtagaattttatcaataatttttctgcatctattgaggtgatcatatggtgtcttagtccattttgtgttcttaaaaaggaatacccgaggctgggtaatttattttttaaaaaaaggtttccctggctcctgattctgatgcctcaaaaagttcaagactgggcatcttcatctggtgagggcattaggctgcttccactcacggtggaaagcaaagggaagccaacttgtgcagagatcacatagagagagaggaagcaacagagaggtggggaggtgccaggctctttttaacaagcagcactcacaggcactaatagagtgagaactcactgatccgaaagg

SEQ ID NO: 10819 - DNA, 231 bp, Homo Sapiens
ctgtaaagaatagtgaggatggacagagcatagaatagcctactggtcctggtagccagtgtgcagaagacggtcctgaacctcacggtgctcctgctttctgacctcaggcagaggccatcctacagacaggaatttggagccccagactggaatagtgttggtgccccacctctactccttggttctagaaaaatcaatcacagagttaggcatgttgtatagcaccag

SEQ ID NO: 10820 - DNA, 384 bp, Homo Sapiens
cgttatagcaccgtggtagcttgctaatggcaaataactctcagcatttgtttgtctgaaaatgtctatctttccttcataagtgatgcttagtttcactggatacaaaattcttggctggtaattgttttgcttgaggaggctgaagataggtccccagtcccttctagcttttagggtttctgctgagaaatatgcttttaatctgataggttttcctttataggttagctggtgctctgtctcagttcttaagactctttccttcatcttaactttggataatctgatgacaatgtgcctaggtgaggatctgcttgtgatgaatttcccaggtgttctttgtgcttcttgtgtttggctatctaggtctctcacaaggcc

SEQ ID NO: 10821 - DNA, 546 bp, Homo Sapiens
aattagacaaaatggtaaaatagtctcatagctctctgtaggaaaagaatctttagttgaataagcagaaaccactttccaccttgtgatacattaaagctttaggtgtcgggtgctttaggaactcggtcagaggtgcacctctgaccgagttccacaacctgaggaataccttggatggctatggtatccaccccaagagcatagacctggacaattacttcactgcccggcggctcctcagtcaggtgagggccctggacaggttccaggtgccaaccactgaggtaaatgcctggctggttcaccgagacccagaggggtctgtctctggcagtcagcccaactcaggcctcgccctcgagagttccagtggcctccaagatgtgacaggcccagacaacggggtgcgagaaagcgaaacggagcaggaatacggtgaagatttggaggaattgggggctgtagccccacaagtacaagggaagattaaaccaaaggagggacattagaattcttgattggacattctttgggggacaggga

SEQ ID NO: 10822 - DNA, 204 bp, Homo Sapiens
gaacaataatagctaatgtgaacaaatcctcccattaattccaaagaattttacaaagaatttccaaaatatttgataaacaagatttctttctccaagtgtttttaaactgttagaaccagccagaggtccaagaagcctacttcattaggtatttcctctccaagtcatttgtaacaaaagtacataagacagatggatgaa

SEQ ID NO: 10823 - DNA, 519 bp, Homo Sapiens
tgcgtcggtggacattagtgtctatctctgccaaggttacggagcatgagctcagtctggtcctgccccaggagaataaggaaccctttgacagcctgccacaggcggctctattctgtggatctgatccctgtggggcctcgggctcctcacacgggagccatgagtgtctgttcacaccaccaagtatccatggctctcagccaggaagggtccaactgccgacttcagcagcgtgctggaggaccataatattaaggcttgctcagggcccccgagcaggacagggaaccctgccctgggcctgcctcaaccctgggctgggcctgtgagctgagcaaagcctttaagaaagggtacactctgtcgtttttcttcatttgtgaaaactcctgctttctactctggaactcaacctctttctgttgccaagagcttgtttgctgtcaatattgttctgctcagactaattactggtttctgtatgtcgatgatatgaaactgttacctgtatttcgg

SEQ ID NO: 10824 - DNA, 347 bp, Homo Sapiens
tgatgagcgcggcccgttattcccagacacagaaaatgtgtcataccagagttttgttatcatacacaatgcattagtggctgcaggaatcttcctccaaaagctaccgtcagaaggcaaactgacaaatgtccatgccgctggtccaagaaaccacagctaagagccatgaggcattcatttgtacattgagctctctctggcatgctccccactctagttagaggggctggggtatggagagaccgtcccagccgggcgctgcagcctcctactcctgggcctccttgcgggtcaacttgtagatctcagtgggtccgtccacatgggtgatcgtggggttgtaa

SEQ ID NO: 10825 - DNA, 592 bp, Homo Sapiens
  misc_feature (265)..(265): n is a, c, g, or t
atttggtgaggcagtctctggattaaagcttttagccggtctaaagctactttcttcaaagacagtgggaggagaggttgctggggcatcagccctgcttcccacagctccttaggcaagagcttacccagcagctgtgagcaccaagctggccagcagaggctgggggaggactttcaggccaacacctgccccagctgagtttgggactgtccttaagcgaggtctggagagaggcagcggcagcagccggacggggagcagnccaagccggaaccacagcctgcaggtgtgggtgtgtgtcatgtgctgagatgccagggcaccagcaagggggaatatgttggcagtgatgtctggcttcggagggtacagtcctggctcccagacaaggggcggggagaacactgtgtccttccagaggctgtaccacactcccactgctgtcacccttcactgaagcctcgagcctcggtagggcctccctcttctccctgtcctatcaagacttacagcaaggtcccaggttgacagggagacagatatcaagggcatagaaaaccctgcaaggaggcctggcatggtagctcat

SEQ ID NO: 10826 - DNA, 471 bp, Homo Sapiens
attaagcaacatgtttattggcgttgatgcagagacttacacaagtcttcttttttaagagaaaaattacaaggtattcaagttacgatttttagataatctctacatttgagacatcaaattataaaaggtcagtgttaccccatatgacatttgttttaaaagtttaaaggttaccaggtttgcagcttttaaagatatgaatgtcctgggccttacccctttggtgtctgagctagcagctgcagagaggccctctgaatacacagtatattttgctatcccttcaagttattaaataccagaaacacaaaaggttttccataagaaattgtgtgattggactacaggaattaaaaccgaacaacctcagtcttgggagaatgtattcaaacgtgcaatctctgaagtccctgtctactgtccaggtgtaaagcatggatttttataaattaataatgcccagacctc

SEQ ID NO: 10827 - DNA, 326 bp, Homo Sapiens
ttaacaacatggagattttgttattataaatttcaaaacaaaatgaaggaatttccacatatttataaccttcaaagtacaatattaatacatgtctgtcagttagaaagaacagcagtttgttaggctacaaggtttaacataaaaccaatttacaaatgtgaaaagcagtagtggtccaatattcaccattacacatgaatctgtttcttccagaattttttaaaattaaaattttagtatcgtgaaatattaaaataacaccccaaacatgccacaatcactattcacaaataaagttaaaatgaaatatacaaaaatccact

SEQ ID NO: 10828 - DNA, 469 bp, Homo Sapiens
gaaggagaaggtgccttaaggtgtatggctgctgctttaaaagatgcaggtgtgcagcctgaggagatatcctatatcaatgcacatgctacttccacaccattgggagatgctgctgaaaacaaagctatcaaacatctcttcaaagaccatgcatatgcccttgcagtttcctcaactaagggagcaacaggacatctgctgggagctgcaggggcagtcgaggcagcttttaccacattagcttgttattatcaaaaactaccacctactttaaacctggattgttcggaaccagaatttgatctcaactatgttccactaaaggcacaggaatggaaaactgagaaaagatttattggcctcaccaattcctttggttttggtggtactaatgcaacactttgtattgctggactgtagaacatataatttgtaattaaatactgatttttaaatgctaaaaaaa

SEQ ID NO: 10829 - DNA, 434 bp, Homo Sapiens
ccaaatattgaaataggagtttagggtataatttgccttgtgatgtttggcagtcactgtttatactttaaaggttatattttaagctattcgagattgcttttgggaagatcactagatttatggaggaattagtcacaaatgacttgtagaaaatactgtcatatagttcatttcatcattttctgttgcaggaagccactccaccacagaatgctaatatgccagtggtacccagtacctcttgtatataggttattgcaaatattgttctgaaatgcttaacttcagaattacattttttaaagtaaataattgttttaaatctattttgtaaagatataaagtacaatagaatttctggagtacagattaaactatttgcactaacacacgtgacgtgcatgatttaataaaataactttactctccct

SEQ ID NO: 10830 - DNA, 492 bp, Homo Sapiens
  misc_feature (461)..(461): n is a, c, g, or t
atgacgagttcacgaacaacgcagcacagccccatcaggttcccatggtggccggctcccctctcggggcaacccagacgtgcaacaaagtgcgatgcgtcgtcccccagactacagtaatactcaacaatgatcggcagaacgccattgtagccaagatggaagaccccttgagcaacagggcaccggatttccctggaaaatgtcattagcaacgctgtgcctgggcgtcggcagaacaccattgtggtgaaggtgccgggccaagaagacagccaccacgaggacggggagagcggctcggaggccagcgactctgtgtccagctgtgggcaggcgggcagtcagagcatcgggagcaacgtcacgctcatcaccctgagctcggaagaggactaccccaatggcacctggctgggcgacgagaacaaccccgagatgcgggtacgctgcgccatcantccctccgacatgctgcacatcagcaccaac

SEQ ID NO: 10831 - DNA, 600 bp, Homo Sapiens
  misc_feature (464)..(464): n is a, c, g, or t
  misc_feature (547)..(547): n is a, c, g, or t
  misc_feature (561)..(562): n is a, c, g, or t
ttgaggttgaggataatgccagattgcatttccattttctcttctattttgccatagaaagaaaggacatggaatcgcaggagtctcacacaagctgttaccgtgaaactctggtcttgttccctcacagtgtcctgtatggcattttctagcagggtgcagaggttatgtgcttcagccaccagttcttcactcttcttggctggctcaggtaagctgttggaggccgtggagggctgagacatcagctgcccaggctggctaagtcgagaggcattcatgctatccgggcttccactgacaggaccacggaccttgctacaagcaatcttcaggagattccagagctccttctgccgcttctcctgcagccggacaacagtcttctcatcctcattcattaagctcaccacctcttccaccttgggcaacaattccagcgccttctgcttgcaccaacagtntactggcctgcgtatatagatactcgcactttcttctcgaactctgatttgctgagcaaaaaccgaacaattcctgactgacncttcagtcctgttnnaaaggggtttcccttagactcctgtacagctccctggc

SEQ ID NO: 10832 - DNA, 464 bp, Homo Sapiens
gtatgtttgtaaattttacttaggccatcattttttattttcacctttgaatttcaaagtaaattagagatatgtaaataacagaattatcaacattaaaatcttattcacaatggctaacaagaacaggatgacagtcaagtcagtagctttttaataaaatgagcagaatcccatcgtaacagttctttgttacatgaattcaaatacacagcagaccaatcatgttccctgaaatttaacaatcaatcatacttaataaaggcctgttagtgctgtccctcaagactctaattctaaagggcttcctttgaattccctttataaagctttgtgcaaagaagagcttaagcaccagtaagaaagactgtcgctagcatttttatttcatcatcaacaacaaacatgcagtttctttctctgatgtgcatggcactgtaaaatgggtgctacactctctcttg

SEQ ID NO: 10833 - DNA, 247 bp, Homo Sapiens
cctgttacctcctttcatcctctgagcagaaaacagctaactaggtagttcatgacatctatggggtactccctactgtgtgccagctgctgggctcacctgcttacacgtgttacactgttgtaggcagtcagctattctataagtaggtgctattattatccccgtttactagatggggaatctggacatctccagagagaacggatggaacccccacaccccagtgttgggctgcgtaaaagtg

SEQ ID NO: 10834 - DNA, 460 bp, Homo Sapiens
gggtctagaggatcccgctcctctcattattatacccacataagcacttgcaaaatttctgtttctagtcctggcactttgagctctgatggtttggagatcttagtccttaaaggagaaatgcttccaaaggggacacaacaatgtttccgattaattggaagaagaaaattcccatatggcgatttggtacttcttatgtcactgaaaccaacatgccaaaaacattggttaatctactagttggaaaaatgaatccgaattaccaagggccaaaaaagtgtgctattttgcaatggaggcaaagtagggtaagtggaacccagaagattgcctagggcatgtcatactacttccatgctcaatacaaggttaatgaaacgttacagcaaccaaaaaacagagcaaataagacacagtcccttcaagaaggaaagtttatgagtcactcaatcaggtt

SEQ ID NO: 10835 - DNA, 666 bp, Homo Sapiens
  misc_feature (113)..(122): n is a, c, g, or t
tgctttgtgactcggcacaatctaaacccagcttaatgaatcaaagagatgtttcttggcaagatattttcattaaagttatttggaaagggcaattaactgcaaaagggacnnnnnnnnnnaactgacaagatactatctaaactaatagtttaaaataacattgcttttatgtcaaagcactttggtaacttggcctcacatgctgacagttttggctaaatattacaaatcttgatcccagaagagcaagagagaaagttttactaatatttgcttaaacatcctgtttaacaactttataacatccttcggaatttttaaggtaataatgtgagatataagtatgataaaaacaacttttaaatggtatttaatgcaaatacagaataacgatgtcaacattttcctcagccgtgtaacctgagattcatcatgggaatgagaaagtaaagtccctttataatggcatgtgaaccagacaatttagtagccagggttgtaaggcaactcttaactgacaatatagttagtatattctgggccttcatcttcaaaattagtaggtagtatttattgtgtgcatatcatgtgccaggcctggtgctgagtgcttacaatgatcatttatatatgggaaaattgaggtcagcaggtcaagtgctt

SEQ ID NO: 10836 - DNA, 359 bp, Homo Sapiens
ccccccccttttacgcaggctgccagccatgaaacttctttatctctgtttcttgccatccttctggccatagaagaaccagggatatcaggcaaacgccacatccttcgatgcatgggtaacagtggaatttgtagggcctcttgcaaaaagaacgaacagccctacctctattgcagaaattgtcagtcctgctacctccagtcctacatgaggataagcatttctggcaaagaggaaaataccgactggtcttatgagaagcagtggccaagactaccttgagtgctggtgattaccattctcaagctctctgggcgcagagacctgctgtcaacccccctcattaaaattcatga

SEQ ID NO: 10837 - DNA, 339 bp, Homo Sapiens
acccgcggggagtgggagtcgagggctgcccccctccagccccatggtcagcagcgcccacaaccccaacaaggcagagatcccagagcggcggaaggacagcacgagcacccccaacaacctccctcctagcatgatgacccgcagaaacacctacgtttgcacagaacgcccgggggctgagcgtccgtcactgttgccaaatgggaaagaaaacagctcaggcaccccacgggtgccgcctgcctccccctccagtcacagcctggcacccccataaggggagcggagccgcctggcacgcggttccaccatccgcagctcgcactatgagattgg

SEQ ID NO: 10838 - DNA, 284 bp, Homo Sapiens
tccggtgacgacagcaggatccccctatcttgccaacatttgaactttctgaaaacgttataaatgctagacatttccaagaatttcagctatgcatctgatccctctatatatgcaatctagagcagaagatttgtgtcagatagtatcggccaaaaaggcatagttaccagaagcaagagaaggcttttcagtaagtgacttcgttacaaaaccctaaagttagtgcaattaaaacagactcacaaagttaccaaggtttgatgcgccatttacaactatct

SEQ ID NO: 10839 - DNA, 450 bp, Homo Sapiens
caggcgccctttctctggggccatcgcttcctcagtccgctgtctgtttcctcatacggaaaagtgagacttgaaggcacgcagggtgtgtgcttgcgatgcaggctgacacgggtcacctgtgaacacagaccaaagggcagagaggcagagagctgcacctctatccactgctgcggcttagggcctcctgctcacagaggttccaagacagccgccaccccagccttcacacgagacatcttctggctcaacagcaggcaggctctttgaaagccaacttgggaaagagccacaaacgtcattttccagaagagaattcttgcctgcccaccggtgaagttcttgttttcagctgtcttttgctgtttgtttctagagaaaaaaacccacaacccaagaaaaggcagtataacctttcacaccagaaccagcctgcggccagccaga

SEQ ID NO: 10840 - DNA, 591 bp, Homo Sapiens
tttaggctgatcatactagagtatatttattaaatttcaccattatgatcactttgttataactaaattaaccctgacataaactttgacattttaaaaacagagaacatactgatttttcaactattttacttacatgtgttttttaattctcatgcagtgctcataattaggagatactacatattcaccctcacattatgcttattaagaaccaagctcagagggtagaaaagtgccaacttcattttccataaacttcccatacatatattaagccactgttcttctaattatatacttatggtacattcttctgtaaaatgtataactgtagtcacataaccattgttatgacaaggcggcaacatcatttcagattacaacaaatgagaccaaaagttgaagagaccacagcatataaaagtcatgagaacaccacacacatttcaatattttccactttccagtcaaaaaaacatgcacaaagttttcttagcagatagttgtcagaagtgcataaaaaaactggctttcaggtcatatatgttgagtgaggatcaatgccattgcgtgaagagagctgtgttc

SEQ ID NO: 10841 - DNA, 630 bp, Homo Sapiens
tgcaagagaaggacgcggtgaacgagtaggccgcgtgagttcggcagctacgcagatgcgctgtggtggcgggtggaaataaggtggtcacatttattcaatcagctggtccctatgaggaaggagaggcccaggtacagataccacaaaggggtacagtgacccagctgtcctgggattggttggggagtggtaagcaatgacataaatcaaaaccattgagggttgctttgatcctgagacagtctgagtctgcttcaaacccatggggaaaggaactttaatccccaacctgcagagagaaatacgcagtagcatccctgcctcacgattccctaatccaatgctcttgaatctgaaatggcctccctctgtgaatgcaagacacagaaaatcccaagtgccttccccaacaacatcctaagtaagtctggactagtaagattccaacattcatgaaaacactgtcaacatctgaactagcagctttgatgaggggtggggggcagaaaatttgccgagtcactaagtagttccagtcttggagacagctcagtgaggaccaaagcctgtgtgtcaggcttaaactctggctcaagacatcctccacagaggaccctgaagtattct

SEQ ID NO: 10842 - DNA, 616 bp, Homo Sapiens
cgccatttacaactatctcgccatttataactatctcgccatttacaactatctccagcgtactccaaagattcaggctttactcacgtcatccagcagagaatggaaagtcaggtagaaggcattagtgcagataaggtcttgtctggaaactgataagagtctctgttcatggttccatcatgctcctgagcaatttacaacagtctgctccataaacggagcagagtcattggtaaatgtgagctgtgaagaaagggtgagtgttaagccactaaaaggaactttcccatcagagaagctgtcgtagcagtctagccaccagagatgagttcaaagatggcagatttattggcccaatttgtcaccctgtgaaaaatacggttattactcaaaatatgtcattgtgcgatttgcttttactcccattcgaatgctcaagtttattacacacttgaccaccgggtgtaagatgtccatactctgccctccacaaaagatgcggaactcccaaatccagcagagattagttggtgagggttccttaagggaaacaaatttgcagggcagccaatcacagcatatgctgctcaaatcaataaagtcactcatccca

SEQ ID NO: 10843 - DNA, 290 bp, Homo Sapiens
ctcccccgctatttacaactaccttgattgtttcccaaaccagctccaccccctctgctattaccaaatccaccctgattcccaaagccacctggattaccaccaaatcttccacttctttctaactgtctattgctattgtgcttaggttcggcattggatatatgaacgctgattcctttaatgatcaagtcctctccacaaagagactgcgcaatctgatcatctgcaaatgtaacaaaggcaaaggccctgaatggcttggggatgaagacatccatcacatcccc

SEQ ID NO: 10844 - DNA, 201 bp, Homo Sapiens
catagtaaactaaaagagagatcagctgagtgaggctgataagacaaagactggaatgcatagagctatctagaaggagatcctaataacccaattagaagatggggcccagagaatctgcattgggaagtcggccacccttcccaggtgattgtatagtacaaactttatgacagattaatttcactcaaatgcaaagat

SEQ ID NO: 10845 - DNA, 294 bp, Homo Sapiens
gggtgagccactgtgcccggccttcagtcacttttatggggaatcttatcctgttgattatttttatttctagaatatcctattgatagtttctttggggggattgggcatgcatgtattttatcctaaaataagatgcttactgcatgttaattgcagaattaatgtaaaattgactacatctttcacagatcaaatacatcgtgtatagctgtgggtctgaaactgtgtggagtggcctggactttacagagcacctggatcaatgttttccagccttactttgtacttgca

SEQ ID NO: 10846 - DNA, 390 bp, Homo Sapiens
agatctgacttcaggggggtaggggggtggcccccaatcggcctcccagacttaactctatccctctttgcactccgatccctaggctgacccattcccctttactttttcacggtgccccacttccctgcctttgcatatcctgctttctctgcctacagtgtagaggtcattttcttctgggattctttagagctctgcagggctgacatttacaggggcctgtgctgcttgcgtgtgtgttcagcatttggtgtgcatgacttcttatcacactcagcccctgtgatcctcacttgattggtcacagtaacttcataagctgggcggtattgtattcccagtctacagatgaaaactgaagcagcttagagtgcagcgatactagaa

SEQ ID NO: 10847 - DNA, 1269 bp, Homo Sapiens
  misc_feature (1091)..(1153): n is a, c, g, or t
tcacaacaaaatagtatatgtgacctatagaacagtgtgtaaaaaagcaggctggtaccggatccggaatacccggagatatctgtcgcaccacgctgttcgcagaaagatccaaaacaagtggctgcgtgcctgtcgcccagtgagtcatcggactgccagaatctgtgtctccagaacgctatagctatggcacctccagctcttcaaagaggacagagggtagctgccgtcgccgtcggcagtcaagcagttctgcaaattctcagcagggtcagagggagacaggctcccccccaaccaatgcggcagcggctggagtctggggccggcccactggtggtgccagacggctggcggagaggggccccagccgcaccccagacagcactcagagcccgccagaccttcctctgaaggcaaagtgacctgtgacatccggctccgggttcgagcagagtactgagagcatgggccagccttggagcagggcgtggcatccctggacggccccaggcgctggcgcggcagctggacgtgttatgggcaggccaccgcagtgctgcgctcaagggacctgggctctgtaggcaaggagacatcaagtaactcagagctctcctatctggacgccttctggggcgaatacctgagtggcgccctgctgcaggacctgcaggagacgatgtacttgactgaggccctgccacaggctgatgaccgcgacgctgtacgactggtggacagtgtggatgaaggcgacccatgcacgccggccccgacgcacgcaagcagcagaatcgccgaagacacggggccagaacacagacagaagcaaactgcaccacgaccgagaagcatgaaccacaccccaagagccggacccaccatcacgcgaagacccacactacgcaaaccccagaagaacagggccacgcaaaccaccaaggagacacggtacaagaacacgcaacacaggacccgcgaacacccccccacccaaacaaaggagcgaccgaaaggaccacaacagacaaaagagaagacaaagccagagaagcaccaacaacgaggggcccccgacgacaccnnnnnnnnnnnnnnnnnnnnnnnnnnnnnnnnnnnnnnnnnnnnnnnnnnnnnnnnnnnnnnnaggaaccacacacaagcaacaaagaaagaacgacaacacgaacaacgacgcaacaaccacagacagacaaacgaacgatacaagactgacccgcctggccagccacagcgacaaaa

SEQ ID NO: 10848 - DNA, 1064 bp, Homo Sapiens
gggggacctcggtgagtacaaggtggtggggggtcgccagcaggttccctctccccggccccagctctggacgctcaccccagtgcaacgccctgagtgacggaaagaggtctggcggcttctctgttgacaactcagctggttccacaccctggcaattgtgaagagttggccaaatgtttgtccactgagctgatctcctctctggagcaccggggccaccaggagggagccaagacaatgcaaactccagtgaacattcccgtgcctgtgctccggctgccccggggccctgatggcttcagccgtggctttgcccctgatggacgcagagcccccttgaggccagaggttcctgaaatccaggagtgtcccatagctcaagaatccctggaatcccaggagcagcgggcacgagccgcccttcgggagcgttacctccgcagcctgctggccatggtgggtcatcaggtgagcttcacgttgcacgagggtgtgcgtgtggccgcccactttggagccaccgacctggatgtggccaacttctacgtgtcacagctgcagactcccataggtgtgcaagcagaggcgctgctccgatgtagtgacattatttcatataccttcaagccataaagatattgtgttcacttttctgcttgaggctaaggcactgtatcccaggcctcccaatgttcccgagccaggaactctgggccccatggagttatgagctcccttggaattttgagccaagctttaagcaagtctggactcctgagacctcctgggtctagtcagtaaaattctgcaactctaggaattctaagatcccattggaaggaatgctctacctcacagaactctgaaccctacagaaatatgggcctgctgccatttcctgaagaccggggcatcggggtggggtgataaaggatacaacctgcacagggggaagttattaaagaggctgcaaagtccagccaccctgaagatactccccagtgctcccctcctgctaaagaaccagttaccccaggaaaaaagggataaagggagaaaaa

SEQ ID NO: 10849 - DNA, 792 bp, Homo Sapiens
gggtgctggcggggacaccctttttatgattgccagactgatttccgattctactggatgcattcaaagttaccagaagaagaaggactgggagagaaaaccaagcttaatccttttaaatttgtggggctaaagaacttcccttgcactcccgaaagcctgtgtgatgtgctatctatggatttcccttttgaggtagatggacttctcttctaccacaaacagacccactacagccccggaagcactcccttggtgggctggctgcgcccctacatggtgtcagatgtccttggtgtagctgtgccggctggcccgctgaccaccaagccagactatgctgggcaccagctccagcagattatggagcacaagaagagccagaaggaaggcatgaaggagaaactcacacacaaggcctctgagaatgggcactatgaattggagcacctgtctactcccaagttgaagggttcttcccatagcccagaccaccctggatgcctcatggagaattaaagagagaagcctccttaaggagccacaggatggtacctggccccaaaaggaatcctggagaggaggacagtgacaacaggtgacttcattctttagagtgaactttccaaacccagtccagctggaaacagcttatctataatctgaaatgctggctcaaacagttatggggaggttcccagattgcgtagcattcagattgatttgagcagctcctactgtgataagtgtatcccagatccacaatgtaaatatatgtgatttgtaagaaag

SEQ ID NO: 10850 - DNA, 686 bp, Homo Sapiens
gggataagctgagggagtggagaggcccggggccaggaaagcagagacagacaaagcgttaggagaagaagagaggcagggaagacaagccaggcacgatggccaccttcccaccagcaaccagcgccccccagcagcccccaggcccggaggacgaggactccagcctggatgaatctgacctctatagcctggcccattcctacctcggaggtggaggccggaaaggtcgcaccaagagagaagctgctgccaacaccaaccgccccagccctggcgggcacgagaggaaactggtgaccaagctgcagaattcagagaggaagaagcgaggggcacggcgctgagacagagctggagatgaggccagaccatggacactacacccagcaatagagacgggactgcggaggaaggaggacccaggacaggatccaggccggcttgccacaccccccacccctaggacttattcccgctgactgagtctctgaggggctaccaggaaagcgcctccaaccctagcaaaagtgcaagatggggagtgagaggctgggaatggaggggcagagccaggaagatcccccagaaaagaaagctacagaagaaactggggctcctccagggtggcagcaacaataaatagacacgcacgcagccacagcttgggtgtgtgttcatcctta

SEQ ID NO: 10851 - DNA, 361 bp, Homo Sapiens
  misc_feature (29)..(29): n is a, c, g, or t
cgcatccatcttaattattttccaaatanggcttgtaaatcttatcgatggaaggagaaaggagacaagatgtggaagaattgacatgtatcccaccataaaatggtagaagatgagttttcaatgagtagtcatagttgaaattttacaaccaaagctcccatttgattgtaatcttgccaaaatataatggatgtataaatgaacttggggtataagcaataatatccactagtgttgttatcagctactgtaaccaagtggctggttcatttggttgatgctgattatggcctttaaccatggtggtttgttgtgtgttttttatttcacaaaaagccaataaaattgtttagctata

SEQ ID NO: 10852 - DNA, 479 bp, Homo Sapiens
cagcctgggaggaggcgtggatcctggcacgctgagcctcaggcaccagcctccctgtgctcgacagcaaagtcttgactccttcctgctgagcactgtgctaccttcactgctccaaagccagactaacagctctcaaagcccttggggttgactcggcttccaggagctgttggagaaatgaggatgtctgtccctgtctgcctgggcaggccagattcctccccagcagccgggtctctccagaccctgattcggtgcctttctgtttaccagctacttcaatcccaaagtttgaatctgcagataccttactcccagccactttgccttcttactgtgttgtgtgtttttcctggtgcttcaagagcgtgtgcagggcaagtgccgtcactgggaactgcaccagatgctcagacttggttgtcttatgtttaccaataaataaaagtagactttttctatttttatttgctgct

SEQ ID NO: 10853 - DNA, 1325 bp, Homo Sapiens
  misc_feature (1049)..(1108): n is a, c, g, or t
  misc_feature (1142)..(1205): n is a, c, g, or t
ggggacgctcgggggaacatggcggctgcggagccggcggtccttgcgcctccccaacagcggcgccgggggcgccggggtgcgccgtctgggcacagtcccggtgctcttctgtttctcagtcttcgcgcgaccctcgtcgtgtgccacacggggcgggctacgagctgctcatccagaagttcctcagcctgtacggcgaccagatctgacatgcaccgcaaattcgtggtgcagctgttcgccgaggagtggggccagtacgtggacttgcccaagggcttcgcggtgagcgagcgctgcaaggtgcgcctcgtgccgctgcagatccagctcactaccctgggaaatcttacaaccttcaaggcactgtgtttttctgctgtgattatgcacggaaagtgttcagaccagccatacaagtatctcggggatattattagcgtggcgacagagatcgttgcaaggggcccggattttaggaattcctgttcaattgtaaccacgaacaataccctaaaggtcttgggagcacggcttcacagaaacttgatttaacagtgttgtaaaacctggtacttccaaagaaccaaggtttcaactggtaattaccagaacgtagaaagcggcattaagcagagatccgcggcagtccacgagtgtcgtactattctggagtagaaaactcacgttgttgcattccaaacaaactggccctggacgctaagttggccgacggacgtccgaggctccaccatcgtcgcctgatgccacctcattcaagaagcatgatggccagcgatgtcggccctcagaaccgctacgcctcgaacgggacatacgtgaccacgaactgaaagccaggcctggccacaacctggcacgcctgaccagagagacccgtccacaacatcgcggcacactcccgcaacgcaccctacaggcgaagccacccaaagaccggatccgccacccccaacgacccgccatccgcaccaccgcgccaccggccacacacacgtccgtaacagcccctccctcgtcacagnnnnnnnnnnnnnnnnnnnnnnnnnnnnnnnnnnnnnnnnnnnnnnnnnnnnnnnnnnnncaccagtacaaacccgcgcaccttctcactcgcnnnnnnnnnnnnnnnnnnnnnnnnnnnnnnnnnnnnnnnnnnnnnnnnnnnnnnnnnnnnnnnnccaagccctccgcgctcaccaaacaccagcatacgtcactcgcctctacctcaccccaccacgctactcacgcatcccacatagtccatcaccctatccatacacacctacccaccgacc

SEQ ID NO: 10854 - DNA, 452 bp, Homo Sapiens
agagtccctggggaaagggaacagagtaaggcaggccttgttctcactgccctctaagggaacttggtcactcggcacttttaagcctcagtttctccagttcaataataaggacaagagcttttcccatgcattctctttccccgggaaagttgactgaggtgaccagtaatagaattgaaaagggagagtgtcttcagtgcaatgtggcatcctggattgggtcttggaacaaaaacaggacattagtgggaaaattggaaatctgaaaaaagtctgaattttagttaatataccaatttcagtctcttggttttgacagatgtaccatggtgatgtaagatgttgaccttggggtaggctgggtgaagggtatacaggaactctttgtactatctctgcaacttctctgtaaatctagtatcattccaaaataaaagtttatttaattt

SEQ ID NO: 10855 - DNA, 868 bp, Homo Sapiens
  misc_feature (17)..(17): n is a, c, g, or t
  misc_feature (225)..(225): n is a, c, g, or t
gccacagccccaatatntccgggggagggtatataaggttttccccaagggagggttttgggaatttccacattttccaaatatggcttccacacctcttttcccatttctaaatttaattttccgggctgggcccaactctctttccaggttccattttcctagaaaaggatttgagttcggcacccaggactgggacgggagaaaggaaaatctagccggganccagttgttaagatgaatggtttgaaaggatctaaattctttctaaattggaaaagttgttcaaattccctctgatatgcagggttaatccattatgctggagatacaggcacttcaggtttcttaggtttgtaatttcttcagggagtattttcagtttattatggctgacattaagtttctgaagattttctagctctcttatagcagaaggaagggatgtcaactgattatcatgtatatcaagaacagtcagtgcaggcaagagtcgcaggtcatctgtaagtgactgaagtttattgtttgatattattagtttggtcaaatctgtctgctcccaccatctttcagtagcaccaaacgaaagattctgattagcttcctcagggatatccacatttattctccagacacactgcggcacttcactgaggtttctacccgacaggtttaactggccgctcttcctcgctgccttcaacagcccttggggtaccgaggtaccgcagtctcttccacctgctttgaaaccagcgcggagatcctgccccgctatccgcttcaggcgcgacatgttcaaagtcctaggtccagaagctgcagccccacccgtgacgcttaaaggtggcgccgttgggatgcc

SEQ ID NO: 10856 - DNA, 960 bp, Homo Sapiens
tcataggttcgcaggagatgaagactacatagtggatcacacaataataatgtacttgattggaccagatggtgagtttctagattattttggccagaacaagaggaagggagaaatagctgcttcaattgccacacacatgaggccatacagaaaaaagagctagccaaagcagtgttgctggatcaagtattctcttgctaagaggaaggaaactgtctcgcataggaggcctatataaatataaacatatatacggtgcacctctacagaattggccttccataccatgagaacatttctgttttggatggggatgttaccccttgcgttcaaccaaaaattgatttcttggaactgtaaagattacaacccaaagtctcccaggaagctgtggggggagaccagaggatcaagctgaagtgaagccagcgaagagcccacctgtggaaggacatggcgggggcgaggcacagccagtgcattcctgcctgcgaacaggccctcccagcagctttgccgcctctccatcgtcttgggcccttgctcaaatagctgtgggactgaatttcacagaaaagaatataatttccatagtgctcttgcttgcctcttcttgagttctttgctcttctgagttcttggtggctaataacagtcagattagggtctctgccattcagagttgatgcttgaaaactttagttttccttattaatgaatatcactatcagatttgactaatgaagaggaaatctattgtttgggggaaaaaaaacatcagtttgatttctctaggggttcttttatgtgatttttagctaagtggtgtgccaggttttcagtgacataccaaatggaaataagaggatattgatcacgagtgtgatgctgagtagctttctgcatatactggattgtactttgtgtaaagtaaacatactcagttttgctgttcaa

SEQ ID NO: 10857 - DNA, 793 bp, Homo Sapiens
  misc_feature (627)..(627): n is a, c, g, or t
gggagaggcagcggttggaggcgcggtgggtgtctgcgggggtctcgcggggcggctgcggtgtttcaccgggaaaggctcgaggagagcgcggctcacgagagataacccagctgtgctccctggaaccttcaatttcaaggcctccctgcctctactaggcgccttagctcactatggggaaccacttgactgagatggcgcccactgcctcctccttcttgccccacttccaagccctgcatgtcgtggtcattgggctggactctgctggaaagacctccctcctttaccgcctcaagttcaaggagtttgtccagagtgtccccaccaaaggcttcaacaccgagaagatccgggtgcccctcgggggatcgcgtggcatcaccttccaagtgtgggacgtcggggggcaggagaagctgcgaccactgtggcgctcttatacccgccggacagacggtctagtgtatgtggtggacgctgcggaggctgagcggctggaggaagccaaggtggagttgcaccgaagtcagccgggcctcggacaaccagggcgtgccagtgctggtgctgggccacaagcaggaccagcccggggcactgagcgctgctgaggtggagaanaagctggcagtccgagagctagcagccgccactctcactcttgtgcaaaggctgcagcggctgtgggacgggcctggggcctgcaacagggcccttggaacgccctctaatgaaatgatccctccaaaaggaagaaggcccgcctccggggtggggcaaagaaagt

SEQ ID NO: 10858 - DNA, 308 bp, Homo Sapiens
  misc_feature (38)..(38): n is a, c, g, or t
  misc_feature (56)..(56): n is a, c, g, or t
taccatttcataataatctgtgcttcacacacattagnaaattcctcattcattanaaacctcacctattacaactaataacattttgtaatgattccatgcccgtttgagaactacaaatcctgtttatgattattgattattgcatatgaagattataacacaaacaaatgatacatgttggatgtcatattctaaaaaccctgatttgatcattacacattgtatgcatatattgaaatatcaaatcgaccccatgaatatgtaaaattactatgtaccaataaaaatacattttttaaactgca

SEQ ID NO: 10859 - DNA, 448 bp, Homo Sapiens
aggagctaatctgaccgttctattgtgtggatgaccacataagaaggcaattttagtgtattaatcatagattattataaactataaacttaagggcaaggagtttattacaatgtatctttattaaaacaaaagggtgtatagtgttcacaaactgtgaaaatagtgtaagaactgtacattgtgagctctggttatttttctcttgtaccatagaaaaatgtataaaaattatcaaaaagctaatgtgcagggatattgccttatttgtctgtaaaaaatggagctcagtaacataactgcttcttggagctttggaatattttatcctgtattcttgtttgaattcctcctctatttaagatatatacatggaatcgaagtgtttatgtaatagttctatccttttgcctgcaggtcagttgtaataaatctaggatgtgatgaa

SEQ ID NO: 10860 - DNA, 887 bp, Homo Sapiens
agcacgttcctggcagcagcaactttccagggacagttttctgtggactgcacctgacgcggatggtggttgatctcccagaactgcaggactgggtcacatcattggacctataaaagaagatcacgtccggtattcccaaggactccaggtggaaaagttcagctggggaggtgattccatccagagtcatatctgttgtcaccccaataagtcgatcagcaaggctgacaggctgtgaggaaaccccggccttgtagcctgtcacctctggggggatgatgaatgcctggcagacgtaggctgtgatagatttggagaaccctgactcaccctcaggaatccggaggtcagtgacattgtcggtgcacacagacattttcctaccctggttttccacagagactgaagggtaaagttgaatgggaagtatttcaaaccccttttggaagttgaagcttggccctccagcaagagtgacggtgttttgccaaagcgggagaagttgttagttcaaagtcctggttggacgtgttgcgtgagaaaggtgcaatcattgtagcacagagagtggatcttgttgttcttggtccctgataccacagggtcacacaggcctggacaccataaggctggtgggctttaagaattgtgttatggggggcaggacgctgcatgttcctgtaatctcggtcaattatagttatccagcatgacaagatgtgccaggaagagcccacatcagaggcttctagcggcacagggacggccttaggacgccacgccattcatgacattggtcacatttatcgagtagatcttggcaacgtcattggtgtacttcctgcttgcctcatgataagtgctcctcttcaaggcccaggtga

SEQ ID NO: 10861 - DNA, 548 bp, Homo Sapiens
gagcttgctcaggccagcgatgtgaataaattgactcccagcaacattgcgattgtgttaggcgcgtaacttgttatgggccagaaatgaaggaacacttgctgaaatggcagcagccacatccgtccatgtggttgcagtgattgaacccatcattcagcatgccgactggttcttccctgaagaggtggaatttaatgtatcagaagcatttgtacctctcaccaccccgagttctaatcactcattccacactggaaacgactctgactcggggaccctggagaggaagcggcctgctagcatggcggtgatggaaggagacttggtgaagaaggaaagtcctcccaaaccgaaggaccctgtatctgcagctgtgccaacaccagggagaaacaacagtcagatagcatctggccaaaatcagccccaggcagctgctggctcccaccagctctccatgggccaacctcacaatgctgcagggcccagcccgcatacactgcgccgagctgttaaaaaacccgctccagcacccccgaaaccgg

SEQ ID NO: 10862 - DNA, 537 bp, Homo Sapiens
caggaaattgacagtggctgcagtattgactccagtgacataaagttaaccacagtggccttttaacaaatgttgccttttataatgttatctttatgagtttcttgatatgtaagatgaaaaagcatttagaataatcttttaatttgtgtatatttgggatgatatttaggagctatcaatcaaattttacatctcacaatgtactgtttacatggatattggctgctttttttaaggaaaaccacattgagatgtgacaagtgttaggacttgtcacagatttctaactctgccgcataaactataaatctgtaaggtggtacacagcgtgtcttgttagcaaaatttatactttgatatgatcacatgtagaagtagcttcaagaatttcttgtagtcataaatgtttaataatatatgatgtaaaattatattatggagcctaatgatgataacaaagaaaacaatatactgatcttagaaaatgtagacatggttaactgggaaataaaatatagagtggcacttcaagac

SEQ ID NO: 10863 - DNA, 322 bp, Homo Sapiens
ccagaactggcatcgctaggggctattatgtgggcacagaaggccgtttcaggagaaggggcccaggcaggctccggtggccgcaggagagggggttgggaagtgtagctcccaagtgtcactcctgacgcacacagattttaactttgggtaacaggcacatcctaaaacactctgggcctctgggctgggcattctccattctctctaagccatgcacccctttaatacaacactgcagttttgatgacattctagggtaggccctgggtagagaacctctgctatatgcttcaagagcctggttctgcaagaacccacg

SEQ ID NO: 10864 - DNA, 1182 bp, Homo Sapiens
ggtaccggtccggaattcccgggatctccggctccgacagctgggtgtccaggccatggggcagccctgggcggctgggagcacggacggggcgcccgcgcagctgcctctcgtgctcaccgcgctgtgggccgcggccgtgggcctggagctggcttacgtgctggtgctcggtcccgggccgccgccgctgggacccctggcccgggccttgcagctggcgctggccgccttccagctgctcaacctgctgggcaacgtggggctcttcctgcgctcggatcccagcatccgtggcgtgatgctggccggccgcggtctgggccagggctgggcttactgctaccaatgccaaagccaggtgccgccacgcagcggacactgctctgcctgccgcgtctgcatcctgcgtcgggaccaccactgccgcctgctgggccgctgcgtgggcttcggcaactaccggcccttcctgtgcctgctgcttcatgccgccggcgtcctgctccacgtctctgtgctgctgggccctgcactgtcggccctgctgcgagcccacacgcccctccacatggctgccctcctcctgcttccctggctcatgttgctcacaggcagagtgtctctggcacagtttgccttggccttcgtgacggacacgtgcgtggcgggtgcgctgctgtgcggggctgggctgctcttccatgggatgctgctgctgcggggccagaccacatgggagtgggctcggggccagcactcctatgacctgggtccctgccacaacctgcaggcagccctgggggccccgctgggccccccgtctggctctggcccttcctggcctccccattgcctggggatgggatcaccttccagaccacagcagatgtgggacacacagcctcctgactccaggaaaagccagagctgtgcagggaggaaggggtgagaggggggcccccacacctagactcagtaaggaagtcgggttggaccttaacatctgcattggacaactccaccccttccttggccttgcccctgcccgcctacactcctacgtgtccagggcttgggccgtgacttaggcaaaggagtgcaaaggagggtctggcaggggctgctcaggccgcctagctgcccctttgccaggttaataaagcactgacttgtttttcc

SEQ ID NO: 10865 - DNA, 536 bp, Homo Sapiens
cgtgggttccttgcagagggaacagcatgtgcaaagggctggggtggatgtcagaaagagcaagagcccatggcatgcccatggtacattccaggtactggcctaagctcatcctggccagtagaggctgggcagtaatgccctcagcctcctaggggcagctttgtggagtgacagagtcacagctcctcacctggctgtgtcccacctctctagtgaccttgggcaagtcttttcctctctgggccttggtttccccatctggaccatgaagaggtaggatgaggcagtttagaaagtctttcctagatgtgataatgagagagattttcatttgtccgctgctttctgtgggtgaccaggtcctggggaagtgaggagccacataggcccaccgctggtttccaaattacccacaatttctctgtctctctgagtcactgaagacagcctggcacacgtgttaacaagaccgggatcttagatagcccaggtgtctgcacttctaaactggaactcttgctgtcctgtcgcga

SEQ ID NO: 10866 - DNA, 522 bp, Homo Sapiens
agaagatcttcttcctagcaagtttctaacaatagtcctgatgagagttcatattatcgtcaccattttatgcgtcaagatctgacccagtctctaattatgattcagcctatcctgtatgcgtattcttttagggatcaccagagccggttcttcttgatagcagtagcattcttgcagatcgtattcttctcatggacacattcttccagattttgatttatcatggtgagaccatagaacagtggcggaagtcaggataccaggatatgcctgagtatgaaaatttccgccaccttctgcaagccccagtggatgatgcacaggaaattcttcactccagatttccaatgccaagatacattgacactgaacatggaggcagccaggcccgtttcctcctttcaaaagtcaacccttcacagactcataataatatgtatgcctgggggcaggagatacatcctgaagtatttaggaataaaatgtcatgatggcttcaacttccagaagttattcaac

SEQ ID NO: 10867 - DNA, 262 bp, Homo Sapiens
aaacaatatggaggagttaattttaaactagctacaacttgtgactactgtatcagccattatagccctagaagttggctgaacagttggctgaacagtaggctgcaaatgtgcagagcaaaattctgagacatgacagaagcctatgagctgaacagagtacagaggtggcaaaaatcagacgtggctctgaccaagcagaatggagagcctttgctgaaccatacgggctttcagtttagacaaagaaaggctacactta

SEQ ID NO: 10868 - DNA, 852 bp, Homo Sapiens
ataaaaataaagagaagcgcccggaagtgctgccttggagtcggtgagaaggcggccacggccaggcctggtgcctgaagaggagtcggagtcggcggctgtagaggctgtgcgccacatacatctgcagaacttctcacgctctctgctcgagaccctcaatgggcacaagctggggggacacttctgcgacgtgactgtgcgcattcatgaagcttcgctgcgtgcccaccgctgcgggctggcaaccggctcaccctccttccaagacaagctgctgctcggccactctgagatccgtgtgcctccggaggtgcccgcgcagacagtgcgacagctggtagagttcctgtacagcggttcgctcgttgtggcgcagggtgaagccctgcaggtgctcacggccgcgtcagtgcttcgcatacagacagttatcgacgaatgcacgcagattatcgcccgcagctcgaggccccggagcacctcatggcgcccaggcccctgccccacacacactagaagcccccacagaacaaatacgacacgctagagacaagagagcagtcaaacagcatggagccaacactagactggactagaaccaggtaccaaccccgcgaggacaaaaccccagaggctggccatatgagcaaccgagcaaagagcccagctaaaaatggaacaggcgcgcccagagagacccccaacagaagcgaattattggcacacggcactacgaccaaacgagcggacacccccaccgaagcgcagccaccgatggcgcaaaacacggtgactaaggaacagaggaggaggcacccttagagccacagcaatcgaaagagccccagg

SEQ ID NO: 10869 - DNA, 293 bp, Homo Sapiens
ctttccaacatatttatgactcagagtcagtgagacagatgatggacttcctttgcagttttgagaatcctagcacagtgtttggatgcagttaaatgcaaggacaaataggacgcctgatcccaatttgtagaaatagtggagacccagaaatacagggacttgcccaaggtcatacggcacttcactggtaaaattgggctgaaacccagctaccctccacaagttgcagctttttaaggtttcttgttggtcagtctttcgaaggacagtagacttgaaatagatgtttg

SEQ ID NO: 10870 - DNA, 233 bp, Homo Sapiens
  misc_feature (41)..(91): n is a, c, g, or t
ttataagacaatatttccaagcctcattgtaacctcaaacnnnnnnnnnnnnnnnnnnnnnnnnnnnnnnnnnnnnnnnnnnnnnnnnnnntatcaccagagaaaagaaccttcactaaacgaagacaggaagcaaagaagcaagagaagaccagaaaacaacacaatggcaggagttcttacttatcagtaataacattgaatgtaaagggacaaaactctccaatctgcaa

SEQ ID NO: 10871 - DNA, 259 bp, Homo Sapiens
gtagatggaattggagaccattattctaagtgaagtaactcaggactggaaaaacaagtatcgtatgtttccacttataagtggtagctaatctatgaggacacaaaggcaaaggcataagaatgatacaatgaactatggggacttggggagaaggctgagggatacccgcctacacattgggcctggcgtggtggctcacgcctgtaatccctagcactttgggaggcagaggagaatgcgtgaccgagagatggag

SEQ ID NO: 10872 - DNA, 198 bp, Homo Sapiens
  misc_feature (171)..(171): n is a, c, g, or t
tgtgatctagaggtcccccttcggaaatagggaagactgtctctgaagaaggaggaagtgtagcttatgggaggctgaggagtttggagtttctccttgtgggaaggtgggagccatggaggctgaagacagttgtccaactcagggcatacaaattgatgaggaactcanactgctgctctgcaaggaacccacgct

SEQ ID NO: 10873 - DNA, 272 bp, Homo Sapiens
catcgctgcaacaacttctccccaacccaccacccacgtagacattttagcacctgtacctaccatcatctcaacaggagagacaaccagacattttgtgcctcctatatggcaaacctgagtttcattaaatctctgaatccagctgccagtttgcaagaaatagaggagttgagggatatactgagctgaatcatgagcatgcaatttagcagactcgcctgtggtaaccctattgtcaagagtccagtcttcaagagaaacaaaggttc

SEQ ID NO: 10874 - DNA, 1032 bp, Homo Sapiens
  misc_feature (54)..(54): n is a, c, g, or t
tccatgtgggtaatgctctgctgctgagggtccccccggggctgggcagaatanacagggatggtccaggtttctcctgtagggctagtaatggtcccagtggcactgtacaggtgggcactgtctactgtcagtaagtctggcctcaaagacacataactctgctgctggccctgtggaatggccagcacggtggccaccggctgccctgagatggcgtaggacacagtgatgggcatgtccactttgcgcttcttcactggttggaggacactggccgtgcacaacccgccgctccccttcccggggtgagccctgctgggatggtggtggggaaagggcacccacggtctggatttggatctgctgaccaccagcaagagactggccagcccaccagctgagcctggatttgctgatgtggaatgtgctcctccgggatttctgcagcctggatctgctgggctgcttgcacgtgctgcacctggatctgagcttgcttgcagctgcgagggactgggactctgcagagacggggtctgaatggagggggctgctgactgtggtgcctggccttggatctgcacctggacctggatgggttgctcagtaggctggtgaacggtgagttgtggggagagctgagccgagacctgttgcggagactgctgtacctgcacctggacctgaacctgctgcggctgctgaacctggatctgctgttcttgctgggtttgtggctgaacactggtggtgactggacaggcaagttcaagcaaagacccagccacttcagtgctgtctgtgtatatgcagttcccaccctgttggtacaccatggtagtggtgctgttctgcaagaactccagaagggcttctggccccttagaggccagtgagtccagaaattccttcatcctgtcgcttgcgggacagaccgtgcctttactcggatgtactcttcaaaggagatggtgttctctagggaattattcatattgcagagtccttagggttcccggcgacgtcact

SEQ ID NO: 10875 - DNA, 287 bp, Homo Sapiens
atcccatacggaatttggtccacagatgaggtgatggctaaaaggaacttatcagtcatggcgaggaggttgcgtagggcgatgtccagtcgtctctggacctcggggtggctcaaggcctgctccggggtgacatcatatgggagatggctgcgctgccctgtctgggcctcagtctggttgatccagttcttatagaggtggacagggtctgtgtggacgctgagcactttgtcttctagcacatcctggataaccttgcccagatctcctgcgggcctcttccc

SEQ ID NO: 10876 - DNA, 149 bp, Homo Sapiens
  misc_feature (1)..(1): n is a, c, g, or t
ncatgcaagtctgatacttgaatccagtagaaaccagagaggaggagaagctggtgttagctctctcttcatgactcccagctctttccttttataatgatcagagaaggactcttccaggtctctttggcatctgcaaggaacccacg

SEQ ID NO: 10877 - DNA, 417 bp, Homo Sapiens
ctataatcttctcccatcttaaacaaaacgaaacaaaaacccactatttccccttacagttgttgccatggctctgctcccctctacagcaaaacccctcaagagttcctatggtctccaattccttctctcctgttctctcacaaacccactccaattaggcattgctcccactcctccccatcagtgctctcacaaggtcaccagtggcttctacattgccaatctagcgatcaaatctcagtaagtgtcatttgatataactgatctttcacttcctctttgaaaccccatcatgtggtttccaggaccacacactccctccctctcctcctgccatgggtgtcagtctccagggctctccctaacctccatgtgtaagaacaccataggggttaggagagtctccgtcgaact

SEQ ID NO: 10878 - DNA, 461 bp, Homo Sapiens
aatggcacactgccccaggcacgagacctccagcactaatcaatggcaaagcttgaaccctggtgtcaccctggggaagtgaacaaatgtaacaagccagcaccgggcccctgcacaactcagggacccagtccacctgtcacttactgatagagctttaaaataaatcctgaaaatatgtgcccaaaccacagaatggtctcaaagtttaaggacttaagcaacaaagctacaacactactcttgttcccatttactcatctatgtcagcaagggcgctcagcactgaaatctgacatgagaacaggaacaaagcctgtggaaacccgcttctctctcgagcaatgacagcgcggatccacaggtgagtgtgccatccgcagacacggaaagacctgcccttccacggggtggtaacacggggtgacaatgctcttaccacgatgtaccgcgcgcgtcgt

SEQ ID NO: 10879 - DNA, 320 bp, Homo Sapiens
catctacttaagtctattgggaagtgacctgtattacccctcacacctaggagggtcactcccccttcccgtcgcagttgctctttgagattgacctgaggcacattttctctttctagaagccgctgcgtaagtgacggacccatccacggggggagattcctgctgatagttgcccctcctcccactccccagtccacggtcactgcaaaatgaacctttccactccccttgcacggggtcctcgtctacctcctcccctcccaccagtaatgcagtcattaatcctctctgatctttccttcctctcccctccccct

SEQ ID NO: 10880 - DNA, 306 bp, Homo Sapiens
atgtaccctataaatatgtaaaatattatgtatcaatttttttaaatgaggggaccgaagcatagcgagatgaacacccccaaaggcacccagcctgtgcaaagtccactgacattctcacttaggttcactggccagaagcttgtgttctctccactcagccacactgtgtcctccacagacatcctcctgccccatttcctttactcttctgggaatcagatggcaacccagaaccaaggtctctgttcctgttcctcaagaccctgccctattaaccctttctgtcccagccgcacgtcatgg

SEQ ID NO: 10881 - DNA, 529 bp, Homo Sapiens
ctcaggtgtgaaaatgctggtgattctaaaaggttaattgtggtaggttccagagacataggccagacacctgtgtgtgcatagtgctgtgtaaagatgtggttataacagtgacaaccacataggccgtaagttttgtagttccagagacatatgccattacacctggtgtgtacgtagtgcgttgtaaagagtgaataacagtgacaccacataggccatagttttgtagttccagagacgatgcctaacacctatgtgtacttagtgctttgtaaagagtggtaataacagtgacaccacataggccgtaattttgtttttgcttgtgttagggtgttcagcatcttgactccttaaataaggttttcagtcagatttataaagcagcattgaagatagttgtattatatttgagtacagttggaatccatggcagttgtacggaggcctaatatatcagatgaataggctaattgcaccgagtcttgcgcaagaacagggatactctagaacgccgcacccacac

SEQ ID NO: 10882 - DNA, 806 bp, Homo Sapiens
  misc_feature (615)..(639): n is a, c, g, or t
gggagtgagccggagccggcgacggcggcagtggcggcccggcctgcaggagcccgacggggtctctgccatgggggagtgacgcgcctgcacccgctgttccgcggcagcggcgagacatgaggagaccccgcgacaggggcagcggcggcggctcgtgagccccgggatggaggagaaatacggcggggacgtgctggccggccccggcggcggcggcggccttgggccggtggacgtacccagcgctcgattaacaaaatatattgtgttactatgtttcactaaatttttgaaggctgtgggacttttcgaatcatatgatctcctaaaagctgttcacattgttcagttcatttttatattaaaacttgggactgcattttttatggttttgtttcaaaagccatgttcttctgggaaaactattaccaaacaccagataattggatcactaaaaattcctggtagaaaagaatttaaagacaaaaagttaaatgatcctaggaaactagtgggaaactggagaaatcataaaattgtactctgaagaaaaagatttccaaatctacccgcagacaagaatatagataatgggaaacagaataccgtccnnnnnnnnnnnnnnnnnnnnnnnnngagaaagaatcttgctcccatcgccccggctggagtgccaggaacagaattcttgtcttcactgcaaccttctgcctcccgggggtcaaggggatttctcccggccctcagccctcctggaggtagcctggaaattaaaagggaaccccaaccacccaaatccccgt

SEQ ID NO: 10883 - DNA, 211 bp, Homo Sapiens
ggggccgggcagagacgctcctcacttcctagatgtgatggcggccgggaagaggcgctcctcacttcccagatgggatggcggccgggcagagacgctcctcactttccagactgggcagccaggcagaggggctcctcacgtcccagacgatgggcggccaggcagagacgctcctcacttcccagacggggtggcggccgggcagagg

SEQ ID NO: 10884 - DNA, 695 bp, Homo Sapiens
gggagacgtggcgcagcgactcggaggttcgcctccagcttgcgcatcatctgcggccgggtcccgatgagcctcctgttgcctccgctggcgctgctgctgcttctcgcggcgcttgtggccccagccacagccgccactgcctaccggccggactggaaccgtctgagcggcctaacccgcgcccgggtagagacctgcgggggatgacagctgaaccgcctaaaggaggtgaaggctttcgtcacgcaggacattccattctatcacaacctggtgatgaaacacctccctggggccgaccctgagctcgtgctgctgggccgccgctacgaggaactagagcgcatcccactcagtgaaatgacccgcgaagagatcaatgcgctagtgcaggagctcggcttctaccgcaaggcggcgcccgacgcgcaggtgccccccgagtacgtgtgggcgcccgcgaagcccccagaggaaacttcggaccacgctgacctgtaggtccgggggcgcggcggagctgggacctacctgcctgagtcctggagacagaatgaagcgctcagcatcccgggaatacttctcttgctgagagccgatgcccgtccccgggccagcagggatggggttggggaggttctcccaaccccactttcttccttccccagctccactaaattccctcctgcctt

SEQ ID NO: 10885 - DNA, 796 bp, Homo Sapiens
ggcgctgctggccttacgcgcgcaatatcgagagcacaagcagtgcctggaggaggcccagctggagaatgagacaataggctgcagcaagatgtgggacaacctcacctgctggccagccacccctcggggccaggtagttgtcttggcctgtcccctcatcttcaagctcttctcctccattcaaggccgcaatgtaagccgcagctgcaccgacgaaggctggacgcacctggagcctggcccgtaccccattgcctgtggtttggatgacaaggcagcgagtttggatagcagcagaccatgttctacggttctgtgaagaccggctacaccattggctacggcctgtccctcgccacccttctggtcgccacagctatcctgagcctgttcaggaagctccactgcacgcggaactacatccacatgcacctcttcatatccttcatcctgagggctgccgctgtcttcatcaaagacttggccctcttcgacagcggggagtcggaccagtgctccgagggctcggtgggctgtaaggcagccatggtctttttccaatattgtgtcatggctaacttcttctggctgctggtggagggcctctacctgtacaccctgcttgccgtctccttcttctctgagcggaagtacttctgggggtacatactcatcggctggggggtacccagcacattcaccatggtgtggaccatcgccaggatccattttgaggattatgggtgctgggacaccatcaactcctcactgtggtggatcataaagggccccg

SEQ ID NO: 10886 - DNA, 905 bp, Homo Sapiens
gggtacagtatcgagaatatggccttcatgccgctgggctttactttttgctactagaagtaccaggcagtgtagccaatcaagtattccacccagtgatgtttgacaaatgcattcagactctaaagaagagctggccccaggaatctaacttgaatcggaaaagaaagaaagaacagcctaagagctctcaggctaaccccgggaggcatagaaaaaggggaaagccacccaggagagaagatattgagatggatgaaattatagaagaacaagaagatgagaatatttgtttttctgcccgggacctttctcaaattcgaaatgccatctttcaccttttaaagaattttttaaggcttctgccaaagttttccttgaaagaaaagccacaatgtgtacagaattgtatagaggtctttgtttcattaactaattttgagccagttcttcatgaatgtcatgttacacaagccagagctcttaaccaagcaaaatacataccagaactggcttattatggattgtatttgctgtgctctcccattcatggagaaggagataaggtcatcagttgtgttttccatcaaatgctcagtgtaatattaatgttagaagttggtgaaggatcccatcgtgccccccttgctgttacctcccaagtcatcaactggagaaaccaggcgggtccagtttatcagcgccccttgtggataaattaaaggagagtatattccccaagtcgtccgtatcttactgcagcacatctgtgccaaggtggtagataaatcagagtatcgtacttttgcagcccagtccctagtccagctgctcagtaaacttccttgtggggaatacgctatgttcattgcctggctttacaaatactcccgaagttccaagat

SEQ ID NO: 10887 - DNA, 625 bp, Homo Sapiens
  misc_feature (26)..(26): n is a, c, g, or t
  misc_feature (31)..(31): n is a, c, g, or t
  misc_feature (52)..(52): n is a, c, g, or t
  misc_feature (57)..(57): n is a, c, g, or t
ggccccggggtcacccgcctagctgnacccnggtaattgggaccttccggcnttttnaagaacggggcattttaccacacagtccagttgcatgatagctaggaaacatgtattgctctagatggggcagtttaagtcattttaaagaaagttagttccatagttgttgccttttaactcatagtcaagcttcagtctttcaaagagaaatgtgtgattttcatttacttgctgatattttgtagtttggagatccttgtgggcattattctaactgatacgtagacacttacttggaaatttttggacattatattaaatgagtgctatctgtgaaattggttatattaggtggcttgactaatgttttttctataattgtatatggactgcatttttaaaaaaaccgcatttgcctttatgctagattgtaaaaaattatattagaatgcataagacatgtttttccttcatatgctagacttttcctagcatttcgtatttctgtgttgtcagtgtgtgatttttaaaccggaatttggtttaaaaaaaatctggtggtaatatatgtgagaaatactttggtgtttaccttatgaaaataaaggattgtaagtaaaaaaaa

SEQ ID NO: 10888 - DNA, 787 bp, Homo Sapiens
  misc_feature (612)..(612): n is a, c, g, or t
gggaaagcaagtggaaccctggcacccctggacttcctcctccagaggaagcggctttggttgtgggccagcgagcctgtgcgtccccagccccagggcattcaccgcttcagagaagcaaggcgacagttctgccggatgagaggatccaggctgactggaggaaggaagggctttggctcatctgggctcaggtttgggagagatggcttctcagaggaggtgatgcctcagccagtcttaaaggcaatgcggtgtgcagagggtgcttggtggttctctcctgatggccccgcagggtctgcagcctccatctggccagcagagggcgcagaaggactgcctgggcagctcggacgtgaccgcctggaagtggtgtacagcgttcctgacaacgttcccggccaaaacgggtcccgccgcccacttgtgtgcaagataactggaaaatgtctttctgtgtgctccgaggagaatgcaaaggctggtggatgtagtgcctttcctctactgctctctcagctgggggcaagaatgacaggacgtgaacatgcacacaagggcccggaactcacgacccccgacagcggtctcccccgccccccaaacccngcgcttgcaggatttagggcactagcacagcacagtccaccccttgggactagcaccccctccgcagttctgctctctgcagcaacatagagtacaaatattgttccttttgtttcttttttccctttggatacatttttaattacaaaaatagagcttgattgttgcacctaaa

SEQ ID NO: 10889 - DNA, 447 bp, Homo Sapiens
atgttttctgattatatttctcaagccaaatatctgcaacaataacatgtattgaaaggtatagaaataaacagatggatagacagaaaaagactcagactgtctaagtagtgaagtttgtgcagaactagaaacaaaaatccacctgggtcagaggtatagggttaatttctcttgctgaggctcagatttctccttcatgcatgtttaatggtccacctaagttcaactggaggagcatctttcttctttgttaaccaaacatgcccaggtagagctgcttctcttttctatggtagctgctgagttctgactgtgtcagctggaggtaccgccggacgttggcatctttaggctgcctattcacggcacccaggaggtagtggcgggcctggtcatagtcctgcagatggaaaaaggccactccggcccgatacaaggccttgg

SEQ ID NO: 10890 - DNA, 787 bp, Homo Sapiens
  misc_feature (714)..(714): n is a, c, g, or t
ggctgatgaatatctgttatcgctgaagtttctctttggctcatcagccacccaggccttggacctagttgatcgacagtccatcaccttaatctcatcacccagtggaaggcgtgtttaccaggtccttggaagttccagtaaaacatacacatgtttggcttcttgtcattactgttcatgtcctgcatttgcattctcagtgctacggaagagtgacagcatcctgtgcaagcatctcttggcagtttacctgagtcaggttatgaggacctgtcagcagctaagtgtctctgacaagcagttgactgacatattattgatggagaagaaacaagaagcataaaagggcaattgaaggaacagactaaaaatcgtgtcctggaaggaaactacaggtactaccagggattttcagtctgaagaagaaaagacaaaatagatgacagaaggagtattagaagggagagcgatgagactcagttggacaccgagagagcaaagaagcaataatacgtgaagatgaaaatgaaatcaatttcagcataagaagacaagaacttatggtaaagctgcccacagccagaagaggatcctagaaggacaggaaattccctgtctgcagcatttcataagcatgtaatattgttgcagggatactgcagaaggagtttgagcagtggacagacagatgatataggtggattttacagncctaagaaagccctgtgcttgtggcccccaaaaccttgaggggcttattgaaatgaatggctgggggggaaac

SEQ ID NO: 10891 - DNA, 445 bp, Homo Sapiens
taaaagtgttgttacatgtgtgatatgtaagtggcatgtgctaatacacattttctttcttattaacagtggttcagcactgagtcatgcttgcttctgctacgcactgatttgttctattccagttttcacgtacatcgttttggtgacatctctgcgttatcatttatttatatggagtgtattttctccaaaacttctctacgagggaatgcacctgctcattacagctgctgtctgtgtattcttcacggcaatggatcaaaccagactcacacagtcttagactaagctgaacactggaaaaataatacatgcttaaagtctgctgttattctaaaatgaaagatatgaattcaacaaagttgatggataactttctttgactgctctacctgaatttagactaagcagtaaatagtttaataaaagatcactttaatat

SEQ ID NO: 10892 - DNA, 794 bp, Homo Sapiens
  misc_feature (47)..(47): n is a, c, g, or t
tatctagccctgaattgcctataaaatgacgccacttcctttctttncccttgggtttcagctgccaaacactcttttacaagtaagataagccagctttgtatggtcaatgataaacatttcctatttctttgtaaatcccatcttcctgcagacatctcatttccatcattgccaaaaaagtccttccatccctcacccctgtagaactactctctcttaactatcaaacagttctgcctgaactctgactatcctcttctacatctccctaaaccaaggtacttgatcttcttgtatcattcccaaagattaattcactaattttctcagagcaaactgtaatgaaggcagggaatagggcctttacacttcagaagggcacaggctagctcctggagaggagtggagatctgggtccaggcacccctcggccccaccacttttcctcaaggcacagaaaaagccaaactcgaaatacgtcttgagtctacacgagtgtacatctccttgcctacaactccgtgagatcatcattgaagtacagaagtattgcaggtgtgtgaagtgtaccgtccatactgagatagtcaaattcttcctcctcatcccggatcccattctcttccagggtaaaatccatgttcaggttcttcccttcatatttccacgtgtagctggcagcatgtgagttataggggagatagcggtgtaggatttcccatatggactccagaacccccacctccagtgtgtgctcctgcgacgtgagcgtgttaatgatgcggatgccc

SEQ ID NO: 10893 - DNA, 446 bp, Homo Sapiens
ccgaggcccatgatgtacctgctgaccctgcgcaccagcaaggagttcgtctcccgtcacctgtgtgagctgctggcacagcagttctgagccctggactctgccccgggggatgtggccggcatctgggcaccccctgggactgaggcagttttggtggatgggggacctccactggtgacagagaagacaccagggtttgggggatgcctgggactattcgtccggacttttgtattaatatctctgctcatctgctgcccttcacattcggggggctcaggggaatccccttgcctccgtgtgacgtcagggaagcacagaggggagaggggccagggaagtggatgtctcctcccctcccaccccaccctgttgtagcccctcctaccccctccccatccaggggctgtgtattattgtgagcgaataaacagagagacgct

SEQ ID NO: 10894 - DNA, 1237 bp, Homo Sapiens
aaaagtgagggaagattcttaatgtgaacttcttttcggaactgctctcccaagggtttcccaatgcaaccagcaatgagccgtttgaattggtcctttcggcgcttgtcagccactttctgcagggaggggtttaaaagcttgcagtcaaactggtccagtgagtccttctgtatttcagggatttgctccattacagctcttatctccaggtacctggggcgcagtgcctcatatatctggaaggccagatggaccagggaagccatgcacccgtcgtgctgcccgtgcatctgtaagcctttcagcacactggtgaaaagccacgtaactgcatctgcgagcagtgtccctgacagcacttgtttgaggagaggccagcagagctgtgaggttgtcctctggcaggacagagtatctttccaggccagggaattgaaggctgtaattaatagcgctgtacaaacatcctcatgcttcatcagacatttgcccaggtctgtaagctctgccatagctgagggggtgacctctgtggccatcatttcttcatcgtctccatctgctgggggagcactactgtggtcagcacccttctttgaaacacagcaaaccgtgattaggtccatgacttctcgggttaacatcctcaccagttgctcctccagcatctcttgagactctgggttttcatctgcagcctcatcttctccacacagcaggctcctttggttgataacttgccatttctgagaaagcctcatatggaggtaggtgaaaagaggtccgaggatgggggataccagggcttcatagtgctctgggggacagaagagcaccagaggctttacaaagacacgaagcatgggtctgagtcggtagtcaggaatattgttcaagttgacaaaggctgagctgagaagctgggtagcaaggtcctccacagtatagaagtcttgctgcatggaagggcctgccttccctaggatatgaaaacagttttcatagagggtagagaagaaacgctgcattctttccaagacggttttgaagacaggagagtcattgagttccaagagaggttgaggtaatcctaatatagcagatttttccgcgtcaagcatatccagagccttggtgaaaggctctgccattttggctagcatttctggtgcatataatgtattgtgggttcttataagcgcaagcaaattgtcaagaagtttcggacgcgtgg

SEQ ID NO: 10895 - DNA, 942 bp, Homo Sapiens
  misc_feature (99)..(245): n is a, c, g, or t
  misc_feature (748)..(831): n is a, c, g, or t
cagtgtgcccctttccaatcatattcctctctctaaccctaataggtaaccactaccctgacttttgtaatgattttcttgcttttaaaatgtagtccnnnnnnnnnnnnnnnnnnnnnnnnnnnnnnnnnnnnnnnnnnnnnnnnnnnnnnnnnnnnnnnnnnnnnnnnnnnnnnnnnnnnnnnnnnnnnnnnnnnnnnnnnnnnnnnnnnnnnnnnnnnnnnnnnnnnnnnnnnnnnnnnnnntgtttgatttttaatttagaactcatgtatgtcttgtctatataagtcaaactaatgatgtgacacaaactgttgtgaaaaatgttactttgaatgtaagcattttttccaaaatcatttatgtgtctcaactaattccttctataaatcaggaagaaaacgataaaacaattcaacaggaaaatgaacaaaggacagagaactcagagaagaaacacaaatgttcaataaacatataaagatatttaattaaattcatgagtgatcagaaaaattcaaatttggatggaatcccttttattcatccataaattcaacaaaaagctggcaaattcccaacagtgaaaaggtgtggggaaatgaatgctgtcatattctgctgacaatatagtcagttggcacaacatttttgaggacaattaaaattttatatctacatagtcttcaccccaactcttccatttctagatatctatgctacaggaatacttgcccactaagcnnnnnnnnnnnnnnnnnnnnnnnnnnnnnnnnnnnnnnnnnnnnnnnnnnnnnnnnnnnnnnnnnnnnnnnnnnnnnnnnnnnntggggtgaccctctaagtcctaggaaggaaagaaattatgaagtgaaagaatatcatataagtgataccatgaagtgaaagaatcaagttgcaagatgttaccctttatga

SEQ ID NO: 10896 - DNA, 524 bp, Homo Sapiens
gggagggaattgtcaacaaagggacgagagacgcgcaactccgctccgcactgtgcgccagcatccccggggcacggagggcgctgcggcccgcccggagacccccccacccaggctggatccgggccctggggcccagggagcgggtgtggacaaatcctccaagatttaacttccaagaaaaccggcggcggagcgggtggaggaggcgaggatgtgtggccaatgcacgcggagtgcaaggccgcctagttgggagccgcaagagcctgcctggtgtggcaggcacacggaacccaatccctgtctgtccgctgcggcctgggaggggagcgccggcctcaccagaggaaggagcacgaggggaggagttccgagaggaaataattagtgaaatatttgcagaagatgctgggatgtggatttaattccggatggacagtggtgcttctgattccctcagtctgtttcccacccacgatctcctctttccttggcctagacacaccaaaaataattcaata

SEQ ID NO: 10897 - DNA, 497 bp, Homo Sapiens
taggtaaactccttataaaaagcaaatacctggatttacaaaagtgaaagtagttgttcacaaaagaattcgccatggaattctttcagttaccaagctctcctggtaatgtttgtggttatatcatttacacaaaacttttcaggaacttctgtgttgtttaagcaagatgtatctgtactgatgtctcagtgaatcagtctgtttattaagcacttatcagggcttccacacacttatttattttgccctagttaatcctgttgtttgctgccattggcatgaaatggccaactgtggctgttacagttctttcattcaattataacttgtaaaccagtgactcctaatctttttcacagttaagacaccttaccattgcttatttggttttatgagacttgttcctttttttctccctaaggaaaaagaaagctttatgacatatttatttttttaataaaactaagcaaaaataaaacttatggtaattcttt

SEQ ID NO: 10898 - DNA, 382 bp, Homo Sapiens
cgctgccccgcaagacggggtcaggcacctcctcccatctcctccatgttcccctcctgcaccacagcctttgtccctctgcccccggtggcctattcaggggtctcactcgccctgcaggagctgctaccgtttccccagtgccaggcgccggcgtgctatgcagtcaggagtgctcaggttgctacttaagtgcggaagttgctgggtgacccgtgcaagtcatctttgtggaattaggttccaaagtggcttgagaagtcgggggaggtgggcccagcttcagaattgtctggaaccttccccagcctctggctatgtctgccagtcacccccaggtggaggacaaggacaggttccaatcctcgtcttgcgggggctg

SEQ ID NO: 10899 - DNA, 677 bp, Homo Sapiens
tataggtatttagagcacctgaaatatcttaatctctgcatgtgtacaatcaggtatttcctgtagtttgaaactctaaagtgcattactatatttttagagatgtctaagtggtattttatttttatggaaccatgtttgtttaatgtggggattctctccactttgaaatgtgaaagcttatatccctgaattctgatacttaagagttttctatttcagacatctctgtgtggaagttgagactaagaataatcctagggatgtcatgaatttaggcaatgtttctcatttggaaaatgaaatgagaaataatttccttctttaaagcaagtatatatagtatgagaaacttggaggcatttcatacacacatttcttaggaaaatggacacattgaaaatgtcctcttttttatattagagattctgcagctctttgctcttaagagcaaatcacaacaggattcttaatgtatgatttctttgttcatatattatgaatgtattattttatttgcttcgtaataaagtttataaggaagagcatctcatacatatcattatcgtggaacacgttgaatgtttgtgattctgtgtggcctttttggggctggaaaatgtatgaattcttcaactgtcttacaagagatctgctaataaattttattattaaat

SEQ ID NO: 10900 - DNA, 299 bp, Homo Sapiens
gtgtagcccctcgcaagacgccagaggcagccccctctcctgggagatcaccccgcagaatatggagggccccacggtgggtaccacagccattaccatgatgagggctacgggccccccccacctcactacgaagggagaaggatgggtccaccagtggggggtcaccgtcggggcccaagtcgctacggcccccagtatgggcaccccacacccccgtcttgcgagggctgccagccccccccaaaacgcagcaatacactgtaaatatggaaagggacgaactgcgtcttccgtaa

SEQ ID NO: 10901 - DNA, 505 bp, Homo Sapiens
tcagtacaattcattttattattttagtgcaacaaaacatttccagatttatttccaatttcagtttcaaaacaaactgacctgaaatttttagtatttactatctgtgacaatgaccaataaaatgtgtaagaatataaaaaataaattcattcattgttggtagtactccaaattcaatgcataagaaccttttctatctaaagcattttcctaaaactgcaaactaaaaatctgatatttaaaacatttatgtggtaaaataatctcatttgattatggatatcataaatagaatataaaagatattacatttcttcaaataccatttgtttcactgtgttcaattttgagtttcctaacatccattctacaggtcaatcaaaatacaaaggcgtgcaaatgaaacaagctattgaaatgaaataaaattcaagaataaaagttagaattaacttatgaggtaacttttatgtaagcaaacatcacagttgtaagaaatgcc

SEQ ID NO: 10902 - DNA, 442 bp, Homo Sapiens
  misc_feature (16)..(16): n is a, c, g, or t
cgtggttgagttttcnactgccagcaggctgacgttgcctgatgtgagagcaagtggccgactggggtgcgggtgcacaggtcgggggagcacaggccacagagcgcagcctctgggggtcccccaaggcacagcatatacagcatggtcgccccttgccctggagtctgggaacaaagagaggagccagcctccccgcactgcttcagatggaaaagggaggcagggtgggcttccgttctccagatctgtttgctcttaacaggcagaacatgggagaatccttattcctggttaatcactatgcatatttgaaataaaagaaagcgtaagcctctgcaattttaacttctcaaaggatgtctctgaaaagaatcactttaaaccaatgcctataaaaagcaagtctaccaaaataaactaagactttctatgtgaaaaa

SEQ ID NO: 10903 - DNA, 205 bp, Homo Sapiens
cagcccccgcaagacgacaccctaccccctttctttgggggatccctgcaccccgaaagacccttctccatagagctcttaatgaactggaagtgccccgttaagtctccagcaatatccccttaggctctctagcgtcttgcagggggctgccggagtaccgacgctcgaacttcgatactcaattgatcatagcctgatttcc

SEQ ID NO: 10904 - DNA, 441 bp, Homo Sapiens
tgggatcattctggacagtgtgtgtggaatgtttcgccaccttctctccccactcctgcaactgctccgagccctggtatcagggaagtccacagccaaaaaggtgtatagcttcttggataagatgtctttctacaatgaactttataaacacaagcctcatgatgtgatctcccatgaagatggaactctttggcggagacaaacacccaaactcctttatccccttgggggtcaaaccaaccttcgcatacctcaaggcactgtgggccaagtaatgttggatgatagggcatacctggtacgccgggaatactcctatagcagctggaccctctttacctgcgagattgaaatgttgcttcatgttgtttcaactgcagatgtgattcagcactgccagcgagtcttgggcaagaaagggatcctctagatagacct

SEQ ID NO: 10905 - DNA, 272 bp, Homo Sapiens
ggcccggcttcccggagagggcagcccgcttgaatccttgtgtggggcaaaggtgctttgtatgacctggagaagtgattccaggtgggtggaagcaggcgcaggagaggagaatgaggcagcctgtaggacacagccaaggcaagagcaattgcctggggtgggagagtaagaggaagctgtgtcttggcattagtttcaaataaaccagattccagcagaccaaagccagcctgctcgtgcctcacctactgtgcgtcttgcgggggctg

SEQ ID NO: 10906 - DNA, 1037 bp, Homo Sapiens
gcccaaagactcgcctcccaaaaccaattcttaaacacctacaagttttctcctttaaagaaaaaatgagctgcataaaaataagacacgttttaggaataaagtgtgaaagattacaagacgtatccagggctgagagaacacggtgcctctgctgccggtccccagaggaacgcttgaacaaagaactgcctctgcctctagcgcagggccccactccccccggagccagttctcccgctgaggtccagacctgggcagcaacgtggtccggtgctcgggcttggggggccctggcatgtgtctgcatatgtgtatgtacaaacaccaggccactgccaggaatcgctgcccagcagtccctggtgaggtccaggttctgtctctatatgcataaagtgcttgggtgatggacaaagctgggtgggtatctcggagggagaggctcctggagactgggggacgccgaggccgcaggctcttcctgggcacagtgcctgctgacctgccctaagcaggagctcgctttggctttgagtcggcagtggtctcaggccattgcctgtcctccggggctgccctggggctagagggtcggtggcacccacgcctgctgagccaggcagctggaggggcagaaattctgtgatccccacctgtaaaagatgggagacaccccccaagctgtgtggctccagatgtgctggttctgccccgtgagctgcagggaggccggcaggctgactgtccgtggggcccagggcagggctcagcaccagcgatcagcgccatgggcttgtcccgaggagtccagccagcacacagagcccactctgcagggctcggcaggacggggggcccagccaggccagaaaggtcaggcacagatgccagtcagcagcgccgagagtctccgctcaatgcacagcttgcacttggtgacgttctcgatgtcggcctggtccgagagcatgtgctgcagcccctccaggagcagcagggccttgtggtagcgtgggacgcagccctcacggtgc

SEQ ID NO: 10907 - DNA, 508 bp, Homo Sapiens
ccggcagcccctggaagacgtttatctatattattgagcaattaaaacaagcgattcataattttatgttcatttaaggcatatacttatatataacatacttacattagcatatttaacacactaataagaacggttacgtttcatgtattaccaaagtgttttgatattaataatgatgtatttctacaaataaaaccatgatgagttacagagtgtaagaaaaacatgcagtggtcattaaaaacatttaagaagaacttcccttaattgaattagttttagaaattataccacagggcaatttaaaactgttttccttttacagtaataccattatatacaaaatatatacctgatttgtctttaagatccattgaaaaatccggaaagtcttttagattaaactccactctggcacgtgtatacctttgttttttattacaaatggaataatctgggtaccaccaatatagcgccactgaaattaaatacatcttactctccg

SEQ ID NO: 10908 - DNA, 526 bp, Homo Sapiens
tctagaggatccttacacgtggttgtgggtaggctgtgccggcgctatacaaatgctgacaaccgcacggtcttttattgaaggcaaatacggtggcatggagctgttccgagccttgggctgcaggagctcatcagctccatctttggaatttttcccactccctaagtgccttgcacttttccgaggatgagattgccctctacacagcccttgttctcatcaatgcccatcggccagggctccaagagaaaaggaaagtagaacagctgcagtacaatctggagctggcctttcatcatcatctctgcaagactcatcgccaaagcatcctggcaaagctgccacccaaggggaagcttcggagcctgtgtagccagcatgtggaaaggctgcagatcttccagcacctccaccccatcgtggtccaagccgctttccctccactctacaaggagctcttcagcactgaaaccgagtcacctgtggggctgtccaagtgacctggaagagggactccttgcct

SEQ ID NO: 10909 - DNA, 395 bp, Homo Sapiens
cagcccccgcaagacgggcagcccccgcaagacgggcagcccccgggcagaatttacacagagaggatcagtctccaagccaaagtcaggtggaggcatggtggtggtggtagagaaacgctgggctggcttccagctagaagccaggctggaggcaggaaggctcagtcgtctgtttcctgcttgatgttctcgacggagacaggcagctctggacttgaagccttgtcgggcgaggccacgtctagatgctcttccttcacacgcacagcaatgatctcgccaggaacaggctccgacgagatcttcctggcaccctgagggtcgtcctccagcaggggcttcttggacgcctgtctgaggggtcgcgtcttagtgggctgggttcttttcct

SEQ ID NO: 10910 - DNA, 275 bp, Homo Sapiens
ggagcctatttgagaaaatatgggaaatgctgatcatcaccttcctctttgttctggttttctggtcttcttctctggtctccttctccttggtcttcatccagggaaaacagacagttctatgaactgattttggtgtggtgggatctgggacagcaggcattccagcctttaaccttcccacagtgactttggctgtgacctgggatggagtggcaggccataactgaggtggaaaatcctgtcagtgagctagatcgagtcgtggcaagaaa

SEQ ID NO: 10911 - DNA, 222 bp, Homo Sapiens
ccccgcaagacgcaagccacacagagcactgcaacttcccagcaggcacaggcaaaaagcagcagacacctccgtcttgcgggggctgccggcagcccccgcaagacgccagttcgtccctttccagttttacgtgaattgctgcgtcttattgggggtgcccgtcttgcgggggctgccagtcttgcgggggctgcccgtcttgcgggggctgccgggtac

SEQ ID NO: 10912 - DNA, 543 bp, Homo Sapiens
ctcagctccgaactaacagaataggacgcggttctattttgtggttttcggaactgaggccatgattacaacgatggtcctcagctctgagcaatgaagtgaggtgggctcctggaactgcagcagccaccccccggggccatcgtgaggctaagaatccagtgcagggtgacgcaaccagcgaccgctacaaggacagtgaagagctagcaccaggaccttgggtagcccacccgctggagggagcgtgtgctgcaaaaagcaagagtgggctttggaggccaacggatggagcggattcagtctgaggctgttccagcccttgcttaaggatccacctacctaggtctggaaatcgtatttccacttcagatgcctactcagaggataaaataacccccggtgggggagagtactggaagagggctaattcccctggttttctccccatgggcattagtgtcagtgtaattttagagtgaccccagctatgtcacgtgtggcaggcacaagaacagatgtcaatgagctattgcagaggtg

SEQ ID NO: 10913 - DNA, 828 bp, Homo Sapiens
atctgccacccacagccccagtgtgaggcgtgcagggcagggagtgatacacgttgggggagccaaccatgggctgagagaacgcctgggtgtcctccaacacaatgtttggaggagccagggaagtatctcgcagatcccgcaaaaaggcacccacgtctacagctcggcgggctggaggtctgcgggccaagccaggcctctgcactgactgtggctgaagaggtgtggcaaaggtcaggttgagggatctggtgagggaagaggcatcagcattcccttgaggctcttgggagagagacagcacctggtccactccctgctgaaacactgacagtctcagcctctgtttcctcctgccaggggccagcagacctggagcaagggttgtggggggctcgagctcaggaagttgcagctccaggctgccgcaactgctctcttgtctggagggttggaccgcctgcggtgctggcactggcttcactaccgactcaggcatcaggatggaagattctggggcagttagtaggatgttcttcagcagcgtccgaggtgtctgttcctccaagtgcccactggcctgaatatgggccgatctgccaacagacctggctccatgggaacgccctctggctatcgtccttgtttggccactcaacttcctgggggaagccgtttcaagcagggctctccgggctccagcccgagcactccggggtcgccgcggggtgcgcgggtccgctgtatccagcacgcgtcgcagcagcccgcgcggcgtggagtcgctgtcaggttgtggtcagccatcgtctcggccccgggccc

SEQ ID NO: 10914 - DNA, 752 bp, Homo Sapiens
aacgatcccttacgtcgggacgtgaggtatgtgaggctgctccggaatggtccggaggctgaagcgaagtgtggggctggccgtctagcaggtggcgcttgggcgggttctcgatgcagctttcaagagtgcgtattcggtccacggctacaggcaggctcacgaagtgtcctctcgtggcgctggcatctcttcccaccacgtcactgcacgacacaacacttgtgcacatgggcatgaggtttacctgccccgggcatgattcggaaggccaggaacacgggcttgtggtctcccatgcagacgttgggcccaatgtggtcataggtgacaaccttctcctcgctctccgaccgcagcaccagctccttggcagacggggacatgaggatgcggtcacaccaggctgggcaccgggtgttcatgtactgctcaccctggcgggcgtcctcactgtacgggtagctgggagggaacgagatgtccagttcatacagtctgtccttaaagacagacaactccttgtcaaactccaagagcgcggtgccgttgttgtctcggaaaacctcctggttgaagtagtcgaagagtttcttttctaactggagcataaccttccggtcgttgtccgactcacgaaatatgagcttcaccacttcattggtgtcggcggcccggaccgtctgcatggtggcttttgtgcagagcgtctccacgacggacttggaatccagccggaagttgaaatcacc

SEQ ID NO: 10915 - DNA, 260 bp, Homo Sapiens
gagggtggaacaggcacccctaagggcccctgtttggactgaggtgttgctgctagccaggggattttcaaacttcaggggataaaggctggtagtgaggagtttgaggagggaacttggggtgggggacgccagagcaggctgagggaagactttggggtctgggaaaagagaagcaggagaagggcttatcatccctgagagtgaagccataatgaatgaggacctagatgatgaagagtttctgcagcagtaccgct

SEQ ID NO: 10916 - DNA, 667 bp, Homo Sapiens
gggcgtgtttccagtagtcatccaggctgtggtggacgaaggagatgtggtggaagtgactggccacgcccacgtgctcttggctgcctttgaaaagcacatggacggcagcttctctgtgaagcctttaaagcagaagcaaattgtggaccgggtcagctacctcctgcaggagatctatggcattgagaacaagaacaaccaggagaccaagccctcggacgacgagaacagcgacaacagcaacgagtgtgtggtgtgcctgtccgacctgcgggacacgctgatcctgccctgccgccacctgtgcctctgtacctcctgcgccgacacgctgcgctaccaggccaacaactgccccatctgccggctgcctttccgggccctcctgcagatccgggcggtgcggaagaagccaggagccctgtcccccgtgtccttcagccccgtcctggcccagagcctggagcatgatgagcactcttgtccctttaaaaaatcaaagccgcaccccgcctccctggccagcaagaaacctaaaagggaaacaaactctgacagcgtcccacctggctacgagcccatctcgctgtttgacgagcgcaacaggcgccggggtgtgtatccccggacatcccactggggccccctttttaagaaaatcacc

SEQ ID NO: 10917 - DNA, 506 bp, Homo Sapiens
  misc_feature (152)..(152): n is a, c, g, or t
tttttatgtgttatgcaagtatcccacttcattcaaataaattattctttccttgaagaaaagcatggccattagctctctgaaaaggaaagggtaagtttgggactgaactagtaataacaacaacaaataaaaccttcaaaagttgtggnggaaacaaattattttcaaaaacaatttacatagttataccatcctcatatcatctacactgaggtaaacagatagacaagtacaaaatctgaataacatttgctgtatttaaagacaaagatgcccttattggctcttcaaagggcaggtgaggatttacattgatccaattcttatggtcttatctactcatcctttggagccagtaataatctgtatataggatctggttaagccaactgtctccattcctccatccatccatccacccacccaatagttctttgtgtgaggcactgtgctggatcatgaagccatcaagatgagtaaaattagattctcacccattaata

SEQ ID NO: 10918 - DNA, 1138 bp, Homo Sapiens
  misc_feature (264)..(264): n is a, c, g, or t
gtccaccaagtgtgttctgtagtggagggtgaggtttgagctgtggctgaaagctttcccacacttggtgcacacgtaaggtttctccccagtgtgtgttctcctgtgtttggtgagatttgagctattactaaaggctttgccacattcagcacatatataacgtctctctcctggggtaggtttagtaggaactgattctctacctttcttggagcctgcctcttgaagagggggttttgttcctttttcattttcaaggtntacggcactgcctctctaagctggcctcaggtttattggcgataatcacagaaattatatcccctttgagcccctctgcttcaaaacctttctgctcatctgctgattcctcgtgctgggtactcaaatctgcaatctcggacctttcttggatcttgagcgaactcctgctcctcaccagactcttggatgtacaggggcccccaagacttcgtatttgtgactggtctccaagggctgtggctgcatgctgctcggggattcctttgcagttcctgaggaggatatcttctcccacaccggtttctgttcgtttggaggagttgagacctggtgtcctggctcatccagttcccgctccagatcttcgaggagagtgacagcctcttcagcgctctccgggcaatgctcctgcacccaggcctggagctcctggggcaggatggtcaggaactgctccagcaccagtagctccaggatctgctccttggtgtggatctcgggcctcagccactcacagcagagcacccggagttggctcagggcctctcggggtccaggggtatcatggtacccaaactgcctgaagcgctggcggaacatctccaggctaggaaggtacttgcctttctcttctttctcctcgacttttaccatcagaggccccacttgctcctgtggaggcctagggcccagaactggggccatgcctagtaccttggtcatcatgtaaactccagaaacagcctcaccaaagacgggactctgtcggcgcaggaatattcgttcctttgggtttccagttctttaggcccacaagttaaaccatgaatcagagccgctccgggtaccgggagaccgcaccgcgtacctc

SEQ ID NO: 10919 - DNA, 883 bp, Homo Sapiens
  misc_feature (307)..(307): n is a, c, g, or t
  misc_feature (401)..(401): n is a, c, g, or t
ggtgagcgccagcgccactgagctgctgcaggactacatgctgacgctgcgcaccaagctgtcatcacaggagatccagcagtttgcagcactgctgcacgagtaccgcaatggggcctctatccacgagttctgcatcaacctgcggcagctcatacggggacagccgcaagttcctgctgcttggtctgaggcccttcatccctgagaaggacagccagcacttcgagaacttcctggagaccattggcgtgaaggatggccgcggcatcatcactgacagctttggcaggcaccggcgggcccntgagcaccacatccagttccaccaccaatgggaacagggccacgggaagctctgatgaccggtcggcaccctcagagggggatgagtgggaccngcatgatctcggacatcagcagcgacattgaggcgctgggctgcagcatggaccaggactcagcatgatggacagtggatgggggggcacccacaccttccgcgcagtcgtcataggccttcccagaaggagctgcccagacctgcgtgtcagcccttggtggtggccagggagaggcgcccggcgcagatggccccgggcggcccaggtcctctactgtgaaggagcagggagctgccgagggacacgagcctcagtgcggggtggaaggctctttgccttgtccaccagggctcagccaagccctgcagtgtgtccccgctcggggagggcccggccgagcgggcagggagagccagtcctgtcggctgggcccttggacggctgtcagttttgcacatgatgttcctattgtaactctcagagaccttaaaaagaagtttactgcaatgtgaataatttaatctctggttgccaaaaaa

SEQ ID NO: 10920 - DNA, 837 bp, Homo Sapiens
ggatctgcgtgagcaccctttgttcctgtgttatcacatgggggcaactgaggcacagcgaggttagtcacctgctgggtgttgcatggccagtgagtgaagaagcctgcatgggaacctggggtagtctggctgtagcagtgacgctgccggcccaagggctggggacttggggcagggatgagggggagtaggatgtcccagcccccgcagtgtctccgcagagcccaaagcagctgctgccatttcatggtgaagctcttggatgatgggactttcatgatccccggggagaaggtggccacacctcgctggacgccctggtcaccttccaccagaagaagccaattgagccgcgcagggagctgctgacacagccctgcaggcagaaggatcccgcaaacgaggattacgaggatctcttcctctactccaacgcagtggccgaggaagctgcctgcccggtgtctgcccctgaggaggcctccccaaagccagtcctgtgtcaccaatcaaaggaaaggaagccggcagcagcagatgaacagaataaccaccaaggaagccacttcctcctgccccccaaaatcccctcttggagagacccgccagaaactctggaggagcctcaaaatgctccccgagagaggccagagggtccggcagcagctaaaaagccacctcgccactgtgaacttgtcgtcactcttggatgtccggagatccacggtgatctcaggccctgggaccggaaaaggcagccaagatcactcaggggatcccacctcgggggacagaggctacacggatccctgtgtggccacatctctcaaaagc

SEQ ID NO: 10921 - DNA, 992 bp, Homo Sapiens
gggaggagggaagatggcggacgaggagaagctgccgcccggctgggagaagcgcatgagccgcagctcaggccgagtgtactacttcaaccacatcactaacgccagccagtgggagcggcccagcggcaacagcagcagtggtggcaaaaacgggcagggggagcctgccagggtccgctgctcgcacctgctggtgaagcacagccagtcacggcggccctcgtcctggcggcaggagaagatcacccggaccaaggaggaggccctggagctgatcaacggctacatccagaagatcaagtcgggagaggaggactcttgagtctctggcctcacagttcagcgactgcagctcagccaaggccaggggagacctgggtgccttcagcagaggtcagatgcagaagccatttgaagacgcctcgtttgcgctgcggacgggggagatgagcgggcccgtgttcacggattccggcatccacatcatcctccgcactgagtgagggtggggagcccaggcctggcctcggggcagggcagggcggctaggccggccagctcccccttgcccgccagccagtggccgaaccccccactccctgccaccgtcacacagtatttattgttcccacaatggctgggagggggcccttccagattgggggccctggggtccccactccctgtccatccccagttggggctgcgaccgccagattctcccttaaggaattgacttcagcaggggtgggaggctcccagacccagggcagtgtggtgggaggggtgttccaaagagaaggcctggtcagcagagccgccccgtgtccccccaggtgctggaggcagactcgagggccgaattgtttctagttaggccacgctcctctgttcagtcgcaaaggtgaacactcatgcggcccagccatgggccctctgagcaactgtgcagcaccctttcacccccaattaaacccaaaaccactgaa

SEQ ID NO: 10922 - DNA, 674 bp, Homo Sapiens
ggggtccggagttctggccgacagcaggcgaggagtgggtagcagcgcctatgtgaagttagctaatctgagaaggcccacttctggttccatggatgatggcggttgagcagatgccaaaaaaggattggtacagcatcctgggagcagacccatctgcaaatatatcagacctaaaacaaaaatatcaaaaactcatattaatgtatcatccagataaacaaagtacagatgtaccagcaggaacagtggaggaatgtgtacagaagttcgtcgaaattgatcaagcatggaaaattctaggaaatgaagagacaaaaagagagtatgacctgcagcggtgtggtaggtgcttgtgttgaggagccacagcacatcggcaactcttagaagcacactctgcagccattcctggggagcattttccagcatttgcaccaagtgtaattgttgcctttattcctccccaccatcactgtttttaattatgccctattattagcagtgactattgtgtatccattgagaagttaacaaaactactaggatgtggcttcttgtgaagacttgaaagctactttttataacatttgaaaaatgtttaattacacattactaactaatatgctttatatggtttaaaaactttttattaaaataaatatggattaaca

SEQ ID NO: 10923 - DNA, 493 bp, Homo Sapiens
caggactctagggaggggtgtggcctgcagctcattcccagccagggcaactgcctgacgttgcacgatttcagcttcattcctctgatagaacaaagcgaaatgcaggtccaccagggagggagacacacaagccttttctgcaggcaggagtttcagaccctatcctgagaatggggtttgaaaggaaggtgagggctgtggcccctggacgggtacaataacacactgtactgatgtcacaactttgcaagctctgccttgggttcagcccatctgggctcaaattccagcctcaccactcacaagctgtgtgacttcaaacaaatgaaatcagtgcccagaacctcggtttcctcatctgtaatgtggggatcataacacctacctcatggagttgtggtgaagatgaaatgaagtcatgtctttaaagtgcttaatagtgcctggtaccatgggcagtgcccaataaacggtagctaattaaaaaaaa

SEQ ID NO: 10924 - DNA, 1072 bp, Homo Sapiens
gggcctgcggctgctgctggtctgactgggaagcagtaagccaccactacgaactctcaagaggagtgggagtgcgggagtccagagctgcctctgggaagtctgcagtagttgagcaaaggggtcctcacgttcctgagagctgggcaggggggattttggaacctggggcagccaagaacgagcagccaagggtacgggagattagttgtgcacagagcagtgctggtcgggcttgggggtggctggtgggcactgcgtgggaaaccttggtttgtagttttcttggtttgcgttactcctgttgggtagaattaccctccgcgcctttgtacaagacacggtgtctcctggggcaaggaaggagccaggatggcctgggctctgaagctgcctctggccgacgaagtgattgaatccgggttggtgcaggactttgatgctagcctgtccgggatcggccaggaactgggtgctggtgcctatagcatgagtgatgtccttgcattgcccatttttaagcaagaagagtcgagtttgcctcctgataatgagaaaaaaatcctgccttttcaatatgtgctttgtgctgctacctctccagcagtgaaactccatgatgaaaccctaacgtatctcaatcaaggacagtcttatgaaattcgaatgctagacaataggaaacttggagaacttcccagaaaataatggcaaattgggtgaagagtatattccgtgtggtgttccatgacagaaggcttcagtacactgagcatcagcagctagagggctggaggtggaaccgacctggagacagaattcttgacatagatatcccgatgtctgtgggtataatcgatcctagggctaatccaactcaactaaatacagtggagttcctgtgggaccctgcaaagaggacatctgtgtttattcaggtgcactgtattacgcacagagttcactatgaggagactggtggagaacagggcggtgccattccgagtaccaatagataccttcaaggagaatgaaaacggggaatatactgagcacgtacactcgccagctc

SEQ ID NO: 10925 - DNA, 1823 bp, Homo Sapiens
aggtgtaatgatagccactctgagcagaactgacagcatgaaggcactcctggccctgccgctgctgctgcttctctccacgcccccgtgtgccccccaggtctccgggatccgaggagatgctctggagaggttttgccttcagcaacccctggactgtgacgacatctatgcccagggctaccagtcagacggcgtgtacctcatctacccctcgggccccagtgtgcctgtgcccgtcttctgtgacatgaccaccgagggcgggaagtggacggttttctcagaagagattcaatggctcagtaagtttcttccgcggctggaatgactacaagctgggcttcggccgtgctgatggagagtactggctggggctgcagaacatgcacctcctgacactgaagcagaagtatgagctgcgagtggacttggaggactttgagaacaacacggcctatgccaagtacgctgacttctccatctccccgaacgcggtcagcgcagaggaggatggctacaccctctttgtggcaggcttttgaggatggcggggcaggtgactccctgtcctaccacagtggccagaagttctctaccttcgaccgggaccaggacctctttgtgcagaactgcgcagctctctcctcaggagccttctggttccgcagctgccactttgccaacctcaatggcttctacctaggtggctcccacctctcttatgccaatggcatcaactgggcccagtggaagggcttctactactccctcaaacgcactgagatgaaaatccgccgggcctgaagggctggccccctcaggcacctttcctcccctggacacccatggtctccatgagtgctccctctgctgcccctgatgcatgcttctgctgattcccgagcaccaacgtccttacaagggggccttgtggctctcagccatgccacatccctgtcacacacccaggcatccattcctaagccagacccggctcccctacacctgaagttacactgccagcagttccccaggcctcttccgagaggcacatggttctagcctggacctggctgggctccatgagaatgagttgcctccaccctgtcccaacagctgacagccaggagccactctcccagctgcaggcctttgtggtccatcttgtcctgcttcctcactgtggacccctgtctgggccaccctagtgtgctaagctgagcagtgcagtgtgaacagggcccatggtgtattctaggccacagcccagcactcctctgggctgctctcaaaccatgtcccatcttcagcatccctcccaccaacttactcccctgtggtgagtacccgtggaacccccagcccacctcactatcatactcaagcttcccctgatggcccatcccagcccctgaagctctatgccaagaacacagctaccgcacaccaccctgaaacagccacagccaaggtaggcatgcatatgaggtcttccccataccctctgggtgttgagaggtttagccacatgagggagcagaggacaatctctgcagggctgggagtgggtagggactgaaggtctcaataaaccttcagaacctgaatgaactggcttcatacacacaaacatatttgtttatcccccaaatgtaggcacctggctcctccttgctcccctgctgatggtgtcctaccccgaactccaaaaattacacctggagtcaggtgcagaagggaaccttgtatttcacaggcctcattttgatggcaaaaagacagtgtaataataacataataataataaaaatataatactg

SEQ ID NO: 10926 - DNA, 794 bp, Homo Sapiens
  misc_feature (746)..(747): n is a, c, g, or t
gggggatcatggcgactttggtcgaactgccggactcggtcctgctcgagatcttctcttacctcccggtacgggaccggatccgcatctccagggtctgtcaccgctggaagaggctggtggacgaccggtggctgtggcgacatgtcgacctgacgctctacacgatgcgacctaaagtcatgtggcacctccttcgaaggtacatggcatcccggctccattccctgcggatgggtggctacctgttctctggctcccaggccccccagttgtcccctgctctgttgagagccctgggccagaagtgccccaacctgaagcgcctctgcctgcacgtggccgacctgagcatggtgcccatcaccagcctgcccagcaccttgaggaccctggagctgcacagctgcgagatctccatggcctggctccacaagcagcaggaccccaccgtgctgcccctgcttgaatgcatcgtgctggaccgcgtccccgccttccgtgacgagcacctgcagggcctgacgcgcttccgggccttgcgctcgctggtgctgggtggtacctaccgtgtgaccgagacagggctggatgctggcctgcaggagctcagctatctgcagaggctttgaggtgctgggctgcaccctgtctgccgacagcaccctgctggccatcagccgccaccctccgagatgtgcgcaagatccggcttggaccgtgagggggcctctctgccccctggnnctggcttgggcttggaagggaatggccggcccctggagaggtctggg

SEQ ID NO: 10927 - DNA, 385 bp, Homo Sapiens
  misc_feature (230)..(288): n is a, c, g, or t
caggtgtgagccaccatgcccggcctaagaaatacttttaagctatattttcattagctagaattgcccaatctgtgtaggtataaattacttggtatagggagagagaaagcctatcttacctgttgctttcttacttagtggtaacatccagcagttagtctatttataaacataattactttttcacatatgaaccataaaatatttaactttctgctctatattgnnnnnnnnnnnnnnnnnnnnnnnnnnnnnnnnnnnnnnnnnnnnnnnnnnnnnnnnnnngataaatgactattgaataaatgaacatatccgacaaatgttctcaatgtaaaggatcagagatgccacatgttctctttgaggggaaaagaccctg

SEQ ID NO: 10928 - DNA, 433 bp, Homo Sapiens
acaggaaaaactgggagattttctgcagaaattgagttccagcctctctcgaacctgggaagacctggcaggagggggctgggctctcggctacagacttctccccaccccgtaggagctgaacgccaaccatcctgacccgccagtgcttttggtctcctgagtgtacccaggtcctcccaggtgcggtgtgcaccaagcgcgcctggcctgatgccctggcctgtgagctggggactcctgggccctgtgagcccctaggcggcaggcccaggaatggctgggtaggacagggaacacctttgccccacgtctggctgtgacctcggtgaaaaccgacaggaaaaaaatgggaccctcctcctcagtagtggctgccagtccctcgttgcaggacagggtcatcataaccataaataacccttcacgtgtc

SEQ ID NO: 10929 - DNA, 437 bp, Homo Sapiens
gggaaaactctgtgatggacatttgtttagtaaatcccttcagtatttatccctcctttccccacagcagctttctttcctgtcaactagaaaggagcaggatgtaataaatacattttggtgtgactaggccacaccaactcttaatcatctcccattttccttagacatttaaatttcaagggcaggtaccctctgtgtactcagaaatttgaagaagttatttggttttccaaaatgcacacggcgggttatggattggttctttacaactatggttctcatatttctcacactaaataaatctctatgagagcttctggacttggcgcatttatttctgggacactctcaggttcttgttcacccatgcaggcaccccaccaaagtacatatcttccttccagtaataatttttaattacaaaataaacatcc

SEQ ID NO: 10930 - DNA, 543 bp, Homo Sapiens
gacaaggatgggcggctgagcaaagcggaaatcctgggtaattggaacatgtttgtgggcagccaggccaccaactatggcgaggacctgacccggcaccacgatgagctgtgagcaccgcgcacctgccacagcctcagaggcccgcacaatgaccggaggagggcccgctgtggtctggccccctccctgtccaggccccgcaggaggcagatgcagtcccaggcatcctcctgcccctgggctctcagggaccccctgggtcggcttctgtccctgtcacacccccaaccccagggaggggccgtcatagtcccagaggataagcaatacctatttctgactgagtctcccagcccagacccagggacccttggccccaagctcagctctaagaaccgccccaacccctccagctccaaatctgagcctccaccacatagactgaaactcccctggccccagccctctcctgcctggcctggcctgggacacctcctctctgccaggaggcaataaaagccagcgccgggcccttgaaaa

SEQ ID NO: 10931 - DNA, 493 bp, Homo Sapiens
ctctctctagcatactcttcctctatttggctcacaaacaggcaccagagaagcaaatggcaccttgaacttaagcctactacagactgttagaggccagtggtttcaaaatttagatataagaggggggaaaaatggaaccagggcctgacattttataaacaaacaaaatgctatggtagcatttttcaccttcatagcatactccttccccgtcaggtgatactatgaccatgagtagcatcagccagaacatgagagggagaactaactcaagacaatactcagcagagagcatcccgtgtggatatgaggctggtgtagaggcggagaggagccaagaaactaaaggtgaaaaatacactggaactctggggcaagacatgtctatggtagctgagccaaacacgtaggatttccgttttaaggttcacatggaaaaggttatagctttgccttgagattgactcattaaaatcagagactgtaaaaa

SEQ ID NO: 10932 - DNA, 595 bp, Homo Sapiens
ctccagctgcaccacctcaaactgcaacatcagctccctgctggtctcaagcagcacggacctcaacctggaacattagctcctacccacccgggtctccagctccacgaccctcaaccggcaacactggctccccaccggttctccagatgcacggccctcaaacatcagctcccatccgggtctccagctgcacggccctcaaactggaacatcagctccccgccaggtctccagatgcacgcacctcaaactggaacatcagctcccagccagatatccagctgcatggccctcaaactgcaacatcagtttccccccgggtgtccagcttcatggccctcaaactggaacatcagctccccgccgggtctccagctgcacggccctcaaactggaacatcagctccccaccaggtctccagccgcacggccctcaaactggaacatcagctccccagccagatcaccagctgcacaggccctcaaacaggaacatcagcttcccgcacgggtctccagctgcatggccctcaaattgcaacatcagctcccagcagattccagctgaggaccatcgtggggatctctagag

SEQ ID NO: 10933 - DNA, 680 bp, Homo Sapiens
tccatcttccagctggataccacctccttccacagcgtcatcgaggctcacgagcagctaaatgtgaaacatgaaccactccagctcatccagcctcagtttgggacgccgctgccaacccttcagcctgcggtttttcctcccagtttccgggagttaccacctcctcctctggagctatttgatttagatgaaacgttctccctctgagaaggcacggctggctcagattaccaataagtggtactgaagaagacctggaattttatgtcaggaagtgtggtgatattcttggagtaaccagtaaactaccaaaggaccaacaggatgccaaacatatccttgagcacgtcttcttccaagtggtggagttcaagaaattgaaccaggaacatgacatcgatacaagtgaaacagcattccagaacaatttctgaagaccatgcctcttgaagctttttctgcctcctgattctctctttgtaaactattttcaaattgtttttcaactccttatcaaaattgtttatacactctttcctccatgagctctggaaggtatatgcatcttctgtaatactcagataggtataagatttttcacaaaatccttatgtaagatacattccatttttaaaaattaaatgtatggttgcatctgtctttttataccctatgaa

SEQ ID NO: 10934 - DNA, 637 bp, Homo Sapiens
ctggggctgcaggaccatcgtctgtctccttgctggctgtgccccccacatccctgccacttcgagtgctgcttttgctcccagccctgtggctcttgccaccgcttggagagagctctccacattcaggggcgtacgagagtctaagccgtaggggtccctcatccctctccggttctgggatgggcccttttccagagttctagcccccaccacaggtaaccaggctcttgcctctcgcctggcttgttgtgggtgtcccattttaagacgattgcctgactccgttaatgttgcagagctacatgagcaactcctggcgcgcacctctcgtgtggaagatttagaacagctgaagcagcgagaaaaaacccagcatgagtccgaactggagcaactgaggatttattttgacaagaagttaagggatgctgagaaaacttaccaagaagacctaaatactgttacagcagaggctgccgggggcgcagggacgatgctcttcttggactctgttggaagtatgggtaagcaaagcagttccagcctcagtgagtatctgccatacagtgggccaggctctgagttcaggggtagttatgtaggtgatttcatgctcgtaggccactgtttggac

SEQ ID NO: 10935 - DNA, 462 bp, Homo Sapiens
tcggccggtgcgtgaatggccaaggacgtgtcatcattatcacgaagacaatctgccagcatgaagtaagctggtgctatggaggggcacccgatatgctgaccactttccaggcacaagagccagtgattggcagacagcccaaaggatggaaagatgatttctgaacgtggccctgcttgcaggcaggcagtttcaaccctgatacagtcagcagattgccttgaaataacagggctttgagggtcttcagccctctccacctcccggcctttgtgacatgtgatgggtcaccactgtcttcctgtgaggtcccttttcatcaaatgcaaaactgggcttcctacgctcaagggaagctccagcctcttttgtccccatctcctgacagccccaggggtggccattcaacgcctccggccattcaacgctacaaaattggtggtattggtaactgttcct

SEQ ID NO: 10936 - DNA, 271 bp, Homo Sapiens
cgagccgccgccgccgctcttgccggccgccgccacggtgaccagcgtttgttcaatgtagtcgtcgtcgccgccggccggcgcgggcaccgggatgagaatctgatcctcgaagccgtcctcggcgcgcagcccgtccgagtcgtcgccgcccaccacctcctcgcgcgtctgcaccaggatcacctcctggtggtggtgcacctgggtcgggtcgtcggtgaccagcggctgcagagcgatcatgggcgggtggtggtggtggtgatgg

SEQ ID NO: 10937 - DNA, 327 bp, Homo Sapiens
cgttgaatggcctggggaggccaccgtgaggcaaatgctcagttttcggaggatgctgtgaggcagggagaaacttggctttcggtggccgcagtgagggaatagtttgattgctgaggctgccgggaggccgaaggtgggcctggaaagctttactttaagaactctgtggcctacagaggctgccaagcagctcagcaggagttggaccaaaggaggttgttgtgaggcaggagacgggcctgtagacgcactgggaggatgagctcgtcctggagacgccgagttaaggacattctgacccagaccagccttcgagggatcctc

SEQ ID NO: 10938 - DNA, 423 bp, Homo Sapiens
ttctacccacgatcactcctctcggttccgaggccgcgtcttgttggccaggacgtcctcacagctgtcgttcatgttctggtcaaagtcccgagagttcagcgagccgggcggcaccttctggaagttgaggctggcctcggggatgcgctgcaccagctcctcccgggcagagatggtcgaggcgggggtgctgggcatgttgctgagggaggcgctgtgggcaggctccgaggagcccagtgttgtcaccgtccccagccacatcgtggatctcctggggctaggatggccacgtccttcaccagcgtctggctcagcctggcaatctccgcaatctctgccgtctgcacgatgaaaccataagggtcaggctcctcctcatcgtcgtccgtgtcccgggggccgggggcccgggaacga

SEQ ID NO: 10939 - DNA, 574 bp, Homo Sapiens
attaaccagacacatgggctgctactttcatagcaccacgtgccagggagagactcagcactgggccagaggattctggggaagggtgaagctgctgagtcaccaaagcagggcagtgggatggtgatgggttagaggagggaaggtctggggcccctccgctgttcgtcagctgtgtcccctgaggagggtgcagccacctgcatgatggctggtcctggagtgagagaggctgaaccaggagcctaacggtgtcgcggtgaacgggggcaaaaggagagtgacttggctttgggattcctgggccgctgtagcctgtgaacactgtaactaggggaccgtttttcttctccactcctctctgctaggggcctagcacagcgtttggtacgaacaaaggctcagtaaatgcagtaatggatgggtggttggaccagctgaccaacaaacgggtaaacaaatgaactgggtgactgaggctggataactggccacggcctcccgctgaccgtggcctgttggactgttctttcggcagttccgggtgctcttcgccgactgtcatctcagcggt

SEQ ID NO: 10940 - DNA, 1071 bp, Homo Sapiens
ctcccgtgtcctccgcgcaggcgggcggcccggagcgctggtgccggcagaggcggcgacggtggcgcccctccgtcatcatgaacagaggcttctcccgaaaaagccacacattcctgcccaagatcttcttccgcaagatgtcatcctcaggggccaaggacaagcctgagctgcagtttcccttccttcaggatgaggacacagtggccacgcggctagagtgcaagacgctcttcatcttgcgcggcctgccaggaagcggcaagtccacgctggcacgggtcatcgtggacaagtaccgtgatggcaccaagatggtgtcggctgacgcttacaagatcacccccggcgctcgaggagccttctccgaggagtacaagcggctcgatgaggacctggctgcctactgccgccgccgggacatcagaattcttgtgcttgatgacaccaaccacgaacgggaacggctggagcagctctttgaaatggccgaccagtaccagtaccaggtggtgctggtggagcccaagacggcgtggcggctggactgtgcccagctcaaggagaagaaccagtggcagctgtcggctgatgacctgaagaagctgaagcctgggctggagaaggacttcctgccgctctacttcggctggttcctgaccaagaagagctctgagaccctccgcaaagccggccaggtcttcctggaagagctggggaaccacaaggccttcaagaaggagctgcgacaattcgtccctggggatgagcacagggagaagatggacttggtcacctactttggaaagagacccccaggcgtgctgcattgcacaaccaagttctgtgacctacgggaaggctcccggggcagaggagtacgctcaacaagatgtgttaaagaaatcttactccaaggccttcacgctgaccatctctgccctctttgtgacacccaagacgactggggcccgggtggagttaagcgagcagcaactgcagttgtggccgagtgatgtggacaaagctgtcacccactgacaacctgccgcgggggagcccggccca

SEQ ID NO: 10941 - DNA, 802 bp, Homo Sapiens
gcaggctggtacggtcggagtgtgggatcggtcgcggggccgcgcccggagctggcgccaggcccaggttagatctgcaatttctccagcggttcctgcagatactgaaggtttgtttccttctggtcatcacaaaatgccttgatgttcctgaccctttgtgcctgaccctactggagcaatttgtgatctaccaggtggcttgatccccagtcagtactatggggtcctgggaaacaaagacttggaagggtttaagactctgacattcctggctgtcatgctcattgttctgaactccacgctgaagagctttgatcagttcacctgcaacctgctgtatgtgagctggaggaaggacctcactgagcaccttcaccgcctctacgtccggggccgtgcgtactacaccctcaacgtgctgcgggatgacatcgataacccggaccagcgcatcagccaggacgtggagcgattctgccggcagctcagcagcatggccagcaagctcatcatctccccgttcaccctcgtctactacacttaccagtgcttccaaagcacaggctggctcgggcctgtgagcatcttcgggtatttcatcctggggaccgtggtgaacaaaactttgatgggccccattgtgatgaagctggtgcatcaggagaagctggagggagattttaggttcaagcacatgcagattcgggtgaatgcggagcctgctgctttctacagagctgggcatgtggagcacatgaggacagaccgcaggctgcagagactccttcagacccagagg

SEQ ID NO: 10942 - DNA, 271 bp, Homo Sapiens
gagatggatgggtgggtagattggacggacagatgatggtaggttgttcttgtcctggaggaggtgatccaggctgagtcctcacactgggcagagcaagaggcaggaggtgagcatggggagatgcagctgtgtgccccagtgcaccggaagttacagatgacatcgatgtcctgtccttagttagagatggccatgaaactcatccgcatggggtaactggggcctccctgtggtgctgcggagctgtgtctctgtcttggtctcttca

SEQ ID NO: 10943 - DNA, 198 bp, Homo Sapiens
ggaagagctcggtgataccaagaagtgaatctggcttttaaacagtcagcctgactctgtactgctcagtttcactcacaggaaacttgtgacttgtgtattatcgtcattgaggatgtttcactcatgtctgtcattttataagcatatcatttaaaaagcttctaaaaagctatttcgccaggcacggtggctcat

SEQ ID NO: 10944 - DNA, 766 bp, Homo Sapiens
ggggggggcggcggcggcggaagcggatcgcactctctttgtgggcaaccttgaaacgaaagtgaccgaggagctccttttcgagcttttccaccaggctgggccagtaataaaggtgaaaattccaaaagataaggatggtaaaccaaagcagtttgcgtttgtgaatttcaaacatgaagtgtctgttccttatgcaatgaatctacttaatggaatcaaactttatggaaggcctatcaaaattcaatttagatcaggaagtagtcatgccccacaagatgtcagtttgtcatatccccaacatcatgttggaaattcaagccctacctccacatctcctagcagcaggtacgaaaggactatggataacatgacttcatcagcacagataattcagagatctttctcttctccagaaaattttcagagacaagcagtgatgaacagtgctttgagacaaatgtcatatggtggaaaatttggttcttcacctctggatcaatcaggattttcaccatcagttcaatcacacagtcatagtttcaatcagtcttcaagctcccagtggcgccaaggtacaccatcatcacagcgtaaagtcagaatgaattcttatccctacctagcagatagacattatagccgggaacagcgttacactgatcatgggtctgaccatcattacagagggaaagagagatgatttctttctatgaagaacggaatccatgattgactgggagccatgactaattgataacag

SEQ ID NO: 10945 - DNA, 774 bp, Homo Sapiens
  misc_feature (723)..(723): n is a, c, g, or t
gggaccgtttgccagccaaagctatgtctgcgcgctcaccgacttcatagggtgccgaattcttttatccccaggcttgccatggctagtcgaggggctcggcagcgcctgaagggcagcgtgggccagcagtggggatacgagccccggctgctggacaagtctgcgggagctgctgggcagcctgagaggcgggcggcgcggagcaccggaccgacgttatctggggaacaacagcagagacaagtcgtgtggcaccgtgaaggatctactgctttcgaagtgtctgctttcagacaaggttatgtgctgctctcctggagcaacgatctctggactgttgatgaaacattcaacgtactgggagccgaacacactacctcatctatggggaagggttacagacttgggaatattccccagtcatatggccatatcgtctacctatgcttacctgtagcttcatgcgctggccatgctgcattttcattgcataggaattctacatagactaataagattcttgtgttagactttgtgcgatgtcttctggcgtttcgtgagcttgtatttgtgaacctttacttgaacaaggctgtgtgcaagaagtttgggttgcacgtgagctcgagatgatgctatgccttcttggttctcagaactggcatgtctagcgtcatcatcagcatgccttccctagtagcttctgtatgtacactacgnttgatagccatggactgggatggtatatgggacaagacttcccattgcctg

SEQ ID NO: 10946 - DNA, 783 bp, Homo Sapiens
  misc_feature (61)..(62): n is a, c, g, or t
  misc_feature (87)..(88): n is a, c, g, or t
gggcaaaggccgtgggtaaaagtttcccattgaaaaaatgtcccatagtctataagaatannaggcctgggatacagccaagatgcnnataatgcattagccaatctttttctttagtggagatttcttttaagcaacaacccagtacaaaacccactgcagggtatgtaaatcagcagatcagcaataaaaactgttgtacgcatgaagagcttatgtgcctgactctcatatccacgtgatgtatggagagcaatccagtctggatttataaactttgccacatatgcacataggagactatgataagctgtaagaggtgggtaatccaatccccaatactgtaaattgttatcactgctgttaaaataccattgtttgaccggtaaattaaaagttatttcttgccagtgtctctgagcttcataatcaccaaacataggcggtttaccagcacctgaataagaattaagagacactgtccatcgtactgttagtcctattaaaaccactactgtcatcaagtacaatttctccatagttcttcaaatttagggaggggaagaaaacacagcaccagtgccagagtacttttaaaacgtggtcaatcacttcttttcttgttcagagaaatgttatcacttcttgaaatgttatcgattcttcgcaattaggagtttgagagaattttaatgatgcttggtttccaaatagtcaaaactcgattatgtctatgtagaagtatccccgccgcccgccggccgctgggattcgcgcctgccg

SEQ ID NO: 10947 - DNA, 593 bp, Homo Sapiens
  misc_feature (484)..(484): n is a, c, g, or t
  misc_feature (525)..(525): n is a, c, g, or t
ttgtctgcagggggcatgttcccgtttactgagcgcgagttctcttggggtggaacggggaccacccgtgcctgctcctggccaggcggggatccccagcagggctggggccagcaagggagtggggccctcaggccagggtggaggctaggagcagtgccaggacggtgagaacaggtccaggtcctaggaggcagggcgtccccgagagggcctcttgcatgctgaggtctaggaccaggtagccgttggggatgccgccctgtagccccagccccagcgtgtccaggtcgtcctgccgctgccgtaggatccagtcccgcaccgggcggtgccgctcctccgccttcaggccctccacgtggggtcccagaagtttctgcacctcagccacagtcaacggcagcaccgcatccgtccgcagcttcatgaacgtggccaagtccatgctcacattctgctgactgagcgccctcaaatcctnccgtgggggccccacccagaaaagactggatcttcacaaantattcagaccccttcatgttctagaaaacaaagcatgccttagaataaaagactgctacttcccttga

SEQ ID NO: 10948 - DNA, 798 bp, Homo Sapiens
  misc_feature (601)..(603): n is a, c, g, or t
  misc_feature (605)..(605): n is a, c, g, or t
  misc_feature (607)..(607): n is a, c, g, or t
  misc_feature (624)..(624): n is a, c, g, or t
  misc_feature (713)..(713): n is a, c, g, or t
  misc_feature (724)..(724): n is a, c, g, or t
gggagagaccatctcatgaagtacaaataataaaaaatatgccccagatggcaaactttgtatacaacatgtacatgcatttgatacagactacacaccattatcatcagacttcattacaactaccacctgctatggtagaagagggtgaggaagttcaaaatcaagaaacagaattggaaacagaagaacaggccatgactgttcaagctgacatcatacccagtccaacagacaccagctgccgtcaagaaactccagcctttcaaactgacaccacccccagtgagacaggagccacttccactccagaagccatccctgctttatctgagaccacccctactgtggtaggagctgtatctgcaccggcagaagctaacacacctcaggatgccacatctgccccagaagagaccaagtagccaaactgtagtccttctaaaggaggacatggcagtcaaaaagtctgagtaaagctggtttttgtattttatatttgcttctgccattttactgtcactaattaatgtttagttcttatatttgttaactgatttcggtgtcttgaatatattttttttaaattatgtgcatgcannngngngacttcattgaaaaacnttaacatgtcggcccgacctcgggccctacgagaagcctttcgtagaccaattcgtgttgggcgccgcggggcccccagtaggataagntgaaacatggntcattagcctggttttccttagggaagaatccctggggccatggacctaggtggctttgggaatttctacccca

SEQ ID NO: 10949 - DNA, 550 bp, Homo Sapiens
taaagtccccaagaaattcaaaagtgtagcccaggttaagaacccctattaatgataaacagaaattgacccatgtccgctaaaaaatgtattaagtaggtttcttgtagagcaatatcaatgagaaaaacttttaatattcacaaccagtatattaagccttggaaaacattagcattattctcggggaaataactttgggactacataacaatggtacagattcaaagttctctgaatttactcatcaagtataaaataaagcctcttaaaatatcccatgctgctattattttaccagcttatactgataaactatttacagtttacaaagcgttttatctaaattctctgcttttcacaaaaaccctgatcaggtagggcaagtataattatcaccacctctaacagatggagaaattaggtctcaaagctatttaaacggcttgcctacagtcattcagctggtaaaaacctaagctgaaaataaaatctaggtcttctgactcctagccaaatattctaacctgggcacacattaataggaggg

SEQ ID NO: 10950 - DNA, 801 bp, Homo Sapiens
  misc_feature (768)..(768): n is a, c, g, or t
gggggggtatctcgaggtgccgggttgcaggcgctcaggagcgctagggtttgaggcctgctttctgctcgcgccagcagagcactacctgaggcagcgaggcgcagcgagcctagcctccccgcgccctgggcagtgtggccatggagaatcaggtgttgacgccgcatgtctactgggctcagcgacaccgcgagctatatctgcgcgtggagctgagtgacgtacagaaccctgccatcagcatcactgaaaacgtgctgcatttcaaagctcaaggacatggtgccaaaggagacaatgtctatgaatttcacctggagttcttagaccttgtgaaaccagagcctgtttacaaactgacccagaggcaggtaaacattacagtacagaagaaagtgagtcagtggtgggagagactcacaaagcaggaaaagcgaccactgtttttggctcctgactttgatcgttggctggatgaatctgatgcggaaatggagctcagagctaaggaagaagagcgcctaaataaactccgactggaaagcgaaggctctcctgaaactcttacaaacttaaggaaaggatacctgtttatgtataatcctgtgcaattcctgggattctccctggatctttgtcaacctgactgtgcgattctgtatcttgggaaaagagtccttttatgacacattcccatactgtgggctggcaatgaatgtattttctggccagaatgcctggccaggttgtgggaaaaacttatcnattggccagccaattttggaagctccccttacc

SEQ ID NO: 10951 - DNA, 397 bp, Homo Sapiens
  misc_feature (68)..(227): n is a, c, g, or t
  misc_feature (251)..(260): n is a, c, g, or t
ttcatttcagcctgactgccggaatcagagccgcgggtgagatccccagccctgtgagcctgtaggannnnnnnnnnnnnnnnnnnnnnnnnnnnnnnnnnnnnnnnnnnnnnnnnnnnnnnnnnnnnnnnnnnnnnnnnnnnnnnnnnnnnnnnnnnnnnnnnnnnnnnnnnnnnnnnnnnnnnnnnnnnnnnnnnnnnnnnnnnnnnnnnnnnnnnnnnnnnnnnatagcgaacctccatctcaaattnnnnnnnnnntgcctacacgctctttaaaatgcaaggctttctcttaaattagcctaactgaactgcgttgagctgcttcaactttggaatatatgtttgccaatctccttgttttctaatgaataaatgtttttatatacttttaa

SEQ ID NO: 10952 - DNA, 901 bp, Homo Sapiens
  misc_feature (393)..(414): n is a, c, g, or t
  misc_feature (431)..(673): n is a, c, g, or t
atatgctgtctcactgaatagctttcttttgtgacaaaggccacagacagcccttagactattccggaaacagtaggaaaaattacatatgtctttgacttctttattctgactccactgattttagccataatactttaaggagctactttttactaccccttaccgtgctgacttctgcaggtctgccctgtgacctgtcaggaactcctgagttacgctactggggtcacctgttgctcccctagcaagttaggcatgtcatatatttttaacagctttattgagatataattcacatattatacaattcacctttaaaacatacgattcaatggttttcagcaaactcacagagttgtccgcccacttgagagcaaacacatgttcaannnnnnnnnnnnnnnnnnnnnngggacagagtcagcttnnnnnnnnnnnnnnnnnnnnnnnnnnnnnnnnnnnnnnnnnnnnnnnnnnnnnnnnnnnnnnnnnnnnnnnnnnnnnnnnnnnnnnnnnnnnnnnnnnnnnnnnnnnnnnnnnnnnnnnnnnnnnnnnnnnnnnnnnnnnnnnnnnnnnnnnnnnnnnnnnnnnnnnnnnnnnnnnnnnnnnnnnnnnnnnnnnnnnnnnnnnnnnnnnnnnnnnnnnnnnnnnnnnnnnnnnnnnnnnnnnngtgtaagccaccgtgcctggcctacgtgttcaattttctatgaacaaaggctttagtccttgacccagggctaaagtggtctgtccaagctgttgttggtagagggagtatgataaaatgtttaaatctcatttggttaccttgagtcctggaacacgcagtaactgtcatgctatagtcatcatctgtatttggctgggaatacaaatggaagatttgtggtgtatt

SEQ ID NO: 10953 - DNA, 564 bp, Homo Sapiens
tttttttcatgggatgatgaactttcgttttattgatttttcagtacccaagtgtggcactgtaaggctgccacatacagcaagtgacatgacaccaaaaggaccttccgagagtattattcttactttggatggaagacatcgcttaaacaaaaaacatttaaagatgctcccttgctttttataattcctaactgtaaaatataattttagtacagaacaaacaaattctccttggttggtcacatcattcattattgaaagggaaacttagtatcaaaagaaacaaaacactgaaataaataactaagtaatttactgaaaggtagttttgttgcattgcacacaactgaccgcagagaattctaaagctgatttttttcttaaaggatgaaaaactcatttgccatttttagtttcttgctaagtgatacatgctccttataaggaaaactactctgtgtaggcctgagtttaaaatgtaaatatctgtttatccagagtttgttaatctagagtacacaggtgtggaaaactggtggtgaaaagagggacctacccagc

SEQ ID NO: 10954 - DNA, 851 bp, Homo Sapiens
  misc_feature (769)..(769): n is a, c, g, or t
gggacagcatggccgccggtactgcagctgccttagcgtttttaagtcaggagagccgaacgcgggccgggggtgccgggggcctacgggtcccggccccggtcactatggacagttttttcttcggctgtgagctctccggccacacccgctccttcacctttaaggtagaggaagaggatgatgcggagcacgtgctggcactaaccatgctctgcctcaccgagggagccaaagacgagtgtaatgtggtagaagttgtggcccggaaccatgaccatcaggagatcgcagtccctgtggccaacctcaagctgtcctgccaacccatgctcagtctggatgacttccagctccaaccacctgtaaccttccgcctgaagtcgggctctggccctgtgcggatcactgggcggcaccagattgttacgatgagcaatgatgtttctgaggaggagagcgaggaagaggaagaggacagtgatgaggaagaagttgagctgtgccccatccttcctgccaaaaagcaggggggcaggccctagccctcctaggtcagctccatgtgccatgcaccgccatgcaccctgttccctgacaagtttcaacaattgtaaatatttcttccttgaagaggagagcttgggtgggggttgggtgggagggacttgggtctttggtgctaggagagggcctgtgctccacacagccgtggttttctgattttcaccatgcccggggcctcccttcccacctgcctgtgagaatnggaggttagtgcctgaagctcagagctacacatttttaatagtttttacatttttggataaaggttgaaataaagtggtgtg

SEQ ID NO: 10955 - DNA, 606 bp, Homo Sapiens
gtttgcataaaatatcattagacctaagagatggtcaaaggcacaaagtttaaacatggggggggcgggtgttgagaggggtctgggataccctgaagcccagaggtgtgatttgttcccccttgcccagaagggtgactgttccactgggcctgtcaccacaggacattttccatgacaagcactcaccttcttggggaaggggcatcaggttggcacaggaaaggcccaggtgaggggccactctgtacattaatactttggtgattaatgtttggggagaggcaggattctcacccaggcttttgactcaaaccctctcactcagctggatatgaaacccagagtccatgctactcccagctctgacacaaggccaagcccacagaacactcccaaacgaggtccacgagagttacggaatagggtggaaaggatcggagggcatcttctggaagagagcgctagggcagatcacagttaccgctccacaggttgctgtagacacagtttgcttgccccaaagatgatggcaatgattgtgcctttgggtgctataaagggcattgacttttaaagcgggggtccttatcccgacccccccct

SEQ ID NO: 10956 - DNA, 628 bp, Homo Sapiens
  misc_feature (34)..(34): n is a, c, g, or t
caccaagaaaggataaccgggggggacagccgangggggaggggaagtactgaagggagtacattttgtcattttgagcagggagaaagattgggggctgggctcctgaaattgtaatactgcttgttagccatctacaatccctaaagtgctttcagaggctctacacatcttcaatgagtcaaaccccaaagacttataaataggtatataggttgctaatctattcctgatgctttgcctaaaaaattggcattgccatcttccacatctttcttttggaagcatggttttgagtttgttccttgttggtaagcatccagaaaatggcagattccggggatttcactagggaagtttggtggaagttcctcccttgatcgaggggtaaacacgaaaccaggacagtctttgagtaatctgtaagttgttgggctgacattgatttttcgtggtacactgcacgactcaaatttgttagccagagtgacattgtttccaaaaagacagtaacggcgcattttaactccaacgacgccagcaaaaactgatccagagtgcagtccaattcgcatcttgataggttctccatggggagacataacttcatcagagacctccatcatct

SEQ ID NO: 10957 - DNA, 840 bp, Homo Sapiens
  misc_feature (191)..(202): n is a, c, g, or t
aaactactaaatattttatttctaagcaaaacagagctccagcataaatcctgtttgtctgagaaattcacaatacattttagaaatccaatggatacattcaaaatggtatctaataaataacaagggcagggctactccaaatctaagaatctgatttaaacataaggggccaaaaaactaccaggacnnnnnnnnnnnnggtggttataaacaatacttgatatttaagcaacacagtcacactgctttaaacttagttgcagagatctacaatttattattattttcagtgttagagctagagggtaattttttcaaagatggcactcaactccacttatttacctgtcaacaaatacagaactgaactgttagccataagcactttacaaacagactcaggaaactatgcagtagacaatgacatagcttaaccagactctgaaaaagagatacatattttgattcacacttgtacaaagagaacagtcatgtctgcatgacttaaggttccctaaacacaactgttttatgttttagacccctggagtgtgccagtttaccacatcagggaggaatcaagggatgtgtgtgctccttctaaagaaccaagggcaagtggggtgggggtggctacagggaacgctctgggcaaaagagctgcctcaggtttttgtgggaatgaaaattacttgttgcagttaagcaattcctagggtttatctagtttgaggttcaaaacaaaggagagaattatttccttcctcgagctcttcccaaagcaatatgcacatctcataatcaaatctcaagtagtacaaagagataatcaattat

SEQ ID NO: 10958 - DNA, 501 bp, Homo Sapiens
tgtgacatggtgactcttaaaactggggagggacgtagagatgagagtttcacacaccagcccataggtgggatgtcaagacccatcggaagtgtcgctggcctaagagaagagcacttatttctccccatggctgatctagaattgttccctgattctgaaagaagtttacactacactggtaagcagtactattagactactgactgtggccttctgtgcatatggaataatgatttctcagatttgtaggcttgaatgtgaatgttattttatcagtaatcagaataaattgcttatattcaggagttattttaaatatttaaatgaaatttattttaggcaccaagcaccacataaactcataataactatttgcaatgcattagcatcactcacggggtaatgaaaacataccttagctgctgtaaaagcaaagtcttccgtgtccgggtgggctgaaagtttttaataaaattttagctaaacatttgtttaagt

SEQ ID NO: 10959 - DNA, 498 bp, Homo Sapiens
ggctgccgggcagggaatgcagccctgggactgggaggtcccttgcagtcgcctgctgcccagtgtgaccagaaaggcagccctgtcccaccatagccacaggcagcagaagtctgggcagagttcatcttcttgacctttggccacttgccttccccagctgcccccaaggggttcccccagctgaggagagaccatggtggaccccagctgcctgtcacccttcatctgggacttgctgtcaaaccctaggatatgtctcataaaggggaggtctgggccagcctgctgctgtctgcttcaggaccaggcagagagtgaggctgggggttctcacaccttactccaccgggcacatcccaacctgcactggggcccacccgagcgcttgttctggtctcagccgctcccttggcagctgcagcccccatgcagaagaggctcccaggcccaagctctgtgtgacccagagaaataaagatgcctcagtgtggccca

SEQ ID NO: 10960 - DNA, 585 bp, Homo Sapiens
  misc_feature (502)..(512): n is a, c, g, or t
tggaacctaaaaaatttcttcaaatgcacagattccaatgcaagtcgagagcgatgtggcgttccattctcctgctgcactaaagatcccgcagaagatgtcatcaacactcagtgtggctatgatgccaggcaaaaaccagaagttgaccagcagattgtaatctacacgaaaggctgtgtgccccagtttgagaagtggttgcaggacaatttaaccatcgttgctggtattttcataggcattgcattgctgcagatatttgggatatgcctggcccagaatttggttagcgatatcgaagctgtcagggcgagctggtagaccccctgcaaccgctgctgcaagacactggacagacccagctttcgggaccctcccgcgtgccgaactgatcttcgagctgcatggacctaatcacagatgcagcctgcagtctcgcctaatggagctgccattaggggagtgtaaaactgggaaatgctgctcactgacagaattnnnnnnnnnnntaaccagtatgaaagtcgttgcgccgtgaatctctactgtagccatgaatttatggacagttaaatgcttacc

SEQ ID NO: 10961 - DNA, 461 bp, Homo Sapiens
ctctcaggatcccaactcatgggcgagctgcagcgtccgtgtagccacccttcaggggtcttgattgccacacagctctccttcttccctggggccttgagccgcccccgacacacctcgccaaactcacctgcaccaatcacctcttcaatcttgacgtaggagacatcgatctcttttgcaaattccctcacagcctcattagggtcttcataagtgaaggggtcgatgtagaccttagtaccatgtccgatgagatactgtccgtgtttgtccgaatattctgcttctctcccattgctctgcttcctgaggcagagaactgcgaccacaatgaccaccaggaccaggaccacacccacgactgccgtgcccgcaatcagggccagctgctcccgccagccctcgctctcatccagttgggtccggctgtgatgttcctggccgaagggcccgtaacc

SEQ ID NO: 10962 - DNA, 410 bp, Homo Sapiens
aatttacagagaaatgtttactatctcccttcggagacatttttgaaattaaagggctgtgggtggaaacaccaaaaatgagggagactcccccctcaccaggaagcctgcccgagaatgcccaagtatctcgccactcccgcaggagggagcctcgctctacagggagacagttttgtggttttaatgcggtaggttacagctgttggtttctgcgtgatactgattctattacttgcgttgtattggtatgggatgtgtggatttcggtggaggaaaaaattgccatgtgtgtgtctgatatgataacatttcaaactttcctgggtccagacatggtgattgtgaagaagctgttaagtgcctttttgttttaggcttgtaaataaaaataaaagagaaagaaatga

SEQ ID NO: 10963 - DNA, 411 bp, Homo Sapiens
tgtcagtcgctctcaggatcccgcctcaggtgcgagctgcagcccgggccgcttcccacacctgccttccgtccctgcaggttgatggtggcatcacccttgagaatggaaatctccaaagacagagcttggttgccgtcctggagctctaccgggaggcacggggggcctcctcggatgtcaccaggctgctggagaccctctcccagatggagagataccagcaacattccatggtgtttctgggacggcgatcaaggatccaagagcgacctgagcctgaagatgtaccaggaggagatccaggagtggtatgaggagcatgccagagagcaagagcagctcgccctgagttgcagctcgccccttatttagcagctcgccccttagttagcagctcgcccctgagtt

SEQ ID NO: 10964 - DNA, 126 bp, Homo Sapiens
ctatatatacatatatattttttaccaaaatgaatcattactctatgttgtttaacaattggtttgacaaatcagaatatctgaaacaccttttcatgtcaataaatgttcttctctaacattttt

SEQ ID NO: 10965 - DNA, 466 bp, Homo Sapiens
cgctctaggaggatccccaactcagggcgagctgctgggggtcatgcagctgtgactccgaggagtcaggcagggtgtcaggagctggagagccaggcccggcagcccagaggatcaagcaagaggttgcaggggttggagctccagagctttcccgagcggctctagtgcctgcgggtccaggaagcggggctgggggtccaggagctgaggctccggctcgggcgatggtggctcgatgggcctgggcctctagcagctggtgcctctggtgcaagtgagggaggccagctcactaaaggatgtcggcgttcagcaagttctctggagtaagtcagtgcgtgtctggctcacggctctggtgggcagaccccgtggccgcagcccgtggctcccgggactatggccttggccaggctggggactgtccctaggctcaggctcaggctcgtaaaggggattgctg

SEQ ID NO: 10966 - DNA, 439 bp, Homo Sapiens
gcagtcccacccgctgtacctgtgcgatgccagtgatgacgacaatctggagcctggattcatcagcatcgtcaagctggagagtcctcgacgggccccccgcccctgcctgtcactggctagcaaggctcggatggcgggtgagcgaggagccagtgctgtcctctttgacatcactgaggatcgagctgctgctgagcagctgcagcagccgctggggctgacctggccagtggtgttgatctggggtaatgacgctgagaagctgatggagtttgtgtacaagaaccaaaaggcccatgtgaggattgagctgaaggagcccccggcctggccagattatgatgtgtggatcctaatgacagtggtgggcaccatctttgtgatcatcctggcttcggtgctgcgcatccgaagcagtgccgggggtcctctgcga

SEQ ID NO: 10967 - DNA, 611 bp, Homo Sapiens
gcaccagctgcagctcaacagtgaccggctggagagccggatctcagagctgacatcggagctgacagatgagcgtaacacaggagagtccgcctcccagctgctggacgcggagacagcagaagaggctccgggctgagaaggagatgaaggaactgcagacccagtacgatgcactgaagaagcagatggaggttatggaaatggaggtgatggaggcccgtctcatccgggcagcggagatcaacggggaagtggatgatgatgatgcaggtggcgagtggcggctgaagtatgagcgggctgtgcgggaggtggacttcaccaagaaacggctccagcaggagtttgaggacaagctggaggtggagcagcagaacaagaggcagctggaacggcggctcggggacctgcaggcagatagtgaggagagtcagcgggctctgcagcagctcaagaagaagtgccagcgactgacggctgagctgcaagacaccaagctgcacctggagggccagcaggtccgcaaccacgaactggagaagaagcagaggaggtttgacaccgcgtctcgcaggcgcatgaggaggcccagcgggaagctgcacggt

SEQ ID NO: 10968 - DNA, 576 bp, Homo Sapiens
  misc_feature (457)..(487): n is a, c, g, or t
aactcaggggcgagctgcaggagcgcatgcagagcagggtgggccagcggggcagtgggctgtccatgtcggccgcccgcagcgagcacgaggtgtcagagatcatcgatggcctctcagagcaggagaacctggagaagcagatgcgccagctggccgtgatcccgcccatgctgtacgacgctgaccagcagcgcatcaagttcatcaacatgaacgggcttatggccgaccccatgaaggtgtacaaagaccgccaggtcatgtaacatgtggagtgagcacgagaaggagaccttccgggagaagttcatgcagcatcccaagaactttggcctgatcgcatcattcctggagaggaagacagtggctgagtgcgtcctctattactacctgactaagaagaatgagaactataagagcctggtgagacggagctatcggcgccgcggcaagnnnnnnnnnnnnnnnnnnnnnnnnnnnnnnntcgcccatccgcatcagttttcacagcaacagctacagtttccacagcaacagttgcatcctccacagcagctgcatcgcccctgagtt

SEQ ID NO: 10969 - DNA, 483 bp, Homo Sapiens
aaggactgcgcagcatcagctcttggtgggcctctgccttctcttctgtttggccacctggtgtggatgtcactgtgtgaagataaggacagaagtgcagagctgcgctttgtgtgttgtctatgtcggctgagctaccaaggtggaagttttcatggagaaaagcacctggctccagggccagtgttacagtgttaccctgtaaggtgttagccttaaaccaccgagcagcgttctcttgatgccagtgcagagaccagagtcagatgcccgaggacagtgggtaggaatttcatcaacaaatggacctatggcatcatggctttagaagctggtacatttactgagctgatggacagtggccttctaaaatatgacacttaaattgtaaatatgcactgtacttaaggattcttaagatgtatttttttgttatttctcctccagctgctatcccttggctaataaaattctagtaatttg

SEQ ID NO: 10970 - DNA, 828 bp, Homo Sapiens
ggtggctgccatcgattgtgacaaggcagtgaccgtggagttcaagcacgatgacaaactcagtgaagacagtggagccttaatccagtgtgctgtgctttacacgacaatcagtggtcaaagaagacttcggattcacaatcttggcttaaactgcagctctcagctagctgatctttataagagctgtgagacagatgctcttatcaacttctttgccaagtcagcttttaaagcagttctccaccagcctttgaaggtcatccgggaaattctagttaatcagactgcccatatgttggcatgttaccggaagaattgtgcaagtccttctgcagcaagccagcttattctaccagattccatgaaagtattgccagtgtacatgaattgcttgttgaaaaactgtgtactactcagcagaccagagatctcaactgatgaacgagcataccagagacagctggtcatgaccatgggtgtggctgactctcagattttcttctacccaaaaattctgcccaaacacaagttagatgtcaagagtacaatgtaacctgataccgttcgttgctatgagtcccgtctttcagaagaaggaatattcttactggataatggtcaacacatgttcctgtggttgggagtaagcagcccaccagaactgatccaaggaatatttaatgtgccatcttttgcacatatcaacacagatatgacattgctgcctgaagtgggaaacccatactctcaacaactcagaaatgataatgggtattatccaacaaaagaggccatattcaatggagctcacattgtaaagcagcc

SEQ ID NO: 10971 - DNA, 918 bp, Homo Sapiens
ggggctcagctgcccctgtctgaagggtcctggcttgattgcagaaggacaacctccgcacccacctaaagacatgtatatgtcttgtggatcccagagattgggtccttgggcctggcttcttaagagttttgatgatgctgggaaaagtgactgcgattctgaagaaccgctgccttgcaaggtcaaggacattcagtggttgctggggtccgcagactactgccacccactcaccatcaactctgttagcccaattgccctgctgaacaactgcctgaatacaggcttcagtgttcccctggactccagccaaggctgttcaggtgggaccatggtgctctttaagcgtgatcggagggaagacacacagcagggccaccattccatgaatgggaggtgtacagatcactttctctttgtgctcaggtctcttctgtctccagcacctatattggtaagactagtacctgccagggagaggtgcccccaagtgaaagggtaccagtgggcacctgggaaaaagcacctggcaaggtttccatgtggcccagcccaccatggaaacagggtgcggaactctgcctgtgtcgtcagaccctcactctactcaagtgggcttttttgaaaagcccctgcccattgtctgtggccaggccctgtgcctgcttcacacccctaacagctggcctgggaaaagggccggcccaccgctccctgtgtccccacactttccttgttccaaacaccttccctggtccaccaactgtcagcccggggcccttcttgcctatggggcacctaaattcaaagcacccgccttccaccttttgttttcgccactggggcattccccgcctttttttccctcggcggcttatgggctgggcgcctttggtacacaatgcttgttaatcc

SEQ ID NO: 10972 - DNA, 1045 bp, Homo Sapiens
  misc_feature (148)..(148): n is a, c, g, or t
tgaaaattcatagcttgccctaagaagttggttagtttcccactttctgtttccccaacttaaacttggaataccactgcctccttcttaaagtttccactggggatgttggcactgtttagataccaaagcaacatcaggatgttancaaatttccttcctttttcatcatagtaaatgaagatgtctcctgtgatggtaaatacaatttcatctatgtttagcagcaagggcatttttatggttgtcaggtagtgaagtaactttttctttcaatgcatgtagcacctctttggccacaagttcttccaacagatcaaatttacactgtgacagcaacttggatacatgagcaaaagcctgcttcgctccctcggagaactctgtgatgctgaactctttgtcgaaataggcccagataaggaaggcctgaattcgagtcctaacccagttgatggggttggagaatcccaggacgatcatcttggtttttctggtgctgctggggcttctcctccgtgctgtagctgcgctgagggcaggcagggaaagaagcgaaggctgcggggagtcccgggctgctgagcactggccaccgggaaccctgggcaggtagcgccgaggctgccaaggccctagcgcttcgtggaaataacgccgctcccaagccgaggcgacagcggcagaagtagcaaagtgtggccgacggcagcctcacctcggccacagcaggagtccggagtcggacggccccgcagggcagcgaccgagagtgcaggaactggggtagcaaacgagcggccagcgccatttttatgacccttcaccccggtgcctgccggtgctgtatggaaaggaagtcggtgggaaaccgcctcagcggtgtcggagaaagagactggagagcaaagtggacctgttgctgcagcctctggtgagtcggccccgtccccgctctccagcacgcagcccaggccgagccccttcggcaacccgccccgcgctcggacccagccactctggagtctgccgcctcgcgaacccg

SEQ ID NO: 10973 - DNA, 1551 bp, Homo Sapiens
  misc_feature (1477)..(1487): n is a, c, g, or t
gtcctgccctcggatgggcaggctcgggaaaagttagctttatacgtctacgaatatttactgcacgtaggagcacagaaatctgcacagaccttcttatcggagattcgatgggaaaaaaacatcacgttgggagaaccgcctgggtttttgcactcgtggtggtgtgtattttgggacctttactgtgcagctcctgaaaggagagacacttgtgaacattcaagtgaagcaaaagcctttcatgattatagtgcagcagctgccccgagccccgtgcttggcaacattccccccaacgatgggatgccgggaggccccatcccgccaggtttctttcagccttttatgtcaccgcgatacgcaggcggccccaggcccccgatcagaatgggaaaccagcctccgggaggagttcctgggacacagccattgctgcccaattctatggatcccacacgacaacaaggccaccccaacatgggaggatcaatgcagagaatgaaccctccccgaggcatggggcccatgggtcccggcccacagaattacggcagcggcatgagaccaccacccaactccctcggccccgccatgcccgggattaacatgggcccgggagctggcagaccctggcccaatcctaacagtgctaactcaattccatactcctcctcatcacctggtacctatgtgggaccccctggtggtggcggtcctccaggaacacccattatgcccagtcccgcagattcaacaaattccagtgacaacatctacacaatgattaatccagtgccgcctggaggcagccggtccaacttcccgatgggtcccggctcggacggtccgatgggcggcatgggtggcatggagccacaccacatgaatggatcattagggtcaggcgacatagacggacttccaaaaaattctcctaacaacataagtggcattagcaatcctccaggcacccctcgagatgacggcgagctaggagggaacttcctccactcctttcagaacgacaattattctccaagcatgacgatgagtgtgtgatccccccttctccgagacgctgagagagcaggcattgcaggcgggaagatgccagaaattatgcaagaagtgaggtgtcattatccaggagctggtggggagggcatctccctgctcccctcaacctcctcccaccccatccacggcccctacctttcccaattttagtttcatgcaataaaaaggccaaactttttattccataaaacaagaaggacaaaactctcaaaaatgtatttcaagtcagtgaccagaaaaatcccaccccttgccctttccccaaaggacccttttctgtacatgacactttcttgttggtttttggctggggttttaccattgttgggatttttccattcgttttcaggggggtcttttgggggaaaatttttttaaatggaagcttctagcaagnnnnnnnnnnnaatcaacttctatgctttcttctttcgctaccccgtttccccccccacttaatacctggtcggc

SEQ ID NO: 10974 - DNA, 842 bp, Homo Sapiens
aagtttctcacctgggatgcggccatctgagttccagtttcggagcaccttttcctgataaagctggacaaatggactctgtaaattttcagccccaactccacaagaggtacatcgagttttaaataagctaccagggatctccagaaggttcttggtgccagccttgcggtgcagctcatcgatgttctgggtgatgaccacgactcgccggccctgcttgcccagccgggtctcacactcggctatggcgcggtgcccggcgttgggctccttgctccccatgacctcccgccggtagtggtagaactcccacacccgggacgggttgtgggcaaaggccaggggagtcgccaggtcctgggcttgccattttctccaataacctccagctcctctgaaggtcggaacaccactttctgcactaacaccagctcctgagatgatgactatgtgctttgcttttgcaaaaaactttcgaaaatctgccatacttgaacttggccgagccattttcaggcaaatctggtttcgtgtggacgctggaggcttcaggccacaatatagctgggaaatcaatcgacttgggacaatctggagaggtcgcatcaggcgtttgtctgtagttctaatgcttgaggcgggctttagttatttcgcccaaaatgaagatggttgtctccacggctgctttctaatatatttgaatctggagacatcaatataatacagacttctaatttgatccagaaaattcactctcttcttctgtaggtttttatatgttagaaaacatttccatttactggggcagctcgcgcccccgaatacagtctcccccc

SEQ ID NO: 10975 - DNA, 427 bp, Homo Sapiens
acattgagcccaccattgacctgaacagggtgttgggggagatgcgggctcagtacgaggccatggtggagaccaaccaccaggatgtggaaaagtggttccaagcccaggtgagtgggggttacagagccagggagtacctggcctccatctgagcagggaggtgactgtgtttctctgtgctccagtctgaaggcatcagcctgcaggccatgtcctgctccgaggagctgcagtcgctgccagtcggagatcctggagctgagatgcacggtgaatgcccctggaggtggagcgccaagcccagcacaaccttggtacgtgtccttcaccctcattgcattgaaattcgcccatgccatgtcctgttagtagcatctcttacagtctcactaatcagatcgggaatagggtacggagctcgaat

SEQ ID NO: 10976 - DNA, 761 bp, Homo Sapiens
tccgggcccctggccccgcggagcgatgctgctgctggctgccgccttcctcgtggccttcgtgctgctgctgtacatggtgtctccgctcatcagccccaagcccctcgccctgcccggggcgcatgtggtggttacaggaggttccagtggcatcgggaagtgcattgctatcgagtgctataaacaaggagcttttataactctggttgcacgaaatgaggataagctgctgcaggcaaagaaagaaattgaaatgcactctattaatgacaaacaggtggtgctttgcatatcagttgatgtatctcaagactataaccaagtagagaatgtcataaaacaagcacaggagaaactgggtccagtggacatgctggtaaattgtgcaggaatggcagtgtcaggaaaatttgaagatcttgaagttagtacctttgaaaggttaatgagcatcaattacctgggcagcgtgtaccccagccgggccgtgatcaccaccatgaaggagcgccgggtgggcaggatcgtgtttgtgtcctcccacgcaagacagttgggattattccgtttcacagcctactctgcatccaagtttgccataaggcgattggcagaagctttgcccatggaggtgaaccctataatgtccacctcacagttgcttacccaccccacccgaccctcctgtgcttttgcccaacaaaccccaataaagccctttggagacccacttaatttccagagaccacatctggggg

SEQ ID NO: 10977 - DNA, 777 bp, Homo Sapiens
aaacacttcccagctgattcgaggacttgattgatatcactaaaggagatctgcttgatattcatcagtttgcacagattttatggatggcatcattctcatgaagaaggagggcgtctgaagatcggtacaagtgagaaagtgtcaaaatggagttgtagttttgaacaataacctcaccagttccataaggccaaataatctgattcattttcaatgagtttgagtactgatcttctaaattctgtgtaacgaaagctcctaatcctgatcctgtgcccccagccatactcattatgatgaaaaaaccactgaaggagtcacatatctccacttccttccggattatgttcattatagattcttcatgcctgggtccatgaacagagtaaccatatgcccagttgtttccagaaccttgttatggacagaagcatgcatgttgaccatatttccattggacagactgggcagcctttgacaagcgtttgattgataaatttgggttccatgtcaacaagaacagcccgggcaattggaactccattctcctcctcactgaagaatctttctttgcaagatgcttgatatgcctcattctctctcatagagcagagtccctgggaactgtgtgagtcactaagcaagcatcaaaaacttcaaaaccaatctgattgccacactgaccaagttgcactgttacattgacatgctgagccacaactaggtgtatacctcttcggcaagaacccaccgggatcctctagatcacccagc

SEQ ID NO: 10978 - DNA, 861 bp, Homo Sapiens
ggggcagacggcgctgagcgcggcggcggcgggagcggcgtcgagtgtctccgtgcgcccgtctgtggccaagcagccagcagcctagcagccagtcagcttgccgccggcggccaagcagccaaccatgctcaacttcggtgcctctctccagcagactgcggaggaaagaatggaaatgatttctgaaaggccaaaagagagtatgtattcctggaacaaaactgcagagaaaagtgattttgaagctgtagaagcacttatgtcaatgagctgcagttggaagtctgattttaagaaatacgttgaaaacagacctgttacaccagtatctgatttgtcagaggaagagaatctgcttccgggaacacctgattttcatacaatcccagcattttgtttgactccaccttacagtccttctgactttgaaccctctcaagtgtcaaatctgatggcaccagcgccatctactgtacacttcaagtcactctcagatactgccaaacctcacattgccgcacctttcaaagaggaagaaaagagcccagtatctgcccccaaactccccaaagctcaggcaacaagtgtgattcgtcatacagctgatgcccagctatgtaaccaccagaccctgcccaatgaaagcagccagcatcctcaactatcagaaacaattcttttagaagaaagaacccacctaaatgttgaagctgcaagaaaagacctacccatgtgccgctgtgtcccccaaccgatccaaatgtgaaaaaaacaccttggccaaatgttgattgaaaaaacaagggcttgcactttatgacattttcgggccttcccccaaaaacggtcttctggagg

SEQ ID NO: 10979 - DNA, 313 bp, Homo Sapiens
attcgcgaatcactacacccgtgctcttagcatacgcccctttgggacagcatgtgctcctaaggtatctgcagaacagaatcaagcaggatgggcctacctgaggcatggcagctgggcagcacctggctgtcagtggctgtcacccaagcctctgcttaactcctatttcttaccttatccctctattctgctccctacctaagtgtgccagctctagttaacagtaggagggtgcttggctgacagaagaatatagattcacctaggtctattaagtgccgactgtaagtcaatgcatacaaggatctag

SEQ ID NO: 10980 - DNA, 475 bp, Homo Sapiens
gggacatttgcaaccttggccatctgtccagaacctgctcccacctcaggcccaggccaaccgtgcactgctgcaatgggctctgagctggagacggcgatggagaccctcatcaacgtgttccacgcccactcgggcaaagagggggacaagtacaagctgagcaagaaggagctgaaagagctgctgcagacggagctctctggcttcctggatgcccagaaggatgtggatgctgtggacaaggtgatgaaggagctagacgagaatggagacggggaggtggacttccaggagtatgtggtgcttgtggctgctctcacagtggcctgtaacaatttcttctgggagaacagttgagcagacagccacattgggcagcgcccttcctctccaccctcccagacctgcctcttccccctggcttccacctcaccccacttatccctctccataaccccagaggaagaacacg

SEQ ID NO: 10981 - DNA, 409 bp, Homo Sapiens
tggttaaaatagtgatttttatgtgagattctacctaaacatgctattacagctcatatatactttttccatctggattcttcacaaaagaatatgttgtgagcatctttccatgatattaaatcatcttaggaaacattattttgtgttcttcaaaatgtgcatgttaagtattcaaatcagtcttaaatttttaaaaatatgtaattttagaaaataatttaaaaggttttgtttcagtttgtaagatttcttttctggcactttaatggcttgaggtatcattatcagttacaaattgaccttattcttcatcaaatgacttttggagtagagattttattattatagcaatagatgcacagatattcctgtaagatacagctgtggttagcctttgcatccagag

SEQ ID NO: 10982 - DNA, 402 bp, Homo Sapiens
ttgtcactccactggtggacgcgttctgctcaacgggcccagagccctgtgaaatgcatcaaggtcctctccgctggccagcagcatccccaggcttctctcaggcgcccgtgttcacattttctccagcctgagacgcagcctcctgcctggaagggcctgtgccagcaccaggcagagggcaagacggagagggcagagcaagaactgcactgcatctcactgcagtctgaatctagacatcgccattccccgaggtgcgacctcagactaatgacatcctggctgagcctctgtttttctctctaggaaatgggggtgataattgtgcctacctcagatagacagtgccagaattaagtgagtcaagccaagtaaagcccagagaagattctcatcagc

SEQ ID NO: 10983 - DNA, 380 bp, Homo Sapiens
caaaaaggtggactcaaggcgagatagaaaaagaaagaaaaatctacatcaaaatatgaagtcctgacagttcaagagcctccaaggatggaagatgccgaggaatttccctaccgggcagttgcatctgaaagaagagacagaatagagacaccgaaattgcaatctaagcagcagccacaggataattttaaaaataatgtaaagaagagccagcttccagtgcagtgggactgggggggcatgctgacagcccgggagaagaagcagcactctcagcatgcaaagcagtcctccaaaccaggggtagtctcagtgggagcagtgccagtcctttccaaagaatgtgcatcaggggagagaggccgccgcttgagtcc

SEQ ID NO: 10984 - DNA, 433 bp, Homo Sapiens
gtgggggcagtttctggcccagggtctgagctgcggcagccccaggcagggggccatacctcctcagctctgtgcttggatacagggagcagccaggagactccctagtgcccccaccatggcgggtgtcactcacgcactccccatcccttagggcttcctggcctactgcatccttgtgggagtcagggaggagggcccgttgggtagctggggccaggcttctctccccaccacctgcagatttcttgctgcttccactgatacccttttgactggaatgaactggctgggcttgtcagggggcaccccaaagagggggcactgccaggtagctgggggagtggcatggggcaggggcccagttctcagcagcagacactctgtacagttttttcaatccctgtttttgaataaatattctcagcgacca

SEQ ID NO: 10985 - DNA, 284 bp, Homo Sapiens
cggagtggtgaatggctggtggtggacactagtgtggacggagctgatggaatgctgctccctttgtcaggaattaaaggatatttcggctttcccaacctattttcagaagcatccaggcgatgagtgtgagacttagtactaaggaactccttcacttcttcgtagtttcccaacatgttctgtattcgactagacagcccatcaccttttgctgtcttgtagggctctccaaaaaggggaatcttttcaggaaatgcctctttctcttggtggctcagcgc

SEQ ID NO: 10986 - DNA, 283 bp, Homo Sapiens
cctcttacgagctgctcgtcagctgcttctgcaggagctggagctgtgcccggcctcggccagctctgcttggaactgtgctatctcctgggaatgtttccccgtcccgaatctgaaggtcgtcggcctcggcctgcagcttctgcaccaggtgttccttggcctgcagctccttcttcacctcactcagctccaaggaggccgccttgaagtggcggcggttatgcccggcttccaccttggcagctcgcccctgagttagttgcagctcgccccctgagtt

SEQ ID NO: 10987 - DNA, 334 bp, Homo Sapiens
ctctcattcgcttgattccgttctctccctccacacacactcgcgttctcattcgcttgattccattctctccctccacacacactcacgcgctgtcattcgcttgattccattctctctctccacacacactcacgcgctctcattcgcttgattccggtctctctctctccacacacactcacgcgctctcattcgcttgattccgttctctccctccacacacactcacgctctcattcgcttgattccattctctccctccacacacactcgcgttctcattcgcttgattccattctctccctccacacacaactacgccttattcgca

SEQ ID NO: 10988 - DNA, 397 bp, Homo Sapiens
aagctgtatgtaactcacgggcgagcagcacgtgactcaggaacgaggctgacagtccatggggatagtaaacctcatagaaactgccagaggttgaacatggaagggtttttctctgttctacaaaacgaatctatctgggcgctggctgccatccaggatcacagctcctaacctcgggttcattccgtaactgggaaaacctgcctgtccggctttgatggcctcgctggctacactggccctgtagaagcctgaaccttctctcttttcttccattccctcctttttctccttggcagtttaaatcttggttcagagtgtatctcacccttggaatgtttctctctttgattcagtatctccatgtaaatcgaccgctcctttacaaaggagg

SEQ ID NO: 10989 - DNA, 462 bp, Homo Sapiens
ctgggcttcacaccgagaaagcgctgtaagattgaggtggggtgcactcctggatctatgtccggagatatcacttcttcctcttcttgtagtccgggggcgcctcgtacttcttggcgccagaatctttagaaggctcttggacatgtagtagggccggtccagggtagccgttgtaccgctccagtgtcttccaggaagcagaggaagagcgtgtccacacacatgccgaaaacgctgaagaagccgctggcgatgacataggcccccaggatggaggtcattgatgggcagccagtaatagttgaggtgggggctcttaaagtcttaacccagccccggggatgcgaccggagaacaacatgatgtacaggacccccaggcttccgaccaccagcagcttcccaaagaacagcagcagggtctgtgactttgtccaggaaaaccacgctgacgatgttt

SEQ ID NO: 10990 - DNA, 417 bp, Homo Sapiens
atggaccatcatcgctgtcctgaaagcccatctcctccaacttgcagcgccggtagagctcgtagtgccggctgtgggtctgctcgcggaggtcttccatgttcacccggatcaacatctcccgcagcttcacgaagtcgcagtgattctcattctccacctgcaccactccccaggggtactgccgtgctcggaccagcttgttccccaccttcacctcctcggtgctgcccaccacggcaaagggcagatgtgcattcatgactgcgttaatctctgcaacagcctcatcatccgtggggaactggtagatctggaccccgttgctgaccaactcgcccatgatcttgatcttgaacttgtggagctcgctcttggagatggtgtcagccttggcgatgatggagtccagaccga

SEQ ID NO: 10991 - DNA, 717 bp, Homo Sapiens
tcactagtgtaggcttaggcataatatatccttccaagtgcagtggaaaagcagtcttggcatgtttggatatgttgatgtgcatatacggattttgtttgttaccaaagctacgtatttgaatacagcagtcagacatgagttcccttcagggaaaatgcaccttagtattttaactttgatattttacatgatagcaattcccactcccttttccttttgatatttactagcctccttagcctccaacatctacagccacatttaactggaggaactcactcctcccaggtagtttttcaacagttacgtgttctcccaaacaagagctaaagctcaagtttgtaagcatcataaaaccaccaaagaagtaccataccaaagcccagcacagagtgagtttcagctgccatctctgctctccctttcggagctatgttatggtgctcttgggtcaggatctcgcactctgctctgcttcctcctcaaggggaatgaacacgaatacggaataagccttgctgaagctgcaggcggaaaagcttgcaattcgcaatgcgtaaggctgcacatcctgtacggcgaaggtcggatggaaggagtggtttagtgtggtgccaggttcctgtgcttcttttcagctcacgcacgtagtcgtaattggtacctgtatcaagatctccaataacataaatactggctcctataggtagccta

SEQ ID NO: 10992 - DNA, 450 bp, Homo Sapiens
atggacccatcatcgctattggcaaatggggagccgattacaattcatccaacgctctgtgaatgcctccaggcaagcctctggtatgacatggtgcttccccaggcaaacggaaggcttccaggtagaggcggagggcttcgtccagtcgcagaccctgaaaactgaaggtgctcacaaagctctccaacaggtcaatgtttttgcggtcactcacaaactctccaatcatcttcttgtccagccgagggttctctcggagccactgagcaacctctgtgttgtccattgggatggtgaggaggcctttctcttgcagaaactgaatccccttctttggtttctgattgaactgctctgtgccagtgattagcagcttctctttgtttttaatttcaattagttcccgtggatctggcaggagacaggaaaatcggggtggcttccggg

SEQ ID NO: 10993 - DNA, 104 bp, Homo Sapiens
gtatgtgagagggctcctacgtccgcgaaggccagccgctggtgcagattaacgacgtgttgctgcttgcgcccagtgtgcagcagcagcaggcgggcgtgcag

SEQ ID NO: 10994 - DNA, 417 bp, Homo Sapiens
agctgattcctagagtatcacatggaccatcatcgctgaatggagcgtggttccgacgttgagacaaattacgaccactggaagccagcacccaaggtaagatgaccggtagaacatctgccatcaaggcccttaatgctacaggacaagcaaacctcagcctggaggcacttttccagcttcacaatttatactacggtaatgagcgccggtagcccagacaagtacatgactaggagtcagaaacccgagtagaaagtaagtcagcagaagagcgagttcgcccgtgctgtgaaagatgattttttaaaaaatgaaattcttgaagagctgcaccttaaaaaataagacaaagtgaaagtattgtattatgttacaaacaatgcaggctccttcctcatttaactttacaacctt

SEQ ID NO: 10995 - DNA, 292 bp, Homo Sapiens
gtggagaaacaaacattttgccttgttggtcactgctggaaatagaagttttttcgctgcagggcaattctgtaaatgtgcttcccagctttaggaggtctgaggctactcttctccaataaccttccttcccactggaccttctcagctcacagcactgctgccctctggacaagccacagtggacaaatatgtcaagctgaagatgcacaaataatttcaagttcagttctcacgcattcaaaggacatgaaaattcttgtagcaaatcttgaataaagagttcatttgt

SEQ ID NO: 10996 - DNA, 778 bp, Homo Sapiens
cccagcatgaagggccttcatcgatgaacagtcctgggggtcagcgctgccactggcttgggggacagagggggcatgactgctggcccttccgggcctcgtcagcgtcagcagccacgggcagaaacatggacagcggatctgaggagggtgccatccaggcttaactttaattcttggtcaagttcaacatggtttgtgttccctattcgcttgtctccagctggcttgtttcttatggattcatggaactccaagtgttcagggggagtcgcctttttgtcattttcctcgctttgaatttcgtgaggatgtttgcagaagtttttacttttctgtgcacttaaatctgacagtctcttggagatgtcatgtattgatgtgctgagaacagcctttcctacctaagatggcatgagttctggaagcttccctctggcccttcccactcatgtctaccccatgagcacctgcttttctgctctctgcctaccttgattggcttagcctgttcctgaacttcgtggtgatggggccgtgtagcgggtgctgttctgtgtctgagcttcgtggtgatggggccgtgtagcgggtgctgttctgtgtctgagcttcgtggtagatggggccgtggagctgggtgctgttctgtgtgtgagcttcgtggtgatggggccgtggagcgggtgctgttctgtgtgtgagcttcatggtgatggggccgtgtagcgggtactgtactgtgtgtgacatacgcgataataggcatccatgcgat

SEQ ID NO: 10997 - DNA, 839 bp, Homo Sapiens
tttccaaaatgcagggccgggctctctggattattaagaatgaattcccgtactttggttaatggtggcggtgaatcggcgataagtgcattctcaaaatggtcacacagtttaccggattcaagccttacggcgtgtattggaggcagaatttgaaagcttgctgggcaatatcatggtacaggcgctctactctagaattgtttctaagaaaggtccaaacactgcctgtaagactcccacaggaaatttaacccatggagttaaaagtaatctgtcagtacgatcctgagtgtcttcaccacttacagcacttaggagaacactctcaggagtttgaatatgatctagatcctctatatctaagaccatctgctgagattcttctttagcagcttcagttttttcctctgccattttcaaatatgccctaacaacatcctccagagattttatgttcacctgttgacaaatgttcttatactggtataacccctcctttgccaagtggctcttgcgaagatccacgcaaagttccaagtatttcaacataattggttcgtgtatcttttgccatgttctatgttttttacttttcataacatcataaagtacatccagagcaggctgctttttgccaacctcaagaaattcgttggcgcgtttgagggcattttccggcctctgaaaataggccggcatcttggcggcaggctcagctcacccggcgtcagcgaactctctagtggcccgggccgggagaggagacgaaggggaaccagcgtaaggtcccacgcgcctcgccagcagtcgcccgcgcccagccggccagagacccc

SEQ ID NO: 10998 - DNA, 1008 bp, Homo Sapiens
  misc_feature (897)..(919): n is a, c, g, or t
ggggagagccagaacctgttctgctgcctgtaccgctcctggtgccacaacccagtcaccacggtgtccctctgcttcctcacccagaactaccggcacgcctatgacctcatccagaagtttggggacctggaggtcaccgtggacttcctcgcagaggtggacaagctggtgcagctgattgagtgccccatcttcacatatctgcgcctgcagctgctggacgtgaagaacaacccctacctgatcaaggccctctacggcctgctcatgctcctgcctcagagcagcgccttccagctgctctcgcaccggctccagtgcgtgcccaaccctgagctgctgcagaccgaagacagtctaaaggcagcccccaagtcccagaaagctgactcccctagcatcgactacgcagagctgctgcagcactttgagaaggtccagaacaagcacctggaagtgcggcaccagcggagcgggcgtggggaccacctgggaccggaggttgtcctctgacaggcctggcacggaggagggcccaccgagtggtcccatgaaacactaagggtcgtcacgccctcccgaggagctcaaggacctgcctgtcaggaccagggctgggcctgccaacccagggcagtgttggggccggaggctgctgtgtctgcccaagctcctctcagagtccagtccccaggcctccagcgctgtcagctgcaccctggcattctcacagagctggctgcccacccagtggggggctatagcctcagagaccactcatcctctggaatcaacctctttctaataccctcttggaaaaagagcttgcccctcctccagcacactagagctctggccttgtgtgtatatgtatacatacgtgaacacatgccnnnnnnnnnnnnnnnnnnnnnnnacttgtatgcacgtaggcaccagcacaaagatctgaatgatgcaccccacccccaccccaataaagaaataacagaaaaccctcaaaaa

SEQ ID NO: 10999 - DNA, 858 bp, Homo Sapiens
  misc_feature (64)..(75): n is a, c, g, or t
  misc_feature (563)..(563): n is a, c, g, or t
  misc_feature (565)..(565): n is a, c, g, or t
  misc_feature (611)..(758): n is a, c, g, or t
gggtgcccagtgagtgagacccaggtgttcttcctccacccctagtggtcccctgggcaggtcnnnnnnnnnnnngtaacactcaccagtctgttctgtagtcaatcattgattgacttgtctgtgaacttgcaggaactgtttcatagtttcattagcacagagtaaacatgtttgccatgcaaggttattttgcatctgcatttaagtgataatgttgaatcaatgaaaagtgttgattaagcagtagttgtagatatgctaagtttttcaaattactaatatcaagtggagattgtttttacttttaagggtattgcttttgtgatagcataaataatggttttccttttttgtaatgtaaattaattgctggcaacttttgtattcccatagactggggaagcttaattgcctttacaagtacttatgtacaactttgtatcaaattttctgtaatagtttatgctttagtactatatatgtactaataattttatctgacttctgtttatatcatttgtacaattacatggttgtaaaataaacttttaaacctcacncnccccaaatcctacccccgctattcaacacttttccccccccaaacnnnnnnnnnnnnnnnnnnnnnnnnnnnnnnnnnnnnnnnnnnnnnnnnnnnnnnnnnnnnnnnnnnnnnnnnnnnnnnnnnnnnnnnnnnnnnnnnnnnnnnnnnnnnnnnnnnnnnnnnnnnnnnnnnnnnnnnnnnnnnnnnnnnngtttcttttcccgccaccctccccataccataactcttccgtcctactttccgcttccgggcggctgtcctttccctgtatattggccctcctgttcccc

SEQ ID NO: 11000 - DNA, 774 bp, Homo Sapiens
gggggggacgacaaggagggcatgatcaacctcgtcatgtcctacgcgctgcttccagctgccatggtgatgccaccccagcccgtggtcctgatgccaacagtgtaccagcagggcgttggctatgtgcccatcacagggatgcccgctgtctgtagccccggcatggtgcccgtggccctgcccccggccgccgtgaacgcccagccccgctgtagcgaggaggacctgaaagccatccaggacatgttccccaacatggaccaggaggtgatccgctccgtgctggaagcccagcgagggaacaaggatgccgccatcaactccctgctgcagatgggggaggagccatagagcctctgcctcgatgccgttttgcccccgctctttggacacgccgacccggcgctccccaaggaatgctgtcccaacaagattcccgtgaaagagcacccgtgtcgccccctcccgtggacttctgtgccgccccgtccacacctgttcttgggtgcatgtgggttttcggttcctggcggtccaggacggggcgggggctcccctcccatctcgtgctgggaggtctcagcgcgctctcctgtccctgggacgtgcgtctctccttctcatgccgttctggaaaatgctcttgctgtagagagcagctgcttctgccagggtgttggaggtggtggagcgccttccgattccattcatggcattttgtgatgtgatgtaattggaatagagctgttgatttaaggcacacacaaaaaa

SEQ ID NO: 11001 - DNA, 953 bp, Homo Sapiens
ctggcgcaggcgcaagccggcaagatggcggcggctggggctggccgtctgaggcgggtggcatcggctctgctgctgcggagcccccgcctgcccgcccgggagctgtcggccccggcccgactctatcacaagaaggttgttgatcattatgaaaatcctagaaacgtggggtcccttgacaagacatctaaaaatgttggaactggactggtgggggctccagcatgtggtgacgtaatgaaattacagattcaagtggatgaaaaggggaagattgtggatgctaggtttaaaacatttggctgtggttccgcaattgcctccagctcattagccactgaatgggtgaaaggaaagacggtggaggaagccttgactatcaaaaacacagatatcgccaaggagctctgccttcctcccgtgaaactgcactgctccatgctggctgaagatgcaatcaaggccgccctggctgattacaaattgaaacaagaacccaaaaaaggagaggcagagaagaaatgagccctccctcggcgaagcctccagcaggccacaccagctgtttcccacctgctgtgcagtcaccttagatgttcagaagccgcttcctctccactgaagagctatgagatacgcacaatacttgctgttcacgttatgactctcatgcaagcaaaatacacagtttcattgttctgaatcctgtggtttctttcagcccacttttatcgccttaacctagttaatgtatattttgaattgtgtgtatgacctcagaactgaaattgataatgaagttgcaagttttgatagcccgtgaagtgcataagtatctaattttacctgaattgatttggggggaaattaccagtagaatgccttggtctgaatatttgatagaaccaattgttgtacataaaacagattgcgcatatatatatatgtat

SEQ ID NO: 11002 - DNA, 443 bp, Homo Sapiens
  misc_feature (45)..(45): n is a, c, g, or t
  misc_feature (117)..(117): n is a, c, g, or t
ctcctgcgctggtaacctcccgtcccgcccgcctcccttgtgtcngcctctcctcgcgtcgcggaatcccttgcccttggcactaccttaacatctctccgggtcccacaaccaccnttagcgcccacctgcctcaaagccaagctccaccgaaagcgaggcagtcagcccccggacatggcctcagcgctgactgatcgcaccctctcgggccccgagcacctacacctacaccaagccggccccgagcactgccctgccagcgcagccgttaccgggacagcctgacgcagccgtgagtgaccaagccagcccctgtgtggtccatacttgcaccccatccccaggccggggtctggccccttcgccctggcaaaaaaagctgcttatgctgtcttcccttggctgcactctgccgaaataaaagttctgccctaaggaaa

SEQ ID NO: 11003 - DNA, 984 bp, Homo Sapiens
aacaggaaaataaatgggacgcacttaatctcctaaatcagtggaactgagggaaaattggcctacatctcgcggggaggctagctctaagtacacgggacacatgcacaggcctgaagggtatttaaatccacagggccaggaatacggaaggaggaggtgggtgagcacaactggggcaactggtgtatacctgtgagtgactcccggggggtctgggggcgatggagcacttggaggggctggggccgtccctggatgctgcacagcacatctggggggagtacctgaagtagtcaaaggcagtggagtagatcttgctcgcgaagcacatggcggatggttgcattgggaaccacatcggcatgcaggagggacagccccaagggtcagcagcttgaagcggggcccgatggccgccacgtgccggttcatgctcccccttggccctgccgatgttcagggacatggagcgctgcagcaggctggagaagatctccacttggtcagagctgcagtacttggcgatcctcaaaccgctgcaccaggaagtcgatccagatgtagtggggggtcacttcggggggacagggtttgggttgacttgcttccgaggcagccagggggtctgcttcctttatctcagcagaaaacaggccaaatttctgctccactgtcatgtgccagcccctgccatctcccgcatgaacggagtgccaagggcccagacaccatgtgagcagcagccagcggggcgggggggcctcctgagcgcgtggccttcctgggggtgcatcaatgcctggtcacctcgtgtgcgtcgcggcggcgctccgcccgccggccggccggccctaccagcggcccttgtcctcagcgcccggctcgcgccgcacgcgcccgccccgtccgcctgccgccagcccggctcggctccccgcctagcgcgccccgagcgccgctcacagccgcccgcccagcgcc

SEQ ID NO: 11004 - DNA, 1061 bp, Homo Sapiens
gtttggcatactcagatcatcatgaaaacaaatatagtgacctggaagtgtagccatacttgtaacgtacaaaacgaggtcatcgaggtcatatttagataacttagtttggagagagagtgaagttaaccattactatgaacccaagcttattatagatctttccaataggaaagaacaaagcaaacgaaaaatctgataagaaaggcaaatcaaaatgtgaaaggaatggataggttaaagcccagatagcgctagcaggaagcatcacagcaactggtctggaacacgaacagggacaagaatcagggatttgatttctgattcctttattgcaggaactattcagcttagttcccagcatgagcctactgatgttgttgataaattaaatgacttgaatagctcagtgtcccaactagaattgaacaagttagatatcaaagtcagtcaagccacgaaaaacaggaaaccacggaatggccaaatctggctcaattagaagccttgtaccagtcttcttgggacagccagtttgtgagtggtcggggaggcactgttctttacatacaatcagtatttgtgaggtaaggaaggcatgaacacagttgagcaaggacaaccacttacacatagttactatgtgacaaaggtccatcataggcgaggcaaaggaagatacgtgacaactgcatagacacaccgcagtcaaagacacaggcatgggaaagcacgggggagaagaggacatgacgaacggatacaagcagccaccagtgaggagaaccccgttatacaccaaagccagacctaccgaaggtccaattaggggaatccccacaacagcttactaaactggtccacagtaggggactaaaccaccctatacacggtacgacataccgaagggaccacaaattatataacaccctatcttggctaactagaccacaacatagtccaccctacaaacatactcctctaatcagatacattaccaaggaagacattcctgaacaccgtctctgaccttaaaaaagacattcatcgaagacacacta

SEQ ID NO: 11005 - DNA, 305 bp, Homo Sapiens
atctccttaattaacgcttgtattctggaggtgttgtaggggaactcacgggctctgggttgacagaggccagttcccagccgctggcaacaggctcagactgggcgttcactccagtcaggtccttggctgcagccctggaggtctgcacagccttgtgtgacagggagtcctgttcctcttggcacttcttcagcaactcttcatacttcaccttcagggcgctgtactgcgtgtccacttcgtgcagaagggagatgcccctctgtttcacagccttggccctcctgatgcaggtctcctcg

SEQ ID NO: 11006 - DNA, 569 bp, Homo Sapiens
atggatccatcatcgccctgggttctgtgctctcccattaccccacacgaccctgccaactcattaaacattttggctgtgttcttcttcctggtgtctggcctcgtctgtctcggtgacagcctgcatcccgtctcctcctgcaggcgcctgccttccctttgttttgggttagttggttgccctgtgacctcagctctcagagagttttgagaaaagtcctgacttttcaggttgcttggtgccttttgttgctgctgcagtttaaggatgggagccgggctctttccagctctctatgtcctaagtggaagctgggagtcacctctgaccttcactttccccagagttttgcaaacaccttcacactgggctcctgctaggtcctcctgggtgggcagcaggcgtcgttagctcctgtacaagtggggcagatggggacccaggggaggggaccagcccagctgctgcatgacactggtggagacggtccagggccctttctcatcttggtggtgctggtgctggctggtgttcaggtgtgttttgagggagtggggatctggagc

SEQ ID NO: 11007 - DNA, 166 bp, Homo Sapiens
aaatattctaaattctattaaaacttttttttaaattaggaaaacaacaataaattttcacctcatgcttcaaccagagaatatgttatgttcagaaccccactggcttctgttcagaaatcagcagcccagacttctctcaaaaaagatgctcaaaccaagttat

SEQ ID NO: 11008 - DNA, 474 bp, Homo Sapiens
atactctaatttaagaaaaatcaactgtagatttatttttctctgatcagtaaaaagaaaatgagttccagcttgactttagctgttcaagtgagaagtctgaggaagtgcatgttaatgagccagtgacccataggtagctgggttaaagacactttggatttggataatccgggaagcaattaatccctaattgttgaacaggcagtcctgggtaaagaggacctaaaatgctgcactattaacagcattagacggccaggtttgtacttcatagttttaggctgtcttcttcacaagttttagaaaaagaatttaggagctagagccctggtgcaggatcaacagcagctcatactcctattttaaaataatttggtcgtggcctcccatcatcgctcctgttaaattatgtactgaaaagtaaactgcctgtgaaactaataccaaggtataacatgtatattttaagta

SEQ ID NO: 11009 - DNA, 295 bp, Homo Sapiens
ggtgacgaaacagatgtaaaacaattttaggggcttctctaaagtgaatttcaccaaatacaatacacggcacctaaaactggctaagctatctaggtaaaaaagggagtaggaaagactaagtccttcaacttctccattctattaatttgattgcccaaaccatcaacactgtcaccagctaccaactaaaaaaagaggaaaagctcgtggtcgaatgctcagtattaccactccagggaagatctgtccgtttgtctttcgcggaaaaaataacccccacaaccttctctgc

SEQ ID NO: 11010 - DNA, 568 bp, Homo Sapiens
tgggactgggaccggaaagagtccagcgtaaagggaaagtggggcccccaggtcaggatggaaatgtgtgaggggcgggagctcaatggccaagatgaggctggagttggggcaaggtgaagtgtcacggtcagcgtcaaggtgaggcctgggacatactgagatcaagatcagtcatggcaaggggctgagggtcaaaaggggagatgagactaagattggagtcaggagccagggtgggcctggggacaggtcagcataagatgtcaggatgaggaatcaaaaccaggggtcaggacaaggccagcattgatgtcatgggtcaaggagaggttgggttcagttagggtcaacatgggtcaaggtaaggaagctgagggtcaaaggttgagatgaagctgagattatcagggttaggctggagagggggaagaaaagggagtcaaggtcaagaatcagcataaggctggggtcaaatcaaggtcaaagggaattaggatgaggggtagagggtcaaaggttgaaccgatactaagacaggttcggtcaaggtgtgcctgcaaccacc

SEQ ID NO: 11011 - DNA, 606 bp, Homo Sapiens
ggtgacctagaggatccccactgatgttgatgggattaatgctttttagaaaatactttaaggtatatatactctgatgcttttttttaactacaataaatttgctgggccagtgtactactcaatattataattaaatagcactagcataataagccaataaaagtcatctttttcagaacatgaaaatattattttctagggaaaagacccttctagaaaaaaatcccagaagaaaaactgggaagatgagaaagaagtatgcccaaaagccaagtcagaagaatcattggtattaaatgagacaaagaaaaatatagttaacacagatgtgccccatcaacatccagaattacttcattcatcttcctgggtaaagccaccagctcccaaaacaggaagtatacaaaataacatgttaactcttaatctagttaaacaacatactgggaaaccagaatctaccttggaaacatcagttaaccaagatacaggtagaggtggttttcacacatgttttgagaatctaaattctacaactattactttgacaacttcaaattcagaaagtattcatcaatcttgggaaactcaagaagttctgga

SEQ ID NO: 11012 - DNA, 433 bp, Homo Sapiens
cgacatggactccatcatcgctactgtgtgcccatctccagaatgtcctggatcactctgtgtgtaggtttctacaacctgtgttattcgtgtctgtttgtgtgtttgttttcgcttctctgagggaggagccaagtctcatccgtgtagctccacgtgtaataaatgtgagtccagtgaacgaatgaaagatttccccaagccttgtagtggacgtgcttggaccatggtggtccatcagtgtggcagtggagtccctgagcattgaggattgggagacgtgtgactagagaggtagaccacacaagccatgaagcatctaggggtgactgcaaactgagtgaggcaggtcttctggtcctgtgctgctccacacagaaggtttcagggatgacttggaagcaagaaacaggtaaatgcagtgctgtgtgct

SEQ ID NO: 11013 - DNA, 372 bp, Homo Sapiens
ctaatacagcttaatcagcaacaagtgccaaaatttgaggtcttactatgtgcactttacctgaatcgatcctcacatcctatgaggtattattatccctgcttttcagatgaagaaactgaggtttacaaagctagtaagtggcagagccacgagatttaaaccaggtttgacaccagtgcccactctcttcaccactaccatttgggagtactgtccttccaggacaaggaaggatagtcctctgcttttcccagaattagcaaaggttctgattgacttgataaggtagtctcaattgatacggatgataggactttgaggagggaaaggtaataaagcttacacttggtcattttgcttgttccgctg

SEQ ID NO: 11014 - DNA, 571 bp, Homo Sapiens
gtcggtacatggatccatcatcgccacgtgctgcagcacgaggagcgccgctgcagtacctcacccgggaggccaagctgatcctggcgctcaaggatgaggtgtccgccatggctgatggaaatgaaggtcctcagatccccattccatcacatcctgcccaagtgcaagctggccagggacctcaaggaagcttatgacagcctgtgcacgtcgggcgtagttcggcttcacatcaacagctggctggaggtgagcttctgcctgccccacaagatccactatgcggccaccagtctgatccccccagaggccatcgaacggagcctgaaagccatccgcccctaccatgccctgctgctgctcagtgatgagaagtccttgctgggtgagcttcctattgactgctcccctgccctagtgcgggtgatcaagaccacatctgctgtgaagaacctgcagcagctagcccaagatgcggacctggccttgctgcaggttttccagcttgcagctcatctggtgtactggggcaaggccatcatcatctacccgctgtgggtggcagatt

SEQ ID NO: 11015 - DNA, 176 bp, Homo Sapiens
actctattgatcccccacatattttctatggccttcagtcaatttttttaaaggatttaataagttcaaatatgtatctatggcttaaggttacaaagaatatttttctttgcctccagtatacttagtattaaaaaaattataaaaggccataggtattcattttcaaatatttg

SEQ ID NO: 11016 - DNA, 510 bp, Homo Sapiens
gggcccgcctgaccccatctcttgtccgcttgccaccagacctcttacttgttccctgtttgatgccattttctcacactctttccttatcatgcctcattgccccacacacattctaggctgagaccttgttagccaaagtcaaagcttctatcaccttttcttgcccccttcaaccagagtcccctcctgctcctctccgctagtccggcccctgacccctttccccagtacccacttcctgcctctctcattaacccttccgtagctgctcaccatgaccccatcagaatccagttaaaagactcttccaaatttcccaacgttcctcaataccccatctctctaacccaccaaaagggcctacagcccatcgtaaacaagctctgctcatgcagtcttcttagaccaacacactctccatataacacccctatcctccctgttaaaaagtctgatggctcataccgactcgttcacaaactccaagccatcagtcaagctgtcctc

SEQ ID NO: 11017 - DNA, 588 bp, Homo Sapiens
tggaagaggcaggctacatgcgagtgctgaggaggaaccccggacgcccaccattttcacatggaagaggccaggcgacaagcgagtgctgaagaggaaccccggacgccaccatttcacatggaagaggcaggcgacatgcgagtgctggagaggaaccccggacgccaccatttcacatggaagaggcaggcgacatgcgagtgctgaggaggaaccctggacgccaccatttcacatggaagaggcaggcgacatgcgagtgctggagaggaaccccggacgccaccatttcacatggaagaggcaggcgacatgcgagtgctgaggaggaaccctggacgccaccatttcacatggaagaggcaggcgacatgcgagtgctggagaggaaccccggacgccaccatttcacatgaagaggcaggcgacatgcgagtgctggagaggaaccccgacgccaccatttcacatggaagaggcaggctgacatgcgagtgctgaggaggaacccccgatcgccaccatgtcacatggaagaggcaggcgaaaacgactgcggagagaaccacagacgccaccagttca

SEQ ID NO: 11018 - DNA, 963 bp, Homo Sapiens
  misc_feature (940)..(940): n is a, c, g, or t
ttaataatctgaagatataattcaattgtttaaaagaacatattaaagaagaccctggtagaattacatggtatcaagaaatactggactccagcacagtggagatataactgatttccttttgaaaaaggtaattttttgggggaaggcaaggcagagaggtaagaagtagttggtactataaggaaatgttagagaccattatggaaatgtattcattattttaaagcataagagtggtacatgcagacagtagtagttctggagtactggaaaccacgaggtgctcatccatcacaagcccatcacagccgggtagaaatgcctgaggaaagcagcggagctgaccgtgccagcatttacacagggaacacttcttgggcagccaggtgtcatggggcacagacccacagttctctttgcgcacatcggtgctcacagttccgtccgtagaaggagggagggcaggcacaaaaggaccccagcatgcaggttcccccattcaggcagcaggttctgtttagctccttactgtgctgtatccccatgggcggcacacgctgggaagaccgaggccgaattgcaggttcctcctggggccaaatgctgtcatctctgaaggccaggtctccccgagatggacgagcaaattcctgatggcccagcccggcaactaatcccagttcaaaggctttagaaatggccatgatccaaatcacactgtaagagaagcgggccatcttcctgcagtccatagcttttaacattagggggaaaagaggcgttagcatcgctttaattcagagtcattgccaaacagccaaaggaaaacattcatctcctaaagcgaaaatggcatttaagaagaaaatgagaaattcgttttccccagaaggtcgtagcagaagcaggagcaggcgtccaggggaactaggagggnccttatacggcccttggacgttt

SEQ ID NO: 11019 - DNA, 1070 bp, Homo Sapiens
aacaccctttccattcagctctgcgataccagtcagagtcttcgtgagaaccagcactatggtgaccttttaaatcactgtgcagtcttggagaagcaggttcaagagctgcaggcggggccactaaatatagatgttgctccaggagctccccaggaaaagaatggagttcacagaaagagtgaccctgaggaactaagggaaccgcagcaaagcttttctgaagctcagcagcagctatgcaacaccagacaggaagtgaatgaattaaggaagctgctggaagaagaacgagaccaaagagtggctgctgagaatgctctctctgtggccgaggagcagatcagacggttagagcacagtgaatgggactcttcccggactcctatcattggctcctgtggcactcaggaacaggcactgttaatagatcttacaagcaacagttgtcgaaggacccggagtggcgttggatggaagcgagtcctgcgttcactctgtcattcacggacccgagtgccacttctagcagccatctactttctaatgattcatgtcctgctcattctgtgttttacgggccatctatagacttagttgttactctttggaccactcccctcaaaacttggaattctctcacctctaacatcagaacatcaattccagtggaacagtcttcccatttacaggtcttctctccaactcttcacggaaagtgcctgcaaaaacagaggtggatacgaggacaggttggagctgcagggactggcgagtctgctttcttctactgccctgagcctgaacgcttctgcttaatctgagaatcacatttggtttgttgagcctaatatttgttgagattttgcaggaccctgatcttttgtggtcctgtaaaagatactgaggaatgtctttcagccaagccaagaggatggtttcaataaacctaataatctgaagttcagtatcattttgattgataactttcttggccttgttggcctgtatattctcctgtatcagggggaaggtggctctgccataaacagagttcagggaaatgaaca

SEQ ID NO: 11020 - DNA, 756 bp, Homo Sapiens
ggtgccaaaacaaaggggatttggtgatggaggctttgttagaaggaatacaaaatcgagggcatggtgggggatttttgacatcttgcgaagcagaactacaggagctcatgaaacagattgacataatggtggctcataaaaaatctgaatgggaaggacgtacacatgctctagaaacttgcttgaaaatccgtgaacaggaacttaagagtcttaggagtcagttggatgtgacacataaggaggttggaatgttgcatcagcaggtagaagaacatgaaaaaatcaagcaagagatgaccatggaatataagcaggagttgaagaaactacatgaagaattatgcatactgaagagaagctatgaaaagcttcagaaaaagcaaatgagggaattcagaggaaataccaaaaatcacagggaagatcggtctgaaattgagaggttaactgcaaaaatagaggaatcccgtcagaaatcgctggactgggagaagcaacgcttgatttatcagcaacaggtatcttcactggaggcacaaaggaaggctctggctgaacaatcagagataattcaggctcagctagtcaatcggaaacagacattagagtctgtggaactttctagccaatcagaaattcaacacttaagcagtacactggagcgggctaatgacactatctggtgccaatgagtcggcacatagagcgcctcaccatgagggtcaatgacttggttggaaccaagtatga

SEQ ID NO: 11021 - DNA, 446 bp, Homo Sapiens
gcatcagaaaacacactctctaaagccacttccttgtgcacagagtctgcacagggagagcacaggcatctccctggaaaagcacctgccaatgacgaatttcatggaagaacctaggcaagaaaggaagcctctttctgagacacagtctctgagaggtgagcctagctttgctcttcctacagggtatgcttgggccatacacaatgctcgccttactttaaagctattttgccacagtcctgttaaatagtgtggacgtccttttgcagtctggtgtgcatgccatatgatcaggacagcttttccactttactcggtttcctacaagcaagtaggaaatacagtgaatttaccctaaaatgtccaatctgtatttatgtaccttgtcagtgttttgctgttggttttctaaaacaatctgatcaataaatcttatccaaatc

SEQ ID NO: 11022 - DNA, 419 bp, Homo Sapiens
tactattttgcaatgtttaatgttcacacttacaaacagaagattttgcatggaaacgtacattgtggcataagtatactgtaagaaaattaaatttaaaagtttaatttctaagatatattttcaagcaaattttatatttgcccacactttgtgtaagaatttaataagattattctttaacaaacagagaaaaacaacgctaaatgatttaatcctttcatctgtggacactgtatgctttttgttttaatttaactgatcagaaaattatattgatatgcaaaatctccagttaaaaccaatcttgcagcgcatttaaaataccgatctctcatcaaaacctacaatataccatgtgaaatgacatggtgtgaagagaacagtgagaaaactgtagccacagcacagcaaaaagg

SEQ ID NO: 11023 - DNA, 762 bp, Homo Sapiens
  misc_feature (345)..(448): n is a, c, g, or t
  misc_feature (450)..(461): n is a, c, g, or t
  misc_feature (463)..(509): n is a, c, g, or t
  misc_feature (515)..(518): n is a, c, g, or t
  misc_feature (524)..(524): n is a, c, g, or t
  misc_feature (533)..(533): n is a, c, g, or t
  misc_feature (547)..(665): n is a, c, g, or t
cacttcagcctggatgtgtgtggggaggaggaggacgatgaagaggaagaggatggggtcactgaggggctgccagaggagcagaagaagacaatggctgaccgtaacctggaccagctgcttagcaatctggaagacctcagtaattctatccagaagctgcacctggccgagaacgccgagcctgaggagcagtccgctgcgtaggcgtcccacgcaggcccacactgcccctctcattctcttcaaactgtgactttttacagactcgggcgggtgttctgcggccccccaggtgctatgggggagggggacgttaaatggaattaaaccagaaagaaagcnnnnnnnnnnnnnnnnnnnnnnnnnnnnnnnnnnnnnnnnnnnnnnnnnnnnnnnnnnnnnnnnnnnnnnnnnnnnnnnnnnnnnnnnnnnnnnnnnnnnnnnnannnnnnnnnnnnannnnnnnnnnnnnnnnnnnnnnnnnnnnnnnnnnnnnnnnnnnnnnncacccnnnnaaaaanaaaccaccnaaaaaacccataannnnnnnnnnnnnnnnnnnnnnnnnnnnnnnnnnnnnnnnnnnnnnnnnnnnnnnnnnnnnnnnnnnnnnnnnnnnnnnnnnnnnnnnnnnnnnnnnnnnnnnnnnnnnnnnnnnnnnnacaacaaaaacatacccccaaattctaccataacacttttcacacccatccccaaacatgtggcaccgcgggcattcttggttctctaacacgcgga

SEQ ID NO: 11024 - DNA, 1347 bp, Homo Sapiens
  misc_feature (612)..(641): n is a, c, g, or t
  misc_feature (706)..(769): n is a, c, g, or t
actctgatagccagctgttccaatgaccagactgtgcgtgtatgggtcgtagcaacaaaggaatgcaaggctgagctccgagagcatgagcatgtggtagaatgcatttcctgggctccagaaagctcatattcctccatctctgaagcaacaggatctgagactaaaaaaagtggtaaacctgggccattcttgctgtctggatccagagacaagactattaagatgtgggatgtcagtactggcatgtgccttatgaccctcgtgggtcatgataactgggtacgtggagttctgttccattctggggggaagtttattttgagttgtgctgatgacaagaccctacgcgtatgggattacaagaacaagcgatgcatgaagaccctcaatgcgcatgaacactttgttacctccttggatttccacaagacggcaccctatgtcgtcactggcagcgtagatcaaacagtaaaagtgtgggagtgccgttgattgtgtctccttcggcccctcctccctcttttcctctggatgcactctgatgataccatggttaccccattgagctctgtttaaataaatattgtcctttcatgtaaattaccaacnnnnnnnnnnnnnnnnnnnnnnnnnnnnnntatcccatccactaccccaaatatatatacccacatttacccccaccttctaccttttttacccnnnnnnnnnnnnnnnnnnnnnnnnnnnnnnnnnnnnnnnnnnnnnnnnnnnnnnnnnnnnnnnntccccctgccactcacttattattcttttttttccgccctatcccctgcttctcaccgtaaatcttcttatgtacccatttactttcccttagcgcgcttggcggtcgcccacttctcctatagttttttaataaaccggtcgcgctgcactgcccttctcctcctcactcataacacctcttccgttctcccgatgcacagcccccggccaattccttcctcaaacaacaaacattattaccccccggtgcgcggcgcacaaaccaccccctgtcacgtcgtcatccctccccttccccgtggtttgtcacttccgcgctgtcacccctcttccctactattttctgacccgcgcactttgaccactcgcttcgcccccgcgttctttatgcccaccaccttgtctcactgcgccgccctctctgctcttacttctctccattctcctgttatccgccgcgcctaacactctctctctcttaggcaccacccgacgcctctactatcacgtggcacacctctcttcttctcctcccaccgctcgtgtatttgctccccactacccctcgttgctacc

SEQ ID NO: 11025 - DNA, 844 bp, Homo Sapiens
  misc_feature (586)..(586): n is a, c, g, or t
ggcccctcgtttctccctccccgcctcctccgcagaagccgagcgccaaactcaaactttatcaggacccggacctctcaggctaatcccgagggccgggcctgttgggcttttctgcacaccagccgaggcagcgagccaacatgagccaagtgctgttccaccaactagtcccgttgcaggtgaaatgcaaagactgtgaggagaggagagtaagtataagaatgagcattgaactacaatcagtttctaatccagttcacagaaaggacttagttattcgtctgactgatgacacggatccattttttttatataaccttgttatatctgaggaagattttcaaagtttaaaattccagcaaggtcttctggtagacttcttagctttcccacaaaaatttatagatctccttcagcaatgtactcaagaacatgccaaagaaattccaaggtttttgctacagttagtttctccagcagctattttggataactcacctgcatttttaaatgtggtagagacaaatccttttaagcatcttacacacctctcactaaaacttttacctggaaatgatgtggnagataaagaaatttctcgcaggctgtttgaaatgtagcaaggaagaaaaattatcattgatgcaatcactagatgatgctactaagcaactggactttacacgaaagacatttagcagaaaaaaaacaagaatttagataagttacggaatgaatgggcggtcacatacagcaaccttgaacaaacaagcattctcaggaactgacaaatgaaaaggaaaaagccttggcagcaacggttccataatcacagcaggct

SEQ ID NO: 11026 - DNA, 220 bp, Homo Sapiens
agtggaatcaaatcaaaagccaactaacatggctgtctgtttcactggactgtcccaatttgctggttaaaaggattggggcccaaatcctctggccatagcatttctcagtgtttgctattcagactgtctaaatacagcatgtgacaagctgaagaagccaaatctagcagtcatttctgatttcattatattctccccctcttcctgctaaaaagac

SEQ ID NO: 11027 - DNA, 913 bp, Homo Sapiens
  misc_feature (712)..(712): n is a, c, g, or t
gggacacacctccgcgggcactcacccaggccggccgctcacaaccgagcgcagggccccggagggagaccaggaaagccgaaggcggagcagctggaggcgaccagcgccgggcgaggtcaagtggatccgagccgcagagagggctggagagagtctgctctccgatgactttgcccactctcttcgcagtggggacaccggaccgagtgcacactggaggtcccagagcacgacgagcgcggaggaccgggaggctcccgggcttgcgtgggcatcacgtgccctccccccatgtccgtggaacacgcagacatctgggtcaagagctacagcttgtactccagggagcggtacatttgtaactctggtttcaagcgtaaagccggcacgtccagcctgacggagtgcgtgttgaacaaggccacgaatgtcgcccactggacaacccccagtctcaaatgcattagagaccctgccctggttcaccaaaggccagcgccaccctccacagtaacgacggcaggggtgaccccacagccagagagcctctccccttctggaaaagagcccgcagcttcatctcccagctcaaacaacacagcggccacaacagcagctattgtcccgggctcccagctgatgcccttcaaaatcaccttccacaggaaccacagaggataagcagtcatgagtccctcccacggcaccnccctctcagacaacagccaagaactgggaacctcacagcatccgcctcccaccagccgccaggtgtgtatccacagggccacagcgacaccactgtggctatctccacgtccactgtcctgctgtgtgggctgagcgctgtgtctctcctggcatgctacctcaagtcaaggcaaactcccccgctggcctacagcacatg

SEQ ID NO: 11028 - DNA, 1145 bp, Homo Sapiens
cgcggcggaaagggctgtgcgacctagcgctggtgcggattctattccggtgagcactcgcggttctggggcgcagacggcttgttccgtcattaaaagcgagccatttagtggggcatcactcgctgttcgtgttgtttctctccttgcggggcctagcagcggtgccgccgttttttgtttcctgataggtgtccccaccgcccgtcggggtcgtaaggcttcggtgcgcgcacgacacgttgtgaggcggtgccgtgttgggatgtgcgccatggcgcggtgcgttttggttgcgaggggagagttagggggtaagatcgggcagcacgtgggtttcggtgtgtggtgtagggacgactccctgggcggctgggtcccaggtcgcggggggtggtcccggagggaaccaagcggggggcgccaggttccgattggcgtacagggagcccccggggcgcggagggggatgggtctcaggagaggtttctccggggggcggaaagcgggccacacagggaagtgttgtttggaaggggacagtgcgagttccccccagtccacacaacctttatttctctaccaaacagcaggtcagcaggtgggtacagggcccgctcctgctaagacctccccacctccccccaggaaagaagcagagaatctctgcaggcaccagactccctgcctcccccactgcgtttctctcactggccgcccaaaacctgtgagagggaggaggggtgaggcgtaggggagggggctacagaacatggagcccattggtctgcaaggcaggctgaggggctttggatgtgggggactaggaaagggatgtgagtcttgatttacatataaaatcatcagtctgcacacgctctaggaggggccaagacatagggacaatccttggtgcaggtttctgctacccctcgctagtttttgccaaagtagcaaaagctgagttaagagaaaaattctgtccatcagaggccatcttcctctcatctgatatgacgtgttcctccagcagggagggagggagagcgggtgccctggggaatcagccatccttagtgacatcctttcggctcatgggtgtcgtggggagggggcaaggagtgaggccaagagtccaggaagcc

SEQ ID NO: 11029 - DNA, 947 bp, Homo Sapiens
ggggctgggcagttggctggaggggctgctgctgggaacacctggagtctccgcgggcagatctcatattttggattctggatatattataatgagtgacactttgacagcggatgtcattggtcgaagagttgaagttaatggagaacatgcaacagtacgttttgctggtgttgtccctcccgtggcaggaccctggttaggagtagaatgggacaatcccgagagaggaaagcatgatgggagccacgaagggactgtgtattttaaatgcaggcacccgacaggaggatcctttattcgtccgaacaaggtaaattttggaacagactttcttactgcaattaagaaccgctatgtgttagaagatggaccagaggaagatagaaaagagcaaattgttacaattggaaataaacctgtggagactatcggttttgactctattatgaaacagcaaagtcagctgagcaagttgcaagaagtttctctgaggaactgtgcagtaagttgtgctggtgaaaaaggaggagttgctgaagcatgtcctaatatcagaaaggtagatttgtcaaaaaacctgttgtcatcatgggatgaagtgatacacattgctgatcagctcagacacctggaagtccttaatgtcagtgaaaataaactaaaatttgccctccggttcagtattaactggaaacgctttctgtactgaaagtttttagtcctcaatcaaacaggaaataacgtggggctgaagtgctgccggggtgtcccggggtgccaaggccctggaggaactctaccttgagtctaacaaacatttcattcccgaaaggccaacagatgttcttcagacagtcaagttattaagatctttcctctaatcaattattgatgaaaatccgtgttctgatagcccacttgcccaggtaaacactaatccctcg

SEQ ID NO: 11030 - DNA, 480 bp, Homo Sapiens
cattgcagtgaaaagggccatgtagcatgcctcaaagccaggttactcagcctagtccttgtttaagcagttttgatattcattcaagttcaattttctcactgattttatgattaatttcttggaaaatttgaaagttttcaagaagtaaaaaattaatatcttgttatcccagtatatagagattaacttcagttcaatgtttggtgcattttcttctagtctttttttcaatgtataaatattaaagttatttcatagttgagatcatactgcatatatgatactgtatcttgcttttttcattttaacgtcgtgagcaattttcccatgacattacaaactgtctttgaaaaatggaaaacatttggggctgtcagcataactgaaaatgttttcttggtgtgacacatgtatctttgtaattggtttgatttagtgtgctttatttcaataaaaattcagtattataatttaaaa

SEQ ID NO: 11031 - DNA, 949 bp, Homo Sapiens
ggggaaaccgaaaccgctgtgctgtgggcgcagcgccgagattgattcaccttcacctgtgctgcactccagctgacccaagtaggaagccagacgagctgtaaaacatgaacggaagagtggattatttggtcactgaggaagagatcaatcttaccagagggccctcagggctgggcttcaacatcgtcggtgggacagatcagcagtatgtctccaacgacagtggcatctacgtcagccgcatcaaagaaaatggggctgcggccctggatgggcggctccaggagggtgataagatcctttcggtaaatggccaagacctaaagaacctgctgcaccaggatgctgtagacctctttcgtaatgcaggctatgctgtgtctctgagagtgcagcacaggttacaggtgcagaatggacctataggacatcgaggtgaaggggacccaagtggtattcccatatttatggtgctggtgccagtgtttgccctcaccatggtagcagcctgggctttcatgagataccggcaacaactttgaaaaacttgctctctttcaatactcccaatgaagatacatttcactcaccctccacccctgctattctgccatgtctttccctctctctgcatagccagatttgaagtgactgatacccaccccaaaccttgctgttcacagtctccaattcttcatattctaatgggaaagtaaaggtattgtttgaaggaaaactgaagaaaagacttggcttagaacaaatgaggagttatatattttactaggacttttgatagaaattcagctacaacccaaagagagaaagattgagtcttcctgtcaccataggcaataccttttttcttagctggcatgccataaaggccagctacgtgatattagaggaagaaaggatttttctttttaatgatcttccttgggaa

SEQ ID NO: 11032 - DNA, 374 bp, Homo Sapiens
cagatattttctatgcatatttaaaaagtaatattttaatcccctcgatttttaaaaattgaaagtggaataagcaattcttcaaaaaatatccattctcccccatgcaactgttgcaatgatttaacaaggaaaattagaataatcggtcaaatgaatgtttaaaagccactgtcacctcatgaaaccctttccatttggaaacaagttcagaaatgcacacatttcaaatatttatctactgcctctgtgtcacaaccactaatgtgttctaactcaagagtttctcatttgcaggaatcccctaattatgatggtagcccacttaaaaatgcagttaattgtaaattcatagaaaatatctggggggtttc

SEQ ID NO: 11033 - DNA, 1962 bp, Homo Sapiens
gctggaccggtccggaattcccgggatctctttggcttccgggcgcacgctactctgtcgccgccgtcagaccggaattgccggtgccgccgccaccgctgtctgtgcgcccacctctgctgctaccatggggatcttagagaagatctcggagatcgagaaggagatcgctcggacacagaagaacaaggccactgagtatcatctgggcctgctgaaagctaagctcgccaagtatcgggcccagctcctggaaccgtccaaatcggcctcgtccaaaggagagggctttgatgtcatgaagtcgggtgatgcccgtgtggcgctgattggatttccctctgtgggtaagtccacattcttgagtctgatgacctccacggccagcgaggcagcgtcctatgagttcaccactctgacgtgtattcctggggtcattgaatacaaaggtgccaacatccagctcctggaccttcctggaatcattgaaggcgcagcccaaggaaaaggccgtggccggcaggtgatcgctgtggcgcgcacggctgacgtcatcatcatgatgctggatgccaccaagggagaggtgcagaggtctctgctggagaaggagctggagtctgtgggcatccgcctcaacaagcacaagcctaacatctacttcaagcccaagaaaggtggtggcatctcctttaactcgacagtcacgctgacccagtgctcggaaaagctggtgcagctcatcctgcacgaatacaagatcttcaatgcagaagtgcttttccgagaagactgctccccggacgagttcatcgatgtgatcgtgggcaaccgggtgtacatgccctggcctgtatgtttataaacaaaatcgaccagatctccatggaaagaggtggcaccgcctggcccgaaaacccaacagtgtggtcatcagctgcggcatgaagctgaacctggactatctgctggagatgctttgggagtacttggccctgacctgcatctacaccaagaagagaggacaaaggccagacttcacagacgccatcattctccggaaaggggcctcagtggagcacgtgtgccaccgcatccaccggtcactcgccagccagttcaagtacgccctggtgtggggcaccagcaccaagtacagtccgcagcgggtgggcctgacccacaccatggagcatgaggacgtcatccagatcgtgaagaagtaacggcgcctgccgggcctcccgcccacctgcctcgtctccctggggaggtggtcccactgggacacacaaacacccaaacagaaaaatacaaatacacgtaccccaggaaggggtccctcaagtctctgctatttacagaagtttcttcagtaggcagacgaagagtgtgtaggggcaaaggggctcggtgggaggcatttcccataagactgagccctctcatgggggtttagagttggtagtgctgagcctgcatctgtgcctcccagccccctgcactgagggagcaagttgcccacatgcccgccagccagggcctaaagcagatggcatgctcagtgccaggctggtagctgggcctgttggggtccctggaggctgtggctgctgtcatggcacctcactccctcagctcttgccagcttctctgacacttgggttgggggcccttccaggaggaaacccccttgggtgccccacacagggctctccatgatgggaaccagtggttagtggcttcaaaggcccagctgacaccctccacagcctaaggggtgtcctaaagtgcctccccctgtattccccctcccagggcagcccctgcccagcacaaaaccccaggaccctggctctgcacgcctggggcagggacttttgagtttaggatctgtattttctaagtccccagttctcctggctctcctttctgaaataaaggattgaaaacggaaaaaaa

SEQ ID NO: 11034 - DNA, 888 bp, Homo Sapiens
  misc_feature (176)..(176): n is a, c, g, or t
agaaaattagggttccagggcataattctcccgttctagggtggaaatagttcatcttccaagttccccaggggggaatgtgcctgctggcctgttatccaaagcgagggttttctccatcaggttgagatctgacagttgaattaggctccatccacatcctacaatgaggtcancaagtggacatctttggggaacttggtcagatccaaagcaccgggatcattccctcctctgggattacatttcaaccaagcctgtggtaaaagtgcattttcaccattggggtattttctcagcagcagtcaatagatccttgtttagattttctctgcttacagaaagaatatactgagactttgtcccataggggaattgcagacttttttcctgaaagagagtggatcattcttgctctcatgggaataccttgggatacaatctgatcttccaggccaacagctttcaaggcttgtcgtcctctatgagaaagggctaagttaatgcttcttccacgtgtgaaggtagccactcgagtatcttccctagcttcatatacatcaatctggaaattcctctttgcaagaaagcatgcttgtaatgaaccaaccaagccaccaccaatgacagctacttttttcctttgaatgacagatgagtccataactgctgaagtatttttcacaattattgttgcttctgtcactgagtgacactgatttctgtgtctcctacacactgatttctctgagtttttatactgccccaagcctagtgcattcatgagccagcggcaatgtttagctcagggctaatttcccttgacagtattaacccattagttggccaaagtacaatcagctcagctctaagaaaaaataaatcccc

SEQ ID NO: 11035 - DNA, 426 bp, Homo Sapiens
cagatgggctttgccggttgttctaccatcacttcagctgaatatgtcctaaacccctaactcatcaacttcttccacggactgcttcctttttcctggcttccctatttcttttaataatgtgattattcgtctcatgatctaggtttgacattctagtcattgtaactcctttctttttcttgaatctaataaaaaattaggtgaaaagatctaattagcggaagtctaaaattagttgaaaaatcccactgacttggcttctgaggtgctttagcatcagcctgtcatggatggcacccttggccattgccttgccacaatccctgtcacctccctggacttgcctttttgccaccatcaccccaggtggcctgctttcaaactgttcatggctccctcttatacatcgcatgaggccaaact

SEQ ID NO: 11036 - DNA, 758 bp, Homo Sapiens
gggaagctgggggagcgggtgggtgttgggtggcgttgggggagctgcgcctcgcccagagcctcgcccggagcctcgcccggagccttccggggtgggggatagttgaggacctcatcgagggaggggttgggcggcggggaagggagcgagcgtggcgggggacccgaggcacgctctcgagccaacgagcgtgatgcgctcgagtgtgggcggggactgagggaagaagtgaaaatcggactgccaggcgacagttcctccgtttgaaatctcgccggctcctgagcgggccaccgggcccgggctgggggtctggcgggagaaataactttatttggactgagagctggagaatgagaataggacctgagagtatattgggctaaggaggagaggtgtttgagcccagatgagtcatggctggacgacccctccgcataggagatcagctggttctggaagaagattatgatgagacctacattcctagtgagcaagaaattcttgaatttgcccgggagattggtattgatcccatcaaggaaccagaactgatgtggctggcgcgagagggcatcgtggccccactgcctggagagtggaaaccatgccaggacatcacaggtgacatttactatttcaacttcgccaacgggcagtctatgtgggaccatccatgtgacgaacactatcggagcttggtgatccaagagcgggcaaagctgtcaacttctggggccaataaaaagaagaaa

SEQ ID NO: 11037 - DNA, 524 bp, Homo Sapiens
gagctcgcccagttaaatgatagtcatatatccctcttatagcttaagcagacaggagaagggatgcttctaaaataaccataacctagcatttacttgtattgggtttagaagaatgtgattacgttcttgagtttatatatttagattctcatcaaagaactgacctgtatatagtgtgtgaggtactctcaaagtatatgtagagtagatgctaatcactgtcactagaactcttccttccacctccaaaaatacaagtgataaagtaatgtggcttatataatcagttgtttttagtccactatgatttaaagtcatttagatcataccttattttccgccattgccgaaaacacaaactagctaaattgtcttcctttataagtgtgttccacatttattctctacttctctagcctttgctagttcagtctttctccctggaatgtcttcgtctgcacgtctctactcagctttcatctttctgtgcctagcctggcttctgatctgttgatgacact

SEQ ID NO: 11038 - DNA, 260 bp, Homo Sapiens
cgcgtcaaagtaacctccgaaagaagaggaattagggacactaaaggccttagaattaactgtgcaatggatttacacttgatgtaagaaactcactttcagtaacatataagaaagtgggagagggcagaggaagagtggaagaatagaagactctgtagttataaggacctcatttatcttttatgaaaaaatcattgtaatgacatgcagttaaagatatacatttgtggtaggcagaaaaatgccccttaacacgt

SEQ ID NO: 11039 - DNA, 417 bp, Homo Sapiens
  misc_feature (357)..(366): n is a, c, g, or t
agaagcagaacagacccacgtgatatactcttccctcctagggtaaatcagctatctgtgtcagacatgctgtgtggcgtccatctaaaccccctgcatacgcgtagactaatgtgatctccccactttcacataagatggtggccctgccttcagggaatgtgggagccaggtgggagccttcccggatatttaagctagaagattctacagggagattctccttggatcaatatatgtctctcagtcaaagatgtaaaagcacttttgccttaaaaagaatgttctgtttctaaatagagtcaacgttgtcctcctcattggaattcactatgagtcagaatcattagactgacnnnnnnnnnnccatagtaatagtatttggcagagtctcacagagctgcagatctttggtcc

SEQ ID NO: 11040 - DNA, 461 bp, Homo Sapiens
aacacacgtgaatttacactaagaaatccactgaagtttttgatcgagggaagatacaggaccaagagttgaattctaaacataactttgagagtacttgtgagcttacttagtagagactatatagaacttataatgtgcatacatggttctaaacattataaatattaattattgcatcagatatcttctatgaacacaataagcataggtttggatttgtctctgtactcataatacacaaagaatttgtgagtctggttttcttttattctattcattgcttctgttgtttctcgcatcacattttgtttccctgtacgctttgttatttctgactgtactgctcattgacccttgaaaattaggaagaaggtgccctcctccggagattcatctttgattctgccaggtatctgggagtggggttaggaacctgtaactggcatagaaaatatctg

SEQ ID NO: 11041 - DNA, 409 bp, Homo Sapiens
tatagtttaaacgtaaccagaatctgtgagttgatggtattaagtccatactgttaaactatatgtagaaatattagacatatattaaatatggcttcatgctaaaaaattaccaaaggtaatttaaaaggcagtgttttagagcagtagctcatggtcaaggtggtcacatgacaatggcttaagctcagtgtgcttctgcaccttatgttgtctatgtatttttaatccaaatgttgcctgcaaatatgtgatcccttattatttaagtttcctgtattatgaaccattgcccgttttaaatcacacagaagattctgaatctgtaaaaactacacatgtcaatgttttacagctacgtaattcgaattgacttgattttttcaagtaatcctagaaagggggagca

SEQ ID NO: 11042 - DNA, 175 bp, Homo Sapiens
gtgtgaattgccccacccagccagaaaaagtgcttatgacgccatgctgctttctaaaaataagataaaatattggtttcatttacggacaaaacaaaatttgaaaggaagcgtcattataaggacattttatatgaactaagagaagtacatcaagtagcatagaaaatatctg

SEQ ID NO: 11043 - DNA, 269 bp, Homo Sapiens
cccttacatgacatatagtaggaataaaatattaatgcatttgctgaactgtacaagaaaatttaaaccttgatttcagagtgaattggattggctttcacttgagagagtctttaccttattcccaaagaaactgcattaaaaagatgaaactatttctttagactaagtctctgctactccagctcatatatatgtcagatctgctctgtagtatttctgacatggagtaacttataagatatgtgaaatcacatagaaaatatctg

SEQ ID NO: 11044 - DNA, 241 bp, Homo Sapiens
ttgacctagaggatcccgttggcgtaggccaacgcccacccccagtgcccttcactgggacgattgcagagcctggtgtacaggccgttcgccagtgggtcggacccttgtgggtgccacattcttaaatgtcctgggcacacaaacaagggaggcaccctcatccaaatcactaacacattcgtgagccaaacacacgcttcccgttagatttgtcgaagctggttgtgagaagctgtgg

SEQ ID NO: 11045 - DNA, 1581 bp, Homo Sapiens
  misc_feature (36)..(36): n is a, c, g, or t
  misc_feature (848)..(876): n is a, c, g, or t
  misc_feature (952)..(1122): n is a, c, g, or t
  misc_feature (1126)..(1126): n is a, c, g, or t
  misc_feature (1128)..(1142): n is a, c, g, or t
  misc_feature (1189)..(1239): n is a, c, g, or t
  misc_feature (1275)..(1337): n is a, c, g, or t
  misc_feature (1445)..(1453): n is a, c, g, or t
cccaatgtttcgtatatctgttctcggtactatagngcaccagagttgatcctgggagccactgattatacctctagtatagatgtatggtctgctggctgtgtgttggctgagctgttactagaacaaccaatatttccaggggatagtggtgtgaatcagttggtagaaataatcaaggtcctgggaactccaacaagggagcaaatcagagaaatgaacccaaactacacagaatttaaattccctcaaattaaggcacatccttggactaaagtcttccgaccccgaactccaccggaggcaattgcactgtgtagccgtctgctggagtatacaccaactgcccgactaacaccactggaagcttgtgcacattcattttttgatgaattacgggacccaaatgtcaaactaccaaatgggcgagacacacctgcactcttcaacttcaccactcaagaactgtcaagtaatccacctctggctaccatccttattcctcctcatgctcggattcaagcagctgcttcaacccccacaaatgccacagcagcgtcagatgctaatactggagaccgtggacagaccaataatgctgcttctgcatcagcttccaactccacctgaacagtcccgagcagccagctgcacaggaaaaaccaccagttacttgagtgtcactcagcaacactggtcacgtttggaaagaatattaaaaagagaaaaaaatcctgttcattttagtgttcaatttttttattattattgttgttcttatttaaccttgtaaaatatctataaatacaaaccaatttcattgtattctcactttgagggagatccannnnnnnnnnnnnnnnnnnnnnnnnnnnnaagcggagcactagaacatacaatctctctcccacgacaatctttttttattaaaagtctgctgttgtatactttnnnnnnnnnnnnnnnnnnnnnnnnnnnnnnnnnnnnnnnnnnnnnnnnnnnnnnnnnnnnnnnnnnnnnnnnnnnnnnnnnnnnnnnnnnnnnnnnnnnnnnnnnnnnnnnnnnnnnnnnnnnnnnnnnnnnnnnnnnnnnnnnnnnnnnnnnnnnnnnnnnnnnnnnnnngggnannnnnnnnnnnnnnnaaaaaaaactcttacaaaacactcttattctgcgcccggcccccccnnnnnnnnnnnnnnnnnnnnnnnnnnnnnnnnnnnnnnnnnnnnnnnnnnncacccgggcataaaaacacatggtttgttattttcnnnnnnnnnnnnnnnnnnnnnnnnnnnnnnnnnnnnnnnnnnnnnnnnnnnnnnnnnnnnnnncacaaagaaggaaattttagggaggcgctttattattgggggtcatcatacaaaaaggggaaggggttccgtgagaaggaacttcataaaatatataaataataccannnnnnnnnagccctgttgttgacctttttaaaaggagaaagaaacggggggtggaataaaaatcttataaaaaacactctcctccccccgccctcagaagggaaaacccctccccccaacacaaaagggggttgtg

SEQ ID NO: 11046 - DNA, 242 bp, Homo Sapiens
gtagatggctacggagggtatgaaacaatcatccagttaacaatcagcaaggttcttcagagcctaattaatgtttaattctaaataaatcgcaacaattaagaaaagtaggtgtttttgtagttctttatgcatttgcagaagagtactgtatttggtgagaatggggaaatgtgttttaaagagatgtgtgaggaggaaaatctttcttcctcacctttacagccgttaggccgatctga

SEQ ID NO: 11047 - DNA, 810 bp, Homo Sapiens
ggggggtccgggccgcaggcccgctgcggcggactgggcggcggaagttcgacggcgccgggcgagtggctgttgagcggcgccgcgggagttccgcaggtttcccgtgttcgcagcggagccggaggccagctgaacccggccgtgggatcccggataggaggaggaggggacccataggacgcgttaacatggacctggaaaacaaagtgaagaagatgggcttaggtcacgagcaaggatttggagccccttgtttaaaatgcaaagaaaaatgtgaaggattcgaactgcacttctggagaaaaatatgtcgtaactgcaagtgtggccaagaagagcatgatgtcctcttgagcaatgaagaggatcgaaaagtgggaaaactttttgaagacaccaagtataccactctgattgcaaaactaaagtcagatggaattcccatgtataaacgcaatgttatgatattgacgaatccagttgctgccaagaagaatgtctccatcaatacagttacctatagagtgggctcctcctgtaccagaatcaagcattggccaggcagtacatgcagatgctacccaagggaaaagcagccagtagcaggctcagaggggccacagtacccggaagaagcagctggcaaagcaactccctgcacatggaccaggaccccttcaaagtggccatggaattgctctcccacaagaaggtggaaagaaaatggcacccacttttgtggaagaaaatataaggagccgaagcctcctggggaagtaggaagaattgtccaaacctctccccgta

SEQ ID NO: 11048 - DNA, 232 bp, Homo Sapiens
gggaacagaaacctaaaggcagtcagcgaagtcggaaaagaggccatacggcttcagaatctgatgaacagcagtggcctgaggaaaagaggctcaaagaagatatattagaaaatgaagatgaacagaatagtccgccaaaaaaagggtaaaagaggccgaccaccaaaacctcgtggtggaggtacaccaaaagaagagccaacaatgaaaacttctaaaaaaaggaagc

SEQ ID NO: 11049 - DNA, 1172 bp, Homo Sapiens
ttcggcactgcttcggatgtggttatcaactgcagcagggactcgaagatccccgagccgccggcggggcaccagtggaaggaggtgcgctccgataacaccgtcacgtggctggcagcttggaccgagagcattcagaactccatcaagtacatcatgctgaacccttgctcgaagctgaagggggagacagcttggcagaagtttgaaacagctcgacgcctgcggggatttgtggacgagatccgctcccagtaccgggctgactggaagtctcgggaaatgaagacgagacagcgggcggtggccctgtatttcatcgataagctggcactgagagcaggaaatgagaaggaggacggtgaggcggccgacaccgtgggctgctgttccctccgggtggagcacgtccagctgcacccggaggccgatggctgccaacacgtggtggaatttgacttcctggggaaggactgcatccgctaccacaacagagtgccggtggagaagccggtgtacaagaacttacagctctttatggagaacaaggaccgcccgggacgacctcttcgacaggctgaccacgaccagcctgaacaagcacctccaggagctgatggacgggctgacggccaaggtgttccggacctacaacgcctccatcactctgcaggagcagctgcgggccctgacgcgcgccgaggacagcatagcagctaagatcttatcctacaaccgagccaaccgagtcgtggccattctctgcaaccatcagcgagcaacccccagtacgttcgagaagtcgatgcagaatctccagacgaagatccaggcaaagaaggagcaggtggctgaggccagggcagagctgaggagggcgagggctgagcacaaagcccaaggggatggcaagtccaggagtgtcctggagaagaagaggtggctcctggagaaactgcaggagcagctggcgcagctgagtgtgcaggccccgggacaagggaggagaaccagcacgtggccctggggacctccaagcttccacctacctgggaccccaaggatccaccattgggcttgggcgccaaccgggttccagggacggcccagttggtgaaaagatacttaccagctacacccccaagctggccaccaaggcgtccccctcggcc

SEQ ID NO: 11050 - DNA, 2074 bp, Homo Sapiens
  misc_feature (1891)..(1891): n is a, c, g, or t
  misc_feature (1967)..(1967): n is a, c, g, or t
gcaagatggcggcgcaacagcgggactgcgggggtgctgcgcagctggcggggccggcggcggaggctgaccccctaggacgcttcacgtgtcccgtgtgcttagaggtgtacgagaagccggtacaggtgccctgcggacacgtcttttgctctgcatgcctgcaggaatgtctgaagccgaagaagcctgtctgtggggtgtgtcgcagcgctctggcacctggcgtccgagccgtggagctcgagcggcagatcgagagcacagagacttcttgccatggctgccgtaagaatttcttcctgtccaagatccggtcccacgtggctacttgttccaaataccagaattacatcatggaaggtgtgaaggccaccattaaggatgcatctcttcagccaaggaatgttccaaaccgttacacctttccttgtccttactgtcctgagaagaactttgatcaggaaggacttgtggaacactgcaaattattccatagcacggataccaaatctgtggtttgtccgatatgtgcctcgatgccctggggagaccccaactaccgcagcgccaacttcagagagcacatccagcgccggcaccggttttcttatgacacttttgtggattatgatgttgatgaagaggacatgatgaatcaggtgttgcagcgctccatcatcgaccagtgagcagagtccgtgcttgctatctgtctcatgttacagagcttccattacatattaaacgtgaaatctatgactcctgtaccttacctgttcaacagacctgaaaatgagccatggcattggggacagggtcacttctgacaggggaagtgggtccccaggtcagcccttctcttccctttgggctcttgccaaagctgtcttcccctactgttaaccttgtttgtcacacggtcgagttcgtattggttctcggctacttcctggagcttctgccgcctcctgtggaagataatctagcttctccacctcttgtttcacactcattcctcccatccagtgtttgtctctcgggtccttcaagccagccaggaccttttctgggtcatgaatagcacaatgaagcaagtgtctcctttccttgtcccccaggtgtgcagacttaaggcaggcgtgcacctgaccagagctgaagctcccgctgggctgtggggttgccagaagctggggttgccatcccggggtacatgtcaccagtcctcttggggttttgtaccatctgatgctggaagttttgattagtgatattttctactactacatatttagagttcactggttcagtcttaaatgcctgcatggtgcctttttaggataaggtataaccatacatttttggtggaagtgtttctgggttagggaagttaaagtctgtttatccgtaagtggggaggagggtcagctaagagaagtgggagggccagagctttttggttctgatttacaaattaatgaagtagtttcaaacaacgcggtcatgtttacctctccatttgggagcctgcctacattcttgttctagaagcacaaaaaatcctcagatgaattagaagaaagaggtttggggactcagcggatactagttcttttaccttctgcttggtaacttagattaaactgagcattgtttttctgtcacaaatgttttccttatgacactggtttcgacatgtaaaatgtgtttgaaaacctgctttgtagatgcagagagaagctataggaaacccagtaccaccccctggtctgttctgacgagacatcgttcataaggcacagcacatcgcaagatgaacagttgttaataaaagctggtgctggaaacttgcttttagacagctcaagaacttggagttcatatttcncaaatatttaataaatataagtcccagagctgtcagccctaatctgtaggagcagaacctctgatttgacaaaagnttattggggtttaaggtggggtttttgaaggccaatagcccccgaagggggcttcaaaggcctaccccgcggcctggaaccctgcttgctttgggggcctccccccc

SEQ ID NO: 11051 - DNA, 548 bp, Homo Sapiens
  misc_feature (207)..(207): n is a, c, g, or t
gcggccgccggcctgggcctcgggcctggcctaagccctgcatccatgatgaggccggggcaggtctccctcctgggtcctgatgctgtttctgtgctcggctctggcttgggcctcagccctggcaccagctctggccgcaaccctgaccctggctctgggccgggcactctgccggatcccagctccaaacccctccccggctcncagatccacccccagccctactcctgtggaatcttctgacccaaaggctgggcacgacgctggtcccgaccttgtgcccagcccagaccttgatcctgtgcccagcccagaccctgatcctgtgcccagccctgatcccaaccctgtgtcctgccctgacccctgttctcccactcgtggcactgtcagcccagccctccctaccggcgagagtccagagtgggtacaggagcaaggggcactgctggggcctgatggctgaaggagacgccggcatcctcgggggcctggggaagttgtgtgttgtgcagtcagtaaaatcctcccactgcctccggaaa

SEQ ID NO: 11052 - DNA, 1054 bp, Homo Sapiens
  misc_feature (795)..(795): n is a, c, g, or t
  misc_feature (932)..(932): n is a, c, g, or t
caggaggtattctccaagtaccagaaagcagctgaagaaacaaacatggagaagaagagaagtaacaccgaaaatctctcccagcactttagaaaggggaccctgactgtgttaaagaagaagtgggagaacccagggctgggagcagagtctcacacagactctctacggaacagcagcactgagattaggcacagagcagaccatcctcctgctgaagtgacaagccacgctgcttctggagccaaagctgaccaagaagaacaaatccaccccagatctagactcaggtcacctcctgaagccctcgttcagggtcgatatccccacatcaaggacggtgaggatcttaaagaccactcaacagaaagtaaaaaaatggaaaattgtctaggagaatccaggcatgaagtagaaaaatcagaaatcagtgaaaacacagatgcttcgggcaaaatagagaaatataatgttccgctgaacaggcttaagatgatgtttgagaaaggtgaaccaactcaaactaagattctccgggcccaaagccgaagtgcaagtggaaggaagatctctgaaaacagctattctctagatgacctggaaataggcccaggtcagttgtcatcttctacattttgactcggagaaaaatgagagtagacgaaatctggaacttccacgcctctcagaaacctctataaaggatcgaatggccaagtaccaggcagctgtgtccaaacaaagcagctcaaccaactatacaaatgagctgaaagccagtggtggcgaaatcanaattcataaaatggagcaaaaggagaatgtgcccccaggtcctgaggtctgcatcacccatcaggaaggggaaaagatttctgcaaatgagaatagcctgggcagtccgttccacccctgccgaaaatgactcccgnggactcccaagttaaagagtgaagtttcaacaggcctgtcccatcccaagcccactaagtccagaattccgaagccctccaggttcttcctgaaaagttctccctccccaagcaattgaaaa

SEQ ID NO: 11053 - DNA, 239 bp, Homo Sapiens
atgttgtgaaaaccaaaattgtaattttataagtctttgattccctaaaattatataatttaaatgtattttttgtatatttaaaaataaggagtccaaagactacgcttaactttctatgcatgcatttgaaagctgtttttacctgataatgtagtaataagttgtattcataaaatactgatctgtgttgcatttcaaaataaactggtgtgtgctctgcctggatttgaaatacc

SEQ ID NO: 11054 - DNA, 576 bp, Homo Sapiens
aaccaatcgcatggttctcctggcaggcctgcatgtgtgccaaaaactcccacccaaggtccctcaggggatatttcactgaagaaccagttagaagtagaaacagctgtggggcttggcaccagcttaggagattgcccagatggcaagaggtcctgggctccttcttgaggggctgcctggcccgctccatcctactcccactaactacacctcagggcgggtgaggttccgacactgatcccagagatgccgtggatacgccagggtcccagggggaatctccccaagctcacactctctcccgcttatcgcctattctcacacctcttctcggtcccatcttctgcacccattgcccagtcttgctttctctttcccatattccttttctttttctcttgtgccaaactgacagaaaccgtcaccacactggtctttttctttaatgtctcattccccttgaggccagctgctatgccaggtggtgtctctgccaggctcctcaggcccagacagaggccagcccacaacctatgaccccctccccaccttcaccttctcaaaaatggaagg

SEQ ID NO: 11055 - DNA, 398 bp, Homo Sapiens
tgcaagttacatgagtgagataattatgggagtggtaagaattatgactgaattcttctttgatgtgtgcacatagatacggtagtctgctctgtatatttttcccttttataatgtgcttttcacactgctgcaaaccttagttacatcctaggaaaaaaatacttcctaaaataaaactaaggtatcatccttacccttctctttgtctcacccagaaatatgatggggggaattacctgccctaacccctccctcaataaatacattactgtactctggaatttaggcaaaaccttaaatctccaggctttttaaagcacaaaatataaataaaagctgggaaagtaaaccaaaattcttcagattgagcagcatttaataaagtctatgtttgt

SEQ ID NO: 11056 - DNA, 812 bp, Homo Sapiens
  misc_feature (747)..(748): n is a, c, g, or t
  misc_feature (750)..(750): n is a, c, g, or t
  misc_feature (759)..(759): n is a, c, g, or t
  misc_feature (768)..(772): n is a, c, g, or t
ggagagcaggcagctggtgttcctctttattggctcagacgctttcaactgctgtacttttctctctggcttcttgctattggctgggactcaagatggaaacatttatcagctggatgtaataattccaagggctccggtacaagtcatccacagatcagtagcaccagttctatccctgctaagtgtcagagatggattcattgctagccaaggtgatggaagctgttttattgtccagcaagacttagactatgtcactgagctcactggggctgactgtgacccctgtgtacaaggtagcccacatgggagaagcagatcttacacatgctgtcgagacgggtcttgtacgacgctaccagctttctgacctctgacttcttggaaagagcagtcccggttagtgaaaaggtttgaccctgatcaacaatgagcagaaacatcatcagtccttcccaaggaccatggcgtttaatgtcttgggcaccccttggaaatcacagaaagtcagctgtactggccgtgtggaactctcatcccaagacctactttgaactgagtaagaaggtcattgtgcccactgcatttgttccaacttctccttgtataaactcaccccagcaacacagggcaaggatatagatgcttttagtttgttcttaaaacagttttggtaaatgtttacaaggacctcagtactaaagcctgtttctctggaggaaataaagaaatatgttttggganncnccccctgcnaacataaannnnntcccttgttcggccgccttcggcccctcaaaaaacctttc

SEQ ID NO: 11057 - DNA, 415 bp, Homo Sapiens
ggcatccccatttgggacagctccccacacctccctgagggaccagcgactgcagctgagtcatgatctgctcggaatcctcctgctaaagaaggctctgggcgtgagcctcagccgccccgcaccccaaatccagtacaggaggctgctggtacaaatactgcagaaatgacaccaataatggggcagacacaacagcgtggcttagattgtgcccacccagggaaggtgctgaatgggaccctgttgatggccccatctggatgtaaatcctgagctcaaatctctgttactccattactgtgatttctggctgggtcaccagaaatatcgctgatgcagacacagattatgttcctgctgtatttcctgcttccctgttgaattggtgaataaaaccttgctctatacatac

SEQ ID NO: 11058 - DNA, 1439 bp, Homo Sapiens
gaacgctcccaaggggcaaagccggggggcgggctgctgagggcctcacggaggagccgggaagtgggcgggtgtccgacacttagcgccgtaaatcgcgccgcaggacgggatgggaattaggggcgagcgggaccccggtgggcgggggttcccgcccgcgtaagagacaacccccctggcgaggacttcctccccagttctcgaacccgttcttgggtcggcggcgggcatggatgccaaagggggggccggtgtcctcgtagctggcggtggtaggagggtcgcgttatacatcccagtggggcctgtggagcccgttgaggtagagcctggagaacatgccattgccggggcccaccagccgaggaaggagccacctccgcccatcatcatgttcaacactgcaaaggggatgaagtcctcctccaggaaggagcagctctccagtccaaccatgatgtgcgtgagctcggggatgggggtcgggcccaggctgacattggacatgtctctttctagcttggcaatccccccagtgtactgggccacagatctgtcaatatccacggcctctgcgctcccccaggccggctggacccccaggaggtacttccgggcacagtccaccagatgctcgtgctccacgcccacgccggccagcaccatgcggtcgggagtgtagtagttcctcaggtaggaatgcagcacctctcggttgatctttgctacgttttctgtggggcagaaacggtggaggccaactgtgttctccctgtaagccgcttcatgaatcatctcggtgagaagtggctctgggtcaggccgcaggttcaggtcctccagctcaaactggaccgccatccgcgtcatctcgacttcttcatctgttagccggggctgcagaaccacatcagccagtaaggcaaccaccgtgtccaagcctttgctatcagcagacacagcatacatggtggtgtctcttgatgtctggcagtcacagatacccccatgcttttccaacgtaagcagaatttcatctttgctgtcaaatcgagcagtagacgaaaatgccaatttttccaaaaagtgagcaattccactaaggtatttcgcttcatatctcgatcctgaattgataagaattcctactgtacaaaactgtccaaacttattctgagatgccacgcgaagcccattatccaatgtggttactttggtttcaaacttttcctgtccatcaactgtagcaaaaacaggcttgggtactccaggtaagggagaagagagggggatgttgggataggcaccaccactactaaaccgtctgtacgcaggaggtccaaacctcagccgcgaacagccccaagaacccgagccccgcagcaaccgcgtcgccgccagcaccacagccgccatcatcccgggaattccggacc

SEQ ID NO: 11059 - DNA, 906 bp, Homo Sapiens
  misc_feature (473)..(577): n is a, c, g, or t
atgaatcactgtgctcagccaccatctggagttttaaaaggctcccatgtgagtccctgtgatggccaggccaggggacccctgccagttctctgtggaagcaaggctggggtcttgggttcctgtatggtggaagctgggtgagccaaggacagggctggctcctctgcccccgctgacgcttcccttgccgttggctttggatgtctttgctgcagtcttctctctggctcaggtgtgggtgggaggggcccacaggaagctcagccttctcctcccaaggtttgagtccctccaaagggcagtgggtggaggaccgggagcctttgggtgaccagccactcaaagggaactttctggtcccttcagtatccttcaagggttggaaacctcgcaatgtcccctctgatggcgcaatccgcgcgtgtgcgtgcgtcgcgcccgtgctgcgtcagaaaccccctgttctcacnnnnnnnnnnnnnnnnnnnnnnnnnnnnnnnnnnnnnnnnnnnnnnnnnnnnnnnnnnnnnnnnnnnnnnnnnnnnnnnnnnnnnnnnnnnnnnnnnnnnnnnnnatgccggttacgcttccccccttcacggctctgtctgcggcccgttcctccggtgtcattcgcgtccccgcctccgttatgctcgtagaccggcctccccccgtagcctgtgctggtttcgcatacctcccccgctcgtttcttcgccccccccgccgggcccccgtgtccgcgcgccttgtcacgggcgtcctatcgcgaccccccacgccacgcatcccgtccgcacctgcggataccggccccgcggggccgcgcgccattttcacccgcccgtgcctttcgcccgtgtgctccccccgcttaaaaacaagatctctgcaatcacg

SEQ ID NO: 11060 - DNA, 253 bp, Homo Sapiens
cagatatttgtctatgaacagtagcacagaccctctaattccatagggaatcatttccatgacttcccccaaataccctactcttctctatctctgtgacagtctctggccctgctccctcctaaactgctcaaaatccttaccaaaatggcttacaaatctctctcctccggcacacagcctagcctctccctaccttcctcagctactctctgctccttccccatcccctcccttgcatagaacatatctg

SEQ ID NO: 11061 - DNA, 842 bp, Homo Sapiens
gccgggagacggtcgcgcgcggcggaagggaccgttgggtgggcgccgcgttgttgcccgcccaggttggcaagccccccttgtttccgccggcgtgttggtttttgcgcggttcggcggcgcctaataataccctcttgtgggggttgggtggcaggcttgtggattttgcccactttcccccagaggcccaatttggagggggtgtcgggttttttgacaaatttttgttactgggcttttccatcaggtataggtgataagaccaaaatcctcttctttccatttgtttgtgtaagccatgggaagttcaatattttcaatctctccaaaggctccaaaatattctttaatttgttcttcagaagtatccgggctcaatccacccacaaaaacctttttgggaggttctttcccttttaaagctttggcccttttgggatctatcaatttgccatccagtttgtgttctttcagttccaaaaccttatcaacactagcagcatctttgaaaagcacaaatccaaatcctcttgatctcccagtgactggatctgttttaattgtgcagtctacaacttccccaaatcgagacaagtactctgtcagatcttttttgcttgtatcccagctcaagcctccaataaacattttaccgtcatcctgctgattcttgctcgcgttgatcttggatccctctgcgaattcctctatattgctgtactcgttcatatcctccatagtgacggagctgtcggcaggggggtgctggcgcgcagtccgggtcgcggcagcagcggcggcggagcgttgtatggagctggatttaaaatggcggcccc

SEQ ID NO: 11062 - DNA, 303 bp, Homo Sapiens
gtataactgcctaaaaactctccaggctaaaatcctattaatggccataaactaatgaggccattgagggacttaccatatcgtttcttgttgtaacatactcaactttaaaaaaatatattttttaaataagcccaccaatatacaaacaaaaataccatctagctttgtctcacagtagtcctctgagtttctacagtaggatatgccaaccttacaatgagctcattttcttctaaaatacatggtttgctttaaacacagaatatatctactttagggccttgacatagaaaatatctg

SEQ ID NO: 11063 - DNA, 853 bp, Homo Sapiens
  misc_feature (490)..(490): n is a, c, g, or t
  misc_feature (578)..(640): n is a, c, g, or t
  misc_feature (648)..(729): n is a, c, g, or t
gggtgctctctggtgtttctgattttcctgcctttattctgtcttctcttgtcctatctcattccagcccacatcttctcctttcctgattacttttgttgtcctgcctcttcaggtaatggtcacagatttggctgtaggcacgttaccagccctgtggcttcttgactcttggttccctgttaactctgtttctgagaaatgtgggtatggaggtgggtgggaaagctcacttcccatgaaggatgtctccatgctaggagctgcctgcaccctggcagaggtggccagtcacgtgaaggtgggcagggcccttagcatggccacacatgtccccagggcagatcaaggggcctctcagaaccatgttccccagccaggtgaggaccattttcactgggacccaggccaaaaccatgtgggtgcacaaagccaggcactgccaagtggaacatgaggttatttccaaatcatgggagccacccaccanggagagggcaggatggaaaatcccctggagcccggtcaactttttgctcatggctagtgaaataaagttgtttgagtactacgatgcnnnnnnnnnnnnnnnnnnnnnnnnnnnnnnnnnnnnnnnnnnnnnnnnnnnnnnnnnnnnnnngccgcggnnnnnnnnnnnnnnnnnnnnnnnnnnnnnnnnnnnnnnnnnnnnnnnnnnnnnnnnnnnnnnnnnnnnnnnnnnnnnnnnnncctgcgcgtcccccgctcctccatcaaacttctttcccgccctttccctcgtggggagggagccctctccaactattccctgttactcggcgcgcgaccactcctcaccaacaaaatcacctgg

SEQ ID NO: 11064 - DNA, 252 bp, Homo Sapiens
caggagtttgccaatgttcatgggcaggtattttacatagtagacgtactaggtctgcgaagtgctcaggtaggtcatctgcatggtataaatgctttaggtgccctgcctctgatgctgtctacacggggatggttagtaggtgaaggcctctgtgtacgcgtgcacaggtgttaaccgaaggatgtctcgggccattagacatctgtgcacttaaaagttaaaaatggacatttgcatagaaaatatctg

SEQ ID NO: 11065 - DNA, 928 bp, Homo Sapiens
ggcagaaacagtggctgccttactgtcggggaagttccagggtctgattgagaagttttatgtcattgattgtcgctatccatatgagtatctgggaggacacatccagggagccttaaacttatatagtcaggaagaactgtttaacttctttctgaagaagcccatcgtccctttggacacccagaagagaataatcatcgtgttccactgtgaattctcctcagagaggggcccccgaatgtgccgctgtctgcgtgaagaggacaggtctctgaaccagtatcctgcattgtactacccagagctatatatccttaaaggcggctacagagacttctttccagaatatatggaactgtgtgaaccacagagctactgccctatccatcatcaggaacacaagactgagttgctgaggtgtcgaagccagagcaaagtgcaggaaaggggagcggcagctgcgggagcagattgcccttctggtgaaggacatgagcccatgataacattccagccactggctgctaacaagtcaccaaaagacactgcagaaaccctgagcagaaagaggccttctggatggccaaacccaagattattaaaagatgtctctgcaaaccaacaggctaccaacttgtatccaggcctgggaatggattaggtttcagcagagctgaaagctggtggcagagtcctggagctggctctataaggcagccttgagttgcatagagatttgtattggttcagggaactctggcattccttttcccaactcctcatgtcttctcacaagccagccaactctttctctctgggcttcgggctatgcaagagcgttgtctaccttctttctttgtattttccttctttgtttccccctctctcttttttaaaaatggaaaaataaacactacagaatgaa

SEQ ID NO: 11066 - DNA, 493 bp, Homo Sapiens
tacatttagtatagcgggcggtgggggggagaaataatgttatttcctatgcgaatgacgtgtatccctgtacccatggtaaatgtaaatatactgtgtctcttttgggagagccttttagtagaggagtcttatatgagtctctacataagtagtttcacttgagttttgcagtttgaaatcttaaaggagctttaattgacatttattataccaattaagcttggaatggggcaatggatgcatttcccaaaacgtgtgaaagcactaacagcttatattgctgaatgagaatctcctgggtgtaatttagccacttagggaactgcgtgaacactcccaggccattatgatgctgttacagcttcagtgtataaatgcatgagtattctttctgttctgttttgtgctctcttgtacatttatttaccctttacagaatatttcttgtaaatacataaaaatattggcaattaaaagtacatcttgaata

SEQ ID NO: 11067 - DNA, 339 bp, Homo Sapiens
cagatattttctatgatacagcaataactacagagtccaaaaataagtctccacaattattttctggttataaatttgaattcgcctactgagatatttctgtctatttttatgtctgctcaaacatcttttatgatgtttaaatgttttccttgaaatgtataaagatttgtaaatcagattttcttcaataataaaataccatatgtgcaagctttaaaaagcctacaaactatgtattatgaaattcaaatcaaacaatcatatttcgtggtattttcactagattcagatggatacaagttcaggatagtcatctactttagggcctggcaaaag

SEQ ID NO: 11068 - DNA, 336 bp, Homo Sapiens
atcgcacaataaagtgtaagagactcggggagaaatggtcccttggactatattggctgtaatactgaggtaaccaattgaccttgttcagagaaaatacctctaacaaaatgaaaaaatcaactaattataacttccaattcacatatacaattcaaataaaaatatatattatttgctttaatgtatagcaagtttaatacattagtgtttacaaaataaaaactgtattctactgaaatttttcttgtgcttccaccttatcactaagcttgaaagactagaaacataagatagttaacgaaacttattatgaatttaaaaagcaatctgtgg

SEQ ID NO: 11069 - DNA, 392 bp, Homo Sapiens
tagtagtgcttcctcaggatatctttggatctggagaccccaaagaaacaaagatgctaatcaccaaacaggctgactgggccagaaatatgaaagagcccaaagtcaccgtggggatgtaaatctcagcaggagagcacgtcaaggccattgagatctgtggtgactatgtcagggttgacatgaaagtttccgtctgtgccctgagcatttggcagcatgtcatcacatgccaactcttggctttgactgacaaggaaacaaatcgtgcgtctctaaatatttaaagcaaatgtgatagcgattgggttccttgggagacacagagactgcctgtgtttagcactcagagcaggcccaacacccacctcttcctttagagggcaataatc

SEQ ID NO: 11070 - DNA, 428 bp, Homo Sapiens
ccacgttgaaagtactgaaagcacgtctgagtatactgagccactctgggtgtcagtagcttctttccttgcaggcaaaacacagaggtgataatcaaccagttaacaccgggcagcccaatgagatgaggaggcagttaaaagaagagcaccaaggactcctgggctttgctgccaaatgtcccacttggcttgtaccaacaagcaggattcattcacactgggcttcaccttagttctgcttctaaaatagatggaaattttacagaaatgcctaatggaaagttttatccccaagtttgtgttgtggtatataacagaattctcatcatcagccaacagagagaggattggctcccacaaataacagatgaccagaactaagagagaattcacatttccaggtaaaaggttactttgacgcgggg

SEQ ID NO: 11071 - DNA, 405 bp, Homo Sapiens
aggccgcagtgcaatggtgttgatcagggtggctgtggcagtttcttaaaataagacagcagtgaagattgctgcattgattgactcttcattacatgaaaaacttctctttagcattcgacgctgtttgataacattttacgcatagtggaacttcttttagaattggacttaatcctctcaaacttcgccactgcttgatcaactaagttgatgtaatattctaagtctgttgtcttttcaacaatgttcacagcatcttcaggagtagatttcatttcaggaaaccactttctttgcttatctatacaaagcagcctctcatctgtacaagttttttcacgagattgaaacaattctgtcacatcttcaggctccacttctaattctagttctcttttttcc

SEQ ID NO: 11072 - DNA, 510 bp, Homo Sapiens
tggctgaggatggggcatatttggataactgccaacttccattggtatcccagcacttcccggcctgacttgtggaggaggagtgcctgctggattactcattgctttcatgggtgacatgggaggtggagaggcataagttccctgaggctgtgaaggatgcatagtttgtgtgttcatttggttaagtgagccactggggtggatgggctgctggtgcattagtccttgaccactgtttgatgggaatcctacagcattggggtatcttggtacggactgattcattggagtattatttgtaaggcctaaattttgattcatccctgtattgttaactaatccctgatttaggttactgtaaggatatcgagaatactgccctgagttgtttatagtaggagaggggactgtctggctccgagaactaaagttaagggtttgcggcctaacagccccttgttggggaggattcggggagaatctgggactgtgggcaacggattctcc

SEQ ID NO: 11073 - DNA, 384 bp, Homo Sapiens
cattctccccaagagggcatgggtcggcaggtggaggagaaacccgggctgcggggtcaggtagatgagacacttatcacttaatcaggtggtaactcagaaacaggccggtgacacccagttccagtgcttcatgtgcgcacacaagcttcgccccacgcatcctctccaggatgcctcacctggatgaataggaagcaaggcacaccgcatcctaagcttatggtcatgagtggacccagaggggagtctccagtatcactggtcccaggagaggcaggcatgcatagtctcttcaagacaggggtaaaatgcataagcccaactctgcatccagtgggtgtcttgccctgatgatgtcagccatggcagatacagctcttc

SEQ ID NO: 11074 - DNA, 185 bp, Homo Sapiens
  misc_feature (1)..(1): n is a, c, g, or t
ncgcatcttctcccatcaggccctgtacacatcgctgagaacagaagagcaaaatcactgccctcacagagcttgcatttagtgaggagtcacacagaacacactcactgtgcaaaatcagtgtacttgcaaacaagagttgaacaagaggcaggctcacacaaatgagaggttatcccttagag

SEQ ID NO: 11075 - DNA, 649 bp, Homo Sapiens
tatacccatatagctctgttggggtctctgtcgctcctgtcctgttcctctgggtcccctcctagtgtgctgtcctgaatggcccgttgtcatcccaggggtgactcctggtgatgggagtcagcagtttcagattcttacactccatagctccccttaccatgaggtggagctggcttccttttccctgtcttcagccctccctgtctcccccacttcctggccagggctctcattctggacctgtgttgtaattgtgtacagaggatggcgttggcctggggtgggggtgctcgctttgtcttctgtcctttggttctccttccataatgctcctgtacccagtttatttaaggggacatgcactggaataggaaatgtcccccatctcccttcctgcaccctgctgtgctccctccaaacccaccttgctctgtgttctcaggcccccctgcttttgtctcaccaggaccgatacctttcaccttgttcccttccacccctccagttagtccctatctgggtaagggtcttcccttgagctccagggggtggaacccaatgtttacattctcttctgtctctgcccccaccccatgcagcgctttgaggaattggaaaagaacctgctgttgtacctagaaaaaaa

SEQ ID NO: 11076 - DNA, 1004 bp, Homo Sapiens
  misc_feature (139)..(139): n is a, c, g, or t
  misc_feature (403)..(418): n is a, c, g, or t
atttttttgtatttttggtagagacaaggtctcattatgttgcccaggctggaaggccttttgaggcttgtatgacaaaggtggggtggggggtgactgtcaactggtttcacttcaccagccaagggggctggtggantaatcttgattgtcaacaggccaaggataataacagtgaatatgtactgagagctcaccatgtgccaggcacattcagagcaagctacataaattaacacacttaaattctccaaacaccttaaagtgggtacctagtatcattatgtctttcacagataagcaaactgaggcactgagaattaagtaacttgcccgagatcacaagttagtaagtaggggacagggatttgagcccaagcagtctaagaatagagtctctgcnnnnnnnnnnnnnnnnaacctcaactttattcatcttccatgtgcctgctgagtctcagactccctttctttccatcagctctggcagcctcatcaagatgactgaattcctacttcagctcccttgcctagcacctgagatggccaatggggctgaagcactgccatgaccccagcacttggccagcactgtgctacgttgctggtcacagctggaccatctgccactttgtgagctcatcatcagtcccacagtggaactagactcacagacctagattgctgacacctgcctggtttagcacagctccagattgcagaattccacagctatattgcgaaggctgagcctcctctgcatactgacagtgcctcaactccacccaggttctccacacctctcggcaatctcaggtcaccttgggaccaggttcacagcactgccttcctctcctgccctgccagcctgaggtgtgatactgaccgtgcgccacattgctgatgcaatcgatgtattctgccccctgttcatcgtacatgtactgcccttgggcccggacaatcttaacaggatcctcgggaaaaaagagtctgcaggaaga

SEQ ID NO: 11077 - DNA, 429 bp, Homo Sapiens
gggtggaggctggaggcccaaactaaggggtcacatgaagatgctctgtggtctctccccctgtacctagaaagctatttgagctggatccgtccctctgatcgtgacgccttccttgaagaatttcggacatctctgccaaagtcttgtgacctgtagctgccacgttttgaagagcttgagctgggtccccagtgggctgtctctctgtggggagggctttctgcttcaccatcattaggaatgtgaccattcctatataattcctggactggtgagattggtggtaggcctgtgaaatttgccctagttactaccattctcgttttggaggaaacaatctctgccaccaccaagtcattgactttgctcgaggcaccttttttcctgtttctccttttctgttgtcgagtaaaatttcatatttaa

SEQ ID NO: 11078 - DNA, 351 bp, Homo Sapiens
catggtgtttttctttagggctcttcctacagccttgagaagtagataggcatcagagtatggtactataggaatcagaaaaattcaaaacaaatgtggattaagtgtttaggctctatgtggctcacgcagccagaatccttaagtctgtgtgtttctgtgtctcaagactgggctcacattctggctttgtccataacaatgctctgggatttcagggagttccctcatttgtaaaatgagggggtcagagcaggtgatatccatgtttcttccctttctgatattgttgtctgtggcatattctttgtatggcgaatttaataaattatattaatgtggcccttgaaa

SEQ ID NO: 11079 - DNA, 994 bp, Homo Sapiens
  misc_feature (976)..(976): n is a, c, g, or t
ggtgaaagacccgctgttctatctagatgcccagaagggccgctacgtcccgctggaccaagaggcctacagccgcatccaggcaggcgaggagaagctgtgattccccccatccctctgagggccggcggatgctggatccggagccccaggttccgccccagagcggtcctggacaaggccagaccaaagcaagcagggcctggcacctccatcctgaggtgctgcccctccatccaaaactgccaagtgactcattgccttcccaacccttccagaggctttctgtgaaagtctcatgtccaagttccgtcttctgggctgggcaggccctctggttcccaggctgagactgacgggttttctcaggatgatgtcttgggtgagggtagggagaggacaaggggtcaccgagcccttcccagagagcagggagcttataaatggaaccagagcagaagtccccagactcaggaagtcaacagagtgggcagggacagtggtagcatccatctggtggccaaagagaatcgtagccccagagctgcccaagttcactgggctccacccccacctccaggaggggaggagaggacctgacatctgtaggtggcccctgatgccccatctacagcaggaggtcaggaccacgcccctggcctctccccactcccccatcctcctccctgggtggctgcctgattatccctcaggcagggcctctcagtccttgcttgcatatggcaaggccaagcataagcggaatgggataaatttatgactgaacccccacatttttcatgagtgaaatgcatctattacagcagattttatgcaaatacagaaaactgactcaatagtcatgttaaaattgcattcagggttctgtgtatcttacggagctatcacaacaatatggtacttgaacttttccaaaccattttttacccagacttaaaatatagctctagtctgnctttattcttctgaagtg

SEQ ID NO: 11080 - DNA, 1267 bp, Homo Sapiens
  misc_feature (478)..(478): n is a, c, g, or t
  misc_feature (486)..(486): n is a, c, g, or t
  misc_feature (614)..(690): n is a, c, g, or t
  misc_feature (738)..(756): n is a, c, g, or t
  misc_feature (758)..(761): n is a, c, g, or t
  misc_feature (763)..(766): n is a, c, g, or t
  misc_feature (768)..(768): n is a, c, g, or t
  misc_feature (773)..(910): n is a, c, g, or t
  misc_feature (917)..(963): n is a, c, g, or t
  misc_feature (998)..(998): n is a, c, g, or t
  misc_feature (1007)..(1007): n is a, c, g, or t
  misc_feature (1219)..(1219): n is a, c, g, or t
ggagagcaagaggtcccgagtcccctcctagtctttcatcctgaatttgcacagaggaaagcgggtgcccggcatggccatcctgatgttgctggcgggatccccatgcaccttgtccttctccactgatactggcagctcggctcctggacccaagatcccttgagtggaattctgcagtgcaagagcccttcgtgggagctgtcccatgtttccatggtccccagtctcccctccacttggtggggtcaccaactactcaccagaagggggcttaccaagaaagccctaaaaagctgttgacttatctgcgcttgttccaactcttatgcccccaacctgccctaccaccaccacgcgctcagcctgatgtgtttacatggtactgtatgtatgggagagcagactgcaccctccagcaacaacagatgaaagccagtgagcctactaaccgtgccatcttgcaaactacactttnaaaaaaanctcattgctttgtattgtagtaaccaatatgtgcagtatacgttgaatgtatatgaacatactttccctatttctggtctttgaaaatgtcagaaatatttttttctttctcattttatggtgaactnnnnnnnnnnnnnnnnnnnnnnnnnnnnnnnnnnnnnnnnnnnnnnnnnnnnnnnnnnnnnnnnnnnnnnnnnnnnncttgtcgccgcctcgctcaaacttcaacatctgcgcagaatgagtaannnnnnnnnnnnnnnnnnncnnnncnnnncnccccnnnnnnnnnnnnnnnnnnnnnnnnnnnnnnnnnnnnnnnnnnnnnnnnnnnnnnnnnnnnnnnnnnnnnnnnnnnnnnnnnnnnnnnnnnnnnnnnnnnnnnnnnnnnnnnnnnnnnnnnnnnnnnnnnnnnnnnnnnccgaatnnnnnnnnnnnnnnnnnnnnnnnnnnnnnnnnnnnnnnnnnnnnnnngcgcacgaaacaccgatagagacgccgggggcaancaccccaangccccacccacattctccccccttacttacttatctccaccccgcgccccattgttgataccacgcccatggtaaatcgaccattagcgagcccccccttgtgatacccccacaaacgatattccccacccgtatactaaccgcgctatctgtcacccgcatacgataatactcccaagcaccgcaatccccactgcgacatcactcatganctctcacccaatatattatccatccttcggcctctttgtcacactcat

SEQ ID NO: 11081 - DNA, 1212 bp, Homo Sapiens
  misc_feature (121)..(163): n is a, c, g, or t
cgaatatcacgatactcgttcggggggagcagaggcgggagcccgcgcgtgaacgcccccgcgcgggcggggcttgtaagggggtcgcaccgggcggccgaaacgggagccggcggcttcnnnnnnnnnnnnnnnnnnnnnnnnnnnnnnnnnnnnnnnnnnntccaggccccagtgtgagccgggtggggtaaggagccccggccgggaggccccagtcccggaggtatgattcccagtaagaaggactcaggcttcagggggaggtcaaggctcagtgaggttctggggtgcccaggggtttcccctgggaaaggtggccgggcccaagatgctctcgacccagtttagagcccagggcccttcctggccatctgtcccgtggcctagccgacactccgttcatctcacttggtgctctgggttcctgtgacagaggcccctggcctttcctgcatggcctggccatcaggggggccgaggacaccactcagagagtcagaggaagaaggcgattcgggaggccacggtcttgcagccgttggaggagaagagctgctcgtcttcagggaagaaggtggtgctgtccagcacagcctggacaacctcatcccttggctccaggcccagctgggccagctcgttgagcacgcagtgccggacgtggtgccgctggagcgggaggaagggcaccactgcgtctaggaggcgctcttccatgatgcccgagtttgagaagccatctgatgaagatgaagatggctttgcggtaattggtcccgtataccacccaggaggagcccaggaaaggccgcaggacttccattcaggcctgggggcatcttgtccatctcatcgaagaggaagagggagcggccacaggcagtgaggttcccttggacccagctcttcagatccttcttgtagcgctcgatgtggctggggtgggggaagtggaggacgggagaaaagtggtgcacgcgggggctcggaggccgccctggaagaggtagtgcgccagcagggagctgacataggatttgccggtgccggtccagccgtgcagggagaggaccagcggcttggtgggggctgggtcccgcacaaaggccttcagcgccttcaccaccagcgccttgccagatgctggccggccaggtgctgagccaggtcacactccagacccggcaagtcgggccggaagtccattcg

SEQ ID NO: 11082 - DNA, 866 bp, Homo Sapiens
  misc_feature (372)..(419): n is a, c, g, or t
  misc_feature (482)..(491): n is a, c, g, or t
cgtgtgaagtcacagtggccttgttggtgcccacagggctgtgtggatggaggaagctgtccctgcccagtgcatcccccaggtcatcacggggaagcaggaggcaggccctgccctgccctctcctcacaggtctgttgcagggactccagaaaccattctgggaaccgtggatgggggcggagctggggtttggtgcagtttccagggtgcagtacagcagggcctgaatactggccctggactcccttttccagaacaccaggtgtggccacctggggctcaggtacacagtggggtctctcggaagccaccgtgtggttctttcacaggcacgtttattttgctgaaataaaaagtttttaatccggnnnnnnnnnnnnnnnnnnnnnnnnnnnnnnnnnnnnnnnnnnnnnnnngggggggcgcggcgccctaaaaatactccccccggggggcccccattttccgctcccccccannnnnnnnnncaaggggggcccccatagagggggggccgaattattataagacgcaggcagcgcgcgggcggagcgcgtgtgttaaacacgcgtggtgggagagtgtcgggaaaaagactcttgttccagccgtgggggacccttggtgaggaggggaaacccacatatgtcgtggggggcgggagacacttggtgtgggaacaacaatcccgagagggaaaatttaaacgccctcaggggggacaatttaacaaatgtttgaagggtttagtactggggttaaaaccaaggcggcataatttgggcgcggccttaaaaaagttttgtgtgcgcggggaataatattataagacaatttttttcgcggggctgtgtataaatata

SEQ ID NO: 11083 - DNA, 997 bp, Homo Sapiens
  misc_feature (405)..(413): n is a, c, g, or t
tgcggaatgagagcgctttgatgcgagactaagagcggccggtttctcatcaggtgagcgtgagccgcctcctttcgggcgggtcaaggggcggggttggcacggacggggaaacgtgggggcggcttgatttttgggagagggggatatttactggaagggcgcgggcacatgcgggtacggtgccaccctgggcagaaagttcttcgtcgaaggtgttgggaagccaagacggcccccccggattagcgctttgggggagccttggggaaaattgcccggtccaattttaattacccgggttatccccttttttgcgccctccgagcggaaaaaaaattgggattggccacgggggtgcgaggaattggtttgccaaggcaggagcgttaaaagcgggggagnnnnnnnnnggctgtgggccattagtttgggaagggaggcgaaacccccaaaaagggggagaccaccccgggttttaaaggcgcgggatgcctgggaaggccggttttgccgtggcccgaacggccctgcgtttagccctgggggcgcgccgcagggtgggatcccccggggtttggggggccgaccggcagggaacagagatggagtgtcccgcgcccgcatgggggagtgagctctcttcccccaaagagggagcgagccgagaagcactttttcctccggtgcgtgcgtcacggcccgggacaggcgtcgagtccggtttggagtgggggcagagaccgcggcgaggagccgctcaaatgtccgctgactgggggttcgccttaatctgtcctcaccaggagcgctcgccctcgccctcccgctggctcgctcctgggccctggagcggcatgggcccgggggcggttcgggaggggccccaggtgaagggcgcccgcacttctcctgcggcaatcatcgatctcctgcctccacacgtcgcggcagcggcccggccatcctagaatcccgaccagtacagcctgctata

SEQ ID NO: 11084 - DNA, 579 bp, Homo Sapiens
atgacagatatggattggatatgtctacttcgtggatgcgaattttactgttgtgtaatgatgccagaagcaaagaggctactgataaatctttacaagcttgtaaaatctcagatatctgtttattctgagctcaacaagattgaagtaagttttcgggagctacagaaattaaatcaagaaaagaataatagaggattatattcaattgaagtgctggagctcttctgatattatcaattctccttcatagacattttataaagctcttttatgtgaactcttgcttcatccaggcaagaacggtgttttgtttgcgaccatctcagtgtcaagagaaacgtgtcagtgagtacctggaccatcacttaactgatgctccggggtaggactgcaggtttcacatgaacctgttctaggctgtggacattggtgtggagaggttctgcaattttttaaaaatatgtaactgggttgattttaagtaaaattatttgtgtattgataaaagtctaatttcttatcatgtgttttgaattttttcttttaataaaaaatgaccattgaagcagtgattct

SEQ ID NO: 11085 - DNA, 530 bp, Homo Sapiens
atgcgcgacgcttccatcaagcaggagagatgtgacccagaatctgtgatctcccagagccacccctcaccctcatcagaggtgacaggccccactgttactgaaaacagtgtcaaaatacacttatgccattactgtggggaacgttttgattcccgtagtaacctaaggcaacatctccatacacatgtgtctggatccctgccattcggggtccctgcttccattctggaaagtaatgaccttggtgaagtgcatccccttaatgaaaacagcgaggcccttgaatgccgcaggctcagctccttcatggtgaaggagaatgaacagcagccagaccacaccaaccggggtaccacagagcccttgcagactcagccaagatatctttgatctccaaagacacagagccagtagaattaaactgtaatttttcttgttcaaggaaaagaaaaagtgagctgtaccatctgtggtcataaattccctcgaaagagccaatggatggaagcgtcgcgcatgggtaccga

SEQ ID NO: 11086 - DNA, 547 bp, Homo Sapiens
agcgggcataagagctgttgccaagtcagtgatatgttcatttaattgtattcttgccagccatgtttactggggtgatagttgttattgtggtgggttattgttctttaggggtaggttcccgaatatgtggtctttaaataattatctaatggtgtttaaaaagatgtttattctgtttgtcaggtacaaagatatttatgatacatgtatgacttgtctaagttattaacattttctctagccttaggtaatgcatgaaagcacatgtttcagtgccactcacataagaagtgcccggtaagtgttagctattattgtctacttgagttactactttctaaaagtatgttgaagtctttttctgtaattgcagatttgttgattttgcatttgagtattttctatattttgaagctgttagatgcgtagtcatgatttttggtggaatgttttatcaatttttgaaaattgcctttgtctcatataatgcttttcatattgaactatattttgtctgctattaaatacttccaagcctgaaaaa

SEQ ID NO: 11087 - DNA, 945 bp, Homo Sapiens
ccaggtagaaggaccgaaggggccaccgcgacattggccggcagtgccgcacacaagcggcggcgcggcgccgccagacgtgggtggccgcgacggaggagggtgcccgttggcaagcccgggagacgagaccggggccggcggtataaggcgggagcggggcgacggggacccgccggagcggggatcctaccgctggggggagggtaggacgaagtggtctcagtctgccaggagggagaggtggggtcattctgaaggggcccgttggaaaaggcctgctcggagggaggggggtattcgggttgttgcccacgttcctggtggggaacggaaagcatactggagggccaatggtatttcgtctagacctgcttcttctaggggtagccttatcttcttcttcatcttcctcttcctcgctcaccaaagatgctttgccatcatcactcaaatctgactccacgaccattacttctgggttagtctttccattcagatcactctgcgtaaatcctgcaaaatcctcagtctctgagtcagtgtcctctataaaaattcttcttagctcttctgtgaagtatttggaatgaaagcgcacatcctgctgtttccctgactctagtgagtcaaaactatcgcagctctcctctgacgagagggtttccatgggaacatcatctcggaagccaacaaactcttcatcatcactgggggcgttaaagatgtcagccacttctttagggatctggtagcgagtcgccaactccattcttcctaaccgggctccagtctcctcccagcacgcggccacgggagcccggactcaccacggccgactgcgtggtcgacgatatcccggaaatccggaccggtaccacctgcttttttcacactgttctatagttcacttgatagctacgggcgacgtgttactttgagttg

SEQ ID NO: 11088 - DNA, 850 bp, Homo Sapiens
  misc_feature (624)..(624): n is a, c, g, or t
ggcatctgaaaaccctggccaaggacgaggccctgaagcgccagagctcgatgggcctttccttctttaacagcatcttggcccatggggacctacgcaacaacaagctcaaccagctctccgtcaacctgtggcacctggcacagaggcacggctgtgcagacaccaggaccatggtgaaaacgctagaatacatcgagaagcaaagcaaacaaccagacatgactcatctgacggagctggccctcagactccctctgcaaacaaggacctgacccccgggcccatccccaggctcagggactctggtgccaaatccagaaagatctgctctgctgccctgaactcttacggcaatttaggtttctcatttttcttttctttttacatatgtacaaattgttttaagctttggcctctatccaggttattctgacaatgaagaaatgggagttgtcagagcattaaaatgcaatcttcactaagaagcagtctctgtgttggctttgcacaagtggccttcggtctactcagccccatctgatgggcctttttaccaagagagaaacaagaatggaagtaacatctttcctcctcgggaaagggggttggttttttcacaancttaacaaatacggggcttttcaccagtggcgcggcccccttccaagtggcgccgggttccccacccgattctcttgccccaagcctgggcacttgaaaagggtaaggcccgccccccaaagtcgtgggacaggggcgtcccggaaccctccgcagggggggacggtggatttaagcggcggaaaataggcccgcgcccggcccaaagctgagtgtgcgtcacaca

SEQ ID NO: 11089 - DNA, 560 bp, Homo Sapiens
atcgcttatactgcgagaaggaggggaggcggcggagtcacagttaataccggggacagggtggaggggaagagggatctgtggggatcaagagaggaggcagctgaccggatgaaagggagggtgtctgcagggcaggtgatgaaggacaaacatcaggtgtggactcaacagtaggggcagggaaaccagagcccggaccgaggtcaggatctggctgagcttctagggatttacaaggacttgggctcctggtcccatctgcagggttttctacaggtaaatcgatgccattatattcattgagaagaaccttctgcagcatgcaggtggttggtttccttttctttacagcactacacgtaggctgcactgaatgactttctttgaattccttgccttcagagtcactacaatgctttttatgcacactgagatctaagacagattcccactggactggacgtcttgcctgtaccctcagccttctgtttgacaccgctggataaatccagtggctgctggtcgcacactatgctaaaagcagaactagctggtcc

SEQ ID NO: 11090 - DNA, 979 bp, Homo Sapiens
  misc_feature (239)..(248): n is a, c, g, or t
  misc_feature (266)..(329): n is a, c, g, or t
  misc_feature (550)..(550): n is a, c, g, or t
ccgcgggcctgcgtccacgccggggccgcgacacgccgtgcgccgccgatgtacccggccgcgggcgcacgcgggggagctcgcggggcgaaagggccggcgacggaccgcgacaggcggggacggggaaaaagcagcgggggaaccgaagggacggcagagggcaaaagcggcgccgccggcggttccgccaccggcgcgaagggctaagagcggaaaggccggggcggccgggccannnnnnnnnnagaggaggcgacccagcnnnnnnnnnnnnnnnnnnnnnnnnnnnnnnnnnnnnnnnnnnnnnnnnnnnnnnnnnnnnnnnngggagcacgcggccgataccctccttcccacccccaggccccccactgggggttctgcagcaggagcataaaattaattagtgttgggctcagaaaggaggaatggagggtccactctactaggactccagggccaaacccaaagggaggttgcaaataactagaataatcctcaaatgctcttcttcttcaggttggagagacaggaattaacaaaatantaatgttaatgaaaactccccagccgagggatcaggcagcagtagggaaaaccaggctccaagaggaaggggctggtcagtcccaggccttggagactagttgttgtccacaacagccccctgccgagccctgatgaacgccatgccatgcgtgcggaagtgggtcttgaggtttagagggctgtcgcagctcgtgccacagaccttacaggtcagtgggcctccagaagcaggcaggggtgagtctccaccatcggggtcagaccttgatggaggggcctcttactccccatcccccagccccagggcactggctttacccacaccccgtctcttcttgtggctgatgaaacggtgtcggcccagggagccaggggaggcaaagcacaagccacagtcgaggcactgctgggcaccatcctccaccct

SEQ ID NO: 11091 - DNA, 305 bp, Homo Sapiens
tcgttacttaaagacattgtgaaggatgcagcaacagacttttgtttgttgtgctttggatggaggaaggaaatcccttcattagattgcccaagacatcggttgatggcattctcatcatttactgtctaagtcaaatttctcaccatcattgtcttcctactgtttcacatctcctaaagtttctttcccattctttttcaactgtctttttcccaaccacctttcttcctgatcatgtttctggcccactgatgagatccaaaagtacaaggggatcaaagagaatactgatcactaaaagg

SEQ ID NO: 11092 - DNA, 912 bp, Homo Sapiens
ggatacttctttcagaaaggggccactgtggaaagtgctggtggggtttgcccttgatcaagtgcctccattgtgctgcaagggctgtagacagcagggtgggacagtcagtcctccgagcagcaggaatcatcccgtcacctgcagccttcccatgcttccgcctttattcagaactttctgtgccactgtagatagctcaggcaaaactattacctgggtatttatccactaatgagtcacaagaaaaggagtggatttggtaagaatagagatttgttttatttaaaccacttcccattactgaccattaaaagctcaccactagagttcctgaaacaggtgaaacctgtgtgacagcccttccactttggggagccacgcttttgatgtgacagtaccgcagagtgattcccccactgaggatgtcatcatcaaactcttctttggtgtgtgaattattagtggaaaagacccagctgtaattacaccctccactgtgtacttagctggaagaacatgttaattctgcaatatgtttcttggttaaacattgcacagttcttacctcatttctgtaaataaagttttgggaatctgttttgtattgtgacaaattcataagataacattgatattttgatttgtaatatttctaattggtagatttaaatgaaaagtaaaaattaatttatttttatatgttcaggggaattttaaagtcaaatcttttgtagataatttaaaaaatcagtgtggtttattttacttatttaacccactggttgttattctgtaacagtttgtataaatggtaaattttgaatgtgttgttattttacctagatgtaaaattccacatgtattaaaatgtacaaaatgttttgttaataaaatttaataatgtttata

SEQ ID NO: 11093 - DNA, 549 bp, Homo Sapiens
aggacctagtccattagagaaacttcaagaagtaatacagacattgtaatttcttgggatatatgtagtacatgaatacaaatattttaaaacatttttgcccttttcaagtacttctaaaacttaaaaattatagaagtacagatacaaaaggatgaatacatgactccacttaattgaggtacctagagtagtcaaattcttagagacaaaatagaatggttgttgccaaaggctggagagaggagagaatggggagttactgtgtagtgggtacagagttttagtttggaaagatgaaaacgtactggtgatggatggtggtgattccacaacagtgtgaatgtagttcatgccactgaattgtacagctacaaatgtttaaaatggtaaattttatgttatgtatatttttaaaaaatcaacatatacgcccctccttatgcctgcagaatcatcccttatttttttccctcagctcagagatggcagctgacctcactcttttagagtgagaccccaaaataatagtttatgtgatataaattt

SEQ ID NO: 11094 - DNA, 365 bp, Homo Sapiens
caatgcttggctttcataaagagaaggatttcaggttcaagataaaattggacatatttatgtaatggtaggaaagtgtcaatagagagtgtgtattgaagaaagaggaaagacgggataattaagcaaatgcccagaggtgagtaggatcggtaagtgatggatggattagccttgcataagaatcagatatatctttatgtaccattggcagataattttataggtagaggacagaaagttgagggagttctttcatgttttttcattatgtgaaagaaaatacagcccactgaaaaatttgagaggggacactaaaaagccttagaagaaataaaagtttctagtagatttttagggacatc

SEQ ID NO: 11095 - DNA, 310 bp, Homo Sapiens
cactaaaaatcctcttcatccctcctgtatgtctttcattttccatacctggagttctgatagtagatttttaacgagcttttcccgtctctgtcttctacctagatccagtatatttctgcagtctggtatgttcttccccctaagaacctcagctgagaaataaagcaggttaacaaagctgtatgaaatgtcactggcagttaaggaaattctagttgaaacaatgggtttgctaatttcactgacgattagaaaaggtaatagaaattagaaaccaacattctcagatttttagggggaaacgggt

SEQ ID NO: 11096 - DNA, 446 bp, Homo Sapiens
tacaaacataaaaccttccagtcttcaaagagcactgataaggattgggctcaaatcagcatctgcacaggatccatcaaagaccttagctaatgcagttggtgctctgtatccacaggtttcaaatcctgagactattgtacagtattttcgattcatgcttggttgaatcagacaatgtcatgggtttactgtataacagaggcagaaactgtggtcactgcatttcccatggcatttaaaggaaggcaagaaaagctgacagaagctgtgatttgtccctcaaattagaagggttttatgtaaaacttcaggagagaactcctcacagttaagactcatttttcttaccgttgatattcttgatgataacaagttactgctgacatccatttctaactaccacattgcctggatttttaggcagaacaggagggatcatctag

SEQ ID NO: 11097 - DNA, 270 bp, Homo Sapiens
taagaaacttagcaatccaatgagggcttctaactctaaccttgatggccacatttcacactaaggccgtcaatgtacttccccagtcttcatctatcatgagagaaaaagacctaaattctcagaagacgctcagtcttactaaatactccagacccaagtctttaactacctagagacagaatacagaaacaattagtgcttctaggaggagattgagaccaatttttatctctctcagttgctgggatttttaggggggaaacaagg

SEQ ID NO: 11098 - DNA, 417 bp, Homo Sapiens
gtcactaaaatcatatctccacccaaacagataatactctcatttagtctatgacattggactaatcaaaagcttactctcaaggataaatgtcttacaggtccttgctgctgcatttatgtcaaaaaataaactccttgagagaagaagccatgcgtgaatagatttttcccccttgttttctatttaattgtctaattgtttctagtatacatataaacaaattatgtgaatataattcccccctcaaattctactctgctattctaaacacttattttttccctgtaagaagccgcagctagtttaggaagtataatggttccaagctctgtaacaataaaagctagaaagcaacacatcaattttttaaaaagtacttgaaagattttagacaattacatagatttttagggg

SEQ ID NO: 11099 - DNA, 420 bp, Homo Sapiens
cactgtagacagctgtcagagcaactaactagagggctctgtcccagcagcagaacttatggaatgtgaggcgtgggcggatgtggcagtcatacttcctgccctagaggatggcagtctatcacacgagaatgaaccaatattacagtgcaaggtctcaaagagtgtcctggagtcattaatttccttccattcattcccgagttccagctgtcacttctctcagtccagctgcttgattttccctctggttttaagataccctagtttttttaaactaataccccttttagccgttgagttggatttctgccatctaaaggagactagtaagatttctaagtttcggatgaataaatacatttgatatgaagatacccaaggattaagattctttttgagacgggtttcactctcggg

SEQ ID NO: 11100 - DNA, 460 bp, Homo Sapiens
ggcgctctgaggatccccccgttccccctaaaaatcttacctatcagtatgtaggaataaataacaacaaaagataggtaagatttcagcaggggagatttatttattacgcagtattaaataatataaatgaaatactgtagattagtagaggttactcatgattaggaagacagaacaagtaagatgtcaatttttctgaactgacatgtagatccagtagaattccagtcaaagcataacttccagtcaaatcttttcatggagtatgataaaatgtatcaaagaataaagggccacgaccatccaaggtactttgaagagtatggttattatttatgttcatatgaagaatttgtttgtgtattagggaaggagaggtttgatttgagtctgcagcccacttatcaatgtggtgatagcacagggttaaacagattgagtaacggaactagattag

SEQ ID NO: 11101 - DNA, 426 bp, Homo Sapiens
tgaaacaatttttctgaaatttatttctaaaagtcagagacaaaactttagaagtgacacatttatactaagcatacatgcgtgagcaaaaaaaataagcacagaatacaaaaatgaaatagtaaaattttaatacagtattctgaatacaagtagaataccactagataagaattgtatttacctaagaaatctatgatagtgtgggtggagataaaccagtttaggatagccacttcactattcacattttaatcagtgctgaccagaagctaaagcaatttcttttaggctaagattggcaaaaaatcatagacccaattttccttgttatgaatcaaatgaacatgttttaaggtgatttgtcctcatttaacggtagctggggtaagtcaaaccacagagagcccttacaaagactaagca

SEQ ID NO: 11102 - DNA, 1102 bp, Homo Sapiens
ggtaccggtccggaattcccgggatgatcagagtcaaccacgagccagagccggctggcggggccacgcccggggccaccctccccaagtccccatctcagcccacagagagtccagccggcagcctgccttccggggagcccagcgctgccgagggcacctttgctgtgtcctggcccagccagacggccgagccggggcctgcccaaccagcagaggcctcggaggtggcgggtgggacccaacctgcggctggagcccaggagccaggggagacggcggcaagtgaagcagcctccagctctcttcctgctgtcgtggtggagaccttcccagcaactgtgaatggcaccgtggagggcggcagtggggccgggcgcttggacctgcccccaggtgtcaggctcaaggtacaggcccagcacgactacagcggccacggacacacgacgagctgcagctcaaggctggtgatgtggtgctggtgatccccttccagaagccctgaagagcaggatgaaggctggctcatgggcgtgaaggagagcgactggaaccagcacaaggagctggagaagtgccgtggcgtcttccccgagaacttcactgagagggtcccatgacggcggggcccaggcagcctccgggcgtgtgaagaacacctcctgccgcgaaaaatgtgtggttctttttctttgtgtgttgtttgtgtcgtgttgttcatcttttgaagagcaaagggaaatcaagaggagacccccaggcagaggggcgttctcccaaagattaggtcgttttccaaagagccgcgtcccggcaagtccggcggaattcaccagtgttcctgaagctgctgtgtcctctagttgagtttctggcgcccctgcctgtgcccgcatgtgtgcctggccgcagggcggggctgggggctgccgagccaccatgcttgcctgaagcttcggccgcgccacccgggcaagggtcctcttttcctggcagctgctgtgggtggggcccagacaccagcctagcctggctctgccccgcagacggtctgtgtgctgtttgaaaataaatcttagtgttcaaaacaaaatgaaac

SEQ ID NO: 11103 - DNA, 455 bp, Homo Sapiens
ggaagagagggtggaaaggcccttcagccccagggccatgtctgggttctccatgcccatcagtctctgcagtttctctacctgcccccagagctgaggccatctgcaagcccctgcccatggcccaatggggagcctccagccacaagttccctgtccttatcagccactgggtggttcccactgcatgaccctctatccctgccatctgtccccatggtttccagctcaatccacccctgacccatctgtcagctttttcccagggagccgtttcaggggttctgggcagtaggctgggcctggcctcagaacctggtggctcctgcctgctccttcacttttgtaaaaccatccccttcaccagaatggtattaactcctggtgctttgtactactggtccagctgccttgggctccttttctatattaataaagaaacgagtaaaaattaa

SEQ ID NO: 11104 - DNA, 486 bp, Homo Sapiens
cagtactatctattggtaatggatgcatatatgtatgtacatgtttttgaaacggattggaaggatacagaccaaactcttgatagtggtcacctgtgaagagtggagaagggaaaataatgagtgtgggaggtgggatgggtattggttaaaggggacttcagctttttatataaacatccacttctctttcaaaagacttcaagtaaatataagaagatactgattgattctggattgtggtatagggatatcttgtcttattttttgtacttttctgtatttttaaaatttctcaaaataggaatgggagtgaggatgggaatgctgtatctgtggaagtcatgttatactggattcatttccaattaaatactaaacattttatagaaaatatttctaaaattttatcacggatgaatggatggacttgctctctatgtaatatgaaattaatctattttattaaaatttaaaaggacagca

SEQ ID NO: 11105 - DNA, 418 bp, Homo Sapiens
taggtaaaagtaattatgtacccaaaaggagttgaagggaaaatcaatttaggtttacattaaacatccttcaagttcttatctttaaatggagtttcagtgtctcccaaaggctggatgagttttacagttataaccactggattgtgagaccataggacatttgaacaatcttttcttctacccatctagaaaagcatcttttttatataccaaatttttacacatatatccacatctgtttttgaaatctagagcagaggtactcaaagtttggttcatggactagtgccagttcacaaattgttaatgttttataatgagataagtacggaagttgagagtaaccatttagaaactgtgtaggaatttaaaaagtaatatctgacaaatttaataataaaaatggaggcttgta

SEQ ID NO: 11106 - DNA, 868 bp, Homo Sapiens
  misc_feature (577)..(577): n is a, c, g, or t
actataagggggtttatggtagcgaggcctgggtggcgaattcggcacgaggtggttgttgctctcggggccgtgtggagtaggtctggacctggactcacggctgcttggagcgtccgccatgaggagaagtgaggtgctggcggaggagtccatagtatgtctgcagaaagccctaaatcaccttcgggaaatatgggagctaattgggattccagaggaccagcggttacacaagaactgaggtggtaaagaagcatatcacaggaactcctggatatgatgattgctgaagaggaaagcctgaaggaaagactcatcaaacagcatatccgtctgcacagaaagagctgaaccactctgtgcagcgagttacatgttgagccatttcaggaagaaggagagacgaccatcttgcaactagaaaaagatttgcgcacccaagtggaattgatgcgaaaacagaaaaaggagagaaaacaggaactgaagctacttcaagagcaagatcaagaactgtgcgaaattctttgtatgccccactatgatattgacagtgcctcagtgcccagcttanaagagctgaaccagttccagcaacatgtgacaactttggaggaaacaaaggcttctaggcgtggaggagtttgtcaagtataaagagacagatcctactggtggtatggaaagaattagacccacccccccagaacccaagcctttggaaaagaagatgggtgggggtggtgtgaagaaccgaaaagagggccctttttgcggtttggcccttttgggaagaaaaatatttttgcaacaacccctcatacaaaaaggtgtgggttttaacgggcgcaaaccccctttggaa

SEQ ID NO: 11107 - DNA, 545 bp, Homo Sapiens
ggcattgtcattctctgaattaagaactgatggtttctatcattatttagccccacctttgtattttaaaatccttcagaatacatttatgaaccaatgcgactggacttagccacacacaatggaaattcagaccttgactatttggtgtttccagttcacaaaggtgatgaagactgtcttgggagcagcttaatcccaaaatttgtacatttcttgctgctcctggcgtggaaacttaagtgagaccaccaaatacattggtcctgtccaattctactgaatgggggtggacctggcatttatctggccaaaaacaggagccagagaaatatgaatataccaaagttgtttgtttagcctccaacttaaattacattagtcaacttatagatactcatatgatcacttttctttttagatactacatcaactagattcaggagtatatcatttgcagtgcttgtattggtttaaaatgtaagattttaagatcctctaacactgtactaaaacatttcaataaaatcattctgatgcgttaa

SEQ ID NO: 11108 - DNA, 1268 bp, Homo Sapiens
  misc_feature (410)..(434): n is a, c, g, or t
cccaaggatgagaaactgccaaggaaaaacatttgcatcttcagagtagacattttgcagtttgtttaataacaacttctaaagtaagttgaattcatccattgtcactgattcaccaagtggatgttgcattgtggaatttgcctgagtactgttgtcattctgctcagccaggcacggtcagtttcttggccagggacattgctatgtgctgtgtgcaagctctttagaagagagattggattttcttggcattatcagcactcatgctatttagtctacttctattttgactgactctttaaattagtacaatttttctacttgtcatataactcctggaacaatagtacgggaagccgtgatccttttccctgactcatgattttagtctttttccaaatcgctgnnnnnnnnnnnnnnnnnnnnnnnnnggctgctccaacgaccagcatgtgttggagcagatctccatggtaagccaaaagtggacttgtcagcctataactactctgcagctgccactaactctacaggcacagtaactacactttatacaggagcacatgccaaagtgccggggaggtgccaataaaatcaagaaataagaaaactacaaaaaaagatacggtattaaccttggacataattttttttagggaggcagctttcccacttttataaagggggttgtaaatctcaagaggtcatttgttccccatagcagcatatctcatttttaaattgaagcgaattaaataggattttactactcaacattcattatactgttaatctttgctgaaatatatgctaacaaatgttaagcaagggaaactgaagacttagtcatgtggattgttagcagtgatctgcattctgtaaaagaggtactttcccatgatgtaggcatgaagtggtgccagtaagcgtagagcggaaatgttgactttagttaacattgggtttagcatttccagtgcagcattatcagtgggcctttaaaaatacttcgtaagtacattagctttcactttgttgttaaattatagcagactcattatagagaacaagtttgccttgattttgtttaaaatgacttctgctaagcacccagaagataaaattgacatatttttataatataagcatactttttttgtacattgtgttcattcttgaataaaatgagttctgtgttggcttgtagatactaaaaagaaagtattgattttgattcaataaatgttttctttcaatcctaaaaa

SEQ ID NO: 11109 - DNA, 844 bp, Homo Sapiens
  misc_feature (135)..(158): n is a, c, g, or t
  misc_feature (708)..(708): n is a, c, g, or t
gcttctaatgctagccggtgaggctgacctggagccagctgctggggtccctcagcctcctggttcatccaggcacctgcctataccccacatcccttctgcctcgaggccaagatgcctaaaaaagctaaaggnnnnnnnnnnnnnnnnnnnnnnnntcctgcctcctctcctctttggggatcaccagctctgactccaccaaccctcatccaggaatctgccatgagtcccagggagtcacactccccactcccttcctggcttgtatttacttttcttggccctggccagggctgggcgcaaggcacgcagtgatgggcaaaccaattgctgcccatctggcctgtgtgcccatctttttctggagaaagtcagattcacagcatgacagagatttgacaccagggagatcctccatagctggctttgaggacacggggaccacagccatgagcggcctctaagagctgagagacagccggcagggaatcggaaccctcagacccacagccgcaaggcactggaatctggcagcacccctgaaggaactgggaaataagttcttccccagcctccagataagagcccccgccggccaatcccttcatttcaaactaaagaagaccctaaacaaaaaaacctagctgagccactcctgacctacaaagctggtgacttaaaaaatgtggggcttttaagcccgcntaggaaccccaccataccacgatttttccttttccggcccccttgggccctccaaaaacttttctaaacctattcccttggggggcgcggggcccatacggaaatgtgaacatgggcccttacctgttttccaagg

SEQ ID NO: 11110 - DNA, 1428 bp, Homo Sapiens
ggggtcgcggccccgcctcctccccggcgctctgggcccgtagcgctccgcgggaaggaggctggatgcccggcagcagtggggcggggatggaggcggccgtggcgccggggagggatgcgccgtgcacccgcggcgagtcagcccagcggctgcgggaaacacaactcgccggagaggaaagcttatatggactataatgcaacgactcccctggagccagaagttatccaggccatgaccaaggccatgtgggaagcctggggaaatcccagcagcccgtattcagcaggaaagaaaaggccaaggatattataaatgcagctcgggaaagcctcgcgaagatgataggggggaaaactcaaagatataatcttcacttccggggggcactgagtcaaataatttagtaatccattctgtggtgacaacatttccacgcaaaccagacctcaaaggggacacacaggtgggcagcagagccagtgaagggggcaagccccgaatttcattactttccctcaggtggaaacacgaggtcaataccggtggccctggagcaccatgggtgtgaagaaccaaagtggcagcgggacacctataggtcccggatgacccacaggtgagcgggcaaggccagcgtggacgaaaatacgttagacgggcagaacacgcccagaagcccacaaggcactcgatgaccaccaaatcaaatggcgtggaccacaacacaaatgcagaccgcggggcaactggccacagggcccgtgtgcccccctgcaaaaacttacagaccaaggaggcacaacaaacaagcggcccccgtggacagcacacgggggaaacgggggatgggagcaacgctcaggggcagcacgagtcaccaattacatcgcggcgccacacacgaggcgaaggtgcgcgggccgaacaggggccaacctgtgcgggaaaaagcgcgccagggcgcgctaggaagatgcaggcaacgcaacccgaggcgcctgatgcgccccgcacccacgtcagccacaaccgagcggtgccgcacacaccgagccataaaggggagcccacccaggacatgaggggggcgacagacaccactaaatcaagcgggagagcgaccccgaagcaagcaacactagaaacacaccacggccgagtagacgcacagaaaagcccgaaagagcgggcaggggggaacacgaacaatacagagcagtacagaacaaacgcaacgacacagagcgcgagcacaagaagaacacaccacgaagcggaaagacgatggggggccagacgaagcggaaaaggcagcaaggaagaagacggagcgcacagccacaagacagagcaggagacgacaaagataacgggcacaccacaaggaaggagaggaagaaccgacgaagcacatcagcacgg

SEQ ID NO: 11111 - DNA, 447 bp, Homo Sapiens
  misc_feature (160)..(171): n is a, c, g, or t
aactcttatttaaacttaacttgtcataatttgttattaatatacaaagacaacaaacttttaaaacattacatttactaagattctggcaataagacacagcataccaggcttgccactcaacttgttattgtaagtctcagcttcaatatgaagccgnnnnnnnnnnnnaatcaaaaccctgctttttacatgctaaatatcttggcaagtaggccattaaacatagtaatgaacttaagacagcaagagtgaggagttaacaaaagctaaacattgcagcctaaacaaaattcatacaaaaaaataaactatcactagttacataaaattttcctgactggttaaaacttagtataaaacatgcattttagaatctttagctatcaagttcaaaaagtaccaatgtctatttaaaataattcctctcccaagccaaagtgtagt

SEQ ID NO: 11112 - DNA, 310 bp, Homo Sapiens
ggaagcagtggtatcaacgcagagtggcattacggccgggagaccagtggtagtgcccagacttctcctagacatctagtctaaaacattctcctaggaccagggaagcctggcttacagtgccatttctgctgggcaccaccacctgcctgagggcctagctcaccacagcacatcctccaggatctagccttctatctacctcttctctggaatgtttatggtggttcagaagaatgatgactcctctttgctgagaactgttcatccttcttcaagaagaagcttgccaggccgggcacggtcgtca

SEQ ID NO: 11113 - DNA, 513 bp, Homo Sapiens
ctcttatggagccctggagttgttgggcaaggatgctgtcattttttgaaccaaaagacaaacaggttaaaaggaaaaaaagtaatctgaatttcccaagtgcctacgctgcatattccccttgttagatcccattttcatgttactttgtagccttggccagaggctcaaaaaggacacaaccagtttggggaaggggtggctaaggaagatggtataggtgaaggcggctgtgtgaccactttcccccacccttcccaccctctagacaactctctcccttacctgtttttgctatggctgtaaaggtatttttcctctgccccactccctgccatacctttatcctgggatcctattttgggcctggggtgggtatacctggggctggtcttaggagggtgctaggctgcagactgccttgtactccctggacaccctcaaatggggttttctgtgttatttcataaaattctttgaagtccaataaagcatgtaggagattttaaaaaa

SEQ ID NO: 11114 - DNA, 702 bp, Homo Sapiens
  misc_feature (266)..(455): n is a, c, g, or t
  misc_feature (466)..(481): n is a, c, g, or t
  misc_feature (503)..(603): n is a, c, g, or t
  misc_feature (642)..(656): n is a, c, g, or t
gacctggccaggtgatgctctgggggcagcatctccccaccgagagaagcgggctcctaatgaggtgggaaagccacggcaggcagcgagcagcccaggccagctttctgcatggatggtcagtctcttgccctcaaacactacagcaaacaagctacccctgccagtcctagacaacttgggtacatctggggacctagcagttaggcttgactttgaggagaggctgtgatgtttatgatccctgaataaagctactccttggnnnnnnnnnnnnnnnnnnnnnnnnnnnnnnnnnnnnnnnnnnnnnnnnnnnnnnnnnnnnnnnnnnnnnnnnnnnnnnnnnnnnnnnnnnnnnnnnnnnnnnnnnnnnnnnnnnnnnnnnnnnnnnnnnnnnnnnnnnnnnnnnnnnnnnnnnnnnnnnnnnnnnnnnnnnnnnnnnnnnnnnnnnnnnncaagggggggnnnnnnnnnnnnnnnnacaaaatttttccccgctcttnnnnnnnnnnnnnnnnnnnnnnnnnnnnnnnnnnnnnnnnnnnnnnnnnnnnnnnnnnnnnnnnnnnnnnnnnnnnnnnnnnnnnnnnnnnnnnnnnnnnncccgggggggcccccgaacgttcccaaaaaaaactcgcnnnnnnnnnnnnnnnccgttccgtgggcgttctaacaggggggcccccagggccgcttcca

SEQ ID NO: 11115 - DNA, 556 bp, Homo Sapiens
atgcgcgagcttcatcaaaacaaaagctatatagaattcaaaatccagtccacaggaatctggggtataggtgttgcaacatcagaaggttaacttgaatcagatatcctcttggacgagatatgcacagtctggtgatgagaaatgatggagccctttaccacaacaatgaagagaaaagtaggctgccagcaaacagtcttccgcaggaaggagatgtggtgggtattacttatgaccatgtcgaattaaatgtatacttgaatggaaaaaacatgcattgtccagcatcaggtatacgagggacagtgtatccagttgtttatgttgatgacagtgcaattttggattgccagttcagtgagttttatcatacgcctccacctggttttgaaaaaatattatttgaacagcaaatcttctgaatgtatttgtttttaaaactggtatttctgcactgttaaaaaatgttcatcatttaataaaactttacccggcctatagatgaaaatatattcttaaaaatatgcttgttgatggaagcgtcgcgcatggg

SEQ ID NO: 11116 - DNA, 290 bp, Homo Sapiens
ccgtgttccccctaaaaatccctcatccttcctaccaagaattattgagcacctgctatggccaggcattgttctagatgctgggaattcagtagtgcaccaaacacctcaaatttctttcttcatgaagcttaaaacatttttcatgctagtgttatggggggcggtcaagggtgggttatgtcctccagatatggagtgattggttgctatagctacaataaaaggcagaggggttgacggattctgtagtgggaaaagtaatctagggaacaggagattctattaga

SEQ ID NO: 11117 - DNA, 895 bp, Homo Sapiens
  misc_feature (593)..(593): n is a, c, g, or t
  misc_feature (599)..(599): n is a, c, g, or t
  misc_feature (612)..(612): n is a, c, g, or t
  misc_feature (614)..(614): n is a, c, g, or t
  misc_feature (723)..(723): n is a, c, g, or t
  misc_feature (783)..(791): n is a, c, g, or t
gggagactggggcctcgctcgctcccgacccggttgcaagtgttgcggtgggagaaagtcgcgtccgcatcggaggggaagcgccgtcatgcctaagtattatgaggacaagccgcagggcggcgcgtgcgcgggcctgaaggaggacctgggcgcgtgtctgctgcagtcggactgtgtggtccaggaaggaaaatcacctcggcagtgtttgaaggaaggatactgcaactctttgaagtacgcattttttgagtgtaaaagatcagtgttggataacagggcaagattcagaggaagaaaaggatattgatgcattatgttgaagccaacatggaaaacaacaaatattttccctggtcattaacacaaagaagccaaaacaggaaacatactttttactacatctgtttggttggaccagatttcccctccgtggaacactgaagaaagtggatgagttgttttcgaatatgtataaagtaaatgattctcttgatccaagttatttttagaagaaaaacctaattgaacaggtatgggttgggagcataataaatgtgttttgagaattgttctaaagcccccgcgancccccngcgggggtgagancnccccgtggtcggccgccctcggccccctcaagaagctttccttaaaccatttcgtttgtggggccgcgggcccccaggtagggtaaaggggaccactgggctcattagncgtcggttctccaagcgagacaccgcggggctctctgacctaaggcggcctgggcgctgnnnnnnnnnacaaataaaacccgccgccgcgcggggaaacgcagaggacggccctgtgacacacgcgccctagctgggagcagggttctgcggcccggccgcccccgctttct

SEQ ID NO: 11118 - DNA, 285 bp, Homo Sapiens
cctgtaccccctaaaaatccctgcattctttggagaaatacaaagcagggaaggtgaatggggggacctacaggtattcatctataggtgaatagggcatgtaggagggaggtaatcaggcaagacttcactgtcagcaaagacttgtagaagataagaaaaccatttatttggaggaagagcttcctaagcacagggaacagcagttgtaaaagtcttgaggtgggttctctttgagacctttcagctaaatatagccaaatgttttacgcctggacgtagcat

SEQ ID NO: 11119 - DNA, 335 bp, Homo Sapiens
ccgtttccccctaaaaatcaatcactccctactttgtaatctcagtagtaactttctatctctcacattctgatctacattatgtgtgaagttcattttctacacctccttaaaggtggaaaatgtctcagtgcagtatctagaaaaatcactggcataatgtctaataaatatttgttaaattacaaaaaaaatgggattcaccattcacttctccccgaagtgtcttgatcttatgttttaatcagatttatacttacagctaaactataatgttcttatatgccctattttctaaagcgtattaggacttgtaagacaagatggggccggct

SEQ ID NO: 11120 - DNA, 801 bp, Homo Sapiens
  misc_feature (523)..(523): n is a, c, g, or t
  misc_feature (780)..(780): n is a, c, g, or t
tgatgaaatgtctgggatgacgggttggaaaacggctctagtgatgaggaagcagaagaggaggaaaatgctgagatgactgatcagtatatggctgttaagggcatcaaacgacggaaacttgagttggaagaagacagtgaaatggatttgccagcatttgctgacagtgacgacgaccttgagaggagctcagcggaagaaggggaagcggaggaagctgatgaaagcagtgaagaagaggactgcactgcaggagagaagggcatttcaggatcaaaggctgctggagaaggtagtaaagcagggctgtcaccagctaattgccagagtgaccgtgtgaatctggagaagtctttgctgatgaagaaagcagctctccccactttcgattctgggcattgcacagctgaagaggtgtttgcatctgaagatgaatctgaagaaagctcctcactcagtgcagaggaagaagactcagaaaatgaagaggctattagaaaaaagctttcaaagccttctncagtgagcagtggtcagaaactggggccacagaacttcattgatgagaccagtgatatggaaaatttactcaaagagggaagaagattaccagggaagaaaataatgattcccaaagaaacgtcaggtgcgcctcaaagtgggaaggaagaccttttccagaaaaggcagcctgaggccctttcctgagggcaagcaccaaagcacgctcccaaaccctccggaaaaagcttaattttatgggggacagttggaccngaaagataaattggaagggac

SEQ ID NO: 11121 - DNA, 254 bp, Homo Sapiens
cctgttccccctaaaaatccctgttcctcccaaagtgctaggattatacggcatgagccactgcacctggcctatttagcctttgaaataactacattatcaaaccataagccaacctatcctgcttgaatgcaggttactcctttctgtttatataaagccttttttcagcttaacacgtgttaaaagattttgctgccatgagaattgacagatttacaggagacaaaggttagatttttagggggaacagg

SEQ ID NO: 11122 - DNA, 304 bp, Homo Sapiens
cctgttccccctaaaaatcaagatgtgaggggcatatgccatcaacaaatactgtggaagtttctgagaatacagaggtgaaattttttaagggtcaaggcaacaaaacccaatcactaggcaagatgttgggttctctaagagctctctatcaactttccctcaggatatcagggatgcctccactgaggagtaaccctgaaagaaaagtaggaattcactaagccacatatttatgtgggaaatttaagtgaggaaggggatgaaaggaatttttagggcgaacgggcccgagcgctacgta

SEQ ID NO: 11123 - DNA, 274 bp, Homo Sapiens
ccttaatcaactcaaaataacccttatgccagaggggcatgtcagaggcagcaaattctggcctgctagtcctgtttggggaggcatgttctgagccccatcactctccttgcagacaggcacctagagttatgcttcatcttatcactctgaccaccccgctatgtattgcttattcattccctgagcactccctgctaaggaaaattattgtggcactcattaaaaccggtaaggaagactcttcccaacaggagtcaggaccatcgcaatg

SEQ ID NO: 11124 - DNA, 279 bp, Homo Sapiens
cccttgtatataaacataggtctgaaatgtttcagctaagctggctaaatgtgagattttactaagccaattgagtatcataattttctttttcttaaaaaccaggggaaactctgggaaaggaagggactatactgatgactagggggaaaggtgttaaatgactttatgattctcatcactctggaaaggcaagagtcttccaaggatctcactggtcctagaggccacaactgaaaggagagaagagaagagcctttgattttcagggggaacagg

SEQ ID NO: 11125 - DNA, 274 bp, Homo Sapiens
cctgtgccccctaaaatcagtcagacctgaccttaaatcctggctctaacactgaataaatgaatgagcttgagtaagctgccactaggagcttcagagtaacaggaatacattccctacacctcacaggctggacatagaggtggtgctcagtataaagggggatcataacttcactggacttttcaatcttacatcaagagcagagggcagtgttagacattcagtaaatagccgtcattataataaggcatgggctcatgaggattaaatg

SEQ ID NO: 11126 - DNA, 902 bp, Homo Sapiens
ggtgagtgtactgtgggcttcggagatcacgccactcctgccgcccgctgcccgccaccatcttcctcggcgctcggggacctcgtgtgacaggtgagcaccttacggcccctccctaccctgcccagatgcctgaaaggcctccatggctttcctgcccttcctggttccggacagctggggaaaggccacagcagctcctctgctgccctgcagtctttgggggcggggagggctggacatgtggaaccctgatgcagccgcagcgtcaaggacgaggaaggggtgggaagggatggtacgtggaggggaatgggtggtgggaccagggacccaatgctaataaagactggactgtgaaaaaaccccaaatcggctgaggggcgtaaaaattgttggcccgcctcgggccctcgaaaagctttctaaaccattccgtttggacgcggcgggcccactaaggaaaagtggaacatgggccttagcctgtttccctaaggaaatccctgggacttgacataagggcttggaatttctccccattaaaaacaaccgcccgggcgggcaaacccgacggtttttggaacaaaatcccacaaaggggagttccccggagggcaattaacgggaacccacgcaagaacgggacgacccacagttgagccgccaccatatacaaatgaacagcccccgagtaatgataactactcccccgagggtacttgtgaccgaactacccccctggaaaggccgcggcgaaacaaggtggtcagcagggaacttaccgggccattatgtgacccttagatattcacttccgcggttgctgcctagaccccctggtgagtcacctcgagacacctcctagtctatcccaacgtggacgcgactatggttgcccc

SEQ ID NO: 11127 - DNA, 1603 bp, Homo Sapiens
  misc_feature (583)..(693): n is a, c, g, or t
  misc_feature (698)..(698): n is a, c, g, or t
  misc_feature (1105)..(1113): n is a, c, g, or t
  misc_feature (1204)..(1204): n is a, c, g, or t
  misc_feature (1234)..(1234): n is a, c, g, or t
tgcaggacgtggaggggttcaaaaccgagatggccatgctggtgacccaggccaggaagaacaccatcaccctggaggagcttcatgtgtccagccttctctctagtgtctttaagttgctgatgactcacaaggttaagcttgagaccaactttgcctccattgtgtttgccatcatggtgttggaggggcttggccgctcactggacctcaaactggacatcctggaggcagcgaggcccttcctcctcacgggcctagtgtgccccccgtgatggggcagtgggcctctgtgggcccttgtcaagagctggaggccactcccaagagcctctcctatggcagctgggacgttttaaaattgggacaccaatttcaaatgtaaccctccagtggtggaaggcacaccatggcttcctctgcttggtttgagggtctgttcaaaagctttgggccaattagggagtaaaaggagggaaggggcctatccattccattgtggaagctgggccaggtgccagggacactctccttcagggaaaatgttatgtggaggaggacgaataaatttattttgttttcnnnnnnnnnnnnnnnnnnnnnnnnnnnnnnnnnnnnnnnnnnnnnnnnnnnnnnnnnnnnnnnnnnnnnnnnnnnnnnnnnnnnnnnnnnnnnnnnnnnnnnnnnnnnnnnccaancgccacacgaaccaagaaaaaaaaccgaaccccggcacccccacgatagcataggaaaacacgtccggcggcaggcgcttgggattgctcgcagtacaaacaccacttcggggtgttcgccaccgctctttatttagtccagaaccccccgcccggaatgcccatcaacgggaaagaattcggcctccaaaaaaaacagccggtttgccattaaaaattgaagggcaccacccccggccgcgaaaaatgaagtggcgtgggaaatccccaattttagactcaccccgtcgaccatgtgattgtctccccccctccgctataggtctaacaacccagcctgggagaaacgagcgctggcccccgcctagccctgcgacccccccagaacattctatagaccaatgggnnnnnnnnngagtgtcccctaacaaagcgtggagatttctatcatgaccccttgggctaggtatacccacaaacccgaggtgcgaatgttcaaactcctntcaaacaccacgtcgagcgtcagcatccanaacaatacataatatgtagcccgcccacacggagagatatacaggtgcggcacggggaggaaacaaccactacgcacacatctggatacaaaacaagcaattctcatcattagtcgctgcgcggctactagtataccacgcgccacctgatgtgggggtgtgatgaccacctaacgggtgtaagtttgtattgtctgcctagaacagagacacacttaatgtcttggtctgatacaacaactcgccgtcgtgtgatagatgcgacacactgtgagagcacgtactgcatgttgtcgagtgccagaggacaccaaccgtctccagtatgtatcatacatatatagacgatgcagtctaattccaaccgcg

SEQ ID NO: 11128 - DNA, 381 bp, Homo Sapiens
ggagactccagtgagatgttgaaattgttcctgtgcttggtaactactttcctctgccaggctatgggaaagaggatgtaattgtgaataatatacaccatccagtctttaatgtgctgcaacaatgtagtaatttgtttttttcatttgttcccactgcctttgtgtacatagaaaacttaaaaatttcccccagtctattagaagttaagatgttccctaatttattaaatatgcctttattcacaatttgtttttttaggttattcttaatgcattatagaattaagtatgactttgtttatttttattacagtatgtagttattgacatattgtggtttgcagaattatcaattgtataaactaaacctttaaatta

SEQ ID NO: 11129 - DNA, 144 bp, Homo Sapiens
gggtctcacaagacatggggcatctccacaaatttaagttcctgtccatttggaaatttgtttctatgtgtacagtttgtcagagaaaaacaaagtttttgtatgaatacagaatgtgatttacgcaagaattgacagaaaact

SEQ ID NO: 11130 - DNA, 567 bp, Homo Sapiens
gagggcatcatgccccacaagaagggaccactgtactacccgactgtcagcaccatcagctggggctcccacaccgtgctggacttctacgagccgcggcggccagaggacgatgaccctacagaacagcctcggcctccgccccggcccaccacctcgctactgctggaaccgcgcagcctgctggtgctccgcggccccgcctacacgcgtcttctccacggcatcgccgccgcccgcgtagacgcgctggacgccgcctcctcgccgcccaatgcggcagcctgcccgtcggcgcggccgggagcctgcctggtgcgcggcacccgggtctcgctgaccatccgccgcgtgccccgcgtgctgcgcgccggcctcctgctgggcaagtgaccgccagggccgggacccctcggattcccaggttcctgcccctttggggctgctgtgactccgcgacctaggaaccgtgggcaaagggggctcccctgggttatttattttcccaataattttgtgtgagctacagaagaccccataccaaataaacaaaaaaatctttcaaac

SEQ ID NO: 11131 - DNA, 366 bp, Homo Sapiens
gaagagggcttggatgtcaaaaattcttccattgtggggtaggtggtcggggatgggagaaagggaaaagtcagggaaaggggagaagaaagaaaaacacatttggccttaaaatagcatgcattctcccagaagcccatagtaaacaaaatgacagatcgtggtcagcagactcttatcaaattggtatgtaaaagatttcttcaagctccattttgcagagaccaccacttagagaatcaaaaaattcctgttttgatacttctaagttaaaatatatgttacagtttatctggtacttcatttttcttaactaaaattactttttactttaagcttgaataaaaatcttcattggtaactgta

SEQ ID NO: 11132 - DNA, 479 bp, Homo Sapiens
ctttctgtgctccttccaagttaaattaaacccctctccacgattcccacggcaggcgtcattcccgagatgggagccagtccaggggtcagcaggagccagcgctgggcacacgtgccctggctgaggccagcggcatcctgggtggcccaggtccatcctgggcagcaaaggcgtgtccccttctgtcagacagcttcacagagtgtggcttcaccagtcagagggagcagtccggagaggcaagatgaccccaccgggactgcagagcctcctccttactaacaaggacctgtccgcagccgcgaggtccttcactcccaccctgtaattgtggggggagtgccagcaacaggcctgtcccctggcaagttggccacggaacccaccatgcactgcaaggctgtgacagcctggacacccctgcttctcctctgcttgtacggttcccccaataaatcctattttccatcgcaaaa

SEQ ID NO: 11133 - DNA, 1079 bp, Homo Sapiens
ggacaacttctcggtgactcaagtgcccttcactgagagcgcctgcctgctgctgatccagcctcactatgcctctgacctggacaaggtggagggtctcactttccagcaaaactccctcaactggatgaagaaactgtctccccggaccatccacctgaccatgccccaactggtgctgcaaggatcttatgacctgcaggacctgctcgcccaggctgagctgcccgccattctgcacaccgagctgaacctgcaaaaattgagcaatgaccgcatcagggtgggggaggtgctgaacagcattttttttgagcttgaagcggatgagagagagcccacagagtctacccaacagcttaacaagcctgaggtcttggaggtgaccctgaaccgcccattcctgtttgctgtgtatgatcaaagcgccactgccctgcacttcctgggccgcgtggccaacccgctgagcacagcatgaggccagggccccagaacacagtgcctggcaaggcctctgcccctggcctttgaggcaaaggccagcagcagataacaaccccggacaaatcagcgatgtgtcacccccagtctcccaccttttcttctaatgagtcgactttgagctggaaagcagccgtttctccttggtctaagtgtgctgcatggagtgagcagtagaagcctgcagcggcacaaatgcacctcccagtttgctgggtttattttagagaatgggggtggggaggcaagaaccagtgtttagcgcgggactactgttccaaaaagaattccaaccgaccagcttgtttgtgaaacaaaaaagtgttcccttttcaagttgagaacaaaaattgggttttaaaattaaagtatacatttttgcattgccttcggtttgtatttagtgtcttgaatgtaagaacatgacctccgtgtagtgtctgtaataccttagttttttccacagatgcttgtgatttttgaacaatacgtgaaagatgcaagcacctgaatttctgtttgaatgcggaacaatagctggttatttctcccttgtgttagtaataaacgtcttg

SEQ ID NO: 11134 - DNA, 424 bp, Homo Sapiens
ggttgcccggtcgctctagaggtccctcctctgttccgcctaaatctctcttcattccctgtccccaagcatccttcccaaccactggtaaccaccattctactctctgcttccttgagacctcaacttttttagctcccacatacaagtgggaagattcagtattcgtttttctgtgccgggcttattcacttaataaccttcagttccatccatatagttgcaaattacatgatttcattcttattaatggctgagtaatatcccattgtgtatatagaccacattttctttatccattcacccactggacacaacttgattccgtatcttggtaactgtaaagagcactgcaataaacatggaagtgcagatatccctttttgatttgatatactgatttccttttggatatatacccagc

SEQ ID NO: 11135 - DNA, 300 bp, Homo Sapiens
ctgctaccctaaaaatctcctcatcataagcaaatgaccaccagatcaggtctttgtctatttagttcactagccatgtacctatgagcctggcttgctgctgttgctcaaaaaacatctgctgtgggaaggcaaagggacttgttgcagccctgcccaacagttacagcctgtgtgcctcaagacagcacacgtcaggggaagccatctgaggcatctctgctgagggtgagcctccctccagacatcagatcaccaaccaagagatacctagcaagggagtggatggaataaagcaga

SEQ ID NO: 11136 - DNA, 687 bp, Homo Sapiens
cagttaccctaaaaatattaggagcgtcaggctgttgcctgctgaatacgccatcagagctacacaaaatggctggaagttatatccgggcactatgacaaactgcatatacttcatcagagccactaggtgatgaacaactcacaaacccagactgccagggactgtggtgtacagggacagtttctgtttatacttggaaaggacattcgaagtcatctggtccaaactcattaggaggtcaggctgaccccctaaaaatctggcaatcaccaatctatatactgataatatttggcacctatactagataattacatataaatggaatcatataatacatagtctgtagtgactagctttctttcacttagcacgtatactaggattacccaaatagtagcatgtattacttcatctcgtataatttaattaaatagtggcgaaatacacacaacataatcttaaccattttaaaatgtacagttcagtggcattagcatattcatactgttgtgcaaccatgactaccacccctctccacaactcttttaatcttgcaaaactgaaactcattaaacagtaactccccattcgtctctctcttaagcccctagtaaccatcattctactttctgtccctatgaatttgactactgtaggtacctcacataagtagaatgatga

SEQ ID NO: 11137 - DNA, 243 bp, Homo Sapiens
tattcaaacttctggaagccagtggactagaaggatgttggggggggtgcagtctcaaattttagcatgtgcattttcatttaatgcccctgttctttgtaaggtgcctcctctttcaggagtacatggcgtgccctagttcaggaatcttctgatttactctcatcagaaaagacttctagaagtggggaaagacagccacccagctgcaagaggcaagaaagtagattttagggggaacag

SEQ ID NO: 11138 - DNA, 472 bp, Homo Sapiens
catagtagcatgatgcacgatagctgaaaggtggaaactactcacatgttcatcagtggataaatggataaacaaaatgtggtatacacatagaatggaatattattcagccttaaaagggagggaaattctaacatgctaccacatggatacaccttgaaaatagtttactaagtaaaatgagttggacacaaaaggacaaataatgtgtgaggtacctatagtagacaaaattagtggaatagtggatactggggcctgggggacagagtaatggggagttattgcttaatgatcacagagttttagtttggaaggatgaaaaagttccagagaggaatagtgttgatggttgtataacagtgtgaattaatttaatgccaatgaattgtacacttaaaaatgtttgcactgcatgaaaagacaaatactatgtgatttcatttatatgaatatgaggctatataaataa

SEQ ID NO: 11139 - DNA, 253 bp, Homo Sapiens
actgtacccccctaaaatcccccattaagtaacctctccactattaggtatataaacccccatctttagattgtttagagtcacatttttctgtgtgctcctgcgtgaataaaaatctatgtatcgtctaagtttaattcccaggccctcaagaactgaaactaagagagtagaggaaaagattttactctccaacaaacattacttacaaaggtaagtaatttcatcttcattaaaaacatgagaaaactta

SEQ ID NO: 11140 - DNA, 204 bp, Homo Sapiens
cttaaagtaaaaataaagcatagaaaataatccctaaaataaaagtatggcataatccagcatgagctctgcctcctgtcagataatgcagcatcattagattattacaggagcatgaaccctgttgtgaattgcacacacgagggatccaggttgcatattccttatgagaatctaattcctgatgatttttagggggaacag

SEQ ID NO: 11141 - DNA, 685 bp, Homo Sapiens
gacgggttatctcactaccacctgtacggtgtcgctgctttctccgtcagatgaaggaagcatatcctagaagacatagattttcaagagctgctgctcttcgtccagaacctgccatcagcccactgggatgatgaggacatcagcctgttgctggctgaggcctaccgcctcaagtttgctttcgccgacgcccccaatcactacaagaaatgagcccaggcccacccgcagctggcctcactgtcccgggtggcgcgccccacctgcctggctggtggtaggcccctgtgagctggtcccgggctgctaaaaggccttgtgaggtggccccaccctccaggggagctggtgaagatgggccacagacctggtctagggctgacaaagacagggacagcctttgttttctgagataccaaagagagccaggggagggccccgggttcggcggccagaggcaggtcaggggtcccctctccctctccctgcaatgtccttgccaaatgactgcctcctgctgcccctagtccggggcagcctaggaggccgaccctctttggagtcctgctgtctgggtgccagggccggaacgaggtagtggccatctcatacctactctgaaatgcaaaacttctattctgttgagtgaaagaataaaatgtagacaaaatctagaccgaaa

SEQ ID NO: 11142 - DNA, 897 bp, Homo Sapiens
  misc_feature (297)..(307): n is a, c, g, or t
  misc_feature (344)..(355): n is a, c, g, or t
ggtgaaacttgcatgttgcctggattgatttcttctttccctctatccaaaggagcttggtaagtgccttactgcagcgtgtctcctggcacgctgggccctccgggaggagagctgcagatttcgagtatgtcgcttgtcattcaaggtctctgtgaatcctctagctgggttcccttttttacagaaactcacaaatggagattgcaaagtcttggggaactccacgtgttagttggcatcccagtttcttaaacaaatagtatcacctgcttcccatagccatatctcactgtnnnnnnnnnnnttaataaactgttacttatatttaagaaagtgaggannnnnnnnnnnnaaagataaaagcatggtcagatgctgcaaggattttacataaatgccatatttatggtttccttcctgagaacagtcttgctcttgccatgttctttgatttaggctggtagtaaacacatttcatctgctgcttcaaaaagtacttactttttaaaccatcaacattacttttctttcttaaggcaaggcatgcataagagtcatttgagaccatgtgtcccatctcaagccacagagcaactcacggggtacttcacaccttacctagtcagagtgcttatatatagctttattttggtacgattgagactaaagactgatcatggttgtatgtaaggaaaacattcttttgaacagaaatagtgtaattaaaaataattgaaagtgttaaatgtgaacttgagctgtttgaccagtcacatttttgtattgttactgtacgtgtatctggggcttctccgtttgttaatactttttctgtatttgttgctgtatttttggcataactttattataaaaagcatctcaaatgcgaaatcc

SEQ ID NO: 11143 - DNA, 564 bp, Homo Sapiens
agttatctgttgtcggagctgctcctcctgtgtggttctatcttgaagatcctgacgaagtcgtgaaagttcagactgaaattgcacagtctgttcctggagatttcttgcttctgtctctttttcagataatgtcttctgcagattctctacttgactttcaagtgattttgattttgtttcagcttggttgagcgtttctttgagttcctgcatttcctggactgaaacatgctgctcctgatggtctccagaggactgagccgatgtctccataaccttatcctgttgtgctttaagttcttcatattgagtcttgtacctacgtccaattttcttaacttgagtaatagttttgactttttcttggatatcaattattttggcatctaagtccttctggatggtttccttttcagttcttactttatttagatcttccttcagactctgaattaagttctggttgttagtcaaagatgcatttgatcttgcaatttcagctttaagtctaccaatttcttctgtcaattgttgaatacgcttagtatgaacttccttttc

SEQ ID NO: 11144 - DNA, 534 bp, Homo Sapiens
ggggttgtctgcgtgcacatgggtgagccggaaaggagacctgcagagaatgaaacagacacataaaggaaagcctcccagcagcatggctttcaccggcaagttcgagatggagagtgagaagaattatgatgagttcatgaagctccttgggatctccagcgatgtaatcgaaaaggcccgcaacttcaagatcgtcacggaggtgcagcaggatgggcaggacttcacttggtcccagcactactccgggggccacaccatgaccaacaagttcactgttggcaaggaaagcaacatacagacaatggggggcaagatgttcaaggccactgtgcagatggagggcgggaagctggtggtgaatttccccaactatcaccagacctcagagatcgtgggtgacaagctggtggaggtctccaccatcggaggcgtgacctatgagcgcgtgagcaagagactggcctaagcagccaggcccggcccacaggagctacaaacccaccaataaaaactgatataaggacagac

SEQ ID NO: 11145 - DNA, 716 bp, Homo Sapiens
ggggagccagtcaagattggctgcctcatgttgaggttcagagttacgactcggactggacagaggcgccggcagctgtggtgattggcggggagacctacggcgtgagcctggagtccctgcagctggccgagagcactggtggcaagaggctgctgatccccgttgtgcctggtgtggacagcctcaactcggccatggcggcaagcatcctgcttttcgaagggaaaagacagctgcgggggagggcggaggacttgagcagggacaggagttaccactgaggacgcagaagtgacttctgcttgaggacgtctgcagctcctcctacaccagcacactggtgggaggctggcggagtcagtgactatggcccccacgttcaggaggaaggtgtgatgccgtcatacagttacaggaaaaataagaacttcctcagaaagaacaggtccgaattcttcctgtcgcgtcactgattttgaggttcttttttctcttggtgacaataggtgacccacgtggctctgtgtgtttttaaaaattgtccaccaagaagcactttgtgcccagaaagttcctgaagcatcatcctgggcagggaggcgcctgctccaccagctggttgggtgtttgtaatccgccaagcaccagctataggtcacagccacatcactcacagctgatcactggttggtggaaaataaactatgagcagc

SEQ ID NO: 11146 - DNA, 696 bp, Homo Sapiens
  misc_feature (633)..(633): n is a, c, g, or t
tgagtttggacaaactttactgcaataaaacaaatgcttaatttaattcagaataagagataactcttcaataaaatatatcaaattgtacaagcaccctttcaaagggataaaggtataccggagggaggggagagatggacaggaaggtgaaataccagggagcttaatgggctgtttgacaaccccattttcaccaagtcaaaacatggctttaccttctgttctggaaccagattttgacctgggtctctgtgaggttcagagagctggagaactctgcacgctctgcaatggagaggtactgtttctgacggaacttgcgctccagggcgaggagctgggacgtgggaaaggccgtgcgcggcttccgattggtcttgtgtttcctcagggtgcaggtggtagggctcacatgtcttggcggcggcgaattatcagcagggttcctgcatccacgccgctccatcttagggaattttcccacttgaccgaggcggtctcgaagggcttcaccagcggcccggggctgtgcgcttcccgagcgccgtgccccgacagcagcagtagcccgcagggtggccccggaagaggcgctttccgcccgcaccggggacgcctccttgggcggcnttcttgtccgacacgagcgcatccacactgaaaggcaggctggagaccttacgcgggcttctc

SEQ ID NO: 11147 - DNA, 714 bp, Homo Sapiens
ggggcgcagcattttgggaaagagtggaattctgggtgttaggcccgccatttcgcttgactcacgccttcgccgtagcatctttcgcagcggaccgaagagaagaaaagtaggccagagccgagactctcttcctgccaagatgtctattggtgtgccgattaaagtactgcatgaggccgagggccacattgtgacatgtgagacgaacaccggtgaggtatatcgggggaagctcattgaagcagaggacaacatgaactgccagatgtccaacatcacagtcacatacagagatggccgagtggcacagctggagcaggtatacatccgtggcagcaaaatccgctttctgattttgcctgacatgctgaagaacgcacccatgttaaagagcatgaaaaataaaaaccaaggctcaggggctggccgaggaaaagctgccattctcaaagcccaagtggccgcaagaggaagaggacgtggaatgggacgtggaaacatctttcaaaagcgaagataattttctaagttgaacagaactttgtccttttttctttcaggttatctgagttcattggagtgggtgcttgtgcatatatgctaggtatcttttgccatctttctctttagatcaggggaaatgtttaagctaaataaatctggggggttttttgttctgttttgtttagttttctttgagaaaataaggac

SEQ ID NO: 11148 - DNA, 836 bp, Homo Sapiens
agagatgaaaggctgcagaaatgtttattgaatacagtgccaggtttataaataaaacgtatttacaatttccatagagttggtcccccatcagagaggtggttaaatctccaaacagtttatctcaagatttacagaaacgtccaagtacatctccttttcaaatagccatggtgaagggcaacttcagtaacaaaagaactaccaccatctttgctacagaagtgtttaataaacatcataatagatttggagaaagaacacacactccacccatgccactaccttcttactccaagggatacagacagcaaagaatttctgtctcctacaggacaacttcaggggattaaaaaaacagtaactgccagctggagggatagattaagacacattagtggaaatctagtcactgccaaaggagaaatatatttaggatatacaataaataattcaaatgcttaaaataattgaatgaacggaagagtagacttgaccaaatttacattcgttgttcaggaagagattcccagtatgctgaggggttcgtggtaagctattcctctgacgagacacagcagcgctgggcctactgcacagccgttcattacaatattgttacaagtacaatcagacatgcatttataaagagaatataaaaatatgtacaatagctcattttcaatgtgtgtaagttgccgaaagacaccaatgaaagtgtgcaaaaattcatttgtcaaaaaatcagaaaaagccttccttggcaacagtgcatcaaaagcccatctgaaatatcgagatccatttgcctcactcaacacctaccccaaacagat

SEQ ID NO: 11149 - DNA, 286 bp, Homo Sapiens
gtgagccatagataccatcatctatgcacatttcattatctatggatgattccattcatcatcatgaatgttgagccatagattccatcagagatagtaaagggggcctatgaaatattctgaggcttgtaaaagggtaaagtaaatacctaaagtaattgagatggatagtgcttgaagtatctgcttacaagtaccatctatcaggctgtggtgagcccaagtaagccattagttgagcagaggacaggctaatttaattataatggattttaggggggaacgg

SEQ ID NO: 11150 - DNA, 371 bp, Homo Sapiens
caaacatcccctcctttgtccttccacaatttatcactcttatgttaagatggtatatgagcctctaaatctaagtgtaactttgggattttacatcttttactttgatgcccctgtgcgtgcaacaatattaacatcaatacaagctgtagacctcttcccctgttaatgtctaaagttagtttaattcacagatcccagcaatagagcctaagtgggtggaggaaaagttttcctcccctacattccaaacaagctagccattatgcatttacattaagatgaaaatcaatgcaattaaatcacaaaatatggtacctaacgtaaagtaaatttaaacagttttgtattcactagttctcttgaaaaac

SEQ ID NO: 11151 - DNA, 275 bp, Homo Sapiens
ccctaaaaccactagccagagcaggagtacataaacagcaaaaataaatcccgcagaaaaggagattctgatttatagagttgacacataatattatttaagacactcagttttcaacaaaaaattatgaggcatgcaaagaaacaagaaaatatagctcacacttagaggggaaaagcaatcccatagaaactgttcctgagcaaacccagatgttggacttacaagaaaaagagttaccaaatggaaagtatcaataatgagatagaaactat

SEQ ID NO: 11152 - DNA, 265 bp, Homo Sapiens
cctgttccccctaaaaatcaagcgcagttttactgcacatagtaagtgctcaatacctacccgtcagctgatacaggatcaggaggggtctcacccccattggaaaatttaaccccaggttttccatgaaaatatcctaaaggaataattttaagagggaaagagaaacacttactctatatagccatgatcctttaaaatagaaatcttcttgtccatctgtttatctgttgatggaagatatttaacaagtatttctatattc

SEQ ID NO: 11153 - DNA, 510 bp, Homo Sapiens
cctgttcccccctaaaaatcaatctccagaagtcaaaccaagaaatttatagtccaaaaagttctggagattggttttaggggaggggaaggtgaggagatcatatatgaatgagtgcctgccattggcaataaaaagaaatgccaactcttcataagaaaaaaatttatataaccttcaaggtccaaatacgaggagaaagctcaatcacccatttgttaatcctccgcagctgggatgaacattttcctaaggatggagaagagataatactcactaatacacgagtcagtagttttactttcaggtggcttttaatctgatgtttatctaatatgatgacagctgggggacagagaaatgttccacttctacctatgtatcaaactagatacctaagcccttcccttccaacagaacacagagaaatgctggataaaatgtagaaaacattcttttaaatacatagcagaacttacaagaaaggggaaatccttacggtcaaaaatg

SEQ ID NO: 11154 - DNA, 418 bp, Homo Sapiens
cctgtgtgaacccgcgtgttccggtcacactagatgatccctccttttccccctaaaaatctcctagcatacgtacacattttattttattatgcatgaagtaatatgcacacattttttaaatgcacctggaatatataaccagtgttgtggatttaacagaaatgtacagcaaggagatttacaactgggggagggtgaagtgaagacaatgacttactgtacatgaaaacacatttttcttagggaaggatacaaaagcatgtgagactggttccatggcctcttcagatctctaacttcaccatattaccacagacatactaaccagcagaaatgccttaccctcatgttcttaattcttagctcattctccttgtgttactaagtttttatggcttttgtgcattatctagat

SEQ ID NO: 11155 - DNA, 496 bp, Homo Sapiens
caaaaaattagctgggtgtgtggcgggcgcctgtagtcccagctattcgggaggttatttgatttggtttgatttttcgtatactttcaggcttctatcacgccctcgatcacagcactgttgaataagataacgcgcattacataatgagaagtcaaagaaaccaagaaaataaaaatcaaacagctgtagtgatggtgtgataatgatgagtgtccaataatgaggcttatgatgacaccattgtcttggatgtcccatctgggaattaaggggagactctgctgtcacccttgctgcacaaggccagtgttgacagtggcatcatcatctctgctctcccgaggccaggctagtgtggggaacagctaatagtgagagcagcacaaaaggagtttgaatttggttgacctgaaattagagttacaaagttcagccagtgtcctcttcacaaggaagttcttcccttaggccaaccttggaggatgctaagttt

SEQ ID NO: 11156 - DNA, 564 bp, Homo Sapiens
ttgcccctaaaaatcttcctgtgtgataaagtttgctgcttcatggagcctgtttcatttctttgtattaatagtagcattggtgggacgacttccctccatcctcactcaggggaagtttcattaaaatgtgttcacacttagggtctctctgtgttgagatggatgtgaagaaactcattgttaaaagaaaagcaaataaagtgattaaagttttcataaaatcaaatctgaaggaatgtaatagaaatgggttatggctttcatcagtaaggtgttggtatgtgcttgtcagttttttacaaagcagagggaacagggaatagagtgaatgtggaacttgaacctcacactaaggaagtttttgtataattttcccacaatgcaactggctctggggaaatttcattcatgtacacaaaagaagtattgcagcaaaattcaataaggttttaagtaagtttcttaacaccaactcaaaataaaaatgctagataacaggaataacaatattggaaactgcgtagaaagcctattcgtagaagtaattttagtttgaactat

SEQ ID NO: 11157 - DNA, 336 bp, Homo Sapiens
atttatagcctgtcatcaactaaatcccctataaccctatctcatgatggtacctattaccttcttaaccataactgaaactagggtgaaaaatcacccagctatgccaatgagtttcactttaaattcatgactgcaaatctcaatgagccttcaactgcatttccttagcaggtctgctttcccgcacctgaaaatgaccatttcacaatttctctccttaaatattcaaaaagccatccctcctttactcgaagccaccccttgtaactgcattaaggcacaggaaacatgcagagagcccagaatatttacaaggttacagatttttagggg

SEQ ID NO: 11158 - DNA, 477 bp, Homo Sapiens
gcgtttaacatttttatttttaactccgctttggtagtacaaaagtcataaaagtacaaaccagacagttaaaaatacacttgacactcgaaatggtgaaaattttccttacaaatttttacatcaaggtagtagccaactcattgatgacaccaaaaagttgtccatcataagggttttctaaaaaaagtctgtgggggattccctcatccttaaaaaggaggaggagaaacacaagacctgtaaacatcagtggcttggggaacacaggaattctcatcagatacgtcagtataaaccagtaaaaagcgtatgtgtggaaaatacggaacgctaaatttgggcaaattgggaagcctgccagacaaaaaccgctcaagtatttattagaaaatatttaaaacatactctgggtatcactaccagtttaaagtattttggagtattctctggcaggtggtatggctatataaaaaa

SEQ ID NO: 11159 - DNA, 464 bp, Homo Sapiens
gtattcacttttcactctgtaaatgtaattctttacaatgactttatttattaaagggcagccagttgtcatttttacaggattgtgtgagctattcaaactcttcaacccctgaacagggtattaagcttccaaaataatgatggggataaatatggaaatcctttttaagttgtatttccattaaacaaaaacccttataattcatactatcatgaatttgctttatccatctcatttgcataacagttcatctgtctggtcccattaggctctaccaaagaaagactctgatgagtggacattattactgtgactcttgtaagtagccataaataaaccaaaatagtatcaaatttaggtatgaaattccacatgtgcaaagtactgttaaggtgataacatttttgatgagatttaaaaaaatatttgaaatattaaaaagcattatctgtaaacatcct

SEQ ID NO: 11160 - DNA, 638 bp, Homo Sapiens
cgttgacaaatcagatgatcagctttatccaagaaagaagactagtaaattgtctgcctcctatagcagaaaggtgaatgtacaaactgttggtggccctgaatccatctgaccagctgctggtatctgccaggactggcagttctgatttagttaggagagagccgctgataggttaggtctcatttggagtgttggtggaaaggaaactgaaggtaattgaatagaatacgcctgcatttaccagccccagcaacacaaagaatttttaatcacacggatctcaaattcacaaatgttaacatggataagtgatcatggtgtgcgagtggtcaattgagtagtacagtggaaactgttaaatgcataacctaattttcctgggactgccatattttcttttaactggaaatttttatgtgagttttccttttggtgcatggaactgtggttgccaaggtatttaaaagggctttcctgcctccttctctttgatttatttaatttgatttgggctataaaatatcatttttcaggtttattcttttagcaggtgtagttaaacgacctccactgaactgggtttgacctctgttgtactgatgtgttgtgactaaataaaaaagaaagaacaaagt

SEQ ID NO: 11161 - DNA, 1082 bp, Homo Sapiens
  misc_feature (174)..(271): n is a, c, g, or t
  misc_feature (309)..(318): n is a, c, g, or t
  misc_feature (365)..(496): n is a, c, g, or t
  misc_feature (626)..(912): n is a, c, g, or t
agggggccaagggtttttattcccctggggaatcaggtttatcaatccccttggggagggttccccttggggcaaaaggtttaagaatttcccccatttttccaaaaatggccgggcggggggtaatttgaatttgagctcccttgggctcccgttgaaaaatcccgtaaaggnnnnnnnnnnnnnnnnnnnnnnnnnnnnnnnnnnnnnnnnnnnnnnnnnnnnnnnnnnnnnnnnnnnnnnnnnnnnnnnnnnnnnnnnnnnnnnnnnngggaacaagtttggccctgtttcctttccttttggggnnnnnnnnnnaaaaaaaggttttaaaaaatttttggggggcgggggggcccccaaannnnnnnnnnnnnnnnnnnnnnnnnnnnnnnnnnnnnnnnnnnnnnnnnnnnnnnnnnnnnnnnnnnnnnnnnnnnnnnnnnnnnnnnnnnnnnnnnnnnnnnnnnnnnnnnnnnnnnnnnnnnnnnnnnnnggtggcagcaaagttttattgtaaaataagagatcgatataaaaatgggatataaaatttgagaaggaggggaagggtggggtgaaaatgcagatgtgcttgcagaatgtaaaagatgttgacccttccnnnnnnnnnnnnnnnnnnnnnnnnnnnnnnnnnnnnnnnnnnnnnnnnnnnnnnnnnnnnnnnnnnnnnnnnnnnnnnnnnnnnnnnnnnnnnnnnnnnnnnnnnnnnnnnnnnnnnnnnnnnnnnnnnnnnnnnnnnnnnnnnnnnnnnnnnnnnnnnnnnnnnnnnnnnnnnnnnnnnnnnnnnnnnnnnnnnnnnnnnnnnnnnnnnnnnnnnnnnnnnnnnnnnnnnnnnnnnnnnnnnnnnnnnnnnnnnnnnnnnnnnnnnnnnnnnnnnnnnnnnnnnnnagagggaggagagaaaaggaaagagaaattgaccctgagcataaagcaagtcttggtgggatccagatcgtcatatacaagggatggaatcctcccagggttgtgaaatgggtgagatttcactttaggtaatagagtctccaagaggttggtcaaaaggttttgtctgg

SEQ ID NO: 11162 - DNA, 1140 bp, Homo Sapiens
ggggaatgtggcggcggtagttccaggcgacggcggacggtggtacggtcctggagggcccagtgcgcggggctagccgtggctggagagcttcgaagagccttgaaatgtgaggaggaggaagatagctgttgcagaagtagtggccaaggtatcgttctggacgcgcctgcggcaggagggtcgccgcgtccacttccgccagccccacctccccccggccttcctggagtccctgaaagaggaagaagtaggttttaaggcaaaagatggccaaggaaagatgcctgaaaaagtcctttcaagatagtcttgaagacataaagaagcgaatgaaagagaaaaggaataaaaacttggcagagattggcaaacgcaggtcttttatagctgcaccatgccaaataatcaccaacacttctacactgctgaaaaattacaagacaacaacaaaatgttagttttagctttggaaatgaaaaatccaaagtgaaagaagcccagatatcatcctacagctgagaaaagaatgttactatctcacatgtcagctatatgcattgaaaaggaaacttacatcacaacaaacagtagaacctgctcagaaccaggaaatattgttcctctggaatggaccccaatagtgatggacagctccagaaatttatttgggaaggatttaccgcaaattcctcttgaagaaactgaacctccaggacaaggagaatcatttcaaatagaagatcagatacctactattcctcaagacacactgggagttgattttgattcaggtgaagctaagtctactgataatgtcttacctagaactgtatctgttcgtagcagtttaaagaaacattgtaacagtatatgtcagtttgatagcttggatgattttgaaaccagtcatttggcagggaagtcttttgaattcgaaagagttggatttttagacccactagtaaacatgcacatacctgaaaatgtacaacacaatgcttgtcaatggagcaaggaccaagttaacttatcaccaaagctgattcagccaggaacgtttactaaaacaaaagaagacattttagaatctaaatctgaacaaactaaaagtaagcaaagagatacacaagaaaaaaa

SEQ ID NO: 11163 - DNA, 568 bp, Homo Sapiens
  misc_feature (528)..(528): n is a, c, g, or t
  misc_feature (541)..(541): n is a, c, g, or t
ttacatccataaactacccacagacctatcccaacagcactgtttgtgaatgggagatccgtgtaaagatgggagagagagttcgcatcaaatttggtgactttgacattgaagattctgattcttgtcactttaattacttgagaatttataatggaattggagtcagcagaactgaaataggcaaatactgtggtctggggttgcaaatgaaccattcaattgaatcaaaaggcaatgaaatcacattgctgttcatgagtggaatccatgtttctggacccggatttttggcctcatactctgttataggataaacaagatctaattacttgtttggacactgcatccaatttttttggaacctgagttcagtaagtacttgcccagctggttgtctgcttccctcagctgagatatctggaacaattcatcatgggatatagagattcctcgccattgtgcatggctggtgtgcatgcaggactagtgtcaaacacgttgggcggccaaacagtgttgtaattngtaaggtattccnaatatgaagttccttggctaacaacgt

SEQ ID NO: 11164 - DNA, 370 bp, Homo Sapiens
gttctggaaagagcatttattgatccattagggttaccagacaggcctttttataggcatgtcatctatgctccaagcagccacaacaagtatgcaggggagtcattcccaggaatttatgatgctctgtttgatattgaaagcaaagtggacccttccaaggcctggggagaagtgaagagacagatttatgttgcagccttcacagtgcaggcagctgcagagactttgagtgaagtagcctaagaggattctttagagaatccgtattgaatttgtgtggtatgtcactcagaaagaatcgtaatgggtatattgataaattttaaaattggtatatttgaaataaagttgaatattatatataaaa

SEQ ID NO: 11165 - DNA, 776 bp, Homo Sapiens
ggggggcgccgaggtttgcaaaggctcgcagcggccagaaacccggctccgagcggcggcggcccggcttccgctgcccgtgagctaaggacggtccgctccctctagccagctccgaatcctgatccaggcgggggccaggggcccctcgcctcccctctgaggaccgaagatgagcttcctcttcagcagccgctcttctaaaacattcaaaccaaagaagaagatccctgaaggatctcatcagtatgaacatcttaaaacatgcagaagcaactctaggaagtgggaatctgagacaagctgtgatgttgcctgagggagaggatctcaatgaatggattgctgtgaacactgtggatttctttaaccagatcaacatgttatatggaactattacagaattctgcagctgaagcaagctgtccagtcatgtctgcaggtccgagatatgaatatcactgggcagatggtactaatattaaaaagccaatcaaatgttctgcaccaaaatacattgactatttgatgacttgggttcaagatcagcttgatgatgaaactctttttccttctaagattggtgtcccatttcccaaaaactttatgtctgtggcaaagactatttctaaagcgtctggtcagggtttatgcccatatttatcaccagcactttgattctgtgatgcagctgcaagaggaagcccaccctcaacacctcctttaagcactttattttctttttttcaggagttttaatctgattggataggccg

SEQ ID NO: 11166 - DNA, 441 bp, Homo Sapiens
  misc_feature (77)..(143): n is a, c, g, or t
  misc_feature (162)..(176): n is a, c, g, or t
ccctaaaaatccctagtctctaaaaaaataataattagctgggtgtggtggtgcacaccggtgatcccagctacttnnnnnnnnnnnnnnnnnnnnnnnnnnnnnnnnnnnnnnnnnnnnnnnnnnnnnnnnnnnnnnnnnnngagtgagaccctgtctctnnnnnnnnnnnnnnnctcagcaggttattctgtggatattagcaaactgattgtaatgtttataaggagaggtaaaagacccagaatagtcaactcaatattgaaagagaagagcaaggttggaggacccatagtacccaatttcagtacttttactataaagccacagtaatcaaggcagtgtggaattggtcaaaaaacagaaaaaatagatcaatgaaacagaacagagagcccagataaaacctgcataaacatatgcaactgatttttagggtaa

SEQ ID NO: 11167 - DNA, 316 bp, Homo Sapiens
aaatctcctccaaatacagccccagtgatgtcagctccactcagactgaaaaccctagagtttgtctcaacccttcttcaccttcctatcaatcacgaaatgccgccacctttaacttcaaaatatactcacaatctaacatcttttcatcacctaccctgctaccacccttgacttcctgaacccacataataatttgatcctttaaaaacaaaagtcagatttgttacccccctgctgaaaacactacactgctcccctgccccctttgcatttaagagtaaaatctgcagagtagtgatttttaggcggaaca

SEQ ID NO: 11168 - DNA, 341 bp, Homo Sapiens
gcccctaaaatcaaaaaggtctcccttgtgcagacccttttttgtcaccctgcccccacctctgtttttcacttctatattttgcctttggagaatattctctaaataggatcatacaatatacaaccttttgaggttggcttttttgcactcatcataatgcccttcaggtctactaaaattgttgaatttatcaatagtttgctctttttgttaaattaccgaaaagtattccatggtatgcatgtatcacagtttaattgtttgcctatggaagggcattttggttaatttcagtttttggctattacaagttaagctgctatgaacaattgtgttct

SEQ ID NO: 11169 - DNA, 388 bp, Homo Sapiens
  misc_feature (44)..(192): n is a, c, g, or t
catgctactctcttctatgatgtggtaagaagggtagcttggcnnnnnnnnnnnnnnnnnnnnnnnnnnnnnnnnnnnnnnnnnnnnnnnnnnnnnnnnnnnnnnnnnnnnnnnnnnnnnnnnnnnnnnnnnnnnnnnnnnnnnnnnnnnnnnnnnnnnnnnnnnnnnnnnnnnnnnnnnnnnnnnnnnnnnccaaacaaacaaacaagagtcaaactctgtaaaatgtttaaagaggtttattctgagccaaatatgagtgaccaaggcccgtgacacagccccaggaagtcccgagaacatgtgcccaaggtggttgggttacagcttgattttatacgttttaggggtcagaagttacaggcagacatcagccattgcactccgg

SEQ ID NO: 11170 - DNA, 295 bp, Homo Sapiens
tcgaaaagtatactcctagtgcacaatgtgacaaaaggacattatatttcactaaaacatcatatttgaatggagattaaatttggaaataaagttaacaggcaaagggataggtagagaaaagttatcataatggcaaatgtttagagcaaaacagagaccaggaattaccagtaggtggcaataaaaggaaataatgacgccacaaagcatttccaggaattaaaggtcaagataacattgaacattgcgtgtttctatcatccactaaaatattcgtgaatatctccagtga

SEQ ID NO: 11171 - DNA, 245 bp, Homo Sapiens
gccttcccttggtgctaaatcataccgtgccattcatggtctcttttttagctagtctaaaacgtgtagtaagtggaaagtaatcaagcttcaagttccacatataatctttccttcttcttcattatactaatgctttcatatttactattcctagatccatatctgatttctttcttccttctcagataaatgtgcagtctagccattagaagaccaaaaggaccaaaatttccacagggggt

SEQ ID NO: 11172 - DNA, 166 bp, Homo Sapiens
ggtcgatctctgcaggatcccttatttaccttcttattggtacaggtcgtgacacagcaacaaatcacagggcatagaaaataagcccactccactatctccgtcccctccaagcaccaataggaggatttaatacgagaaaaacaataaagaaggaaataagggg

SEQ ID NO: 11173 - DNA, 240 bp, Homo Sapiens
ctctattgaggaacccaggtgtagcctgtaggttgactagatatgactggtcaaatgctttccagttccttaatggtaagacagtcaccctggccagtagaatgactgggaactattgtaaaatgtcatagtctaccactttcgcctcttcctctcttctcatgggtatgcgatgttagaatcaaagaagatcagagcccttggagacattaaatagcatgggcttccctcctcatttta

SEQ ID NO: 11174 - DNA, 406 bp, Homo Sapiens
agaggatcccttcgggttgtgcatcccccctctttctcttctcccttggactttgagtcaaattggcctggacttgagtccctgaaccagcaaagagaaaagaagggccccagaaatcacaggtgggcacgtcgctgctaccgccatctcccttctcacgggaattttcagggataaactggccatccgaaaatagcaacaacccagactggctcctcactcccttttccatcactaaaaatcacagagcagtcagagggacccagtaagaccaaaggaggggaggacagagcatgaaaaccaaaatccatgcaaatgaaatgtaattggcacgaccctcacccccaaatcttacatctcaattcccatcctaaaaagcactcatactttatgcatccccgcagct

SEQ ID NO: 11175 - DNA, 502 bp, Homo Sapiens
gtgtgtaatacacacacacacaaccccctatacctggaagattgtcagcatgtaaatcaggaacaactttctccttattgacaatcccataataaaacctcaggaaccaaggcaaaatgaattggcttctaggggtctgaaccttactgcccatacaagtgttgattcattttaatgctgtttatgatttctgcattggcagaaattttcatactttctatgtttttttaattactcagttttttattactaaaaatagcacatttgagtacatttgaaaagtagaaaaattagaaattattaactttattgaataagcaagaagtgcatcctaatcctttgattattaatgaggttgaatatttgtgtgctatcggtagctgtgtttctttgatcagatgttcctgtccttttgcccttctgttatctgttggagttgctttgtttttcgtatcaagttataggatctctttatataataaatgtaatttaacttgcaaaa

SEQ ID NO: 11176 - DNA, 813 bp, Homo Sapiens
ggcactggagtcagagtcatgtagaagttctcttccctacatctgtgagatgacagctttcaggtttccagattaggacagtcctttgcactgagttgacactcatgccaacaagaacctgtgcccctccttcctaacctgaggcctggggttcctcagaccatctccttcattctgggcagtgcccagccaccggctgacccacacctgacacttccagccagtctgctgcctgctccctcttcctgaaactggactgttcctgggaaaagggtgaagccacctctagaagggactttggcctccccccaagaacttcccatggtagaatggggtggggggaggagggcgcacgggctgagcggataggggcggcccggagccagccaggcagttttattgaaatctttttaaataattgcacgtgttagtctcatgtgtcagcaatgctgtgtctggttcagtgatccccacgggaacgcgagccggggggtcgactggaagtgctctgtcccttgagtccatgctggggctcccctacacggggagaagagccggtcagcccatctggaactggcactggccagcaagtgtgctctgttcttacagggtgtcctgaaggccaaagttggaggcctgagaccacgggctccactgctaagagcgtgccccaggcagctgcaggctgggtgtgggtggcttggcgtgggtgccctcggtggcagaggagactgcccgcctcacagttcaggttgcggtagcgggcaacagctggtgtggggcgggggcacatggacaggaagccaaagctga

SEQ ID NO: 11177 - DNA, 554 bp, Homo Sapiens
  misc_feature (20)..(20): n is a, c, g, or t
  misc_feature (47)..(47): n is a, c, g, or t
  misc_feature (133)..(133): n is a, c, g, or t
  misc_feature (183)..(183): n is a, c, g, or t
  misc_feature (226)..(226): n is a, c, g, or t
  misc_feature (268)..(268): n is a, c, g, or t
  misc_feature (307)..(307): n is a, c, g, or t
  misc_feature (311)..(312): n is a, c, g, or t
  misc_feature (329)..(329): n is a, c, g, or t
  misc_feature (342)..(342): n is a, c, g, or t
gattatttttcagattgttntaatccagtgtggccgattcctcatcngattcaggctgtccagtcaggccccctccccattttgggacctggagccttcatttatgaagagattctccatcctatgaaatggnatcctcatttgtaaatcttttttcttcccattttcaccaaagctgtaaangaaataatccatctcaaaccttacccttttttctctggagtcnagtggggtctttcctcgctccatcttacacagaccctgagcntggaagcctcaacctggttttgttcccctgtttgaaatnttgnnatctcccctccccatgnaaggaaaacccangaaccagaggcgtagactgactgaagacacaactcctggctttctgaagctatggacttggattggattgctgggggtttgtagagaaaggtgacaaatttcagtacctctggcatgctgtcccaggaaactagggctcccactaacttatgaggtttttaaacacattgaaaatgacatgacattaaaataaatttggatttgctcataaa

SEQ ID NO: 11178 - DNA, 537 bp, Homo Sapiens
agtcctgcaaagacaatcgccccacagaatgctccaagagatgagtctaggggccgttcctcgttttatcctgatggtggagatcaggaaactgcaaagactgggaagttcttaaaaaggttcacagatgaagagtctagagtattcctgcttgataggggtaataccagggataaagaggcttcaaaagagaaaggatcagagaaagggagggcagagggagaatgggaagatcaggaagctctagattacttcagtgataaagagtctggaaaacaaaagtttaatgattcagaaggggatgacacagaggagacagaggattatagacagttcaggaagtcagtcctcgcagatcagggtaaaagttttgctactgcatctcaccggaatactgaggaggaaggactcaagtacaagtccaaagtttcactgaaaggcaatagagaaagtgatggatttagagaagaaaaaaattataaacttaaagaggctggatatgtagtggaaaggcctagcactacaaaagaaaacccc

SEQ ID NO: 11179 - DNA, 989 bp, Homo Sapiens
gcgtgccgcgatgtggtgacccccgagggcggtgggagggggccgggccggacacgaagaggcgacccgcagtgacccggaaccgcggcagggccatcggaggacagcacccggttccaggccggcgcagggccaggcacatgcgaaacgtccaagggggtccgaacaggggcaggattgagcagagctgcagcgctggtggaccagatgctgatgccagtagcggtctatcaccaccatactcgaggacggcctccagaccggcaccaacggcatcatgagacacgcgcctcagcccaggatggtggggggtccagggcaccctccctagagggcccttgtctgagaaaccccaataccaggaaaccccacctacccaaccatccacccaagggaaatggaaggcaagaaacacgaaggatcatgtggtaactgcgagagcttgctgaggggctgggagagccagctgtggggtccagacttgttggggcttccctgcccctcctggtctgtgtcagtattaccaccagactgactccaggactcactgccctccagaaaacagaggtgacaaatgtgagggacactggggcctttcttctccttgtaggggtctctcagaggttctttccacaggccatcctcttattccgttctggggcccaggaagtggggaagagtaggttctcggtacttaggacttgatcctgtggttggccactggccatgctgctgcccagctctacccctcccagggacctacccctcccagggaccgacccctggcccaagctccccttgctggcgggcgctgcgtgggccctgcacttgctgaggttccccatcatgggcaaggaagggaattcccacagccctccagtgtactgagggtactggcctagccatgtggaattccctaccctgactccttccccaaacccagggaaaagagctctcaattttataccttcgattttgtctgtataatc

SEQ ID NO: 11180 - DNA, 835 bp, Homo Sapiens
  misc_feature (528)..(529): n is a, c, g, or t
  misc_feature (622)..(622): n is a, c, g, or t
  misc_feature (642)..(642): n is a, c, g, or t
  misc_feature (674)..(674): n is a, c, g, or t
ggggggagcgagcaggcgaagccgcggaggacggggtgaagatggcggccttctccgagatgggtgtaatgcctgagattgcacaagctgtggaagagatggattggctcctcccaactgatatccaggctgaatctatcccactgatcttaggaggaggtgatgtacttatggctgcagaaacaggaagtggcaaaactggtgcttttagtattccagttatccagatagtttatgaaactctgaaagaccaacaggaaggcaaaaaaggaaaaacaacaattaaaactggtgcttcagtgctgaacaaatggcagatgaacccatatgacagaggatctgcttttgcaattgggtcagatggtctttgttgtcaaagcagagaagtaaaggaatggcatgggtgtagagctactaaaggattaatgaaagggaaacactactatgaagtatcctgtcatgaccaagggttatgcagggggtcgggtggtctaccatgcaggcctctttggacctaggtactgacannagtttggattttgggctttggtgggaacagggaaagaaatcccataacaaacaatttgataatttaatggagaggaattcactatgcatgatnaccattggatgttacctggnatatagataaggggacatgtcaagttctccanaaatggaaaaagatcttgggtctgggcattttaaaataccacccacatatgaaaaaccaagcccctctttccgggcctgggggtttttgaagaaatgctgaaactgaaatttaaacttccggggaaaaaaggaattttaaggtttccacccaaaaggatgg

SEQ ID NO: 11181 - DNA, 840 bp, Homo Sapiens
ccaagcggggctcagcccattgacccgagcgaggcgcacacacctgcagcgtggatcaagcgcactctctccagcatcgccctgaccattccatgtgctttgtcctagcatgttcattcttgactttctccacttcattttattaaaaagttaaatgctttaggaatctgtggcgtgtggccactgaccgccccccacctcctgccgctcctccaagtttgagctgagatggttctgtgagtcccttggcaaggggtcaaaggggcacatctccttgaaccctagaaagcccccctacactctcagaggacacctctcctgtggattcagcgctggggcagtgaaggtgtcgggagccagcagagcatggtgcgtgctgccagctgccggccagccgggatagaggagatgccactggccctccgtgcccccagcccctccctcttaaccgaggctgtccttgctctctgcagaggccgctctgcaggatcctcgtgtcgcgcgtgatgtgtggtggcacagccgtgtcaaagtcacagtgtcttttctgtcgttctagttccagggtcacccccgagaggacaacaggcatctggaagtgctctctcgccactctgggtgctttactgtctctggcttgtttccatcactggaaatcacttagagaattgtagtgtttttggtccttgataaagcctagaagacatttgtgatgttacaaaatggaagttttcttttgtttctgttttttaagatctaagaagttgtgaatgttgttaatcatttagccgttgcaataaatgtagagggaaatctccgcgcgcggcgcgcagcgacgag

SEQ ID NO: 11182 - DNA, 1223 bp, Homo Sapiens
  misc_feature (857)..(870): n is a, c, g, or t
gaaagatggaaggacaagtaagaaaatccatctaaaggtagctcttgaggaggaaattaacttcttgaggggataaattagagggtaccaagtttatgttctggaatgtaccctggggagggcgctgcccactggattggtcccagtggactgaaaggtggtgctctcgagtcaggcgcttagtcccagagagagctgggtgccgcggggctcgtggtctgtgcctactcagggaaatgacttaggttctcccaggtgctctgttgataaggatggaagcagaactactttgagacacaagcaacaattggaagagtttttttatatgaactgaaatagatctaagagagcctggttaacagtttcctttaataccagttcagattaaatggttactttaggaacctgtgttactgtgtgagcacccacagaaacaagcaaacttatttcctacaaaaaatgaggggataataaccgatcagagtcacagtcgtttcaatataaacccttccgaaagcaaaagcagggaccacatgagcacacaagaagccaaagtttgtcagtgatcttaataaattaagactgagtaacatcctgcctttagaaaaaaataaccccgaggtggagaccagggcaggggaggtggcggagaagcatcgggccagatcaaccgttaataacatgcttctgagctatgtggatgtataaatgaaaacacccccaactaggtattgtagaggctggaaaaagatgtgatgggattatacaggtgatgcatatttttgttttgagactcaacaatgtgctacaaatgtgatacttaaccctgaactgcatgtattggggattgttttttnnnnnnnnnnnnnncaactttgaatcaataaattaacagtttttcacttgctggctcttcttgctgtaaatggtgactaagaggttgggacagaaatcttgacaactagtggaaaacttggataatcttcaaggaccatggagccttctgtttccttctgtttgcagaaaagcaacactgcctgggttgtgatcctttacaagtgactacttcagacacaattggccacctctttgtatcactggatgactgatgtatgatttatgtgctgctgcccttagagggaagaaaaatgccatgttaaatcctgttttcttaaataaaaatgttgacaataaccagccttcccaagtgggagacaaaccaa

SEQ ID NO: 11183 - DNA, 920 bp, Homo Sapiens
  misc_feature (707)..(707): n is a, c, g, or t
ggggtagctgatcggcccggaagtgctcacacgtgtgctccctgccctgctcctggccccttggccggccgggctgtttctggccatgggtcgctcccgccggacaggcgcgcaccgagcgcactctctagcccggcagatgaaggcgaagcggcggcggccggacttggatgagattcaccgcgagctgcggcctcagggatccgcacgaccccagcccgacccaaacgccgagttcgaccccgacctgccagggggcggtctgcaccgctgtctggcctgcgcgaggtacttcatcgattccaccaacctgaagacccacttccgatccaaagaccacaagaaaaggctgaagcagctgagcgtcgagccctacagtcaggaagaggcggagagggcagcgggtatgggatcctatgtgccccccaggcggctggcagtgcccacggaagtgtccactgaggtccctgagatggatacctctacctgacatggcctgaagatgcagggcagaggaattgcccatggacagtgacgcaaggactaggctgggagggagcgtgccaaccccttttgcctctgggtttggggagcggagggcctctttcttggtgccctgcccccaataaaggaaactgggcccccggatttcccccacccactcccaaccaccacccgccaccaacacacaactttcttcaaaccanacacagagaagattataaaaatcctttttacgggcccgccctcgcgcctccccaaaaaagcttttcttaaaaccaattctgttttggggcgccggggggcccccgtgaaggggtagagggaacacacgtgggccacaaaaccttgttttcccccagagaaagaaccgcggggccaaagagaaacaagggcgcttggggattttctcccaccac

SEQ ID NO: 11184 - DNA, 734 bp, Homo Sapiens
gcggccgccttggcgagccgccgccgttggggcagaagcacagcaccctccgtaaggcaccgggagagcccgggagtgcgttccggggctttcggagcagcggtgtgaggaccagcagagagaagagattccatcttccagaggttgccactgtctgcctccccacttgtccccatccacagtcatctttttgatatatataatgacacattagttgtctagttcttcatagttaatgtggtttaagtctgacatcttttcttttgccatgaaatttacaccttagtgttattctcactgaaaattgcctttgagtttgataaactcttatcccagtgatattgactgttttaaattaacagatttatcaccatttctgagctgtgtagggccttaattgaaaaagtatctttgattattttttcacattttggccacatgcctataataatggaatatttacagtactttttagtggagaacttttttaagtagaatttcaataattaatgtttgatggagtttggaagttaccgtattttgaagtatcgtttaacattcttctctcaatgagttttcctttaaaatttgcagtgaatttgttttcctgtttatgcatgagaatttaggtcttattaattgggggaaattaatgttaaagtaataaataagcccttgttgcagcttattgtttcttgaaatgaattaactatccaggcaaaaggttaaaaatg

SEQ ID NO: 11185 - DNA, 446 bp, Homo Sapiens
  misc_feature (37)..(37): n is a, c, g, or t
atcaaggcagctatgagccaactaaagggactgtatntgcaatcagaggatttttgggaaacaaaatgctttttaaaagacatacgtcaatattaagttctataacaacaataatgtttcctaataatacctcttatagtttactctgactacatttacacccagttcttacttgcagaactaaactaacctagtaggaaatctgcttaaaacaaacctccttgggagaaggcaaagaggcagagtcctttgagagagataatttgatattgtatggaactatttttggcaactcctctacataaattgattgaattttgacaatgtaggtgttacatgaaaacttatgtaatttggttgcgtaagttgtaggtcaaaagcacaaaatatagtgaaaaacaaaaatgtgcagtccttgaaaaacttctatcgaatcacttagaagg

SEQ ID NO: 11186 - DNA, 363 bp, Homo Sapiens
cgtctcttagaatagtccgaggtgaaagccaacataaggatgaacttgatctgcattatctgtttcctgagagggctcgggagcttcaccctcagccccagccacccatggctgtcacttctcacagtgagggctgagatgtgcatttagattgatcagtttttaatgtatcaggtaggacccaatagtcctttgcactctgacccacctacagataagctctctgattatgttcttctatattgtttctcccaggtcagtaccatattattgtaaatcctgtgattcatagtgaagttgccagattcatcaagtaaaaaataggacagaaaattaactttaaaatttaactaagcgacacat

SEQ ID NO: 11187 - DNA, 420 bp, Homo Sapiens
catgccttcaggcactctagagatcccctggacacctataaggctagtggagcgttctgtatacggcgctgctgcctcggactcttcttaaccacacgtctactaatcccagtcttctttctcagggatcagacttgcagagttgtatgaaggctcttcctgcctgcccttacttcctcttctttatccttcttaggcccaataaatctcctgcacttataatcccatcttgacatctagttctaaaaggacctgaactgacacatgaagaagaactgacacatgaagtagagcgaagtatactgttcccaaatatactcccctctattctgcaagaaggattatatatccctgcctattaccatgtgatgtgttcaggccagtgaaatgtgagtagaagtgacatggccgttttaagca

SEQ ID NO: 11188 - DNA, 456 bp, Homo Sapiens
  misc_feature (424)..(424): n is a, c, g, or t
ccatttaatagctgtagcatctttgaggctgcaaggcttctctttgccccaattgcttcacctataaatgggggtattattaataatagtgctatctcatacattcatatatgtagaatatgtagagtacttagaatttggcacatggtaaggattatgtaaatgttaacttcgattttagaacactgtaatagggtaatatgagctgctatagcacacatagcccatatatcagtgacttgattcactagattatttctcactttgtaaagtctaaaatggatattctcgataggtaggtgcttaccaacccaagtgacactttttactattaagatgttagaatatctacctagaaagtggagaaacttaagctgatcctagcattagtcatatatggcccatatttaggcctagaacaaanaagctgctaataaagactttacatataggaat

SEQ ID NO: 11189 - DNA, 229 bp, Homo Sapiens
tagagaatgcacggagctcgtatcatagcatgcacaggggaataagtagaatcctaggcgagagaaaactgccccatgaagactcagagactttagcagctcgatttgtttagggagttcaagcagtgtgatatttgggactgataagttgggggaggggtagaggatgagggtgaaaagttgtggtggaaaggaagagcatattatatttgctgacttaggtgttatt

SEQ ID NO: 11190 - DNA, 545 bp, Homo Sapiens
  misc_feature (45)..(163): n is a, c, g, or t
  misc_feature (170)..(212): n is a, c, g, or t
  misc_feature (413)..(413): n is a, c, g, or t
atacaggaaacattaggtgggcataatggcgtgtgcctgtggtcnnnnnnnnnnnnnnnnnnnnnnnnnnnnnnnnnnnnnnnnnnnnnnnnnnnnnnnnnnnnnnnnnnnnnnnnnnnnnnnnnnnnnnnnnnnnnnnnnnnnnnnnnnnnnnnnnnnnnnncagatannnnnnnnnnnnnnnnnnnnnnnnnnnnnnnnnnnnnnnnnnnagatattttcctatgttagctgaagaaagtgatctgaattatctattgtttcacttcctcttttcataaagatgattatgtttttgctttattgttatgtttatgttattgttatgtttatgaaatagaaatttttattctaagccgtctcttagaatagctttagagaaaccaaagcaaaatatgtccacccttatttcntttatatgtgtttcccactatatttacacacttacaggatctactgtatagctaggtaatgtgaagaaccaggtaaatgcaatgctgctactcttctgtttctaagagcgtataatcttataaaaccaattt

SEQ ID NO: 11191 - DNA, 429 bp, Homo Sapiens
aggacacatagaagagttaacaaatacaggctcagtttcttcctcctgtaaaagagttatagcaaggattaagcaagttacaacagttctcagtacacagaaagcccccggtaaatcctagctattgtttttttcccatagtagaggtacagtttgggaataacaactccaaatagcatttgtttgtttgattgtttgtttgcagagatcaaagagagcaaaggaggggtaacagccagggccagccttaatgaaaccctaatgaacaagtttccacaattaaggacaataatgggacaggaaccagtggggcccagaaaacaatcaatgcctttgattaagcactgctgacgaaatttcccattggtgctttaatatggctccccgggggggttgttggctttgcaatgtcttaaggaaactcatctc

SEQ ID NO: 11192 - DNA, 468 bp, Homo Sapiens
cagtggtaggacacatagaaggtgtgctaaagtctgccttaaaatctgcatggcccatgaccccatctccccagtgctctctgatcctcatctggacgccgtggaccagcggctcctgagtgtcctggccaccgtgaagcagtgcaccgaccagtttgggatggacacagtactggtggaagacaggatgcctctctcacacttgtaattctcgacacaaaataagtgaaacttctttttacaaagatagagaaacagcacaatcaattccaaatggtatgagatggattggaagtggccagcagcaagttctggtgacaggacagggtggccttggatgtctttggtattttctgtagtagaaactaaagcaaagaccacaagtttcagagcatggagacattcctgctgaatcgccttctcacctcactctgcatattgctcattctatgtgatcgtaccgactga

SEQ ID NO: 11193 - DNA, 864 bp, Homo Sapiens
  misc_feature (508)..(508): n is a, c, g, or t
ggcagtcggcccaggcccagccccagccctcttccagctcccggcaacggcagcagcagccaaagtccaacagccatgcagccatcgactggggaaaaatggcggagcagtggctgcaggaaaaggaggcagaacggcggaaacagaagcagcggctgacacctcggccctcccccagccccatgatcgaaagcacccccatgtccattgctggcgatgccaccccactcctggacgagatggatcggtagggggcctgctcctcggactctggttacctctgaggctgggaaaggcctggctgcccactgcctccctccctgcccctccttttatgtccataaagtggcgtgaagtgagacgttctctttggtggtcaacccggatgggtgacaggctggatggccttgtgaacttgagctcagtgtatgctaggcaacaattctcccgctccagacccctcaccgaccacctgtcctgggaccaggctgggaggggagtgtggcanggaggaggaaaaggaaggtgagaatgagtagaacagttttgtattctactccctacaagcccattttgaacttctgccctcaccggactctgggctgtgactggggcaccaaactcagcacatgagtctcccctagctctcgtggggagagggatgctatttattcagtttggggcaggagggagaggagggaaagtatttctgaccctgatgccaacagccgggtggctgtccaagcaggattgcaggggacacagggaagcactgcccagcccctgcctggctgccctttccccccggctgctgccacaaattcctgcctgtcatttgaataaacagtgtttctattgaaaaaa

SEQ ID NO: 11194 - DNA, 564 bp, Homo Sapiens
ggccttttcaatggcgaaactgtcggcattagcagttttgggtaagctggcggtactataacacgtactggaaacctgttcctcatcaccacctaccagattctggaaatgccgtcttctagaaaacgatggcgtttgtggtggtcttcttttgaaaggaacagtaatttgtgtggatattgttaaagtgtttaaagaatattttgacaattaagtttacattttacaattgctttattttttattaaaatagttgtatataaatattaccctatttcactgttgttcaagtaaatctaaaccttgtagacaagtgagtcatctgatatgtatagaagctgtgatatatagagtacatttattgtgtaaatgtttatgaatataattgttcctgtgtttttataagttggggatattttgttgttttacggcaacaaaatttattgcatttaaatggtttttatgtaatagaaatcacgcaaaatagtgaaggatttaaaatatgtatatgatacatgtaaatgtacaaactttagaaagaaataaatccaacaaatttcaatc

SEQ ID NO: 11195 - DNA, 1082 bp, Homo Sapiens
gagcaaagtcaacagaaaatcagcccagcagccgtaggagaggagtcatccccaggccggccccagtctctgctggacaacgctagcgcctcagacagtcaggcagtgatgaacattatgaacacagaacaaagccaaaatagtattgtttccagaattaaagtgtttgagggtcagacaaacatagaaacctcaggactgcccaagaaaccagaaattactccacgttcacttcctccaaagcctactgtttcctcagggaaaccttctgtagctcccaaaccagctgctaacagagcttctggagagtgggactctgggactgagaacagactcaaggtgacctccaaggaaggactcaccccataccctcccctgcaagaagcgggaagcatcccagtaaccaaacctgaattgccaaagaaaccaaaccctggccttatacgaagtgttaatcctgagattccgggaagagggcccctggctgagagctctgatagtgggaagaaagtgccaactcctgccccgcggcctttgctgctgaagaaatctgtttcctcagaaaaccccacctacccttcagctccactgaaacctgtcactgttcctccccgactcgcaggggcatcacaagccaaagcatacaagtcactgggagaagggcccccagccaaccccccagttccagttctgcagagcaagcccttggtggacatcgatctcatcagctttgatgatgatgttttgcccaccccatcggggaacctggctgaagaatctgttggttcagagatggttctagatccctttcagctccctgcaaaaacagaaccaataaaagaacgagcagttcaaccagcacccaccaggaagcccactgtaattcgaaatccagccaaaccaggaaaatgtttacatgagggatccacaaagtccaccttcctctccctggctgaaaaacctattggaaacactttcagtacagtatctggaaagctcagtaatgttgacagaactagaaacttggaatccatccacccaggtcaaacaggaggttttgtgcgagtcgcccctcttccgca

SEQ ID NO: 11196 - DNA, 1030 bp, Homo Sapiens
  misc_feature (949)..(972): n is a, c, g, or t
tatcactctgggggagtcgggctgtgtgatggtggagactggagggagtggaggctacacgtgtttctgggttatgcagagggctctatgtccacactggctgccttgctctccccccacccccactcccaggcattctccgacgcccacgtggaggcagtgatgatcctgggggagcctttcgccacccagggcccttatgactttgggtcgggggaaacggcccgccgcatacaggacctcatcccggtgctgctgcggcaccggctgtgtcccccacccgaggagacctatgccctgcaccgcaagctggcaggggctttcctggcctgtgcccacctccgagcccacatcgcctgcagggacctcttccaggacacctgacaccgctactgggccagtcgccagccagacgcagccactgccggcagcctccccaccaaaggggactcctgggtggatccctcatgacagcctccatgggggattcagtccccagagcagggcgtaccctgctgtagtgcctcttatcccttcccccgtctgccctgagtcacaggagcccccttgggcttcccagtcttgcctggctctcctccttggcccaagagctcacgatccctggggctggggaactcccaacttcgtgccctagatcctgcacctccccactcgaaagtggggatccgaaaactaagccaggggaagcggttaacttatccttgccaaacatttgaggggagcccttggggccgctgcatggtcgttatgcagaatcggactcatcaggggggagcccttcacctcttgcttccaagcctcccgtgggaaggcggagatggtccctggagggcagatcttcaactttggccttccctcgcttcctccaaacagcctgaccttcctcccgggtgtccagccctcttccatggtgttttgcaaaggtaannnnnnnnnnnnnnnnnnnnnnnnaacctgaaattctttaaattggaaataagaaaagagccccttctcccttttaaaaaaa

SEQ ID NO: 11197 - DNA, 1059 bp, Homo Sapiens
  misc_feature (331)..(331): n is a, c, g, or t
  misc_feature (635)..(635): n is a, c, g, or t
  misc_feature (720)..(729): n is a, c, g, or t
ggggtcttccctcctgtggaatcgaggggaaattattcttcccaataccttgatttgattttcagtttcataagcttcttcctctgaatcttattgagggactatggtaccaagcaggtaggactgttcacctggtggaacagttcttgctctgccttctaggcttcatcccagaaatccagcctctttctggagaccccaaagctggagggagatgggctttcctctgggcctctctcctactttgccatccacactgctcctggctaaccccagcaataaccaacaaatgggaggaagccccatctattgctttttctcaattatgacntgcatagtttatggaaacaaagatcttgaggaacatgagggaagccctcccctcttcacagtcccccatctcttctcctttggacctggcaacacccagaagctccggggtttacccagacaaaaatatacccgcattcgagtaaggggggttcaatatgaccggaaatcccccttggggtgagggaaagaaaaaccaaccccgccctttttataagtggtggccccccggaaatagaattttgttaacaccccgtttccctttgtggggcaccccccaaccttccagcaggaagaggggcgcnctccgtcttttcgttaataccgaccccctgtcccttggggcaaaaaattccccggccgcaaaaaggtgttgtcacggcgggcggnnnnnnnnnngggggaccggggggccctcctctttcccccgcttacaaagagagacaaattgtggggcggggggaaccacccgccgccccctcaaggttggcccaagttggcgcccccctcctcactcctaagtttgtgatacagggtaaaggaagaaggggacaccttttaaagctgccccggaaatggggagcccccctcaccgcggaaacaagtcgggggtgttttccccacccacattagatcttcagtggccacaaaactcttcggtgggcggcttggggcacgtaaatgcgcgactgcgggtcttggcggcaatcccttctccaaaggggggag

SEQ ID NO: 11198 - DNA, 1219 bp, Homo Sapiens
gtgtgagatcacaagggtgtcaatggctggatggttttacagtgcacacttatatattatgaagtatgtccttaacaaatctgatggtttctttacagaattcctttcttcaccttttcttcggcggattagctgttcgaggtggagtgacaggacgtccagaattcagtccaccatactggtatttagctttcttttcagatggtttcaatatctgaaatgaacacatcaaagtttcatccacactcatcattccaccagcattatcaaactcgccacagtaatttggggctgaaaataaggttaccaactgtcgtttagcaaaaaattcatatccatcttccaccacctgatgagctcgacaaatcaaatctaaatcatgacgattcagaaatttactgactacatcagctccaaaagtaaaggaaacaccacgatcattttctccccagccttgcacatccttatctggatcagaccatagcaaatcacagagcaaacctgtatcagggacatcagtaggtctcataattctccgaatctgctccatagattgcaggtctggtgacaatcctccatgacaacagaagatcttctcatccacaatggctgctataggcagacagttaaaacaatcagtgaaggtcttccacaatttaatattaaatcttcgtttgcattcatcatagaatccataaatgcgattgatgctagcacactcatggtttcctcttaagagaaagaagttctctggatatttgattttataagccaatagcaaacaaatggtttccaaagactgctttcctctgtccacataatctcctaagaaaagatagttggcttctggtgggaaacctccatattcaaataatctcagtaaatctgtatactgtccatgaatatctccacaaattttcagcggtgcttccaattccaaaagaataggctggctgagaaagatctcccgagacttgatacataagcctcgaacttctgcttcagtcatctgcacaatctttcctggacgacatcctcgtacctccagcagccagggtgatgaggctgtccacgttcagctccccgtccgccatctggtcggcacagactctccttcccagcagcgggaacaagggcttctcggcggcggaggctgcggcgacggctcggcgttctctcacctacaagtcacgcggcgtgtgggtattcggcgtgtgca

SEQ ID NO: 11199 - DNA, 941 bp, Homo Sapiens
ggggctggaggcggcagcggttggaggcttcgcccggctttgcagcggggacttcggcggcggcgcctcaggcacctcggcccggacacgatgaggcgagtggtacgacagagcaagtttcggcatgtatttgggcaagcggtgaaaaatgaccagtgctatgatgacatccgggtttctcgtgtgacctgggatagttccttttgtgctgtcaatcccagatttgttgccataatcatagaggcaagtgggggaggagcgttccttgtcctccctctgcacaagactggtcgaattgacaaatcttaccctacagtatgtggccacacaggaccagtgctggacatagactggtgcccacataacgatcaggtcattgccagcggttcagaggactgcacggtcatggtatggcagatcccagaaaaatggactcaccctttccctgactgaacctgtggtgatttttggaaggccactcaaagagagtcggcatcgtggcttggcatccaacggcccgcaatgtgcttttcttagtgcgacggcctgtgaacaaatgcccattaatcattctgggaaatgcgggggaaaccggggggaaagccccctttactaaaacctttggaaccgatattgccattccccagaacatggatctttaacaatgttgaaggcttggcaaccctggaaatgggggagagtctgacacctgcaccaaggtctctcccaaggacccaccaaaggtgggagaagccctttgcatcccccaggaaaccaaaccaccattgtttgtctgcaaaaccggaaaaaagcccctcgtaagggagcccagatccccatggaacaaccttttctttcatgggccccgaggggcaaatggtctttctaccccctggtgggtcctgccccccacggaagaaaaagggcgcacttccgggctt

SEQ ID NO: 11200 - DNA, 1085 bp, Homo Sapiens
ggtctgtggggaccggggggccttggtcccgggcccagggggaattggaggagggtcccccagggaggccccacagggcgggaaaggccaggcccgcgttcctttggagtttttctttttgggccttttcccagtgcccactccagggggggtggccttccttccttccccagaaaggccggggaagaagaagggggcttggccccgaggacccaccatttcttctgttcttgggcaacccaagaaaggcaggcggaccataaaaaccccaagaggcgttttaaaaaaaggattaaaagggccttcggggccggtgaaaggcagcgggcttcttcgggggctgggccagcgctgggcggggacaaaggtgcctcactggggcccgcgggccactcagtccctcccgcctggttccccgcggaggctgcagccacttgtgctgtgatgtggcggctcccggtgggcaggctcagaggtattcctgtagaaagtgcagcaacgtgacttcatagtgctcgcccgactcggagcagcgaatactgtgtctctcgttggggtagatctggagctggtaaggtttccctgctcggatcagttgggagacgaggaagtttgtgtggaaaaagtgcacgttttcgtccaggaagccgtggaggataagcaagcggttgggctcattgggcagcttctccacgtgcagggccacggaacccgcctcatagccgtgctggttgttctcagggacgtccatgtagcgctcagtgtaccctgtgtcgtaggccatccagacggtgaccggggcacccgcgatggccaccttgaacacctggggcttgtggattagccccatgagcgagaggaagcccccgtaggaccagccatggatggcaactcggctcaggtcgatgaagccatacttctcggccacgaactgcaggccctccacctggtcctcgatctccacctggcccatttggtttttcagggccccttcgaaccgaagccctcgctgacaggagcccctgccgtcaatcacaaccacggcgtagcccagggaggtcagtgtgttgagccgcaagtacttg

SEQ ID NO: 11201 - DNA, 2083 bp, Homo Sapiens
  misc_feature (1374)..(1374): n is a, c, g, or t
  misc_feature (1395)..(1395): n is a, c, g, or t
gtactagggagacatgtcaaagaggagccagtcgaaactacgacagggtcaattgaagtagaaacatgactttctgccggtagaaaagactatggggaagaagttacctgcaacgtacagcaactccagactcatcaaaaacagaaagtggacagcaggacaaagagcaaggattactgcaaagtaatatttccatatgaggcacagaatgatgatgaattgacaatcaaagaaggagatatagtcactctcatcaataaggactgcatcgacgtaggctggtgggaaggagagctgaacggcagacgaggcgtgttccccgataacttcgtgaagttacttccaccggactttgaaaaggaagggaatagacccaagaagccaccgcctccatccgctcctgtcatcaaacaaggggcaggcaccactgagagaaaacatgaaattaaaaagatacctcctgaaagaccagaaatgcttccaaacagaacagaagaaaaagaaagaccagagagagagccaaaactggatttacagaagccctccgttcctgccataccgccaaaaaagcctcggccacctaagaccaattctctcagcagacctggcgcactgcccccgagaaggccggagagaccggtgggtccgctgacacacaccaggggtgacagtccaaagattgacttggccggcagttcgctatctggcatcctggacaaagatctctcggacccgcagcaatgacattgacttagaaagtttttgactccgtggtatcatctactgagaaaactcagtcatccgaccacaagcagaccaaaagctacagggaggcggcctccgtcccagtccctcacatcttcatccctttcaagccctgatatcttcgactccccaagtcccgaagaggataaggaggaacacatttcacttgcgcacagaggagtggacgcgtcaaagaaaacttccaagactgttaccatatcccaagtgtctgacaacaaagcatccctgccgcccaagccggggaccatggcagcaggtggcggtgggccagcccctctgtcctcagcggcgccctcccccctgtcatcctctttgggaacagctggacacagagccaactccccgtctctgttcggcacggaaggaaaaccaaaagatggagcctgcggccagcagccaggcggccgtggaggagctaaggacacaggtccgcgagctgaggagcatcatcgagaccatgaaggaccagcagaaacgagagattaaacagttattgtctgagttggatgaagagaagaaaatccggcttcggttgcagatggaagtgaacgacataaagaaagctctacaatcaaaaatgaatacttngatcaatgaaatgtcacattnattcatcctgagtcccgaaactcaaatttttctgccccagacaaaataatcttgtgccaaaagattaaaggtttgcctcaaaatgtccctgtttgaaagattagcacaaaagtcttgatagcacaacacaaattccatccaagaggagaatcttccccagggtttagtcctggggctggcactcgttgtgacttacacagagcaaaattgtgctaaaggcttttctactctgagatctcaatgcgaaatgaaaactcaggcagtttagtccatagtggtactattttgatgatattttccattaataaaatgtaatttcagattattcgtttacaagctttataattttatgattttttaatcgtgttttgtcacagacttccctagtgtttgtactacacgtagtcagaagcgagtgtccttttcttttgcttcaggctaagagctgcctcgctctttgtccccccattaggattctattacatatgcaattgtaggttcaacctgtccctttccctgccagcaaaccccaccaccctaagagaaattttagcttatatatgacggtatatttacaaaaagagaaagagaaaatctggtatttgcaatgatctgtgccttctttttaccaccctcttgattggagcttttgtgatgcagctaccatgattcaaaaaaattaaaaatt

SEQ ID NO: 11202 - DNA, 957 bp, Homo Sapiens
gggggccccctcgctggagcaacgcaagcaggaggcgggggagtcggaggaggtggcggcgctggagctcctcccggggaccagcgacccggggagcgagcacgtcgctccgcaccgctcttcctccagccgctgagccgtcccttctcgccatgtcccagagcaggcaccgcgccgaggccccgccgctggagcgcgaggacagtgggaccttcagtttggggaagatgataacagctaagccagggaaaacaccgattcaggtattacacgaatacggcatgaagaccaagaacatcccagtttatgaatgtgaaagatctgatgtgcaaatacacgtgcccactttcaccttcagagtaaccgttggtgacataacctgcacaggtgaaggtacaagtaagaagctggcgaaacatagagctgcagaggctgccataaacattttgaaagccaatgcaagtatttgctttgcagttcctgaccccttaatgcctgacccttccaagcaaccaaagaaccagcttaatcctattggttcattacaggaattggctattcatcatggctggagacttcctgaatataccctttcccaggagggaggacctgctcataagagagaatatactacaatttgcaggctagagtcatttatggaaactggaaagggggcatcaaaaaagcaagccaaaaggaatgctgctgagaaatttcttgccaaatttagtaatatttctccagagaaccacatttctttaacaaatgtagtaggacattctttaggatgtacttggcattccttgaggaattctcctggtgaaaagatcaacttactgaaaagaagcctccttagtattccaaatacagattacatccagctgcttagtgaaattgccaaggaacaaggttttaatataacatatttggatatagatgaactgagcgcccatggac

SEQ ID NO: 11203 - DNA, 994 bp, Homo Sapiens
gggggggacaccaacggggagtggatactccgaggctcaacctggggcctctgcccgccctcccctgggtgcggagccggacggcgggcactggcaacccccgggcccctggagagccccgcggcggcccaagacccgctcccgagacacgtgggcccctccggacttggttggtccctggagccagctgcgcgcgtcctctccggcctccttgtcggcgctggagtgggtccacgtctgccttgcggagcgcggtggttccacgctcctgagcgcccacgctgcgcagacctggccgctctgcgaggcgacggcagcgcactgaagaccgtggtgtttcccaagccctccctgctctcgggcctccagggcgcagcaggggagggttttgtccccgtggccaaagctctgcaggtcgaaccttatctgctatgggaaggccccgcattttcagattcacgcagggccctctgcagactgttggcagaaaaaggtagccaccaaacacatgcataagctggacttttcccagaatgctgcagcagaactaccctccagatagacactagcctgcgggccacagtgctacgtgagtcttgcaaagaggagatctttatggcgaggctgagagcactgcctgcatgctttaccagagcccagcctccagcctccacggaaaatgtgttttggaatcaacactctttgcaaaggctccacactgctctctggtagcattggcctgggcgcccaggcactcctttagaacccacctgttccccccacccaccctagtgggaggaggagagggttacactgacagataccggcagctctgcaacccgggaacaacgcagacaacatacaactcgacagagtcacagaaggtggcgtccatcgcgcctggatggtgactactgccctgcgggctgctgggtgggtgaaacacacagggaagaagcacaaatacacacacagatgtggctcagggaaaaaa

SEQ ID NO: 11204 - DNA, 811 bp, Homo Sapiens
  misc_feature (319)..(319): n is a, c, g, or t
tcactgcagaggaggagggtggacgaaccaaaagccaccgatactggcccaaactaggttcaaagcacagctcagccacctatggcaagttcaaggtcaccacgaagtttcgaacggattctgtttgctatgcaaccacgggcttgaaggtcaagcaccttttgtctgggcaagaaaggacggaggggcatttacaatatactgactggccagatcacggctgtccagaggatgtccaaggatttttatcctacttggaggagatccaagtcggtccgtcgccataccaacagcatgctggaaaggcaccaaagaaccnggcacccgcccattcgttggtccacttgtaagttgcttggggtgggaaggaccggcgtgctcattctttctgagctgatgatctactgcttggaacataacgaaaaggtggaagtgcccatgatgctgaggctcctcagggagaagaggatgttcatgatccagactatcgctcagtacaagtttgtctaccaagtcctcatccagttcctccaaaactccagactcatttaatcaccccaatccagctcctggaggagggacccagctccatcgcgctggaggaagagtcacctccaagacaacatctgctccccccacaggggtgcaaggtggctggcaacaaacaggctctcttgaagacagtaagccaagattattcacacataccattgtattattttatatgagataatttatttttttcccctttggaataacttttgtgaattattataatgcagtttccctagtaatatagtacaattcattt

SEQ ID NO: 11205 - DNA, 939 bp, Homo Sapiens
  misc_feature (88)..(132): n is a, c, g, or t
  misc_feature (754)..(754): n is a, c, g, or t
cggtgaggccgccgttgggccccatcttccggcggtcgccggagtttgtggtgattgttgctgccgccgccaccgccccggctgccannnnnnnnnnnnnnnnnnnnnnnnnnnnnnnnnnnnnnnnnnnnngggccgggctgatcccctccccgctgccgcctcctcctgggctgggcccgcggtgtctcgtcccctcgcggagccgctcctgccgcctgccgccgccgcctcctcattcatcctcgtgcaccataggcggcacaggcaccaagatgtccaaccgagtggtctgccgagaagccagtcacgccgggagctggtacacagcctcaggaccgcagctgaatgcacagctagaaggttggctttcacaagtacagtctacaaaaagacctgctagagccattattgccccccatgcaggatatacgtactgtgggtcttgtgctgcccatgcttataaacaagtggatccgtctattacccggagaattttcatccttgggccttctcatcatgtgcccctctctcgatgtgcactttccagtgtggatatatataggacacctctgtatgaccttcgtattgaccaaaagatttacggagaactgtggaagacaggaactgtttgaacgcatgtctctgcagacagatgaagatgaacacagtattgaacatgcattggccttatacagcttaaagccatggaaagggtatgagtattatagaacaattagacctgtatctttangcaattacttgaagaataccataatactatatgtggaagacatccatttggggtgttataaatgctatcacagagctccagaagaatggaatgaatatgagtttttcgtttttgaattatgcccatcgaccagtgtagaactgcagacagttcagtgagtatgcagctgagcatcacgtcccgac

SEQ ID NO: 11206 - DNA, 514 bp, Homo Sapiens
ggtcgatctagacgatcccgtaagctggtctgggtctatgctctggggtggaaacatagccatccaaggtattcctcaggttgtggaactgggtctgagtataggcagaactgggccccaggatgatctcccggagtgggggaagctgtgaggtcaggtaagtatccacgtccacccgtaccccaatcaaactcagcagaatggtgaactggagaagtccttccgttaagtatttcttcagagaaagcattgctgaaggaccagaatgtttatgctttttgcgtttttaaaactcttccaaaagacaaatcaaggccactgctctgccgctccagccagcaggttaccctcctcagtgtcaaaccccgtaccccaccctggcagaacacaagggatgagctccctgacggccccagaggaaagcacaccctgtggagccaaggccaaggacacactccagaccacattcactttcccttctcgacacctcacctctgaaagtacaactgttcct

SEQ ID NO: 11207 - DNA, 477 bp, Homo Sapiens
aaattcaatatccatatatttgccaaatctagaggagttgtcattccttacagttttggcatttccaaaagcttccaggaccgggttggactgtaaaagctgttctttaacttgattaacttctgctccttttccacaaacagctgccacataggacatgacaagcttactggcctctgtttttcctgctccactttccccagtaatgagaatacattggtccttatcttgatctcgtagggatctgtatgcttaatccgaaagggcaaagatgtgagggctcagttcataaaaatttctgttcctgtattcttcaactttctctggtgaataaatgggtaaagaccgatatgggttaacagatataaccacacttccaagtaagtgtatattcaccgtgttcaaaggcttcttaagtttgtgaatgaagttctcctcatgaagaggttctaaaaaaccaatatccccacttccaat

SEQ ID NO: 11208 - DNA, 607 bp, Homo Sapiens
  misc_feature (546)..(554): n is a, c, g, or t
tcctggtcgcagtcgatacagagcccgaaccagctagggagggtaggcaggtgtgagaaagaacataggcgcaggctgtgcagatcctggggagagacttgcttggacttctcgggagggatatattaagcaagagactgacatttagtgcctgaaactcagagcaaggaacccaagaagttggtgtttgactttgaccaagccctaaattcagaccagccctagtaagcaactcaagattcagacagatcagtacagccagatgctagacatagctgtgaacagcaaaagcactctggaatatcacagagttgatttctagctgtggttgtaacatagctgagtggcaaattagtttctcagcgcttctatttcctcacttggtaaaccctcaccctgttgagaaagttgaattaacagattaggaagctggaagctgtcaagccctgcctagagcccagtgacctagaggcttccttctaaactggactgttagtagggaatctggttgatatgagtttggggcctagagaatacttttatacnnnnnnnnnctttaaacattagtcaactgtagtagtaaggaggagagcaagattagacacag

SEQ ID NO: 11209 - DNA, 315 bp, Homo Sapiens
  misc_feature (196)..(256): n is a, c, g, or t
caggtgcgttacagcgtcacacagggtgacatttaggacttcacaccaagccttctgggtattgggctttttccactatactacagcgatcactttatctttctgtagcattagtttcagaactgaccagagccagcaccccaccctggagcgaaccttaagaagtcagcttactggccgggcatggtggctcatnnnnnnnnnnnnnnnnnnnnnnnnnnnnnnnnnnnnnnnnnnnnnnnnnnnnnnnnnnnnnaccatcctggctaacatggtgaaaccctgtctctactaaaaataccaaaaattagctga

SEQ ID NO: 11210 - DNA, 686 bp, Homo Sapiens
gaacagatcagcaaatttaaaagaaaaccaaacagctcttttagaaatgaaacactaatgtctcagtggacatatttggtgccagtctagatacagtagaagagagaaacagtaaataggaagattaagaacttacccagtgaataggaagataaaaaaatttcagataaattattacagagaataacgtgggaaggcagaggacagaataagggacgcggaagatggaatgagggctaacgtacatttgatggatgtcccagaggcagaggaaacaatggctgtcaaggagtaggttggggttttcagaactggtgaaatatactgacctacagacagggagccctgaagccgcctggcagaacaaaggaaaagcaacccccacctgcaaactacagatgagcaacaagcaggcagtggcttcctggacagatgcggtgctaggagacttcacctggctctcaggagcaacgacagaagccagaaacagtgatgtgctgtcacacacctgagcaaactccactgaactaggatactaagccacggaaagaacagtcacaagggatggccaaataaagacattctcaagtaaacaaaggcggacagtgtgtcactgatccttgtggtgggaattccaggagcgtccttcaagcagaaggcaagcagcagagggctgcgcgtgagtg

SEQ ID NO: 11211 - DNA, 613 bp, Homo Sapiens
  misc_feature (577)..(577): n is a, c, g, or t
tacgctggtcgcagtcaacataaaatatgctgctcctggctgtgcaatctgcttgatgtcagagtgctctgggattccaacagctctatctgctgctcctgtgcctgggtaatgaaggcatctttaatgtcatcagtagtagagcagctgattgggacaggaatgacctgtagctggaggtgatggctcttataatttctctcaaatacaacacaccatttccctcgactcttaaagaaccgtctcagagtggccttatacttctccacctcttctaccacctctgctgaaagctccaccactgactggtagtgtccaataggcaggatgaggacatggtcatcagataagcctcctttggccagggcaaggtagcaatgtgtgccgatgttgaccaccaaatgtttttccacttcagggctagcaaggcaaaaccagcagggtcctggaggctgaggaggtttgcgaggctgctttggatgaggagaagatttgctatctctacctgtggatgaacgcttccttccctgcttttcatttaaatcaaagaaaaactgacaggctgattcttccacangggcaagaatttgctttcctatggatgctcctgccc

SEQ ID NO: 11212 - DNA, 571 bp, Homo Sapiens
ctgtggggcctaaatgaagaaaactataaaactaccaaggagcatgaaagacttgcagggagaacctcgttctcccataagaaaacggaggatgtatttgtagtcagagcgatgggccgcaaagacgtccacgtgctcattcttggagcctgtgaccacgttcttacctggcaaaggaattttatctcacaaggcagatggtattaaggctgctaatcagctgactttaagacggggagattatcttgggttatctgggtttttctggtgtaatcacaagggtccctctgtggggacagggagcagctgggagctggcctgactcagaaggaatcagaaggactcaggactcactcagaaggactcagccccacgctgcaagctctgcagggggaggagcagccgtgcaccaaggagaagctgaaagtgaattatcccctggagcctccagaaggagcccagccctgctaacccctcagttttcacccagtgggactcatctaggacttgtggcctgcagaatctgggaggtaataatttgattgtttgtagccactaagctgtgctccgt

SEQ ID NO: 11213 - DNA, 411 bp, Homo Sapiens
caggtcagcacaatgttgagtggaaactaggaccaaagtcatccagctatttgggcactggtttctcagccttcccctttgcagatgaccaaaattttggcctatccagctttatttttccaagggaccccagaagtagactgctaagctgcctgccatagaggaatagtcaaggatttataacctagggatgtctgaaaaagtcacttagtcctaacttatttaacctttcaaaatttgtattagcttttaaaatagattctaattttaaaggtaacattatgcttattaccaaacaatttggaaaacatgtaaaagtgcaaaggaaaacttaagcataaaggtttcctgttgctgggcactgtggctcatgcctataatcccagtatttgggagccaaggaggaagcat

SEQ ID NO: 11214 - DNA, 913 bp, Homo Sapiens
caaggcacgtgggcagcagaggggcccgtccgaaaggagccatgccaggaacgcccatttcaggaggacagcgagtttccatgaagccaggcaggcccgcccgttccgagagaggagcatgtccactctgactccacggcaggcccctgcctacagctctaggacgcggacctgcgagcaggcagaggacagatttaggcctcagagtcgaggtgcccacctgtttcctgaaaaactggagcatttccaagaggcaagtggaacccgtggtccattaaaccctctccctaaatcctacacctttgggcaagcccttgaggaaaccagaccttggggattaccaggcaggattagtggccggaattgagagaacagagccccacagagctcgtccggggaccgtcccccagtcacaagagtgtctcaaggaagcagtcttctcccatatcccccaaagataactaccagagggtcagttctctgagcccttctcagtgtagaaaagacaagtgtcaaagcttccccactcaccctgagtttgccttctatgacaatacgtcgttaggcctcactgaggctgagcagaggatgctggacctcccaggatattttgggtcaaatgaagaggatgaaaccacaagtacacttagcgtggagaagctggtgatctagactgagaatcagcctgagctttacacagctggggtctgctactcgcgttttgtagacttttgtgtaactatttgtaccgtaggacagaatgtgaggaggaagtaacacacagaggaggatgtgtgtgtatgcatgtgtttgaattcacaaggaagaaattatttatcttgagctttttcctttgttattcaatttctattgatttattagtaataacaatgataataaaatgtaaatgagc

SEQ ID NO: 11215 - DNA, 478 bp, Homo Sapiens
atggtttacacattattttttcattaccttcagtattcctgtgaatggttcaagagagaaagtcttcatttactaagatttgggttctgcctcccaagtgacaatacggggctgagatccctctcagcttctttgagatgtggacaccataagcatcatcgttgtagggacagtctcattgctgtcttctagcagacagaagagttaggtgccagaaaggacaatcttgatggtgggtcccctccctgaaggactttaagaaggcataaaggggttggggtggagggtggcgtgtgaaggaggaggcccttgattaggtcagtggtccctgggagccatcggcgagagcctccagccgggtgacagtctgggctctcgggtactaatctttctaatatggcagtggttgtggcacttctgacttgaattgataattctctatatctaataaaaccaagaagtacctcgttgatatctt

SEQ ID NO: 11216 - DNA, 343 bp, Homo Sapiens
ggaggaaaacagaaatacactgggaagggcagaattaactaggtaggaggtggaggaagcagagacccgtgaagagggagcagcctgtgcagggttctgaacgcacagggttgccaggacctgaggcaaaatgaggaaggtggtgtcctcctgtcctgggctgtggtcagaggggactgatgagcacggtgtctttttgggagaggatgggagtcattttaccgacggagaaactgaggccaagagaaaggaagagcctttccggggcttcaggcagagctgagactagaaactgaggctcaggatacttagcctggaggatgtgtgtgtgtatttgtacgtg

SEQ ID NO: 11217 - DNA, 835 bp, Homo Sapiens
  misc_feature (262)..(286): n is a, c, g, or t
tggtttctcaaacctttctcttaggccccttcaaagggggaaaactaaaaattatacaagttatagttcaaggactttaaatagattatttatatgattgctcataaggatgaggctgtgaggagggaacaccttatttaatctaatgaaattccataggaaagaggccttttgtatattgaatcaatttatctgccttctcagtgcatctgtcatattctgaaagattctgggttgatcttttgcgataacctctatggcnnnnnnnnnnnnnnnnnnnnnnnnnattttttaacattttgtataatgattggaggttggtaaaaagtaacacaacagtacttttttaatacaaacttggagtgatcttgagttgtcttccattggagagcgtacgtgtgccacgagattggtgcacctgaacggcatctcataggcatggcaccaactcccatctagctcttcttggtggcctgcaggggcctagggcgcattcacttccctctgcttgactttacgtggtgtcctagcgtcagacatcaggcgatgcccgtgcattacccaagacactggacagctccggatcttcccgtctaaccactaatcaagttaaaaagaggaaattaacgctttcttagtagtctctgaacagaaactagttctttgcgtaaagatgacttggtattgtgttgtttatccctggggagaagggtacagaagaccctcaaactggatttgctgctgaagtgcttttaactcacctgtgcggagagcggacttcaagagagggcgtgccggtgctccggacaaaacctggggaatactgaaagccaca

SEQ ID NO: 11218 - DNA, 305 bp, Homo Sapiens
ccacaacggaaacacttaaaacagtactcctcaagagcaattcaatttccccattgtcttcctgctttttttcccattttaattcttttgttcaatttaagatccaagtcaggtccatatattgcaattggctgataggtctcttatgccacttttcgatctccttccacgcatttttaataggtccccaaccaagtaagcctctcccagtgtggggtcactggatgtgacattggaggagctctctggatccccaggacatactgcagtccaccatcagtcgcctattcccactctgagttaag

SEQ ID NO: 11219 - DNA, 1538 bp, Homo Sapiens
ggagaatagtaagcgtaaatttgagcgggactgccgggaggcagagaaggcagcccagactgctgaacggctagaccaggatatcaacgccaccaaggctgatgtggagaaggccaagcagcaagcccaccttcggagtcacatggccgaagaaagcaaaaacgaatatgcggctcaactgcagcgcttcaaccgagaccaagcccacttctatttttcacagatgccccagatattcgataagctccaagacatggatgaacgcagggccacccgcctgggtgccgggtatgggctcctgtcggaggccgagctggaggtggtgcccataatagccaagtgcttggagggcatgaaggtggctgcaaatgctgtggatcccaagaacgactcccacgtccttatagagctgcacaagtcaggttttgcccgcccgggcgacgtggaattcgaggacttcagccagcccatgaaccgtgcaccctccgacagcagtctgggcaccccctcggatggacggcctgaactccgaggcccgggtcgcagccgcaccaagcgctggccttttggcaagaagaacgagacagtggtgaccgaggattttagccacttgcccccagagcagcagcgaaaacggcttcaacagcagttggaagaacgcgaggcgtgaacttcagaaggaggttgaccagagggaagccctaaagaaaatgaaggatgtctatgagaagacacctcagatgggggaccccgccagcttggagccccagatcgctgaaaccctgagcaacattgaacggctgaaattggaagtgcagaagtatgaggcgtggctggcagaagctgaaagtcgagtccttagcaaccggggagacagcctgagccggcacgcccggcctcccgaccccaccgctagcgccccgccagacagcagcagcaacagcgcatcacaggacaccaaggagagctctgaagagcctccctcagaagagagccaggacacccccatttacacggagtttgatgaggatttcgaggaggaacccacatcccccataggtcactgtgtggccatctaccactttgaagggtccagcgagggcactatctctatggccgagggtgaagacctcagtcttatggaagaagacaaaggggacggctggacccgggtcaggcggaaagagggaggcgagggctacgtgcccacctcctacctccgagtcacgctcaattgaaccctgccagagacgggaagaggggggctgtcggctgctgcttctgggccacggggagccccaggacctatgcactttatttctgaccccgtggcttcggctgagacctgtgtaacctgctgccccctccacccccaacccagtcctacctgtcacaccggacggacccgctgtgccttctaccatcgttccaccattgatgtacatactcatgttttacatcttttctttctgccgctcggctccggccattttgttttatacaaaaatgggaaaaatataggaattttataaacatga

SEQ ID NO: 11220 - DNA, 519 bp, Homo Sapiens
tgttagctttgggttgcagtgctagatattgttttaaattattttcattttaaacaagatgccttctaagctattgagcttattaaaaataattttacatgtttacttagttggagcaaaaataagtctattttaacaaatagctttgtttttgcatgctaatgtcagaaaggcatacgatgcacattatgctgttttaaaggttttaccacccttgtaaaaactataatcttaaatggttttatttgctgttacacaaacaacactacataaaacattttttcctaaatggtacaaatttataaactatcatttttcacttacggtatttgtaaatactacactacaaaaatcagctttctgagaaagaaataatcatttatttatgatattgaaaatttctacagtaaacactcaaaaccaagcaaaaaacatttgtaagatacacggtatctatttggagcaacggtttttgtaactaatgtgtttcattttttaaataaagacaactaaaaataa

SEQ ID NO: 11221 - DNA, 515 bp, Homo Sapiens
tcttacaggaacctgaagggccgagaagtcctgctgtgtttggtgccatcatctcttactttgaacagttttttgaaactgttggaatttctctggcaaatcaacagtacgtttcaggagacggcagcgaggctaccttgcatggtgtggtggacgagctggtgcggttccggcagaaggtccggcagtttgcgctggccatgcccgaggccacgggggacgcccggcggcagcagctcctagaaaggcagcccctgctggaagcatgcgacaccctgcgccggggcctgactgcccacggcatcaacatcaaggacagaagcagtacaacatccacgtgggaactgctggatcaaaggacaaaagaccaaaaatcagcgggctgaggatggagcacagccatgaacctgctcacgacaagacgcacccatgcttctcagggtcaaggctttatgttaaagcttcctgtcggggctgctaggtcagcattaaagtaaggcaaccaacagtggaaa

SEQ ID NO: 11222 - DNA, 695 bp, Homo Sapiens
  misc_feature (193)..(226): n is a, c, g, or t
  misc_feature (295)..(309): n is a, c, g, or t
  misc_feature (332)..(396): n is a, c, g, or t
cccctttcaaaagtaatcttagaaaacagaagcttctgtttcataaaagtcctaggaaataccatttcacatctcatcagctctgatctgttatgcctatctttagatgtgagagtaaggtcaataatattaaatagagaaaaataagtaagaatagaaaaagtcttggcagtgttcagtggtggcttgcatnnnnnnnnnnnnnnnnnnnnnnnnnnnnnnnnnnaggatttgaggccaggagttcaagaccagcctgggcaacacctgggtgacagagcaagaccccatctcnnnnnnnnnnnnnnnctaggtcaagtgcaatgacacannnnnnnnnnnnnnnnnnnnnnnnnnnnnnnnnnnnnnnnnnnnnnnnnnnnnnnnnnnnnnnnnttgcagtgagctatgaacaccactgcactccacctgtccacttgttcttgtgtgacagaacaagaccctgtctctaaaaaataagataaaaccataaagaaacacagtcagtactatacaagaataatggctacttctagagggaaggagttgtcattgtgatgaggcacttggaggggttctggggtgcctgacaaagttctgtttcttcacctgggtggtagttagaagggtgtccccgtatttcaaattgtacctttgtgagattgtatgttttgtaataataaaattttttttgt

SEQ ID NO: 11223 - DNA, 352 bp, Homo Sapiens
gctttgttttctttttagattttgcacattccatctttataggtctgtttcatatgttttatgtatagaacactaagtcttgcactctctgacattgatactgatatattctcgtcatttgttcttttatgaatcaaaatgttgactgcctatttaaagaaaagaatgaacgctgtgcatcaaagtgtttgtatgttcgtagctacatacgtaccacagtattttggatgctttagtctacaatgaaactttcaattaattctgtcttgaaacataggagaaacaggattcatgtgtatctctttaccatgcacaaaatctcaaatcattataataaagcttgttttctcca

SEQ ID NO: 11224 - DNA, 459 bp, Homo Sapiens
gcctgtcatcttgttgacatctccttctggactgtgagctctgtatctggcttgtttttcatccccagcttctagttcacaattaggtagaaccctattactctatgaagaaggaacaagaaaatgtgggccagttttcatttgccattcttccatgtgagttagtatggctcgtaagtattcctggtgatacgctagtattggcaattctgtgaggttgaacaaaggggtggtatggtgtgctagcgtgggaattaggagacctctgggtcttgacagtgccctggccactaagcaaaggcagttcatccttggagtctcaatgtgcttttttgttaattgagatatgcttgaagtatcagccctaaatagtctgattctgtgacctacaaacccttacttaattcagtgttactataaatgattcttcccttaaacctactttttacttagcaaaag

SEQ ID NO: 11225 - DNA, 527 bp, Homo Sapiens
  misc_feature (11)..(11): n is a, c, g, or t
atggcaggtcngactcgaccatgacttagttgtaagggtgtgtcggctttttcagtctcatgtgaaaatcctcctgtctctggcagcactgtctgcactttcttgtttactgtttgaagggacgagtaccaagccacaagaacacttcttttggccacagcataagctgatggtatgtaaggaaccgatgggccattaaacatgaactgaacggttaaaagcacagtctatggaacgctaatggagtcagcccctaaagctgtttgctttttcaggctttggattacatgcttttaatttgattttagaatctggacactttctatgaatgtaattcggctgagaaacatgttgctgagatgcaatcctcagtgttctctgtatgtaaatctgtgtatacaccacacgttacaactgcatgagcttcctctcgcacaagaccagctggaactgagcatgagacgctgtcaaatacagacaaaggatttgagatgttctcaataaaaagaaaatgtttcactaaaaaa

SEQ ID NO: 11226 - DNA, 683 bp, Homo Sapiens
tctgagctgtaaatgctgacggccaacgctaatgggcagtatggctatggggcggccatagaagataggtgaagtgagaaatgctgaccccagagtgttcttaaagtctgaggtctggttgccaacagcagccaccagcaagacccctaagccaactgccagtgggagggccacaatatagaagttgaccatggaagaaaggctaatcagtgccacaaggccaaaatagatgccaactatcacctgggcagcaaagcgaatgggactcagagggggtgtcacccctctggggctctgcctctgtccctgggctctgttggcctgagctacaaagcttgggagcttccagaactcccagagccagcccagcccacctccccccagggtcagcatccagagcagggcgtggctgtcccttcccaggtacaggtggtggagcccagcagggccccccacagcccagagggcataggtcaccaggagccccttggccatcctctagggcaaaggtctcagaacaagtccggttactcgcagcacagaagtctcggggtcctctgtgagactcatggctgtcatggccccagagttatccttagacctgggtgccccgctcccagaccgagtcagaccagtcatttccttggaccacagagtgaaaatggcccgtctcgcctgctccc

SEQ ID NO: 11227 - DNA, 700 bp, Homo Sapiens
  misc_feature (598)..(598): n is a, c, g, or t
aaagtagtcaagatttccttttactcaaaaaaaatcacttcagaggggacctccatgtacaaaaggcaagatcaatcacatttatcactggacacaaaggatttttcaaaggtatttaaaaatggtaatttcaaaaagaaaaattaattttaatttttctaatgcattatcaagaccatacttgcttaacaagttaattatgctattgatacaaaacatacaatatttacacttaactgtacaaaataatttaatgtttacaaaaatattagaatgtttagttgactgacacagtcttaagtaatctcttctagagaagtatatagtaagaccactgattcccatttcatttcttttttaataagtcaaagaaaggatgctgcaatgcttcatccaaggtaattctttgagttggatcatattctaacattcttcgaaccaggtcaaacagtttctcatgttcttcatcatgacaaagcataaattccttcaacggtttgcagcgtctcctaacatatctaccagcgaacctgtgttcatcccaattagctggttatggtgaaaatctttgcgttttcttgtttttgatcatgtgttngggggatggggtcctaatatttcgttccatcattgccaggtgctctttctatcattgaagtctgaagaactgtgaaccccaggggtataattcaataagaat

SEQ ID NO: 11228 - DNA, 904 bp, Homo Sapiens
  misc_feature (337)..(345): n is a, c, g, or t
  misc_feature (461)..(473): n is a, c, g, or t
  misc_feature (604)..(650): n is a, c, g, or t
  misc_feature (850)..(850): n is a, c, g, or t
ttccccctgctcccagggcacatggttgggctgtgtcaacccttagggcctccatggggtcagttgtcccttctcacctcccagctctgtccccatcaggtccttgggtggcacgggaggatggactgacttccaggacctgttgtgtgacaggagctacagcttgggtctccctgcaagaagtctggcacgtctcacctcccccatcccggcccctggtcatctcacagcaaagaagcctcctccctcccgacctgccgccacactggagagggggcacaggggcgggggaggtttcctgttctgtgaaaggccgactccctgactccattcatgnnnnnnnnnagcccctcccttcattcccattccccaacctaaagcctggcccggctcccagctgaatctggtcggaatccacgggctgcagattttccaaaacaatcgttgtatctttattgacnnnnnnnnnnnnnctgaatgcaatgactgttttttactcttaaggaaaataaacatcttttagaaacagctcgatacacacaatcttcagtgtgaagcaatatactaataagaacactagtcgtcttaacatttacagtcttcnnnnnnnnnnnnnnnnnnnnnnnnnnnnnnnnnnnnnnnnnnnnnnnacgaggccagatataatacacacgtttaccattttacagtcatatgtacaggaagttgctagggcggccctgggctgggggctgcgtcaggcctatcgaagcgtggacagagctgaggacacggacggacaggcggacggactggcagggactggcccgggccggtggtggctgcgtggacaagtggcgtcgcggtagcnccttacccgggcaaaggcccggttgggcttctgttgcgggcgcacgacgcacgg

SEQ ID NO: 11229 - DNA, 510 bp, Homo Sapiens
agtgctagctaggtggtgtgccacgtggggagacgaagctaccttattaagtgggcatggatcagcttcctgaagggacgggcctgcctctgtaagatatgggaagtcgctgagaatgttacagaacggccctagagatggggcagataacggcccccatttgtgagaagtgagttgggaggcatgtttggggcctctgatgtttgggaggctgtgggtaattaagatgagttttggggtccagcagcagaattcaggtttcctcttccactcagtaacctcagcatccgtatctgtaatgggaatgatacaaaacctatccccaagttgagggaaaaatgagattgtgtaaagcgcacttggcacatgacagtcacaagcatggggacagtgagtccagaaggattttcttatgccagcattgtaagccctaggatcacagggctctggcttgtataaccatcgtgtctctggtccctagccttgcaaacctggtgtgtagggatgcct

SEQ ID NO: 11230 - DNA, 499 bp, Homo Sapiens
ggtaaagtcagcagaaggacaaaaacaggccctgctaagacggcaggtgaactctagagaagaccacggaggagaactagtatcggtactggagcttctcagcacccaggtccaacaagccagtaaagccaaatgacttacaacaaaaccctacaacaactacaaagatactactctaaagccctgtctacagtcagattcttgaatataaatgtgacgttagaacagaagagccccaaatataccagctagtccctttacagtgacaggtaaaagctacttactacacttactacctgccagacactgtagtaagcacttgacacaaatggtcttatttactcttctccgtaaactcacaagctagaaaataccatcatccccctttacagacgggaaaactgaggcttagagagtttaggtcacacagctaagtagcaatggccctgatatgcgagaacctaggcagtctggtttttaagcactgggcctacactgc

SEQ ID NO: 11231 - DNA, 691 bp, Homo Sapiens
ctcacaacgcgcccgctgtgggggtcgcaggcctctgtcccacatggggtacagtcgcaccgggtgcagttgccgggcagcagggcgttgccgtagaagccgggggcacagatctcgcagcggggcccagtggtgtggcgcaggcagccacggcaggcgcccgtcagggggtcgcagtcgctgaagagcaagttggggtcaccgttgccgctgcagtcgcatggctggcaggagctgcccagcaccagtgggttcccaaagaatccgggcgcgggcgctcgcaggaggcacctgcataagcaggtttgcagaggcactgggtgcggccgcctcgcaggacacagccctcggcgaagttgttggaaggcactgagagggggcaggggcagctgacacagggggcgctggggtcgtccctgctgctcatgaagccagcctggcagcgctcacagtgggccccttcggtgttgtgctggcagtccacacagacgccagagccagggaggcagcggtctgagtgtccatggcactgacaagggacacatcggcccaggaagagacctttgacgtcccgatagaagccgggggcacattcctggcatgagtccccccggtagctggcggggacaggccatctccacattgctggccaggccccctggcctgctgggctggcacctccagtgcaccc

SEQ ID NO: 11232 - DNA, 309 bp, Homo Sapiens
tatgtggtagctagctggccaccataggatagaccatctgtcaccccctgactcctctgacctgacctaccttgtgagccagtgagggaggacccagcactggggcctgggcgaaggtccacccagaaatcagggactggcctggggctcacctctgcctctcccaggctccagcttgtgctctccaccgcatctacagtttacgtactcggttcctcagagcacccacgtggtggttccacagaccccctctgggggcagatggggtttctgcagtgggattggaagctgtagatcagctcctgtcct

SEQ ID NO: 11233 - DNA, 311 bp, Homo Sapiens
gagtcccggtgtagcacctcctctcccgcggacctccgtcctcctctctttttggatgactccctggaacccctccgacttcctgcggcccgctccggctccgttctcccttccccattctgtcacagcccgcgtctcctctatttccagtggggctgggatctgtgaccctttggttgtcctcgcctcctaactgaataaccttaacttcagttcctccaggctctgctgtactctttgtgcaccctgggtggaaagccttctaattctttcagtggtcaatgatgagccgaaaaactgccggttctttc

SEQ ID NO: 11234 - DNA, 521 bp, Homo Sapiens
atctcctatcacctcgcaaggcgtgagctggcgagaggtgaggctgagaatgggccaagtactatcggaagtcctatgagagaggcctcccttcaccaactagtgagcgtgcaccgtgcgcatgaaccgtgcacgtctggcaaccgtgcgccgtgctgcagtcgggccgcgttgacacaggtctcgggctgccactgcccacaccgtgccctctcctccagaggacaagcgccgtgctgccaaaactctaaagcgcatctctggctataggtgcaggagtatgcagggaccagcgcgtgtccctggagcagcagctgcgtgagcttatccagaaagatgacatcactgcctcgctggtcaccacagaccactcagagatgaagaagttgttcgaggagcagctgaaaaagtatgaccagctgaaggtgtacctggagcagaacctggccgcccaggaccgtgtcctctgtgcactgacagaggcccacgtgcagtacgcagccgtgcggcgggtactcagc

SEQ ID NO: 11235 - DNA, 474 bp, Homo Sapiens
gcagtatggctaagatgatccagaccgcctcaacctcccacagtgttgggattacaggcatgagccaccatgcctggaccaccatacagatctttaagagggattcatcatacacctgaggatagatgaggggaaactgccaattcacggaaaaaggctttcctctttttattcaaaataccataatgacttcttacttgatttcatctcatctcagatgtgtgaggttcagggagacagggagtgagaagaggatggtgggtggtaaaggcggtgaacacagcagctggtctgtatgcaagggtataccagggatctggttccaccttcgtttcccgtccatatttcctctataacctcgggtgcagggtgtcagccacactggccttcttgcagacccaggacacagcaaccgttgctcctgcctcacggccttctgctcccaaacgccttcacaaattgcgaccaggcata

SEQ ID NO: 11236 - DNA, 268 bp, Homo Sapiens
tgactggtgatgagtgagttcatggtaatacagttgcttcagaccactgttgagtgttaaccctgtgagtccaggagaaggctctcctcggggattgcttccagtcctcatgttctgctctaactttatttgatcttgaatctgtttattttaactattgtggccgccaagattattatattttaatatagaaatgatccataaagatgcatttttatggcatttaaataatgctctgcagtggttgaatgtctcaggaataccacaa

SEQ ID NO: 11237 - DNA, 452 bp, Homo Sapiens
  misc_feature (369)..(369): n is a, c, g, or t
aatgtcagttaccagtttggattgatgaaagtgatttttctgctttacctttttcctgtcagaaaggttttcctctgtgctacccttaacttagggatgaacagactataactaggaaaggaggaaaggtatcagggatttttaagtccgtttagagagcaaaccatattgtgcctcttcatcttgacccaggctcttaaagataggtcctaaacattgctgttcactagattatcttaacaaataatactcagctaaatatttgcatttaggaatactcctaaaacagatattgccaactagatacactgcctcaatcttgaccagacaaaagaacagttaagttctctcagttgggtagtaacttgnaataccagtctatttatcagttggtttcaacacaaaggtttcaacccgaaagccattcatcttaaaagctgaacagaaaaatt

SEQ ID NO: 11238 - DNA, 395 bp, Homo Sapiens
cttaaaactaaatgcatgactgcagagcggtagaggtgtatatttttcatactgtggggcaaagtatttgtgctgctttttggagatggactggaacgtctggtttctgtccccgggcccggcagctacgtctattttctgtagaaggtgccacagtgagacctggagccaccccttcctgccctggcgccgtttagagctgggagcccgtggactcccggcctgtttctaccttctattcaaccactctgacgtggggagacaagaagaaatagaacttttttatagtgtggtaaaaacattgatttgaactattttagtaaaaggagtaacaaacaagattgtgatagtgtctactttgagctagataaataaaggcctctttgtgagcctca

SEQ ID NO: 11239 - DNA, 404 bp, Homo Sapiens
  misc_feature (28)..(28): n is a, c, g, or t
gaagattgaccccagaaaactcaggaantggctggaggaagacggactcggaagaggacagtgaggaggttgagggcgccgagggtggggtcgacgacgaagacagcggagaggagagcggtgcggaggactgaaagagcccctccaggggcgcctggcaagtgctgtgcccacgtccgcccaggacccagccgtgttgagtgaagctcttggggccaagcgtcgtcctgacgcacaggagagagctgaaggtgggtggcccaggccagggtgtgaactttctcccatggtttagtctctgacgcggcactgggccggaagttcaactgagtgcagtgcaggtggattccctcagcagcctgtgtgttgtgtgaaataaattggacttgaaacaagaaaaaaaa

SEQ ID NO: 11240 - DNA, 508 bp, Homo Sapiens
ttttaatggtatactcatgttgaaagataaatgttgctaagtcctggtatgatggtgtgagcttccttggggaagtacttcttgagttatgtaactaacaggatgttttactacagatctggatggctattcagataacatggcaaaaaatgatagcagaagatcattaaaaacttaaaatatattttattagaaaacatttatctatgaatgaatatttccttgatgctggtctctgcacacaatatgcttggttacttgcatgcattcattggttgttcaataagtgagatgattacagataacttaatactgtattttccttatatggaaaaccgttatagacccaataacaactaaacctttcaaaagaaaatattttctattatgaatgttgattttcataccaaagaagatggagagtctaaaatttggatatgattcttatgtttttttaatagaaaaccttcttcaagtttattttcctaaataaacatcataattgtga

SEQ ID NO: 11241 - DNA, 586 bp, Homo Sapiens
tcgccaagaagatgtgggaggagctgcctgaggtcgtgcgcaaggactacggcaagaagtactttgatgaaaagatcgccaagatggagacctactgcagcagtggctccacagacacgtcccctgtcatcgatgctgtcacacacgccctgaccgccaccaccccgtacacccgctaccaccccatggactactactggtggctgcgaatgcagatcatgacccacttgcctggagccatctccgacatgatctacatccgctgaagagtctcgctgtggcctctgtcagggatccctggtggaaggggaggggagggaggaacccatatagtcaactcttgattatccacgtgtggattatccaccatgccaggaagacccataactggttttaacactaactagagggaatgacttctttgcatagtgagtgacttgggccttcacaaacagggtgtggagtggcaggcagaggcctctaaatctcagggcaaacatggtgaatctatctctccggagataatttcatacagagattttaaaaaaacatctttatattaaaaacagatctcatttgatcctta

SEQ ID NO: 11242 - DNA, 574 bp, Homo Sapiens
  misc_feature (47)..(55): n is a, c, g, or t
ttgagacagggtctcaggctggagtgggtgggtgggtgtgtgtgtannnnnnnnnattgagacagcgtctcaggctggagtgggccttgacctccccagctccggcaatcctcccacctcagcacccctgagtagctgggaccacaggcacaagctaccacgcccaagccaattttttatttttcatagagagggggtctatgttttctacactgatcttgaattcctgggctcaagtgatctatcccctcggtctcccaaagtaccgggcttataggtgcgaaccactgcctggacagagccgccttctgtaaaacactcacctgggccaccctgatagagggcgcctcttgggggggatgggggatgccaacctcacagggcctcctatcttttagtgctggtgttccagaaggttccagtactgggagggacaggtgagtcggcagcagtgggctcatggcacaaaggcagcccacgagggactgtgtgccaggcccatggtgatgccaggcccacggtggccatgctgacaagggaaggagggagcgggggagcaggtggctgtgtgagc

SEQ ID NO: 11243 - DNA, 201 bp, Homo Sapiens
catattataactaaatatgtttcctgagagataagagaaataatgttcctacaatagttgtatgtatctaagataagacatatagatgcttaagacattttgtttcacttgctattcactagtgtacttgaaacatggtcatttttagcccttttccttaggaaccatgtctttattttctcaataaagaaattactttca

SEQ ID NO: 11244 - DNA, 583 bp, Homo Sapiens
cagatcacgacaacaggtaacctttagtcagaactcaccacccactgtgttaagccttacatgacaatcaccatgaagatttacatacacatgttatatcatagtctcctcacaacatgtctaagaggtaggcacgtcattgttcccattttgcagatgaggaaactgaggttcagagagggcacttggcttgcccaaagtcacacagcggggagtggcagaggaagtcaggttgggtgaccccagtaactgctctcagaggctgggtgatgaccggcttcctggcttctctggaataaacctttgccaccacttcctgcatttcagcttcagtacaggcagagaatggggataggtgggggaatgaggtgagaggggagatgtttagaggtgtggagggcggcagaggtttgaacagtgcagacaaggggagagttcagccgatctggggaggatagaggatggacgatggagcctctgggcatctggatcagcaggagcataacatctggatcagtctggagcgtagcatctggatcagttggagcctatgactttatgatctacctttcatctctaaaaa

SEQ ID NO: 11245 - DNA, 525 bp, Homo Sapiens
  misc_feature (56)..(93): n is a, c, g, or t
tctgcagtgggggtcgctgggggtggagagaacactaagaggtgaacatgtatgannnnnnnnnnnnnnnnnnnnnnnnnnnnnnnnnnnnnnaaaggtccagccaccccgtcctccagcctgcaaggggtgtctggcgccttgcctgacaccaagccccctctccccctgagccattgtgggggtcgatcatgaatgtccgaagagtggccttttcccgtagccctgcgccccctttctgtggctggatggggagacaggtcagggccccccaccctctccagcccctgcagcaaatgactactgcacctggacagcctcctcttttctagaagtctatttatattgtcattttataacactctagcccctgcccttattgggggacagatggtccctgtcctgcggggtggccctggcagaaccactgcctgaagaaccaggttcctgcccggtcagcgcagccccagcccgcccacccctgcctcgagttagttttacaattaaaacattgtcttgttttga

SEQ ID NO: 11246 - DNA, 438 bp, Homo Sapiens
  misc_feature (307)..(398): n is a, c, g, or t
ctggttcaggtttgagcattgataaacactctttaaagagaaacattttaatgttttggaagtgctttccatagtaataagcctgtcctcccttgactcctcagccgagctgactagcctagctaggaaagagccagtcaggctgacagttaataagaactcaagctcatgcctgaaattcacagtgctttaggaggctgaggtgggaggatcacttgaggcccttaggtcaagaccaacctgggcaacatagccagaccccattctctaacaacaacaacaataacaaaaattagcagggggtggnnnnnnnnnnnnnnnnnnnnnnnnnnnnnnnnnnnnnnnnnnnnnnnnnnnnnnnnnnnnnnnnnnnnnnnnnnnnnnnnnnnnnnnnnnnncctgttacaaccctgtttccaaaaaaagaaccccagtttt

SEQ ID NO: 11247 - DNA, 256 bp, Homo Sapiens
ttgctataaattccacaggcaccttagctatacttatgaaactcagataaagaataccctgaagattatagctagaaggtatagtggatgacgtaagttattcttttatggtcatgtgcgtgtgtaacaatatttggtcaacagaccacatatacaatggtggtcccttaagattataatggaactgaaaacctcctattacctggttaacatgatagctgtggtaatatcacagcgcagcacgttactcacttgt

SEQ ID NO: 11248 - DNA, 413 bp, Homo Sapiens
tttgtgcatcccactggatatcagtacaggaggggcatgtgttgttggagtttcaggtgtaaaacaatactttgctaaaggaactgattggggtgtactcagtacttctgagggtcgctctcacagtggacatggtgggagagtgtggtgcccacaatggatgaggtctcggtactttggatcgagggagaagatgaaatgatgtgtattgggcttggtaagctactgatatcagtgggtatagagggaaggtctgtggttgtagtcaatgaactgctggtgttcaaagataatggggtgagagtacttagggatgtggtcgggatgtctgtactcagagaagatggggatgaaaggtgtggaagtcaccccagtctctgcggtagtgaaaggtgaggtgatggcagttgtgg

SEQ ID NO: 11249 - DNA, 445 bp, Homo Sapiens
cacgagctgcgtggtatctgtttctcctcagggatctctctctgcccttgtatacacctgcattcaaaaatgatcacgggctgcctgtgctctggtcatcaataacgcagggagaggaattgctgaaagccgtttcccgtgtttggagggttcacacctgtccctttcaaatgctggcgctttcacacactccttctctcctgccagcaccttctggtctcaggagcattgcaggatgttgtgtgagtgagtgatgggagacactttaatatggcttttttcagcttagcctcctgttatcagagagcagtctctttcagtgtcaaggtttgagtactagatggtggagaaagcctgtgtgaattatttttaatgaataagtgtgatgatgggtggcatacagtcactgccttaagattttcaaagagaagcagccttttggagg

SEQ ID NO: 11250 - DNA, 388 bp, Homo Sapiens
  misc_feature (312)..(321): n is a, c, g, or t
caaacctgggccttctcaaaatcgtccctttctttttcaggaattgggtcatccaatctcatgatcagtttccccttaaagttaacctggtagtgctggttcagaagagcagcttttgcaagccccaagtgtaagtaacttaaaccaaaacctttcaccaaggaactcattaacatgttttaactaaaaaacttaaacttaacctttttgaggagatgagaactaaaccaaagtccttctaaatgggaccccagtcatattttattttctaaccaaaagtaactgtgatagaaaatctgaccctgacagggnnnnnnnnnngactatacgtatatataaaacaattataagaacacttcaaatgtaaaatctcacagaggtcaagtat

SEQ ID NO: 11251 - DNA, 948 bp, Homo Sapiens
attccagagagcgtgtgtggctgcagcctgcaccgttgctgcccgctgcccaggacgcggggtgggggacaggagccagagtggtgcctcctgcagaccaatctggggccccaaggtggggggccctacagagatgctccgaggcatgtacctcactcgcaacgggaacctgcagaggcgacacacgatgaaggaagccaaggacatgaagaacaagctggggatcttcagacggcggaatgagtcccctggagcccctcccgcgggcaaggcagacaaaatgatgaagtcattcaagcccacctcagaggaagccctcaagtggggcgagtccttggagaagctgctggttcacaaatacgggttagcagtgttccaagccttccttcgcactgagttcagtgaggagaatctggagttctggttggcttgtgaggacttcaagaaggtcaagtcacagtccaagatggcatccaaggccaagaagatctttgctgaatacatcgcgatccaggcatgcaaggaggtcaacctggactcctacacgcgggagcacaccaaggacaacctgcagagcgtcacgcggggctgcttcgacctggcacagaagcgcatcttcgggctcatggaaaaggactcgtaccctcgctttctccgttctgacctctacctggaccttattaaccagaagaagatgagtcccccgctttaggggccactggagtcgagctcagcgttcacaccaggcgggctgggtcccctgcccacctgcctccctgccccctgtgacggagggggcaagcaagcccccagaggccgtgtctctggacagacggatagacatacggaagcgaggcctggaccaagagaggcccaggctactgggaggagtagaaggatgggccccgtggggtccccactgccccggtacgagggggcccaagaacc

SEQ ID NO: 11252 - DNA, 494 bp, Homo Sapiens
  misc_feature (70)..(158): n is a, c, g, or t
accgcccagtgccacgcgcgcacacccgcacatcgactctagagagtacccgccacacatggaccctctnnnnnnnnnnnnnnnnnnnnnnnnnnnnnnnnnnnnnnnnnnnnnnnnnnnnnnnnnnnnnnnnnnnnnnnnnnnnnnnnnnnnnnnnnggaaaaaatgcatttcaaaggaaactactagaaatgttcatattccctttgaccattttgctttcgtgagttttctctgtcacaggtttcctgccaagttaattcaaagcccagtgggactaacatgctcctctctgcaaaatattctccagagcttctgggaatacctcatagctactgctaccaggataccaaaatatttcccaaatacacttgcagctggaagcaagatataacatttcctctctaactccttcttgcctgtgcttttcaaataacctcagctgtgaatggagggtcttagaaggtccagtatgccggtccccaggtgtacga

SEQ ID NO: 11253 - DNA, 153 bp, Homo Sapiens
tactacaacgatatgtactgagtcttggacaaagctgtccttcatagagttgttgataactgcctccaaatgaaaactgcctaattacgtcatcaagaggagattggttcaatcaatgatggtctatcagtcagccattcaaaatcatgttgg

SEQ ID NO: 11254 - DNA, 504 bp, Homo Sapiens
ccgatgcacagcaaccagccaatcctgctgtctcaagggtatccgtacctcaatgtcagttacattcagcagaaaaagtgacatttaatggaaagcaaaacaaatcaggtcctgatttaaaattttaacacgtttagatagcttatttaaattctaagactgtttttacagactgtattatttgtatataaatatgaaccatagtttttactagtatcaccaaattgagtgaaacaaatttcatctattttattaccctatttttaagggaattttatgttttgtttaaccttgatgaattgtataaagagagaatttaaaaaattacattctttattttctattagctgtattcatactttggttgcttcagactttatatattgttcttaaaagttaggaaagaatttcatgtgttttaaattgtcacttctattctttacagaaccttgtagtgccaaaaactttttaaaaggtaacacaataaaattaaatttccccatg

SEQ ID NO: 11255 - DNA, 428 bp, Homo Sapiens
  misc_feature (105)..(105): n is a, c, g, or t
gctcgctctcaactctgtaggccaaggtggcgtctcctcttgactctccagacctaaagtgacacccttcaggcacttcgggcccaattcagcccagtcctggtntttcagcgccagatgacagcactttgcagataagaacgatatgatgtgtggatttcactacatttggctcctggatgctataaaaggacttggatttctgacttggctcagggactggggttagcagtctctttctgctccttttcacctgtgttttcttccgatcccagctctggtccctcagccgcattcatatttactctcctctcccagcctgatatccctgtccctcatctcaacccgaagccaagatctgagcccccaagatggagaatggggaggagctttttatggcggactgattaaaactcttaagcatttaa

SEQ ID NO: 11256 - DNA, 1247 bp, Homo Sapiens
  misc_feature (860)..(912): n is a, c, g, or t
  misc_feature (1123)..(1132): n is a, c, g, or t
ggggctcgctgaaccatgctgtacatctcccggtggaggacatcatcatggagcaactcttgtcactgatgggtctctttgggcctccggtcctctagctctagcttggagtgcgtcatggcacgggattgctgcttgtgctacccctaattagggcccagcctgtccatggcagctcctaacaaggaccgtctgggatagcacctctcagtcaacatcgtggggctggacagggctgcggcccctctgcccacactcagtactgaccaaagccaggcctgtgtgtgcctgtgtgtaggtcccacggcctctgcctccccagggagcagagcctgggcctccccgaagaggctttccccgaggcagctctggaatctgtgcccacctggggcctggggaacaaggccctcctttctccaggcctgggctacaggggagggagagcctgaggctctgctcagggcccatttcatctctggcagtgccttggcggtggtattcaaggcagttttgtagcacctgtaattggggagagggagtgtgcccctcggggcaggagggaagggcatctggggaagggcaggagggaagagctgtccatgcagccacgcccatggccaggttggcctcttctcagcctcccaggtgccttgagccctcttgcaagggcggctgcttccttgagcctagtttttaaacgtgattttgtaacattcattttttttgtacagatacaggagtttctgactaatcaaagctggtatttccccgcatgtcttattcttgccttcccccaaccagttgttaatcaaacaataaaaacatgtttgttcgtggttcttttttatttacgacaagannnnnnnnnnnnnnnnnnnnnnnnnnnnnnnnnnnnnnnnnnnnnnnnnnnnnatacgacaacaacaaggggggggcggctccataaaatactccccagggggggcgccagaagtgacggatgcacccgtgtttttgaacaaaaggggtgccccaaagtgggggtgatataaaaagcacaacagcgcgggccgcgtattaaaacacggtcaggagcggggaaaaaaagccacgcgtggtactcttgatgagacgacccaccttnnnnnnnnnncacaacgtggaggcagcacccacgggacataaagcgccggcgaataagataatcggtgtcttatgggtgaaccacgcgcatcagttcggcgcaaatcgtccggagtttaagaatc

SEQ ID NO: 11257 - DNA, 558 bp, Homo Sapiens
aggagcactacaatgccacgcagaagggccatgtgccacattacttgttggagcgcagggacctgtggcggcgggaggccgaggcccgcaagcagagccagccggaccctgccatgcccccaggccacacgcgcatgcctgagaaccagcggctggaaacactgaccaagctgctccagagccagagccagctgctgcgtgagctggtactgctgcctgctggggcagactcactgagagcccagagccaccgtgctgagctggaccggaagctggtgcaggtagaggaggccatcaagatcttttctcggcccaaagtcttcgtgaagatggacgactgagcccctttgggggacagtggcaaggagctccatgctgaggatcgccacatggctgcaaaggacagggttggacccaatcccagagcagaggtctgaagacaggagcaggggggtggccagtgtccctagagcactcttcccagtcaccagtggctgcagaagggccaccctagccttttaactgctttgtcaaaattaaacattttgtacacagaaa

SEQ ID NO: 11258 - DNA, 948 bp, Homo Sapiens
  misc_feature (487)..(502): n is a, c, g, or t
gggagtcacagcgaagaaggcctggatttcaagccctccccacccctctcaaaggtttccgtcattccccacgacctcttctatttcccacactatgaggttcccctggctgcagttttggaggcttatgtagaagacccggaggatctaaaaaatgaagaaatggatctcgaagagccagagggctatatgccagacctggactccagggaggaggaggccgatggctctcagagcagctccagttcctcggtgccaggagagagcctccccagtgccagcgaccaggtgctgtatctcagcaggggtggtgtgggtaccacaccagcctcagaacccgctccactggccccccatgaggaccaccagcaaagggagaccaaagagaatgaccccatggacagccatcagtcccaggaatccccaaacctggaaaacatagcaaaccccctagaagaaaatgtaacgaaagaatcaatcagtagtnnnnnnnnnnnnnnnnggaaacatgtggaccacgtagaaagttcactatttgtagcaccaggaagtgttcaatcctcagatgacctagaagaagacagtagcgactacagcattccttccaggactagtcacagtgactccagcatttaccttcgacgacatactcataggtcttcggaatcggatcattttagctacgttcagttgaggaacgcagcagatctggatgacagaagaaaccgaatattaaccaggaaggccaacagctcaggagaagccatgtcactggggagccacagcccgcagagtgactccctgacacagcttgtccagcagccggatatgatgtattttattctcttcctgtggctcctggtgtactgcttgctgctcttcccacaactggatgttagcaggctctgatacgtgtgtctggataataaaaaagacaggaccctgaaa

SEQ ID NO: 11259 - DNA, 470 bp, Homo Sapiens
atggcgcgtcccctgcttaacttgaaaaaaatatgggaaagacaatgcagctttcatgcccttgcctatcaaagagtatgttgtaagaaagacaagacattgtgtgtattagagactcctgaatgatttagacaacttcaaaatacagaagaaaagcaaatgactagtaaacatgtgggaaaaaaatattacattttaagggggcaaaaaaaacccaccattctcttctccccctattaaatttgcaacaataaagggtggagggtaatctctactttcctatactgccaaagaatgtgaggaagaaatgggactctttggttatttattgatgcgactgtaaattggtacagtatttctggagggcaatttggtaaaatgcatcaaaagacttaaaaatacggacgtactttgtgctgggaactctacatctagcaatttctctttaaaaccatatcagagatgcatac

SEQ ID NO: 11260 - DNA, 485 bp, Homo Sapiens
ctgcctaggcctggagggaagcccaaggctacttggacctcaggacctggaatcttaaagggtgggtggcagaggggagcagagccatctgcactattgcataatctgagccagagtttgggaccaggacctcctgcttttccatacttaactgtggcctcagcatggggtagggctgggtgactgggtctagcccctgatcccaaatctgtttacacatcaatctgcctcactgctgttctgggccatccccatagccatgtttacatgatttgatgtgcaatagggtggggtaggggcagggaaaggactgggccagggcaggctcgggagatagattgtctcccttgcctctggcccagcagagcctaagcactgtgctatcctggaggggctttggaccacctgaaagaccaaggggatagggaggaggaggcttcagccatcagcaataaagttgatcccagggtttgctttgttttttt

SEQ ID NO: 11261 - DNA, 1231 bp, Homo Sapiens
tttgcagctcattgaaggaaagagttcacatgagactctgaatatagtggaggagaagaagcgggcagaggttgggaaagacgaaagagtaatcacagaaggaaatgaatggtaaagagatatcacctgggagtggtcctggggagattcgtaaggtggagcctgtgacacaaaaagactccacctccctgtcttctgagagcagcaacagcagcagtgagagtgaggaggaagacgtgggagagtaccgtccccaccaccgagtgaccgagggcaccatcagggaggaacaggagtatgaagaagaggtggaggaagaaccccggcgcggggagaacaaggtagtagagagggaggaagcagtgcccgaagccagtccagtcacacaagcaggtgccagtgtaatcacagtagaaacagtgatccaggaaaatgtaggtgcccaaaagatatccggagagaagagtgtacacgaaggcgcacttaagcaagacatgggagaagaagcagaggaagagccacagaaagttaacggagaggtgtcccatgttgacattgatgttttgccacaaaattattggttgtacagagccaccagtggtaaaaacagagatggtaacaatttctgatgcctcacaaaggacagaaatctccaccaaggaagtccccattgtccaaactgagaccaaaaccatcacatatgagtctccacagattgatggcggggctggtggtgattcgggcacgttactgaccgcacaaaccatcacatctgagtccgtgtcaacaacgacaaccacacacatcaccaagactgtaaaaggtggaatttctgaaacaagaattgagaaacgcattgtgatcacaggagatggagatattgatcatgaccaggcactggctcaggcgatcagggaagccagagagcagcaccctgacatgtcggtcacaagagtggtggtacacaaagaaacagagttggctgaggaaggggaagattaagtaagaaagtcattttttaaacaacactcaactttgtgaacccctgaagattttttgaccgttccaagtcttaatgccacaccactattccagcgaatttatgctacaactggtaacaatgaccagaagcctgaagaattaaaatgccaacaccaaacctttccttaccagctctggtctatattgctcccatgcatttaatatattattttgttttataaccacttct

SEQ ID NO: 11262 - DNA, 546 bp, Homo Sapiens
tggtagcgctcggcctaacacagtggaaagtggggaggccatagacccaaacaagttctttgggccaggcatggcctagtaagtacaccatgcctcgaaaataagtccagaagcactggactaaagagtgctaatgcaggaaataatacacataatttttaggtaaggataataatttatctctgctcctaatattactatcccattgtaattatttataaccctcaagccagttgatttttaatatatttgattggaaaagaactctctggtattattaagactcacacagaatcagggacagggcccccaaaggagtttgctgtaaaataggcagtagagttgtggcatgggcccaaccctgcattcaagtgtaacagcattctgtcagggtcactttgaattgtgcacataagaaaaccaatacaaaaaacaatttgtattcaatatcgtcacatttctctctggtagaaaaatcaaataccttagagattatgaagtcattaatttatgtgaaccggagtgacatactactaggtcgccaag

SEQ ID NO: 11263 - DNA, 168 bp, Homo Sapiens
gcgctcgggttaagagagtaaaaaactaacatttcttaacctaaccctttttctttctttctcacaggtaacaactatccaatagcttacctttaaaatgtcccctctattgttcctccctcagacatttttgatcactaacccgagcgcaccaggaccgagcgtgac

SEQ ID NO: 11264 - DNA, 501 bp, Homo Sapiens
gcgctcgggttaaggtatgaagatggaaagactggctaaggtagagtgaaagacaagattacacaggagaagagttcaagctacaagagaccagggtaatagaagaatcatcaccatgtgtattaagatgacaatgagttaagacaggagaggagttttgttggagaggacaatggtgagtcattaaatgagaataacttgaatggtatcagtgaggtaacagcaaccagacaaagtgggtgataaaatttgatggcattagatctacagctggagggaactgtagggaagaggaatatgttagataacatgcaaaacccataagattagcaaaacagtttttcctaaagattaaattttatatgctttcactctcaacattaggatacttcagtacaagagtttagatagtaacccaactaaagtaatactgatcgctgaatttcaagtgagctcaaaggtctccttccccctagaaacatatatagatctcttaatgat

SEQ ID NO: 11265 - DNA, 474 bp, Homo Sapiens
taggctcgggcctggttggctcgggttagcaaaaatggtgaaaaagttcaaagactccaaaagtgtattgttgatcacttgtaaaacatgcaacagaacagtgaaacatcatggtaaaagtagaagctttgtgtcaacattgaagagcaatcctgccactcctacaagtaaactcagcctgaagacaccagagagaaggactgcaaacccaaatcatgacatgtctggctcgaaaggcaagagcccagcatcggttttcagaacacctacatctggacagtcagtatctacttgctcctcaaagaacaccagcaaaacaaagaaacacttctctcaactaaaaatgttacttagtcagaatgaatcccaaaagattccaaaggtggacttcagaaatttcttatcttctctgaagggtggacttttaaaataaccaatgcctgatgtcaattctgaaactaaagttggtaaaac

SEQ ID NO: 11266 - DNA, 398 bp, Homo Sapiens
tggtagcgctcgggttaaccagacgtgccaccagcctggagctgcccatggccatgcgttttcgtcaccttaagaagacgtccccagaagctgtgggtgtctacatgatcagccatccacgggcgaggcctgttctgtaagcgcaacatcgacgcgggggagatggtcatcgagtactctggcattgtcatccgctcggtgttgactgacaagcgggagaagttctacgatgggaagggcatcgggtgctatatgttccgcatggatgactttgatgtagtggacgccacgatgcatggcaatgccgcccgcttcatcaaccactcctgtgagcccaactgcttctctcgggtcatccacgtggagggccagaaacacattgttatcttcgccctgcg

SEQ ID NO: 11267 - DNA, 427 bp, Homo Sapiens
ggaccgcgtttggcgcgccgacgcgcgtcggcgcgctcgacgacgacatccgaggctgtgcggtgctggacctggcctccctgcagtgggtggccatgcagtgcgacacacagctggactggatctgcaagatccccagaggtacggacgtgcgggagcccgacgacagccctcaaggccgacgggaatggctgcgcttccaggaggccgagtacaagttctttgagcaccactccacgtgggcgcaggcgcagcgcatctgcacgtggttccaggccgagctgacctccgtgcacagccaggcggagctagacttcctgagccacaacttgcagaagttctcccgggcccaggagcagcactggtggatcggcctgcacacctctgagagcgtcgagcgcgccaacgcgggaccgagcctgactat

SEQ ID NO: 11268 - DNA, 380 bp, Homo Sapiens
cgcctttgtgctaataaatcatcacaaaaattaggtgacatggcttatgataattctttgcctagtatgcatccatttctagctgcccacggacctgcatttcacaaaggctacaagcatagcacaattaacattgtggatatttatccaatgatgtgccacatcctgggattaaaaccacatcccaataatgggacctttggtcatactaagtgcttgttagttgaccagtggtgcattaatctcccagaagccatcgcgattgttatcggctcactcttggtgttaaccatgctaacatgcctcataataatcatgcagaatagactttctgtacctcgtccattttctcgacttcagctacagaaaatgaggcccca

SEQ ID NO: 11269 - DNA, 238 bp, Homo Sapiens
aagaacttgaaacttgtaaactgagatgtctgtagcttttttgcccatctgtagtgtatgtgaagatttcaaaacctgagagcactttttctttgtttagaattatgagaaaggcactagatgactttaggatttgcatttttccctttattgcctcatttcttgtgacgccttgttggggagggaaatctgtttattttttcctacaaataaaaagctaagattctatatcgcaaaa

SEQ ID NO: 11270 - DNA, 414 bp, Homo Sapiens
  misc_feature (36)..(36): n is a, c, g, or t
  misc_feature (42)..(42): n is a, c, g, or t
cgtcgaccccgcgccgtgccgcgccccgcttctcgntgcgcntgggccccgggcccgccggtggctttctcagtaacctcttccgaaggacctgacggctgggcccagagggctgcccttgcccacttaggggctcactttcctcttcaggccaatggagcgacagggcccagattgtcttccaaaagaagctgatgccctccccgccccaggatgctgggcaagggctcatcgggagcaggggctcatccggagcaggggccagctttgtggggcaggagctccaggtgggtggcaggggcaggtgaacagagctattttccgaattaatataggtctatcttttctagggcagggatggggctgggtatttatgtatcaagatcggacagagtaatatataaatcactccaa

SEQ ID NO: 11271 - DNA, 375 bp, Homo Sapiens
cacttaataaatgataacctttattgttactattaattattaaatgacactaaaacatggcagaatgccccagcaaaacaaaagtcaaccaaaaaactaacaaccctgcattctaggtaattaagggtgctcgattttcttaattaattactatgtgccagaacattgtaagtactttgcatatattacctcactgaatcctcacaataagccttatcttcaccatttatctatcatttcagagaagaaacttcaacctacctcatttttaatctaaatatttcttccattcagtatgttttccaatcaatcacttgcttcattcccaacacttttctttttcaaaaccgtcctaaaaatcaatacccattttag

SEQ ID NO: 11272 - DNA, 622 bp, Homo Sapiens
  misc_feature (25)..(25): n is a, c, g, or t
tcggcaaggaggatattcggcaggntctagagcaaagagtatctgaggtcctgatttccggggagctacacatggaggacccagacaagcctctcctaagcagcctttttaatgctgctggggtcttggtagaagcgcgtgcaaaagccattctggacttcctggatgccctgctagagctgtctgaagagcagcagtttgtggctgaggccctggagaaggggacccttcctctgttgaaggaccaggtgaaatctgtcatggagcagaactgggatgagctggccagcagtcctcctgacatggactatgaccctgaggcacgaattctctgtgcgctgtatgttgttgtctctatcctgctggagctggctgaggggcctacctctgtctcttcctaactacaaaagccctttctccccacaagcctctgggttttccctttaccagtctgtcctcactgccatcgccactaccatcctgtcaccagtgggacctctttaaaacaagcagccaaccattctttgatgtatcccattcgctccatgttaacatccaaaaccagcctggatttcatacatggacttctgattaaaagtggcaggttgtgcatgttaaaaaa

SEQ ID NO: 11273 - DNA, 469 bp, Homo Sapiens
tatagctccttacgctgggaaagctggttttttaaagaaataataataaaatatttaatcttattaagtgttcatttaaaatgcgtaatgctttggaaataatgggtaacagatagcgagaggatatgtttataaagtgagcatgttggtcccatttataaatatatgtatgatttataagcttttttaaaacaaagctcaaattgttggtatttttctaaaatgtgcacagctgtattttacatgaaggctctttctaatgggttgttatactgtactcaacattttggacagcacatgaagtctgccaatgtacttaataaaacatgactttgtttatttaaagtttcttgctgtgaaaaagaactccctacctgtgagttcctttatttataattcttgaaaccaaaatgtataatgtacagttttcacaactgtatctgctctaataaaaaaaagttggttatta

SEQ ID NO: 11274 - DNA, 882 bp, Homo Sapiens
gtccatattcatatatttatagagctagtatgtcaaaaactttacacagtgacaccattagcccctggcccacccctctccttcccacttctgtgttcgaccctacttagaccctcgcacacaaatggttgatcaaaggcagtggccacctcagactagtgcaatgccagtcctgcaggggagaggcctggcaaggtagagggtgagtctcccacagatccaagacaggtcccagtaccttgtgcccaccctagcgaggacataaggggccatcagcgtctccaagacttagctcagtgtaacgagcaagctgcccaccatgtgtccctgccatgccaacttatataggcatgaccctgcgctccagcagtagacggcagtgcttgatgcggcatcggcgtggtcctcgaggccgcagaagcacgtcgtgacgtgcgttggcagggtagccggacgtacgctgctaggcgtgcgcattgcttctcacagtacagctcgtcacccacccatgaagtgcccgcgcagtcttcacggttcaggcccacagtcggcacacggctgtagcacccggggtggcggtaccggccctcctggatgcgcacaggcctggttcgcgatgctggtactgcacttctcacaagtgtggagcttgggaggggtggccaggtccctggtaggcgggcacggatgactgggcggctcacctgagctggggcacgaatgctaggcggtgccagcctctctcctcagcctccaggggtttccttgcagtgagccgaacaggagctggacctgtcgaggcgggccgcccgtccctcgacgactttcctgcggcctcctcgggaccttccgaggtcctcgtccacggacgagcgcttcccc

SEQ ID NO: 11275 - DNA, 554 bp, Homo Sapiens
  misc_feature (54)..(54): n is a, c, g, or t
cagccagcagtaaagcaaaacttggtgtacttaataacacagctgagcctgganaattcccactactgggtaatgctggattaagtagcctgacggaaggggtcttggatctttttgcagtgaaggctgtatacatgggccaccctggcattgatatacacactgtgtgtgttcagaacaaactgggtagcatgttcctgtcagagactggtgtgacattgctctatgggcttcagaccacagacaacagattattgcacttcgtggcaccaaagcacacagctaaaatgctcttcagcggattattggaactcactagagctgtgagaaagatgaggaaattccctgaccaaagacagcagtggctgcggaaacagtacgtcagcctttatcaggaggatggacggtatgaaggcccaactttggctcacgctgtggagttgtttggtggcagacggtggagtgctcgaaaccccagccccggaacatcagcaaagaatgctgagaagcccaatatgcagagaaacaataccctgggcataagcactaccaag

SEQ ID NO: 11276 - DNA, 521 bp, Homo Sapiens
aatttacaaacaaagtgtgggtatatttggcaggtttgaggcaagcagaaaggagggtttgggtactctataaaaaaagatctgaaattcaaacatctgataaggccacaatgaagagatttccagcagtgggtgttgcaggatgctggcacccaaatcgccgcacgcttgcaaaggtgctatgcaaggtgaggaggcaggtgaggcaggcagtgcctctcacaggtccatgtctgggcctcctgaggatgtcttcagcggcactgagtcaaatccatcaggagtcctcttggaggtaaatgatttgatcttcccaaagagtgacttcttgctggtaaagatgaggtcgtcctctacatcctcgccttccatgatggcgcagctgtcagctgctggcaggtcacagtccttgagagtagcattcatcaccagcttggagtacttgtactctagtttttgattctttttccaaaagtagcaggtcaagacggtgagcaggatggcagtacaggtgcctgcag

SEQ ID NO: 11277 - DNA, 210 bp, Homo Sapiens
ctggcaatccacgaatgggagaaaatatttgcaaataatatatctgttaagaaacctgtatctagaacaaagaactattacaactcaataatagacaagtaatccatattaaaatgggcaatgtatttgagttaggcatttctccagtgtgcccaataagcacatgataaagatgctcaacatctttatcattagggaaacaaaactact

SEQ ID NO: 11278 - DNA, 442 bp, Homo Sapiens
agttcggcggagactctctcttccccccgctgctctctgcggggctcccgagccccagcccgggctgtccgcctcttggggagtcggggaatcgcttccgaatatcggggcatctcgaagggaccccggggagaggaggggtggggggaagagagagttgcagagaggcggagaactttaccctttgtgggtagtttcccgtcacctcccactcctcaaaagcaccccggccagaacgccaagtctggctgattttcaggaggtgctactagatgagaagagagggttctcctattatttatttttaaggttgagaagggctcatcggtgagggaactcagcctcaaacaatgactcgcaggctggtggatcaggtcctcgtttcttactcttttggggaagtagggatgttttagtctctccttgccctgctagatttccc

SEQ ID NO: 11279 - DNA, 401 bp, Homo Sapiens
  misc_feature (257)..(311): n is a, c, g, or t
agtcaggagactctcttattgtgcattatgcttactaccctctgccttattcactctatgacagccacccggtgcttccttggtcttccatagtctgacctcagactatcttcctggcaattgcatcttcttctacggatactcatattgttagctcctttacttccttcaggtgtttattccaactttccttctagtgatgctcctcctgagttcagtcattcccctcaatacttactctccccacttccctgcannnnnnnnnnnnnnnnnnnnnnnnnnnnnnnnnnnnnnnnnnnnnnnnnnnnnnncttatttagcaatatctaacatggcatgtcttttagccatttatctataatgtctgactctccccgtgggagagtctccgtagaactgga

SEQ ID NO: 11280 - DNA, 354 bp, Homo Sapiens
agttcgacggagactctcgtactgagcaggattaccatggaggatcgaaacactgcaaggatagactatttgaagatgacaatgatgtgaacatggagacaaaggcagaggtttaaatgattatagaggaaatttgcttgataatttattatatgaatatagagagaaatcacaaaaatgagatgatgaatattggaaataataagcacagacgaactgattagaaaacaaatagaactgacaaaatcaaaaagctggatcttttagagagatgctgctcagtaaggtggccacaacccacgtgaaaattaaattaaaaattcattttctcagtcgcacgagccaagtttccac

SEQ ID NO: 11281 - DNA, 362 bp, Homo Sapiens
agttcaggagactctcacatctgttcacttaactgcttttccaaagaatctgaacgctatgaaaatgagaaaatcttcataatttaactgatttggtgacaaagcgtaaagtgaacagatgtgagagtatttgtaattgttaattttacgtagtaggaaatagtaatttgttcaattagggttgctacttcatatccttttagtgtttcaatataggtgtaccacactgcttttcctttaaaaatgttctcagaatttaacattctgcaacactcttgagccctgtgattttggagaatggaacctatagtagatgctcagcaaattctacatgatgcaaattaaaatcaaggatatgagta

SEQ ID NO: 11282 - DNA, 399 bp, Homo Sapiens
agagcaggagacacagcgggcagtacaagagtgatgggcatctcaaatgcccaaggagtgccaagccccaagatgctgttgtccccgagtccagcagctgcgcaccatccgcgaatggctggagtcctggggaccgcatggggctgagccaggcccctcctgtgtcttggaatggagagcgggagtctgatgtggtccaggaactgctcaaatactcatctgataaagcttacgggagaaaagttctgacctgggatggcaagatgtcggcggtcagtcaggatgctattgaagacagcagacaggcccggactgagaccgtggttgatgactgggacgaagagtttgaccgagggaaggaaaagaaaattaaaaaatttaagagagtctccagtcgaa

SEQ ID NO: 11283 - DNA, 513 bp, Homo Sapiens
agtcgggagactctctatctatctgaaagtcctttccaccatgccttcaaattctatccagaaccaaccacttctccccatctccaccgtaggctacctccagggtccaagccgtcatcatctctcacttggactattccaacagccccctgactggtccatgctgctgatcttacctccctgcaactgattcttaatccagtgggccaggtgactcttcacaactaagacagcagcatcccatgcctctcctgcaaacccttcaaatggcctgttgctctcactgaagccaaagtctttctagaggccttcgagacttgacacaatccagccccccaacccgttggtcctcactaccacctaactcctctctcactgccaggcagacatcctggcctccttgccaggaaagcaccaatgcctttgtactctgctagtgccctctacacaagaatgctgctctccagacatgcacagctcagcctcatgcctggcagtgagagtctcgcataa

SEQ ID NO: 11284 - DNA, 442 bp, Homo Sapiens
cctggtcttgctcaggtctactgcctgggctgtgggcagccccaggatgagggagacatggtgaacactgtgtcctgctagtacccccggctgccaacggtctctactgctctcacttgcttccgcctcctggtacatacctgctccgtgtgtgcatctcccctctcctaccacggggacctggacctggagctggactccagcgcatgaggagggccctcagctatcgctggctgcagctcaaaggaaggaccctgagcaggcatggttattgcagcaacagctccaagaagtgctcggcaggagcctctcaatggagtccacttccgagtccagtgacctggatcaggagaaggggcctcagcagaggaagcacgggcagcagcccttacctgaagcccatcagcctgtcagcattctcaccagacctgagcaagcccgg

SEQ ID NO: 11285 - DNA, 226 bp, Homo Sapiens
tgcgtctcaactcctggactcaagtgatctgcccgtctcagcctcccaacgtgctgtgattcaggcgtgagccaccacgcccagccaacgataactttttaaggaatactcaggagccagagctcagtgtgaggggcaaggaaagagaaatgtctgtggtagagaaactctaccgggagattcctgaggccccgccagacctgagcaagccagtgcgcggctgagc

SEQ ID NO: 11286 - DNA, 608 bp, Homo Sapiens
ggattggggatgaagttttgaaaatgtgtcgctctttgtataacaccaagcagatgctgcctgcagagggtgtgaaggagctgtgtctgctgctgcttaaccagtccctcctgcttccatctctgaaacttctcctcgagagccgagatgagcatctgcacgagatggcactggagcaaatcacggcagtcactacggtgaatgattccaattgtgaccaagaacttctttccctgctcctggatgccaagctgctggtgaagtgtgtctccactcccttctatccacgtattgttgaccacctcttggctagcctccagcaagggcgctgggatgcagaggagctgggcagacacctgcgggaggccggccatgaagccgaagccgggtctctccttctggccgtgagggggactcaccaggccttcagaaccttcagtacagccctccgcgcagcacagcactgggtgtgagggccacctgtggccctgctccttagcagaaaaagcatctggagttgaatgctgttcccagaagcaacatgtgtatctgccgattgttctccatggttccaacaaattgcaaataaaactgtatggaaacgaaaa

SEQ ID NO: 11287 - DNA, 477 bp, Homo Sapiens
cctgagaagggagtatggcagggctgggatgcggctactgagagtgggagagtgggagacagaggaaggaagatggagattggaagtgagcaaatgtgaaaaattcctctttgaacctggcagatgcagctaggctctgcagtgctgtttggagactgtgagagggagtgtgtgtgttgacacatgtggatcaggcccaggaagggcacaggggctgagcactacagaagtcacatgggttctcagggtatgccaggggcagaaacagtaccggctctctgtcactcaccttgagagtagagcagaccctgttctgctctgggctgtgaaggggtggagcaggcagtggccagctttgcccttcctgctgtctctgtttctagctccatggttggcctggtgggggtggagttccctcccaaacaccagaccacacagtcctccaaaaataaacattttatatagccaaaaaaaggg

SEQ ID NO: 11288 - DNA, 428 bp, Homo Sapiens
ctagtcccagagccagtgtttattagcaagatggaacccaaaggcggctgtggcctgggcagcagaaggccaccaggagcccccacccatctacccaactgccccccagagctaattacatccacacccatcccctgaagtggtggacataagggagccctggggagcctctaccggccccaggcctctaccacggaccccctcccctcagagctggggcctcccgtcagctctgcctgggcctggcccctctgctatgctcccagcctctgagtcaaagtggcacagggaaagctaaggaggtagaagtggggtggccctgccctggccaggcggggaggggagaaggggctgaaggggctgtcccacccaggcaggatgcctcttctcctatccccaataaatagagaataaatacccaggaaggg

SEQ ID NO: 11289 - DNA, 529 bp, Homo Sapiens
  misc_feature (44)..(56): n is a, c, g, or t
  misc_feature (59)..(320): n is a, c, g, or t
gcgagagaggattagggtctgcgggaggtgacagctgtttctcnnnnnnnnnnnnnggnnnnnnnnnnnnnnnnnnnnnnnnnnnnnnnnnnnnnnnnnnnnnnnnnnnnnnnnnnnnnnnnnnnnnnnnnnnnnnnnnnnnnnnnnnnnnnnnnnnnnnnnnnnnnnnnnnnnnnnnnnnnnnnnnnnnnnnnnnnnnnnnnnnnnnnnnnnnnnnnnnnnnnnnnnnnnnnnnnnnnnnnnnnnnnnnnnnnnnnnnnnnnnnnnnnnnnnnnnnnnnnnnnnnnnnnnnnnnnnnnnnnnnnnnnnnnnnnnnnnnngagtgagccaccgggcccagcctgttttctcttttctcctttccctggggaagagggttggccggacagaccctggtgtggctgggatgggggactgctgcagagaggtaacgggcccctgagatagacatgggacagcccgaaaaggtgggactgagaggggacacttgtggccagcagtgtatctctgacacagtctcaccccgcag

SEQ ID NO: 11290 - DNA, 174 bp, Homo Sapiens
cttgtgtattgaaatgtaaaatcatgatgtttgttatgactgctgatgcgattgtttttgtaaattttattgtggcatatacagtattgtcatacagttgaagagaaacaatgtttcctaatgtaagtgctctgaaaatgttgacactgtatatatatatatgaggatagtttg

SEQ ID NO: 11291 - DNA, 525 bp, Homo Sapiens
tagggagaagttaatgaccattgttaaagtgcttttttagaaaatgttgtgctgtatgttcttgatttgacataaatgaatagactttggcaagggaggaaataagttaaaaggcagcttacaagagcctattccctataaagggtataattttacacagtactcaaagcttgttatcttttctgaccattttagtacagaattagtacttggtggttactaacatcaacttgtgacatctagaactagggctcttagtgtttagtgggccacttctctgatgtcagatgcatgcagacctgtactccacatgcaacccaacagcagtgcagtgtgataactgagcggtcgcatggcagaggacatccccctcagagtgggcacaagtgccctctagggcagccaggggaatactattgttcgatacctgggatttgactttgtcaaacagctctttgtgcccctatctttgttttgtcaaatgtagatcagttaataaacatgagtagcttgaattttcaaaaa

SEQ ID NO: 11292 - DNA, 745 bp, Homo Sapiens
  misc_feature (663)..(673): n is a, c, g, or t
atcattccagcgtaatttagagctgagctgagaagataatatatttttattgtcaatgacattaacagatatgcactgattcttttatacctacaatttacttaatgttccttttattaaaacgcgtggttcatgagcaactacagactgaatccagattattacctgttgctttcagtattttcgtgatggcttttaatcttatgaaatcatcttgagatcattcatggtcaagccatgaaaactcccatcttcaagcctgcctgctaaagcttctttgccttcctgattgtgattatggtaacaatttatatcagacagttgtactttttgataacttagggaaaacagaaatgacttgaacaagggattgcctgcctcactgcattgcagagatacaatttttgtaaagaacacaaatagcagttgtgaatattaaggtgtgattatctttccctgtccatgtgcttattgaaagaagatagtgaacaaatgattatattgaggatttttttaatttataagatctaatgtgaaatccacacttggaactttttagatctgtctgttgcttgtttaatatatttcttttatgacattacttaaagtttaaaagggttttctatccactgtcaatttcaattggataacattttgtcaagnnnnnnnnnnncctgattatttgatgctagctggaattcaagaaatggcattgaccttattcaaataaagaaatattttagta

SEQ ID NO: 11293 - DNA, 386 bp, Homo Sapiens
ggaattatgccactgccccctgaccaaagctaggtgatcctctgaggctgaaggctttgggttcactctccacgctccacaggacactgctggcagacagccctcaccatagcatcctgccagatacaaagcaaagcacctggaccatgcagtgggggttcctgttcaacactctgaagccagggactctgcatttgtagtaagagcaacactgatagctaccactttttggaagctacacacacactgtctcatcagaacctcctggcagccccatttcacagatgaacctgctgagaccagagaggtctcatgacataaccgggcatatagcacagagtggcagagtcgggctcagtgcaggatgctctgatgctacctatgca

SEQ ID NO: 11294 - DNA, 1169 bp, Homo Sapiens
attcccgggatgcggcagcggttcctgtcaagggggcagcaggtccagagctgctggtgctcccgttccccagaccctacccctatccccagtggagccggagtgcgggcgcgccccaccaccgccctcaccatggtgctgttggcagcagcggtctgcacaaaagcaggaaaggctattgtttctcgacagtttgtggaaatgacccgaactcggattgagggcttattagcagcttttccaaagctcatgaacactggaaaacaacatacgtttgttgaaacagagagtgtaagatatgtctaccagcctatggagaaactgtatatggtactgatcactaccaaaaacagcaacattttagaagatttggagaccctaaggctcttctcaagagtgatccctgaatattgccgagccttagaagagaatgaaatatctgagcactgttttgatttgatttttgcttttgatgaaattgtcgcactgggataccgggagaatgttaacttggcacagatcagaaccttcacagaaatggattctcatgaggagaaggtgttcagagccgtcagagagactcaagaacgtgaagctaaggctgagatgcgtcgtaaagcaaaggaattacaacaggcccgaagagatgcagagagacagggcaaaaaagcaccaggatttggcgggatttggcagctctgcagtatctggaggcagcacagctgccatgatcacagagaccatcattgaaactgataaacccaaaagtgggacctgcacccagccagggccttcagggccccagcaaaggctttaaaacttgggagcccaagggaaagggagtagataactttgggggacaaattaaaattctgaagggggaaaaccatcatggccctcttagtatgggcaagcggtacttctgaaggcaaaccaaatggcgtggctcccccccattaaatatggagaaaggggtacttattgaaagattgaagaaaaagataaccccttaaccctgtggggccaagaccggaggggtttaccccaaatatgtgggggtttccagttggggaagaaatacatgggctttaagggatctctcaaaatggaacaagaatatggggcccgacaaattcgccccctccccagtggggggcgaaaaaaatgaa

SEQ ID NO: 11295 - DNA, 470 bp, Homo Sapiens
cacatgctgcacgcgcatctcgcccccaggggcactgcctggaagattcaggagcctgggcggccttcgcttactctcacctgcttctgagttgcccaggaggccactggcagatgtcccggcgaagagaagagacacattgttggaagaagcagcccatgacagctccccttcctgggactcgccctcatcctcttcctgctccccttcctggggtgcagcctaaaaggacctatgtcctcacaccattgaaaccactagttctgtccccccaggagacctggttgtgtgtgtgtgagtggttgaccttcctccatcccctggtccttcccttcccttcccgaggcacagagagacagggcaggatccacgtgcccattgtggaggcagagaaaagagaaagtgttttatatacggtacttatttaatatccctttttaattagaaattaaaacagttaatttgaaaaa

SEQ ID NO: 11296 - DNA, 909 bp, Homo Sapiens
gcgagtattggtggaacgccatcctggagggagaagagcccatcgacattgacaagatcaacaaggagcgctccatggccaccgtggatgaggaggaacaggcggtgttggacaggcttacctttgactaccaccagaagctgcagggcaagccacagagccatgagctgaaagtccatgagatgctgaagaaggggtgggatgctgaaggttctcccttccgaggccagcgattcgaccctgccatgttcaacatctccccgggggctgtgcagttttaatgaccagaaggaaaggaaaccctcgccggtggggaggcagagccttatcctcggctgcccttcttggctccctgcattccagggacttgctcgtcttgtttacccctagccatcctttctttcaagggtgaaccaggccttccaccctgaccttgcatctccagactgttccagagaaggtgcggggccagctgctatgtggtggccgctgtggctgacactgagtgaaggtgtacgaaatgcaaggagaggatatcccagcaaattgggatcacatgcttatagtctccacagcaaccagccactgctaggcagcatgtctttccataccactgactctctgcttgcatgaagatatatgacgctactctgctttgcaatgtcatacatgggtagggactgtagaagttgatagcaggaatactcaggcgaaacgctgaaagtcaattcgaaagtgatcgtgaagaatcatgatgagtattgcttgacgtgcaagacaggcaatggtatgcgcctggacgcttgctcttgggaaagatccaaggcccattgcaactactattggagaagcttacacggtggtctacttagcgccatccccttataagtgtagaatagacatgcctcg

SEQ ID NO: 11297 - DNA, 470 bp, Homo Sapiens
  misc_feature (303)..(423): n is a, c, g, or t
cagatgtagcctggtgccttgagcagttcccgggtctcagctgccacacatctcatagccggtgatgctgggggaagcttacgcagtcacagtactggcttcttcctctttttctttccatacaagtggcttagggatggggtagagtagttgacttatttggatgaaaaccactatcttctgtcagaaactcaaaaggaatcattgctggcatggtaacctaaagaaaaacaaccagacaagtgcccaacgacacttaaaaaggtgatttattatcttgccaagtttaggctgggcatggtnnnnnnnnnnnnnnnnnnnnnnnnnnnnnnnnnnnnnnnnnnnnnnnnnnnnnnnnnnnnnnnnnnnnnnnnnnnnnnnnnnnnnnnnnnnnnnnnnnnnnnnnnnnnnnnnnnnnnnnnnattagccggcatgatggtgtgagcctgtagtcccactttctcagaca

SEQ ID NO: 11298 - DNA, 446 bp, Homo Sapiens
atggggcctccactgctcaggtgcaggtgtggccaggatggaggccacggtcctgggcttggctgtggcccagccaccctggctggtgcctttcatcttgcggaccctgagtgctgtctcttgtgtcctctgagtcctaggaagtgaccgcagtgggagcaggaccgtctgagtcctaggaagtgaccgcactgggagcaggaccgtctgagtcctaggaagtgaccgcactgggagcaggaccgtctgagtcctaggaagtgaccgcagtgggagcaggaccgtctgagtcctaggaagtgaccgcactgggagcaggaccgtctgagtcctaggaagtgaccgcactgggagcaggaccgtctgagtcctaggaagtgaccgcagtgggagcaggaccgtctgagtcctaggaagtgaccgcagctgagcgcaagaccgggcgg

SEQ ID NO: 11299 - DNA, 145 bp, Homo Sapiens
tcccggcctcgccgtgagtaccgctggagtgaggagtagccgctggagtgaggagtagccactggagtgagtagccgctggagtgaggagtagccgctggagtgagtagccgctggagtgaggagtagccgctggagtgagtagc

SEQ ID NO: 11300 - DNA, 247 bp, Homo Sapiens
gctcggcccccgtgcttgctcaggtctcctgctcccgctcttacccatagagttgttctccacatcagagagatccttctaaaacctgtcacttctttgcttaaaaatcctccatgcctttccactgcccttaaagcaaggtcccatgtggccctacaagacctggcccctggtgacgtctcagacctgattcctaccactggcttactctactctggccatactggccagacctgagcaagccagg

SEQ ID NO: 11301 - DNA, 450 bp, Homo Sapiens
gctgtctagaggatcccttggtcgctgtagcggggggtggaggctgcgacggtggtgacggtgggtctgggggcagctggtcgggtggagggggcaggcaggagaggtccacgggctcaccccgtgctcagtgacctccaagacagcatcaaagctcttagccacgcggataggtgtctagcggcagcagtggtatctccctgctgcttggcgtggagggcagccagcttgtagtcgcgctggcggctctgcaactgggccagagggccagggctgcagggacctgggggcatctggggcttagccaagcctggagatgaggctggggcggtggcagaaggtccctccagggtgaccctgggctctggggctgacgcgattctaggggccggctgggtgggtgcagggctgtaggtaggcgtggacgccgggccttttcctatggccact

SEQ ID NO: 11302 - DNA, 407 bp, Homo Sapiens
tcaggtttaagagctcaggtctcccatttgacaagatatccatcatcctcgctgtctgaacaggtttcaagctgtggttatccaatccctcattcttgatgacacacaccaggctgaatggtctttagtagttcccctcaagccgccaagcgctctgagacaggtttactagctttggtgagatgctgacactcctcacatgcacgtgcccctcccaactactcaagtgagttcgtggcaaatctctcatctgatctgcataaacggattatatcttaggcggtgccattgtctgcattttacaaataaggaaactgagcctcagggaggtgaagtcatttgcccaaaatcacagagccaggaaacgagagagccaagatccagaccccgcaagatccagaccccac

SEQ ID NO: 11303 - DNA, 406 bp, Homo Sapiens
ggggctcctagcggagtcatccagctaccactctccagctgctcccgctaccgatcctgctatgactgcatcttggcccgagacccctactgtggctgggaccctggcacccatgcctgcgcagcagccaccaccatagccaacaggacagcactgatacaggacatagagagaggaaatcgaggctgtgagagcagcagggatacaggtaagtgactcatatgagtgtgggtctagctacgcagactgtcctctttgccatttactgccatgtgtacgtatatgtttgtatctgagtggctgtggctatgtacatttggtaaggatgactcaaacacagagcctggcacagagtaagtgctcaacaaacatttactgcccaaatgaattataaactagttttccg

SEQ ID NO: 11304 - DNA, 440 bp, Homo Sapiens
  misc_feature (225)..(268): n is a, c, g, or t
cctggcttgctcaggtctgtgtccgggtccccctgctggggaggagccggccatctctgaggcagcgcctgaagctggcgcccccacttcagccagtggcctcaatggccaccccaccctgtcagggggtggtgaccaaagggaggcccagaccttggacagccagatccaggagacaagcatctaatgatgacattctggtctcgtcttccgtctcccccgtgnnnnnnnnnnnnnnnnnnnnnnnnnnnnnnnnnnnnnnnnnnnnatgtcactgcagattgagacctacaggctgacgttccgggcaaatgccagggcccgcaccgaccacggggccgacattgtctcccgccccccacacttccctggcggccccaactcgggctcccgggtccttggccccctttcccgggctgtccactagaccagtgagcgct

SEQ ID NO: 11305 - DNA, 941 bp, Homo Sapiens
agactgccatttcccctccagaaggccagtgttcatcatcgatagggctagagaccatcccggagtccccatgtttcaggactcccgaatcttcacatagtccatctttaagaagggatctcctggcagctaagagggtgaagctaatcgttctacaaagtagtgcctaactgttgataagatggcagtgtaggaagctgtgtgttgggtcggattccccttttcatgagccattttctgtggtaggttccacggacatggacaccatggcctcatggaagcatgaacagctccaacacagggtgaagcttgtggtgtccaccttcttccactgcaggctaaattgctcaatccttcctctgtgcagtccgtttcttccagaagaggcatgatattgttccttcaggacagaggcactgtatattctattccttctattatttgcctccaatattcagtccatgtgaaagttcattaccagccttgggtgtttgaatgcagaacatcctgagatgttaaccatgggctgttttccacggggctagaacccctcttcacgtcactgctcacctacagctcaatcacctgtgcatctcttttggagaaattgtggtttcgccttggggctctcttctttagcgggatggtgtcactgaggcccccaggcgtgcttttcaggtcggaagagtcgtcgtcaaataagtgcctcctgatcatgcagatcttcagggccaggaagccagcagatatggcgacacccacagcagtcccgatgagggcgtacttgaaatcaatttcagccccaggggtcttgcctgttgccagcacttgagctcctcctacatccaggaggaagaggatcctcagcatgctgacccccaagttcatgctggcgctctgctcttggctccatcttacgacgctgggacctgtacagcctg

SEQ ID NO: 11306 - DNA, 406 bp, Homo Sapiens
cctggcttgctcaggtctgatgaagaaagcagcttccaagggattgcatcaggcagtcaatggcctgggatggtattaccacaaattcaagaaaaattacgccaaagcagcaaagtactggttaaaagcagaagaaatggggaacccagatgcgtcatacaatcttggagtcctgcatttggatggcatcttccctggagttcctggaaggaatcaaactttagctggtgaatatttccataaggctgcgcaaggtggacacatggaagggaccttgtggtgttctctctactatatcacaggcaacctggagacattccctagagatcctgagaaagctgttgtatgggcaaaacatgtagctgagaaaaatggctacttgggccgactgtcatctaagcggggg

SEQ ID NO: 11307 - DNA, 440 bp, Homo Sapiens
acggctatgtagtggtccacgatgaggcgcagcagcctgttgagcagagtcaagtcgatcttctctatacatcttctcaaagcgggattccagcatgacattgcactcgccttcactcgtctcccacacgtcctgcaggttattgatgccttgacaccacttgtaaacaagcagcggaggtggtgctgtgtctgcaggcttaatccaggatgggaacaggcggcgcttgtcggcttcataccacaggtactggtccaggtaagcatcagttatcttctccaggggctcaacatcatatactggaacgaggtggctatacagatccatgaactcaatgcccacctctttgaaggctctctgtgtgaggaggtgacgcttgatgcgggacagcgcctcgtgggggttatcgtaggcctgctcgatcagacctagctcctccc

SEQ ID NO: 11308 - DNA, 431 bp, Homo Sapiens
ctgagatgacagtcggcaatagggagggtaggtgagcagtggagctgtggtgcacaactttatgggacatactggatgggcagcactcagccttcgaggccctgtaagagggaagggaagagctaggaggctcctgcatggatcttatagggtatacctaagacactggcagggccatcagtactggacttgaacaagaacatgataaagctagccaagatacagttaacagaatctggcactgattagatgtgaaaggcaagaaaaagagaggcactgaaactagttctgagtttgagagaaaagggagatagtggtgtggtactggcagcactcaaagtacacacacaatagggtccgaatggaatcacaaacacatagccaaagctagcagtacatggctctctccccatggacctggatgtcctgat

SEQ ID NO: 11309 - DNA, 626 bp, Homo Sapiens
tctaagaggatccccgtcttatatgacagtcggccaaatacctactagaaatgaaaagcttaatcctacccccagaacatatcctgaagagaggagacagtgaagcaatagcatatgcattctttcatcttgcacactggaagagagtggaaggggctttgaatcttttgcattgtacgtgggaaggcacttttcggatgatcccttatcccttggaaaaggggcacctattttatccttacccaatctgtacagaaacagcagaccgagagctgcttccatctttccatgaagtctcagtttacccaaagaaggagcttcccttctttattctctttactgctggattatgttccttcacagccatgctggccctcctgacacatcagttcccggaacttatgggggtcttcgcaaaagctatgattgacatgttctgagcgtcagagttcagggactgggatagcaagagtattatcatgactctagaagatgacatggaaaccctcccccacttctatcacaacatatacctatgagatgtaataagaattcgtgctcggacacccgattctgttgcttgttcttgttcccggacttcctccaaccatccccttttcgggctt

SEQ ID NO: 11310 - DNA, 342 bp, Homo Sapiens
  misc_feature (116)..(116): n is a, c, g, or t
cataagaaggatgatctaagaaaattggaagccatatggaggggaggctttcagaattcagcgtctcctcctggttgaaagtcctgctgggaatggcaggctctgggtaaccaccnctgacacatggcactataatgtaaaaaacaacacataggccttcccaagacatgcaccctcatgggattccagaccccctgtatgatgcttagtagtagtggcctacaaatctgtgggtgaacagaacaggagacttctggactgacagcccctgtcacaagggggcattatctgagatattggccagggcatatcgtgtccctggtcttttgaaactccatttgt

SEQ ID NO: 11311 - DNA, 666 bp, Homo Sapiens
tggacgcagcttctcccgtctggtttcatgggctggagggctcccctgccccaccccctttctcgcccacggttgggggtctgcctggaaatacgctgaccgtgccttggccttctatgctgtacgggacggcaagatgagcctcctgcggaggctgaaggcctcccggccccgccggggtggcatcccggcctcccccattgaccccttccagagccgcctggacagtcactttgcggggctcttcacccacagactcaagcctgccttcttcctggagagtgtggacgcccacttgcagatcgggcccctcaagaagtcctgcatatccgtgctgaagaggaggtgatgccgggcacgggcgctcctgctgccgtctctgctccaggaagctgcctcctctgggccctctccttcgtctgggaaggcaccagcatgagtcccacacacccagccttctcatttctagaggcttccacctttttatacactcagccttccctctcccaggcaggaggacccccagaccctgttcccctgcagacctcacttctgggagacagagctacagctgggacagctccaagctaccctaacccctcctttcccaggtttctagaatagtgtctggcatgtagtagatgctcaataaacacttgttgaatg

SEQ ID NO: 11312 - DNA, 864 bp, Homo Sapiens
gtggtatatgaagtattgcgagaagatgagttttccccactaaagaatgctgatagtcagaatgggaaagacaaccctactactgcaaggcatgctttgatgtcccttcatcattgctgggtcctcaatgcagggggccatttcatagatgaaaatggctctcgccttccagcaattccccgcagtgctacaaatgggaagtcagagaccatcacagctgatgtcaatcacaacttgaaggatgccaatgatgtaccaatccaatgtgaaatctctcctcttatctcctatgctggagaaggattagaaagttatgtggcagataaagaattccatgcacctctaatcatcgatgagaatggagttcatgagctggtgaaaaatggtatttgaaccagataccaagttttgtttgccacgataggaatagcttttatttttgatagaccaactgtgaacctacaagacgtcttggacaactgaagtttaaatatccacagggttttattttgcttgttgaactcttagagctattgcaaacttcccaagatccagatgactgaatttcagatagcatttttatgattcccaactcattgaaggtcttatttatataattttttccaagccaaggagaccattggccatccaggaaatttcgtacagctgaaatataggcaggatgttcaacatcagtttacttgcagctgaaagcatttgtttttgaagttgtacatagtaataatatgtcattgtacatgttgaaaggtttctatggtactaaaagtttgttttattttatcaaacattaagcttttttaagaaaataattgggcagtgaaataaatgtatcttcttgtcaaa

SEQ ID NO: 11313 - DNA, 809 bp, Homo Sapiens
aaatgcaatggggctcttcatttaggaggctttcattgtctttaagatgtgttaggaatgtcaacagagcaaggagaaaaaagccagtcctggaatcacattcttagcacacctacacctcttgaaaatagaacaacttgcagaattgagagtgattcctttcctaaaagtgtaagaaagcatagagatttgttcgtatttagaatgggatcacgaggaaaagagaaggaaagtgatttttttccacaagatctgtaatgttatttccacttataaaggaaataaaaaatgaaaaacattatttggatatcaaaagcaaataaaaacccaattcagtctcttctaagcaaaattgctaaagagagatgaaccacattataaagtaatctttggctgtaaggcattttcatctttccttcgggttggcaaaatattttaaaggtaaaacatgctggtgaaccaggggtgttgatggtgataagggaggaatatagaatgaaagactgaatcttcctttgttgcacaaatagagtttggaaaaagcctgtgaaaggtgtcttctttgacttaatgtctttaaaagtatccagagatactacaatattaacataagaaaagattatatattatttctgaatcgagatgtccatagtcaaatttgtaaatcttattcttttgtaatatttatttatatttatttatgacagtgaacattctgattttacatgtaaaacaagaaaagttgaagaagatatgtgaagaaaaatgtatttttcctaaatagaaataaatgatcccattttttggta

SEQ ID NO: 11314 - DNA, 214 bp, Homo Sapiens
gctcaggacgctggccgataccccccacacagtggcgcaggacgctggccgataccccccacacagtggcgcaggacgctgggccgataaccccaaaacagtggcgcaggacgctggccgataacctccaaacagtggctcagggacgctgggccgatacccccccaaagagtggcgcaggacgctggccgaatccccccacacagtggctcag

SEQ ID NO: 11315 - DNA, 458 bp, Homo Sapiens
cggccgtggggctggaatgaatgcagcagcagtggagacacgctggcacgtactgtctgtgaggattatgacttgtgtatcacctgctataacactaaaaaccatgaccacaaaatggagaaactaggccttggcttagatgatgagagcaacaaccagcaggctgcagccacccagagcccaggcgattctcgccgcctgagtatccagcgctgcatccagtctctggtccatgcttgccagtgtcggaatgccaattgctcactgccatcctgccagaagatgaagcgggttgtgcagcataccaagggttgcacaacggaaaaccaactggcgggtgccccatctgcaagcagctcattgccctctgctgctaccatgccaagcactgccaggagaacaaatgcccggtgccgctctgcctaaacatcaagcagaagctccggcagcaacagctg

SEQ ID NO: 11316 - DNA, 427 bp, Homo Sapiens
ggggacgtcagcatcggcatcaagtgtgcacctggagtggtaggccccgccgaagctgacatcgacttcgacatcatccgcaatgacaatgacaccttcacggtcaagtacacgccccggggggctggcagctacaccattatggtcctctttgctgaccaggccacgcccaccagccccatccgagtcaaggtggagccctctcatgacgccagtaaggtgaaggccgagggccactggcactcagtcgcactggtgtcgagcttggcaagcccacccacttcacagtaaatgccaaagctgctggcaaaggcaagctggacgtccagttctcaggactcaccaagggggatgcagtgcgagatgtggacatcatcgaccaccatgacaacacctacacagtcaagtacacgcctgtccagtctcg

SEQ ID NO: 11317 - DNA, 504 bp, Homo Sapiens
gacccagagcaggcctgtccatgccattccttcgcacagatgaaactgagctgggactggaaaggacagcccttgacctgggttctgggtataatttgcacttttgagactggtagctaaccatcttatgagtgccaatgtgtcatttagtaaaacttaaatagaaacaaggtccttcaaatgttcctttggccaaaagctgaagggagttactgagaaaatagttaacaattactgtcaggtgtcatcactgttcaaaaggtaagcacatttagaattttgttcttgacagttaactgactaatcttacttccacaaaatatgtgaatttgctgcttctgagaggcaatgtgaaagagggagtattacttttatgtacaaagttatttatttatagaaattttggtacagtgtacattgaaaaccatgtaaaatattgaagtgtctaacaaatggcattgaagtgtctttaataaaggttcatttataaatgtcaaaaaacaa

SEQ ID NO: 11318 - DNA, 533 bp, Homo Sapiens
gcccctttttctctttatgatctgcttcccctctgcccttgagtcttcaaaatggagccagcactgggaaggcataggagaggagcaaaggagcaggactagaaacaaacatatatggctaatcgagttactataaagaaatggtacccgtattggacaaaggtctgcagatgaaggaaactaattctttttcaggagttttccaaaagtgcccaattcacaccaaaattttggaaaatctcatacaatgtgggaaaagtatacagaacccttgcagaagactccatttcctaaactattttgcattaatatcaacgttacaaacgcaataccataggatttcagagcctatcttcacacaaataagatctgaccaaaattgcattgcttagcttaaaaaatactacacaatgtataatttcaagtcttaggttctcagctactaccaaaatatgtcaatatatgaataaactgccttgtgaaaaacatgcagtcggtctcgacttaccttggtggatcctctagaggcagct

SEQ ID NO: 11319 - DNA, 474 bp, Homo Sapiens
accgtgtgtgtgaaagaaaccagccatattggttttggcttctgtatttttcacactgattaatgaagggaaacaaagagaaaaaaacacacatcaattaaaggagacaaaaagaggcagagcgagtagagagcagccctcattcaccacctggtcccagacgtgcttcagtcctcgtcctctctttgtggctggctcccagccttctctttcctcttgaggatacttagggtaaactggatccttcctgctcaaggatcctcatttgtatacctagtggaaaggagctctgaactcacgaggagtcactgttcccttttttaggttagaaattaacagcagggaaatgccatcttattacctgagacgacccgccctgggagttaggtacggtctgaagttatgtctagataagacttcagacgtcctgggattgaaagaatgtgtgtgaaggtggtagaatttgtgcaaaca

SEQ ID NO: 11320 - DNA, 403 bp, Homo Sapiens
cttgagatacagtcggcatagtcccaaagagtggaccatctgaaatagaatataaatctccctgagttatttagcttagtcagaactaggaaggcagatttcagagaaaatgaaattagattaggaactcagtactgggcaatgtcagtggacaagatagtctgctatataaaccatgttccaatctatagaaaaaaatgatacttcaataagcagcccaaagcttaattaaggatgacagagcatgcctacctccttcacttttgccatacagtgaaataatacagtgggatgtgctcaaatttcaagagaccaaattttctccactattatgcctcctaaagtacaccacagaattagccaagaagatttttcactttcagttttattaaagacacattgt

SEQ ID NO: 11321 - DNA, 900 bp, Homo Sapiens
  misc_feature (598)..(606): n is a, c, g, or t
gaccgtgtggattgtcctagaggtagccgaccccttatagaccctagggggagtcatatgacttaagccgtgtccattgatgggtatcccatccttcaggacactgtcattctaatttagaagaggccttgagtgaccgaagccatgccctggattctgggactttcacaggaaccatgagtaaaaaggatttctgtatactaggactggcgagctataggcttggcgctgctggtggctgtcttatcattcaggaaaatctgcccaagaactagagccagtatgagaaaatgatgagagatgaaaaaagacaattattgataacatgacttgagctcctggatatagtcatgcctgaaaccattaacaccttgactttttgcttatatgcacaagcaaatttattcagtgctttagtttgagttaagtttctgccgtttttcaactgaaggagtctcaactaaaactacagttttcaagtttcccaagtccagtctctttctatcactctcagcctatttcttggtgttgacagtgagagaatatagcttaattgtataatactttaaataaaactatattgaaaatgcaatagggnnnnnnnnncctactgatacaatcattattggcttaggtctatttaaaggaaaaaaagctaaagcacttgctgtatctgaactttgcctaaaaccaaagtgcttcgccattataatcttgagttcatttcaactattaaactattaactcagcgagtagtgatcactaaaagggattatagagcgtcatttttatgacttaagtacaacaaagtgggaacgcttttgtatagtataccttatttttatttacgcggcccacctgatgataaaaggaaggtagtttggacggtgtgttttttat

SEQ ID NO: 11322 - DNA, 647 bp, Homo Sapiens
ctgagatgacagtcggccggcagaggagcccttctgccgagaggaagccaaggtgctgccgggaggagcaagggcccttcctgaggccttgtggaagcaaacaccactccccactgcctgagaactggagcgaagagagcatctcacgatgactccagggctacagagaatggagaccaacttgcactccctaaggaagtcccaaagaaacttccctttcaggaccctctgctcagggaaatgggtgaggcctccaacctgggtgaggtggactgggggacagggctctgaatccttggctctactgcaacaagagaaattattctctgaggtgttccatataccgggttcatttctaacatgtttcggttacaagagatctgggtcccccttgattagaggagctgtccggaggcaaccttttcttggtaccttcttcctgacatatcaagacttgctgagactagggagtcttccctttgggagaaagggaaattccattctcttgatcatgattttgacagctgggaagcccagcccggccttcctcctggctgtttggaacagcggaccgtgatgctgaggcgagaaggggcagtcctgcctctgcacctccactactcacctgagggacacagacaagatcc

SEQ ID NO: 11323 - DNA, 518 bp, Homo Sapiens
  misc_feature (32)..(32): n is a, c, g, or t
  misc_feature (39)..(39): n is a, c, g, or t
  misc_feature (114)..(114): n is a, c, g, or t
acatttcccgtccattgagacagtagcattcncggcacncatcgtgccagctctcctcatttttatgatgatgaccatccacggtgagacaagtgtccgacaggatgggtggcncagctgaagcagaggcctctctgcacttgcagataagacagccgtgactgtcctgctggaaacccaaggggcagatcttactgcatgagagctctggacatttcttacagcgacagatgtcacagccgtgcttattcttcagcaatccaagtggacaatacttgtcacagattatgggtctgcacttcttgggccttgggcggcactcacagatctcacagttttgggcatcagtaaggaaaccgaagggacagttcaaggtgcagccttgtttacgttctgaacatagttcctcggtgtttatgcactcacaggtccgacaaccattgtgatcgcgtttgaaaccattaatgcagtccttccctgtcagagtgcagtttgatacggtcccgacttaccttggt

SEQ ID NO: 11324 - DNA, 469 bp, Homo Sapiens
aggagcaatagcagcagccgtggcgccacggggcgaggcgcggcggtcggtgaccggccggggctgcaggcggcggacggctggaagttggattccatgggttccaagagaagaagagctacctccccttccagcagtgtcagcggggactttgatgatgggcaccattctgtgtcaacaccaggcccaagcaggaaaaggaggagactttccaatcttccaactgtagatcctattgccgtgtgccatgaactctataataccatccgagactataaggatgaacagggcagacttctctgtgagctcttcattagggcaccaaagcgaagaaatcaaccagactattatgaagtggtttctcagcccattgacttgatgaaaatccaacagaaactaaaaatggaagagtatgatgatgttaatttgctgactgctgacttccagcttctttttaacaatgcaaagt

SEQ ID NO: 11325 - DNA, 605 bp, Homo Sapiens
atggtcatagctgactctagaggataaaccaaggtacaggcggaaccgcatgcattccttgggatgttacttcgccaacaggaaacctctgtagctggcgaagccttcttcctgagcactgcttgtgcctgctggcctcattccgcccactcgacctggcaggctgggcttggctcatgctaccggcccggatcccacacctgccaaaggcaagccaggcatggagcggtgagggctgtgtgggcgagtgagtgtgaggtctggctgctgtgcacagacagctaggcacatcagctgctgtggcagggcgggcagccccaggcgccggcactgactccatggaaggctgcggcttgaccagatgtactgcatgcagcttccactgcgggcacccatgtctggatgaggggaatgtggtggtgcctggaagcttggagatgccaggaactgcagagccccaaagagagtgtcacaaccctggctccgggagctcctagatgtgggctcccttctctccttcttgttgcccacaacgtggctaatggaagtggggcgtgtttcagcccctgtttgtgttacagctctttcagccctgccattcagca

SEQ ID NO: 11326 - DNA, 322 bp, Homo Sapiens
gagagctgactctagaggatacaccaaggtaaggcgagaccgtatgcaatgatagaatgggactttgggatttctccctaaggagagagactaagtgtgttatgcatggggaaagaaagaagccaagagctgtttggtgactagaaagatggaatgtagcagaaactccatgaacaggggtctgggaaatagcaaagagcacacagataatatttgggaagatgacagtgagttttagctaacagaatttgagcagaagtgatgtaagctacttctaagcttagatcctaaaaatcatcccctgcggtcccgacttaacttg

SEQ ID NO: 11327 - DNA, 490 bp, Homo Sapiens
caaagctgacaagactctgggacgatgaagaagccgcacaccactgaagagattggtgtgcccatatccaggaatggctccaccctgggcctgaagtcccagaacggctgcattcctccaaagctgccctcggggtccccttcccccaaactctcccagacacccacacacatgccaaccatcctagacgaccctggaaagaaggtgaagaagccagctcctccacagcacttttcccccagaactgctcaggggctgcctgggaccagcaactcgaatagcagcagatctgggagccaaaggcagggctcctgggacagcagggatgttgtcctctctacctcacctaagctcctggctacagccactgccaacgggcatgggctgaaggggaacgacgagagcgctggcctcgacaggaggggctccagcagctccagccattgcactccggccagccattgcactccggccagccatggcactccgg

SEQ ID NO: 11328 - DNA, 613 bp, Homo Sapiens
gtatgtgcttgtgtgcacgcgtgcagtagctttagtttctgcctcccccacagggctgtaagctcagtgaagcaaaggactcatctgcctttcttggattccgagcattgcaatgttgtcaacaaatgcaaagctgagattgaacctcactcatcttgctctctgttagactgtaaacaccatcaggacagagacttgggattgtttcgtggacaaagagagaactcttgttggggttcaagggagtaagaagggcatcacctgtaatgcttagtaatcactgaaacaaggaagcactttgcatgtgcgtcctttacactgagggcacctgcggagctcactcccctagcagccacccaagtccgttcagggacctcattctcccacgggaagttggagaagatgggccgtggctctgcggagcggggtgtggacctgcctcggtacctggagcggttcaggcctgtcttggtggtggctggggcacaggtggctgcctggcctgtccttacagaccgtcagtgttctcccgcctgctcagttggtgaatgctctcgtgaatcccttcgccgtcttttgttctcacgaagtagccatcacaattagtacggtc

SEQ ID NO: 11329 - DNA, 386 bp, Homo Sapiens
agttcgacggagactctcgtgcggatccaacccagcacctgtttcacttctgcctgcaggtggcgcagctgcacgcactgctccaggtgtttccgatgctgctctgcggctaaatccaattcctgctgtttttcatgaagaaactccagcaggtcctggacccgagttgccatgtctacatctctatcacacagcagctccacaccagaggcctggacctcattgacatactgcagaagatcttgcccttggtggatgacgtcaaaagtcaagttgttcatggtcaaggctttgtctgcatggtgctggaggcgctgctctgcaatcgtgagatcttctgtgtcgaagtcattcatttgctgagaaagctcatcattccaagactc

SEQ ID NO: 11330 - DNA, 372 bp, Homo Sapiens
aggatcccagttcgacggagactctccagtctatctctcccaagtctccccatcaagacagcctgtcaattattcacttctatccttctcgactgtgggaggggattgctggagaggacttttcagctggagctaaaaggtttacagctccagggcctcatttagggatcagcttagtgacagcaaggaggttttgggcactgtggtggtctgtacatcgcctagaaggtgcccagaaaagcacttactgagaatgcatacatttgcacagcatggggtaatatgctaggcagtttccaaaggtaaccaccctcagttccttccctctctgtgcttatagcctctcattgacatacagagagtctccgtcga

SEQ ID NO: 11331 - DNA, 454 bp, Homo Sapiens
agttcgacggatgatccacatttggccagtgagagtctcttgaggtggctgctgtgtccattttgatctgacctggttgatcgttgaatgcttcctttgctttctggcaggataaaatgtatttcaacctgatacttatcttgccttaacctgggacactccttttctttagtgaagttggcttcaggtcttaattttatgtgattgctcacttctttcatctaaactttaaacagatttgacacattgagatcagcacttttgcctttttttggtagtcaacaagagcaactgaggtgtcctgttgatgctagtatttaatgtcttaaaacttgtcttaaaaacagaacattttcctgttcaattatataagcaaaaagacactttaactgtatccagccaaactcttctatggcatctctgaaagtaattatactgccagttgtactttgcg

SEQ ID NO: 11332 - DNA, 498 bp, Homo Sapiens
agtttcgacggagactctcactatcctcactgttgaactgagaattgaggatagtgagagagagaacctagtggatatctgggaggagagctttgcagacagagggagcagcatgttcttgagaagctcaagatgagtatgcttggctagaagcatcagggaggtccgtgtgactggagcaaagaaagtaggagctgagaagtcagagagctggctggggtacatatcacataaggcctcctagaccttttgcttttctctgagtgaaatgtgaaaccattgaagagtttgaagtagcgaatgatctggttttatatttcataccatgttgaggaaaagggcaaggttgaggtaggcagatgagttagaaggcttcggcgttaatccacgtgaccggaggtagtaagaagaggtccgatttttgatctgttcttgaaagtagaattgtcaagttttgctgatatttgaatgtagagtgtgtgggagagtctccgtcaa

SEQ ID NO: 11333 - DNA, 334 bp, Homo Sapiens
actgcatccaacgccgctgactgcatccaacgccgctcaaggacgaccccgagggtgacagggacggctgcgtcatcacaaaggtcctcctgtaggggtgtggccacttccccaccccaggacagcgcttctccgtccaatgccaatgccttcagaccccgctgggaccgaagccgtaaccgaagccaggcccgcagccgctactcactcggaagctccagctaactgtaggatcttccacaccctaaggctctcagacgtgagaagcacttcgaagccatgagcagcaccagaactcactcgccatgggatcactcggggatgcctgcggcag

SEQ ID NO: 11334 - DNA, 348 bp, Homo Sapiens
tgaagtgggggtgagggccaaggggctattactgctgttgggaaatacttgcctctcgtagatccagccttaatgtttttctgacatcctagtaatagcagaccctgcacaaagtggatatcagacttaatactgtgaggagacaaaataatgagaatagttttaccaaagataatgaaatctcgcatcatgtctgcattttaccatagattggagtgcatccttagaaaactgaatgtaacaaaaacccaggacatttttggaaattgtatgctctctagcaactttgtgtgaatttttatacaaacactgttctatgagttatataaaatgttataaaactagaaa

SEQ ID NO: 11335 - DNA, 416 bp, Homo Sapiens
cacacagtccaactcttccacctctggggaagatggagcaggtctttgggaagctcccacacccacctctgccactcttaacactaagtgagagttggggagaaactgaagccgtgtttttggccccccgaggctaaccctgatccatagtgctacctgcacctctggattctggattcacagaccaagtccaagcccgttcttacgtcgccataaaggcccccgaacggcattctcggtacttctgtttgtttttgtacattttattagaaaggactgtaaaatagccacttagacactttacctcttcagtatgcaaatgtaaataaattgtaatataggaaatcttttgttttaatataagaatgagcctgtccaatttctgctgtacattattaaaagtttttattcacaaa

SEQ ID NO: 11336 - DNA, 394 bp, Homo Sapiens
  misc_feature (216)..(324): n is a, c, g, or t
gatctacagatgaatatttaactcaatagaaaaattattttagaacacattgtattggtattacaaccagattatattcttgacgttgacttcattaaaattatctacaatttcctaataatttaagctgtatatggtcttcattgaaaaaagatagatattgttacaggaagcttgttacattatattcttgaccttttggttgataatcttaannnnnnnnnnnnnnnnnnnnnnnnnnnnnnnnnnnnnnnnnnnnnnnnnnnnnnnnnnnnnnnnnnnnnnnnnnnnnnnnnnnnnnnnnnnnnnnnnnnnnnnnnnnnntgccccaaacctgttctgtctccctctctgtatgtacatacatacacgtataaaatattgatgaaatctt

SEQ ID NO: 11337 - DNA, 179 bp, Homo Sapiens
gatccagtttttcttgggaggttgtatctggtcataaggtaaacattctatatattctatgcctgctctagaattgaaagacttcagcagtattaaagcattttttaatcttatttgagctttcatattcttcaatggttcctttcgtaaaacctgagttaataaaagtggtctgaaag

SEQ ID NO: 11338 - DNA, 575 bp, Homo Sapiens
aacaagatgagagagcatttaaaagcatttacccacacagccctggtgataattggattggaatcaaaacaaacacagcatgagattattaagaggttttaaaaggcaacagtggtgtggactggttattgccagtgttaagagagaaataaacttgggtttttaggcaccagagatatgggctctgtctacccagtgctccagtttcccggtaactgctcttgaacattgtggacaagggcaggtcttcatatttttgatcatccctttctcccagtgaaatcccatagcccttacctagatgtctagggcacaaagacttcggggaagatacactgagattgacctgaggagacatctacacacaccagtggcagctgccccagggcctgcttccccttcctaagtctgtcatcctctggaagggatgggtggtgctccaatctctggtgcctaaaaacccaagtttatttctctcttaacactggcaataaccagtccacaccactgttgccttttaaaacctcgttaataatctcatgctgtgtttgtatgattccgatccaattatcacc

SEQ ID NO: 11339 - DNA, 491 bp, Homo Sapiens
ataacctggaaggtggactacttgtaagtagctggtgtttattgattaaaccatggaagttttcatgatacccaagcatgttgctgaaactgatgcatttgaaagagctgttgaaataatgcaaaactttggttttataagaatctactcatgttttaaaagtatttaactctgtagaccacaattatagaaagctcagtaatgctgctaatgacatttgtaaactatatctgtaatgtagtgcaatatttttatatttcactgggagaggcagtagagacatcatagttgtactttagtgcaagtgggggaacactccaaatagcctagagtatagtaaggtacaaagcttcaatgaaaaaagctgtattatattacattactgatgtaatcttgctgccatgctatgtatcaatagctaaaaaataataataaagactaccacagaaaacaagaatatcttcatttaatgaaatctttaaaaaaggtga

SEQ ID NO: 11340 - DNA, 650 bp, Homo Sapiens
tagggttgggacagggtgctttggaatgaaagagtgaccttagagggctccttgggcctcaggaatgctcctgctgctgtgaagatgagaaggtgctcttactcagttaatgatgagtgactatatttaccaaagcccctacctgctgctgggtcccttgtagcacaggagactggggctaagggcccctcccagggaagggacaccatcaggcctctggctgaggcagtagcatagaggatccatttctacctgcatttcccagaggactagcaggaggcagccttgagaaaccggcagttcccaagccagcgcctggctgttctctcattgtcactgccctctccccaacctctcctctaacccactagagattgcctgtgtcctgcctcttgcctcttgtagaatgcagctctggccctcaataaatgcttcctgcattcttctgcctcctgtgtcattttcagctgtgtctgatgtccttcccttctccccaagcatggagcagtccatgggactctgggtggctgggaatatttgagacatatgggatgggagcttgggaagaagcagccatggggagagatgggaacaacggacaacttgaggccatagaagtacctggactgcagtcctgtcctgttactgac

SEQ ID NO: 11341 - DNA, 498 bp, Homo Sapiens
  misc_feature (251)..(263): n is a, c, g, or t
gcagctgttacggggcagctggctctggtgcagctgctggtggagaggcacgcggatgttgacaagcaggacagcgtgcatggctggacggccctcatgcaggcaacctaccatgggtcagtgccagccccacgccctcagcgacaaggccagacagatgctctggcctgagatggaggttcccaatgggctcttctggtcctgagatgctgcatacaaaccccaggactatgacgacattgaggcatggnnnnnnnnnnnnngcggcacaggctcattttagtcccacccttctgtgtccagatttcctgttcccccatcacagaatttcacaatggccctgaaaaaccatgcagcaggagcattttatgcagagagataaggttctctaggttggtttcagttgaacacagtgactgattcattggagttttcacattgagatatagtgacctccttaagtagctcctgtatgaagtaaacattggttattcatac

SEQ ID NO: 11342 - DNA, 440 bp, Homo Sapiens
  misc_feature (58)..(132): n is a, c, g, or t
tgtgactcacctaaggccactcaacaagtttgtggcagaactggattagaactgcacnnnnnnnnnnnnnnnnnnnnnnnnnnnnnnnnnnnnnnnnnnnnnnnnnnnnnnnnnnnnnnnnnnnnnnnnnnncacctcccaataatcaacagcaaaattataggtctaacaatgttttatagacacccctccatttatgtgatgggtttgcatcctgataaacccatcataagttgaaaatatgatcataagttgaaaatatgatcataagtcaaaaatgtatttaatatacctaacctaccaaacatcatagcttagcctagcctgccttaaacatgctcagaacacttacattagcctacagtgggcaaaactatccaacacaaaatctatattgtaataaagttataaagaattttgaataaaaattcaaaatttga

SEQ ID NO: 11343 - DNA, 1313 bp, Homo Sapiens
  misc_feature (794)..(794): n is a, c, g, or t
ttccttcactgggggaaatagggctggagcacaggaaagagttgaacgatctgtgaggcccagagggaggcggcgttatgcagagcagtccctccctcatctcagcatgattgggaagggggcagtgacccttgtcattagagggagaccgggtttgggagtcagataaactgggttcagagcttgactgtaccatttacaagctgggtgaccctagccaaatctcttcatctccttgagcctcagtttccccatctgtaaaatgaagatagcccctcaggtaagtgagcaggtcatgtggcacctggccaggcagtgctcactgaacagccattccttcccatccccaatgcctggtggacccccagatctgcaggcaggccctgaagtttctgacacagatccgggcccagcccctcatcaacctgcagatggtgaacgcgtctcagtacgagcatgtggagcgaatgcacctcattgggaggagacgggagcagctgaagctcctgggggattacctgggcctgtgccggagtggcgccctgaaggagctcagcaagaggctcaaccaccggaattatctcttggaatctccgcataggttcagtgttgctgacctccaacagatcgcagacggggtgtatgaaggattcctcaaggccctgattgaatttgcctcccagcatgtctaccactgcgacctgtgcacccagcgcggcttcatctgccagatctgccagcaccacgacatcatcttcccctttgcagtttgacaccacagtcaggtgtaaaanagtgcaagaccgtcttccaccagagctgccaggctgtggtgaagaagggctgcccccgctgtgcccgccggcgcaagtaccaggaacagaacattttcgcctgatgcccatctgctgaccccgctctgaaagccgggggtgagtgtggctcagccatcccggctgggtttgccatcagcccaggatactcaccgtgtcacagctgtgtccccttgtcaggaagaccctcagatgtggccagagcaccggcctcccagagaaagcccaggaagtccccgtggtgtcccctggccctccccccacccctctgctgcaggaggcgtggccaccaccagatgctccctgtctggggcaggcagggccgtttactcaccaggccctggctcaccagcgtcccggcgcctccgttagggctgcccaaacactgtggaaaggggacttggggagcattttcaattccacattcctgattaaaaggtctagttttttaaggtgggtttttcccattcatatttcaac

SEQ ID NO: 11344 - DNA, 698 bp, Homo Sapiens
  misc_feature (411)..(528): n is a, c, g, or t
  misc_feature (575)..(583): n is a, c, g, or t
ccggaatttccgggattgaaggaaactgaacttgaggtggcctccttgcttgttacatacctgggtatgtgtaggcagtttagtgcatctttgcctctcagttgaaacctgtataaccctgttacaaagctgtgttgttgcttcttgtgaaggccatgatattttgtttttccccaattaattgctattgggttattttacaacttctctctgtatttttttctggcattgacattatagacattgaggacctcatccaaacaatttaaaaatgagtgtgaagggggaacaagtcaaaatatttttaaaagatcttcaaaaataatgcctctgtctagcatgccaacaagaatgcattgatattgtgaacatttgtgatatatgtattaataaatagagcaattacaagcnnnnnnnnnnnnnnnnnnnnnnnnnnnnnnnnnnnnnnnnnnnnnnnnnnnnnnnnnnnnnnnnnnnnnnnnnnnnnnnnnnnnnnnnnnnnnnnnnnnnnnnnnnnnnnnnnnnnnncccctttaaaaattcccccggggggccccatttttccgcaccccccnnnnnnnnnaaaaaaggggccccataagggggccgaattaaaaactgggccggggggcggttttttaaaaccgcgggggtgggaaaacctgtacctggggacttttgggaagaaactcttcttt

SEQ ID NO: 11345 - DNA, 1107 bp, Homo Sapiens
ggtatcgccaatgaaaatggagggataacattcttccctgtccaagtcaatgttggggggcaggcacaagctgtgacaggctccatccagcccctcagtgctcaggccctggctggaagtctgagctctcaacaggtgacaggaacaactttgcaagtccctggtcaagtggccattcaacagatttccccaggtggccaacagcagaagcaaggccagtctgtaaccagcagtagtaatagacccaggaagaccagctctttatcgcttttctttagaaaggtataccatttagcagctgtccgccttcgggatctctgtgccaaactagatatttcagatgaactgaggaaaaaaatctggacctgctttgaattctccataattcagtgtcctgaacttatgatggacagacatctggaccagttattaatgtgtgccatttatgtgatggcaaaggtcacaaaagaagataagtccttccagaacattatgcgttgttataggactcagccgcaggcccggagccaggtgtatagaagtgttttgataaaagggaaaagaaaaagaagaaattctggcagcagtgatagcagaagccatcagaattctccaacagaactaaacaaagatagaaccagtagagactccagtccagttatgaggtcaagcagcaccttgccagttccacagcccagcagtgctcctcccacacctactcgcctcacaggtgccaacagtgacatggaagaagaggagaggggagacctcattcagttctacaacaacatctacatcaaacagattaagacatttgccatgaagtactcacaggcaaatatggatgctcctccactctctccctatccatttgtaagaacaggctcccctcgccgaatacagttgtctcaaaatcatcctgtctacatttccccacataaaaatgaaacaatgctttctcctcgagaaaagattttctattacttcagcaacagtccttcaaagagactgagagaaattaatagtatgatacgcacaggagaaactcctactaaaaagagaggaattcttttggaagatggaagtgaatcacctgccaaaagattg

SEQ ID NO: 11346 - DNA, 1219 bp, Homo Sapiens
  misc_feature (1182)..(1182): n is a, c, g, or t
ttaaacaagcagctcagcgatttgggaggttggttagtacaatacagagaacacagagagaaagtataaaatggcactgaacactaatgccaatacttatctcattgtggttataacgaaggatattattatttgtgttatttttgtctggaacataaatcaatgccattaacttgaacttgaggtatatacacaatacacacacaaccttaagcaaaatacttttcataagtaacattacattttaaaatattggaaacattcgaatatctgtgctgatttgtattctgacttaatggaacaagaagaaaataacattcaactagggagggttaaactgataataaagctcttaaaattcaaaatgtcttcctctccctttgtacttaccataggctacacaatgtcctgagaggattcattatgagaaaaatgtcaatcacagcttcaataacttactttggaaaaaactaatgagaaagcaaactggaaggtgagacttcatctttgttttcaaataagtggtcttaatttttcttcttatagaaaaagtttaaatcagtttattataaatatatctaaaccattaatttttgcagctttcaggtaaagtccagcacttcatttatacaaaatctatgagaagaggtcagtagagatcatctaatcttaagtcgtgacatcatccattcaagtccttggcacaatccctcgccagttagagcacagcatgcctggatatgccactggtgatctttaatagaagttagcttcaaaaactgggagatttctgctacagtcatgcattctttaacatcttgtttattagcaaaaatcagcaatccagcttttctccaggtcctcatgcgctaacattttatagagttcttctctagttacagaaatcctctctctgtctgtactgtccacaacaactattacaaactctgtgttagtatagtaagtgttccaggaagaacgaagagattcttggccaccaatatcccacattaggaaacgtgtattattaatcactatctcttctacattacttcctattgtaggagatgtatgtacaacttcattcatagaaaattggtaaagaatggtagttttccctgcattatccagcccaacaatgataactttgtgctctggctcgcggacatcgccgccgcgttnctgcgacgagcctcgcgggccaccgtcctcccccagc

SEQ ID NO: 11347 - DNA, 407 bp, Homo Sapiens
tacttatttccctttattgtcattgcaagcttcttatggaaactttatagggaatgaaaatatacatgttaaggaagattaaacattagatagtagatggtttgttgcatgctaaaactgttagtattgttgaatcaattactttggtttcatgaaaaaataaacgataaatatctttaaagagaactagaagaattttttgtttgagtgattccaggctgtagtatgatcatttactgaagtagtttgattggctggctaacttaaaattattgtttcttgttttgtactgcaataggggttaaaattgtaaaataaaaatgtgtgtgtgtttaagggaagtaggtggtggttaaaattcttggaaaattttcagaatcctttaaaaataaagttccaagttcccc

SEQ ID NO: 11348 - DNA, 453 bp, Homo Sapiens
  misc_feature (40)..(40): n is a, c, g, or t
  misc_feature (112)..(112): n is a, c, g, or t
  misc_feature (134)..(134): n is a, c, g, or t
agcaacagcaacaacagcaaacaccagcagcaacagcagncaacagggcggctcctccccaaaccccagccccaagtccccagcccccagttccaagcgccaaggggcttcnagcagacccagcagcagcaacnagactagcagctttggtccggcaacttcaacaacagctctctaatacccagccacagcccagtaccaacatatttggacgctactgagcccacctggaggaactgcttgtgcactggatgtggccccaccctttcctcttaattcccaatcccattcctgggctagcaccagtagtggttggggccctcccctcaggctccatttttaataagtttttagtatttttgttaatgtgaggcattgagctgttgggttttgtatattatttatatagagaccccagagctgttgcacccaatacacagagcttctttgcaa

SEQ ID NO: 11349 - DNA, 415 bp, Homo Sapiens
  misc_feature (172)..(184): n is a, c, g, or t
ggccaatttaaaaataagcatagggcttgtgtaaccgtttcccacaaagaagatatataaatctctaataaatacataaaaaaatgcttagtatcatttataaataggaaaatgcaattaagactacaatgaaatgccccctcataccattaggatggctaccacaaatttnnnnnnnnnnnnncagaaagtaacaagtgttgatgtggatgtgaagaaactggaaatttactcactgctagcaggaacataaaatgaggtacggccattgcagaaaataatacagcagttgttcaagaaattaaaaatatcactccctataagaccaagcaattccacttctggatatacacccaaaaaaattaaaaacagtgagctgaggtatttgtacacccgtgtatgtcgggcttggtgg

SEQ ID NO: 11350 - DNA, 554 bp, Homo Sapiens
tctgtcacttgctctgtacacttagacaacagcttgacctcttgagctttagtttcctcctctgcataatgagagggttagactactgaattgtatgggaaaaaaatacaaattcctgggtcctaggccatgcctgctgaatccgactgttcaggaagaggcctaggaaatctgtgagggaatccccaggggaatctcgtgaccagccaggtgtgaaatctgctaactggaagatctcaaagcttccttcactttttgtgattttgtggtcatgtaacgttactgtattattctacgtaaatgtgggtacttggatgtttatcatactgtttctctgtgtttacatactaatttgtgtaagaaatgcattttagtctgtgtacctcaacctgctgtttgtttcctagaggtgttagtagtctttaaatacaagtaagacttaagaggatatttgatgttatttacctggatattttcttccccttttatttatttagaggaaattgagattctaggagccaaaaaaatgaaaacaaaattctaaggcaaagtta

SEQ ID NO: 11351 - DNA, 326 bp, Homo Sapiens
gtccatctcccctgacaggctcgcttcaacgtcagccgccaaacacactatggtgcgggcacttacgtacggcagcagcagagaggaaacattcacggccatcgaagtcccaacctgccgatgaagcaacaaagctctggccttacaaggcctcagaaatgggggcagtcaaaacacactctgtaagatgagcaaagaattaattcagcgtgttagcaacagaacccttgggtgtgtgctgtgggataagcgagctacgcggggaaacgtgccactggcttccaggaaccactgcactcagccaatgagcagaagtaaaaacagtg

SEQ ID NO: 11352 - DNA, 900 bp, Homo Sapiens
aatggagctctcggagtcctgtgcagaaaggcttccagatgctggcggatccccgctccttcgactccaacgccttcacgcttctcctccgggcggcattccagagtctgctggacgcccaggcggacgaggccgtgttagatcatccagacttgaaacatatcgacccagtggttttaaaacattgtcatgcagcagctgcaacttacatactagaggcaggaaagcaccgagctgacaagtcaactctaagcacttatctagaagactgtaaatttgacagagagcgaatagaactgttttgcacggaatatcagaataataagaattccctagaaatcctactgggaagtataggcagatctctccctcatataacggatgtttcttggcgcttggaatatcagataaagaccaatcaacttcataggatgtacagacctgcatatttggtgaccttaagtgtacagaacactgattccccatcctatccagagattagttttagttgcagcatggaacaattacaggacttggtggggaaacttaaagatgcttcgaaaagcctggaaagagcaactcagttgtaacttggggaagttaacgatccgcccgagtgcagaggaaaaccagaaacgccttgccttcagctgaaccaccgtttgtgcgagctggatgtccttttcagtagaaaagaattttccttttgaatttataccattcatcaattttgacactttaaaaacgtgtgaaagggttaagagggaaagatactgcccaagtatttgaatcgtttagtagtaactgtccatttatcctattttgatctttttcaagtcttctgaaaggaagtagacagtattacaccctgaataaataaggtgttgttttccacaaaaa

SEQ ID NO: 11353 - DNA, 517 bp, Homo Sapiens
gactctagaggatacaccaagcccgaccatacactttggccctaggatcaggtgagtcgtcagcataaaagcctttccccaaataggtctcccctgctttacgagagcacccagccgaggtatgagaccttgagatccaatgcaaagttgaagtgtgtgtcagtcacctgccttcacacatcttttgttccctggccccagggctcatgggtatctctgggtggcttaaccaccccacaagtgacccctccagccacttcccaactcagatcagagctccatgggcttctgccctccctggacttgatggcagcagggatgctccctccaggccttctcctggccgcagctgggagaagacctctcaagtcccctgactttgtcccgactggtggctacagctcctgcctggactcaagctggctatgacatgcccttaagactttggcatgacttgtacaattccctctttgctaagggaaacccattccccccccatagtttgtcatctgcaaaa

SEQ ID NO: 11354 - DNA, 273 bp, Homo Sapiens
tcacatggaattagggggctaaacaactactgtaggcatcctagtaaaaactaagatcaaaacttactgtgttctgagagaggaaagacgtacgcgcactcttcttttttaaaattcaaaagaaaaagtaagcgagactccgactcaaaacaaacaaaaaccaaacctctccttacatttaatctatgctgaaaaccagcatgagtcctgattcacgggtcttctgctgaagcaaattctagcaatataaaacacagctgtgtcctggacccc

SEQ ID NO: 11355 - DNA, 924 bp, Homo Sapiens
ggctcgcgagcagatacagacaatgacccccgctgcagcgaggtaagccttttgcgtttccctgtgtgaggtggtgcccatgtgtatggttggcactttggtgaagctactgtagagctattgaggtcctggaaacaaggcgtgtctgcttggcccacgatttgtccctggatcgccgtgcccagcactgtgcccagcacttccacagtcatccgataggcggtggcagaatcccgctcagtctgctcggtgctgatgaacatggtgagagccgagtagggaacatggaaacacgtgaccattgtttcaaagaggcaatagaaaagcaggtaccaataggtctggccgtgtaggaagtcgggcacgaaccagatgaggaagtaggcaatgacggccaggggcgtggagaagatgatccagggcataaggcgacccaggcaggtccagggggatttgctgatgcagaggcccaccagggggtctgtgatggcatcccaggctcggcccacaaacaggatgatggaggcagagaaagggcccacctgagccacatccaataggtagatctgaaggaagaaacccagggcacagcccgtcacctggtagggggctcccccaagtgcatagcaaagcttgttgcaaacagacaactgcttgtttcttctttttcggttctttcttcacctgggccgggcgttcagtgctttggaggatgctggtgggtagcagccccgccgcggagccgctctcggcgccttctcctttggccatgacccgcgggccacgccgcttgggacctggtagacgggatgctcctctgccccgcaggccgctgctcctcccaagctcgcttcgtagcagccttagccacgccgccgcgcgctagccaagccatccataagacctccgggccgggtaccagct

SEQ ID NO: 11356 - DNA, 480 bp, Homo Sapiens
atgaggaggaggaagagcagcgctctggccagagcgtactaagccaggtccacctgtcagaggacgaggaggacagtgaggatttccactccattgctggggacagtgacttggactctgatgaatgaggcttcctttgggcctccttggtcagccttccctgttctccagcctaggtggttcacctttccccaatttgttcatatttgtacagtatctgatcctgaaatcatgaaattaactaacaccttagcctttttaaaagtagtaagtaaatgataataaatcacctctcctaatcttcctggggcaatgtcaccctttgatttaaaacaaagcaaccccctttcccctaccactacggaaaagagcaagctcatttttccgtgtcctcctttatttaactccatttattgcttttggtataatttttacctggggaaggaggggaaattatgaaagaattagtaactttatgtc

SEQ ID NO: 11357 - DNA, 201 bp, Homo Sapiens
taaatcacagaaaaaatcaaaccaaaccaaaccatgggggtgaatgggacacgtcaagataaaagctggaataaacccagagactttctggagtgggaaacatgtaatgggatgttgggaatgcaggcccttgcagaccacctagctggggaaagcttctagcagtgtttgatgcagaaatctattcgaattttacacact

SEQ ID NO: 11358 - DNA, 261 bp, Homo Sapiens
gtcggcaccggagagagactgagaggcctggcctctggtcgtttggagttaagctggtgtcctggcccacagaggaacaaaggatactcacagaggacattcagggtgactgggtcactgcggatgccaccatatcggtcccgtatttcacattgatagggtcctgtttcatttctcgtgacactgggtagaatgaggatcctgttttcaatgggtcgctttaccctcggactgacagggtatgctctgataagcatcctg

SEQ ID NO: 11359 - DNA, 446 bp, Homo Sapiens
  misc_feature (224)..(224): n is a, c, g, or t
  misc_feature (274)..(274): n is a, c, g, or t
  misc_feature (430)..(430): n is a, c, g, or t
atacaaaaaccaaatcttcatttatactgcaagtattctggacacctgttgtattaaacttttctcattcaaacaaaaattaaaaggaaaggcagtaaaatatcaagaacaaatcaggtctaaggaacatgagctgtaacagcacttgatccatcctgaaaccagggtttcgatgagaagcacgtgtgatgaaggaagaactagacaactttcagaattggagnctggcaagtgaattaatatgaacagaaatagagttttcttaaaacaattnagttgcccacaggagcttgaacacagaacacatatgagaagtcaagctgaattaacaggttttgttctggtggaagtcaacaaggtgagacttcatgggactagtggtcttcttagaaatatattaatcaaatatcttcagaatagactagactanaaatctaaacattaaa

SEQ ID NO: 11360 - DNA, 194 bp, Homo Sapiens
gaccgccagatgcagtaaccacaggatagaatgctcctgaaggaaagtaaactcagaaaccagaacttgcaccacggttagaattttggatgcatttacccaagaaaaggaattaggttgcacagcaagttcacccagcagagagctgcagctgttttccagatgtctctatcagctttggccagcccaagcct

SEQ ID NO: 11361 - DNA, 424 bp, Homo Sapiens
atcagaatttgtgttgaaggaacttgtctcttcatctaatatgatagcgggaaaaggagaggaaactactgcctttagaaaatataagtaaagtgattaaagtgctcacgttaccttgacacatagtttttcagtctatgggtttagttactttagatggcaagcatgtaacttatattaatagtaatttgtaaagttggttggataagctatccatgttgcaggttcatggattacttctctataaaaaatatgtatttaccaaaaaattttgtgacattccttctcccatctcttccttgacatgcattgtaaatagcttcttcttgttctgagattcaatattgaatttctcctatgctattgacaataacacattattgaactccaaaaagcaccaaaaaagaaaaacgaagacggccgc

SEQ ID NO: 11362 - DNA, 419 bp, Homo Sapiens
agtggctatggaacacagagatgacatccaattcaatgtgcagagttcacaaagagcttctcagctagtgatgtccaggctgagataagagagcttaataggatgagaggggcttgcaagtaaagtccaaaatggcaggggagtaacaagagaggccagctcaggagaggctatgtacttacgaaccatatcaagaacttagaactttacactgaaagccttttaagtcaggttcacctattagaaagctcacttaaactgcagtaggaaaactgactgtaaggctggagaccaaaaggagatctcttaaaggtagaaggaaatgaatgtaaatgtgaagaagagaggcaatgccagctttgagatagagaacagaaaaaatatctgcaaaagacgtatctaaaaaagaactgttatcc

SEQ ID NO: 11363 - DNA, 638 bp, Homo Sapiens
  misc_feature (53)..(64): n is a, c, g, or t
ttcaggtgacattttcatttattctgtttacagatgccacttagttacactgnnnnnnnnnnnncagtctcatctgggttggatccaaagacattcagaggcatggtaagaggcaaagcatcagacatctcattggtggcaggtacttcctgactactgtaccacctgctgtatccttccccacctcatcacccccaaagccatttagtgccaaatgctacagtaaaaacccaatgcatttacataaaataatgcctaactgcatatttacatttttttagaaaaaaaatcccattaagctcttctagaaagttcatggcaggaaaggtaaggaccaaggctatgagcaagccatatgtggaaacttaaagtagatgagcactgagtttctccatagttggaaaaaagccacactgagcccactcttcctgtgaggcaagatgagaccttccttttataccctgttgagtatcacaacgagggacactaggaccatgagtacggaaaggcggtcggtcgccggagcgacgaccagacacaggtaaggaggcgaagacatcatcgacccacaccgaagcgcacgactaagactctcatccgacacagggtacattggaaaatagggctctgaatagacc

SEQ ID NO: 11364 - DNA, 613 bp, Homo Sapiens
attgaatcagggaaaatttgagtataatggatcgtgcgggtaccttctcaaaccagatttcatgaggcggcctgatcgaacatttgaccccttctctgaaactcctgttgatggtgttattgcagccacttgctcagtgcaggttacatcaggtcaattcttatcagataagaaaattggcacctacgtagaggtggatatgtatgggttgcccactgacaccatacgtaaggaattccgaactcgcatggttatgaataatggactcaatccagtttacaatgaagagtcatttgtatttcggaaggtgatcctgccggacctggctgtcttgagaatagctgtgtatgatgataacaacaagctgattggccagaggatcctcccgcttgatggcctccaagccggatatcgacacatttcccttcgaaatgagggaaataaaccattatcactaccaacaattttctgcaatattgttcttaaaacatatgtgcctgatggatttggagatatcgtggatgctttatcagatccaaagaaatttctctcaattacagaaaagagagcagaccaaatgagagctatgggcattgaaactagtgacatagcc

SEQ ID NO: 11365 - DNA, 165 bp, Homo Sapiens
atatatatatttagtcgatgatcacgatgtccgtgaggatcacgatgtccgtgaggatcacgatgtccgtgaggatcacgatgtccgtgaggatcacgatgtccgtgaggatcacgatgtccgtacatcggcgtcatctgtcgggctagtggggacggacatcgt

SEQ ID NO: 11366 - DNA, 271 bp, Homo Sapiens
tcgtatagatgcctcacagataagacaggggccaagagacaaggacactttgtgagtttctggaaacccagctgagtcttgatctgaagcctctcctgtttcccatatgattgcaactttgtgtttctcttttatcaattaaattcaattttcaaataggcatagactgcgtaatccatctacatggttcaaaagtatgaaaagctgcgcacagaaatcttgctctcccccgccttcctgccattaaccctaccacggccatcgtgatcct

SEQ ID NO: 11367 - DNA, 530 bp, Homo Sapiens
ctcgcgaacgtgttatccctgctagctggacccaattagcagggagaacactgtgtgttgcgatgacagactactgccaagataggtaatggactggacgatagaaatgtgggcttatagagggggatacatgattcccctttgagaatagatgttgaacgagcaggagggtatcctgtggggaagattcataagaggggatgcagaggagaaggtcgtccacatattgaataaggtgaggaaacagatggacatgaaagaaagtaaatcatgagaaagagcttgactaaagtaatgggggttgtctctgaagccttgtggcagtacagtccaggtaagttgctgagattggtgggtgacacggatcagtccatgtgaaagcaaaatagaggtcggatttgaggggtgcacaggaattagtgaagaaagcatctttgaggttgaggacagaataatgagttgttgagggaggtattgaggataggagagtatatgggtttggcaccacggatggataacacgttcgcgag

SEQ ID NO: 11368 - DNA, 749 bp, Homo Sapiens
tgactggcactttctgcgtgatttatttcatctcggcatgaactgacaaacatacgaggctctgcactatttatgcccaggattttaaaagtcaagcattaataaatacattaactacacagatcacaacagctgccctgaacttggccttcaacaggtgtagtttacctttaataaatggtaacatttgagaatcgcttagagcttgaacaggctttggaggagctttgatctcacatgagaacccgtctcctgtttcatatgcgttcaatccaaatccatccacttggcgtgtctgaagctcctgccagcacagtgtctgtgccgggtgccctgaaggctgcacagtccaggcttcctcccggatgtggaaaacgtggaaatgatgtggccactgaaagaaattcaagacaactgaaacaactgcagatttccattttcagctcgtgttttcttatgaacaataacagttgcagaaggggaaatatcagaaagttgattgatttttaacccaaaaatagaactttttgtaagctaggaaagcatctacaattaacaagaatacaaaaatgcacttttgtttacatttgctctatttagatcttacaagagattatgtcttgaatctatcctgacttcagcaaaagacaaaagaacgttgaaaacatcctatttccaaatcgtttacaggaagttacctaagagactgacagattcaacggctgctaccagaattactgaagtgacac

SEQ ID NO: 11369 - DNA, 582 bp, Homo Sapiens
  misc_feature (424)..(424): n is a, c, g, or t
gtatagaaaaccttttttacaatttatttcctgttgttaatctttaaaaatgaggttctagctaagtgcagggtttcagtggtgaaattttgaccatgtgaacacataaataaatatttacagtctttggcaaaacacatgacgtttcatcaacctatacgataaatttgtttagaaaaacataaataatttacaaaaaatatggtacattctaaatattcaaatcatcgtcattcccacaccattgtacggttgaccccacaacacagaaacagaaaacctgcacgctgttgacagtcgctacatttaatgaagtatcccaacgcttcgttggtctcgggaatacagctccacacgcaaaaaagtaaaaagtgcagcaaaacaacacaacgatcaacctcaaaggaaacaacaaaattaattntatcaaaatgcaatgtgtacattaagactaaagttatggatcgtttctgtttggcatagaaatgtgatgactatttacagaaaggggaaaaagatttgccccctattcctcatcagacagacagacttctcttactaaaacccttatgtggagtggga

SEQ ID NO: 11370 - DNA, 421 bp, Homo Sapiens
  misc_feature (54)..(54): n is a, c, g, or t
  misc_feature (59)..(59): n is a, c, g, or t
gatctgagccaccctccccgcacagccctgcaccccgcccctagggttggcagnctcanttggcccctggcagaggaacaaggacacagacattccctcagtgtggggggcaggggacacagggaaaggatggttgtccctggggagggccctctggccccaggcaaccttagcccctcagaacagggagtcccaggacccagggagagtgtggggacaggacagcctgtttcttgtagcttcctggggtgggaggcacaggggcaaagcaataccccagggaaagtgggaggtggtgctggtgctctctccaggcccaccatgctgggagaggcggccagagcctggggcctccagcctgggactgctgtgatgggctatcacggtgatggtcccattaaacttcccctttgcaaacctg

SEQ ID NO: 11371 - DNA, 587 bp, Homo Sapiens
ttcatagctcagtaagtgtttaatgaagaagagacagatggaaagagatgggcgaggaaggctgatgttacaaatataaactttgtcagcactttcaaaacaatagcaaatacacttaaatacatacaaagtttattaaaaataggttgcaactgaaatacagtagaaatggaaaactacagcagttttgatgttttctcatagtaatgcagttctgaaaagcacttttacacatattcacatttgacctcactgcccaaagatggccaaatccacttgtgtatgggtttcacaaccacacatacaaatatccctgtatgtagatatttacatgtatctgcatgttctcctgtgtatttttctatatattaacagaaaagtaattcatctgcatctctttaaagaaagtgtggatttagtcaccataaggctgccagtgtcctcaagatatttgggaggtgcctgcttttcctagaacttctgctgcaagcaagcaaatccttcctaaacactcagaaccattcactctcttactcaaacaaggaaatggtaagaacacactttcaaataaaaaccctgatagaggt

SEQ ID NO: 11372 - DNA, 364 bp, Homo Sapiens
caatttctagaggaactttttctctgttaattcctggaactgtattttgaatccttaaaggtgagccctcatagggagatccaaagtcctgtggttaacgccttcatttatagatgaggcagctgaggcctggggatgtgaacaacctgctcacagtcctcatttactggatttgacttcagccaggtgaactggaatgccttggggcgtggaagggcattaggagtgtttcatttgatatgtgaatgctcataaaaaaatgtcaaggaatgaagaacaacaactctcagtggtgcctgcatttataattatttatgtgaaagtcaaattcatgtacagtaaatttgttataagaatattcaaa

SEQ ID NO: 11373 - DNA, 432 bp, Homo Sapiens
  misc_feature (273)..(281): n is a, c, g, or t
ggagtccaaaggaagagtaaacaagaatggagctgtgttcacactgaatttggggtcaatctatttcccccaccctctctcctccccaacccttcaggaaccctttagtttattaatcttatacagaagaaactaacttagaaacaaaggattcaatatttgcttatttattctttgttaacatgagagtcccatgtctgaaaaccaaagtccaatttctgtctggccttttgtctcatccttcttggcaaaagtagcttttgaactgatatnnnnnnnnntgctgagtaacagaaaagtattaatgtgcttgacaccatgactgaaatactatgatcttgtttgtcaataaaaagcagctatctgtgaaccaggtaactgtgtgttttggaagatctgtttattaacagtaaataaataagccctgtacag

SEQ ID NO: 11374 - DNA, 618 bp, Homo Sapiens
tttcgactcctataggaatttgcctcgagccaagattcggcacgaggagtccagtcccaccggactctccaagatacccagtcccgagacccagccgcctgacagtgaagtatgaccggggccagctccagcgctggctggagatggagcaatgggtgatgctcaagttcaggagctcttccaggatcaagcaaccccttctgagcctgagattgacctggaagctctcatggatctatccacagaggagcagaagactcagctggaggccattcttgggaactgcccccgccccacagaggcttttatctctgagctgctcagtcaactcaagaaactccggagactcagccggcctcagaaataagcctgagagaccatctttagcagcctcagcactgccaggcctgccctgaaactccagatcctggctaagagggaaatagctccttgggacacaaacaagaaatgtggacaaggagggacatttgcatactcctactgtctgtgtggtcacagctagtttctgtcagctgggctctctgggagaaagctggctgttgtccaatgccttccttggcagccaagtggataaaacctttaggagccccagctcaa

SEQ ID NO: 11375 - DNA, 439 bp, Homo Sapiens
tttataatataaacagacagtatccacatagtttatttctcacagttctcctgacaaatgaacatcattcaagaacatactgtatacacagataagaagaaacatacaaaatgttttaaatgatgcacaacaaaatccagcagtataaaagaatgcatgtgaacccttgctcactgtgcagactaaatttaatcacttgtttaaatagtaataaaaatacaatcttttatggatcttgtgcagactacaaaagagggaaattattaccatatatatgatttttatattaggcagttttctttgatgagttgtactgacaactccaaatacagaggcagaaggctgtgtattttaaaggaattaatgttgtgaattagaaactttacacagttactaccactggcacttttcaccatagtttgtacacatcacatgatca

SEQ ID NO: 11376 - DNA, 457 bp, Homo Sapiens
caggctgggaaagtctagagccccctttggcccctttccatgactgtcaaggacaactgactcccccatcagctcaaacattaagggtacccgggcacaaccgtacccttgcccccagccccagcctccctgagggcctgccgggctgcctctgccccagcccccagcaagggcactcccaggcttcctggtgggtgcagcccactccctctgccctctgctccgttccctgggggctgggactaaagaaatgggtgtcccccaccccatcagctgggaaagcccaggccgcaggagtgggatgcccgttggactttgcccctcacactggcccagcccctcacactgccccaccccgagaaccctcagctctcaaaggtcactcctgggagtttcttcttcccaatggaagtggcttaagagccaaaactgaaataaatcatttggattcaagtta

SEQ ID NO: 11377 - DNA, 224 bp, Homo Sapiens
  misc_feature (68)..(68): n is a, c, g, or t
gggtgatagtatgtggatccctcactattatattcccactataaccagtaagttcatttcataggccnctatcatgcattaatcattgaatggcaggagttaatgaaaacttttcctgttacaacgcccattgccggcaatgaacgtaccaaaaccgccaaggaagtcattgttattgcacaatacatgaggacctggagcttttccctgtgttacgtctaggt

SEQ ID NO: 11378 - DNA, 448 bp, Homo Sapiens
tttttttactataagcatgtattactcataataatgggaggtagatccaaattttcaaggaataatctgaacttttataacagaaactgtacttaagaacactaatagaggttggctgacaccctgaaaaaatggtctgttacgtttaactgtgggccagtcagcttcaaactcaggaaaacctctcacctcagttgcaggggaaatgggcaacaataatagtagctactgctgacaggctgggccctgtgcttaactccatctatcatctccaccaactatcccacgtggcatgtgctaccactattttacagatcagaccgtttacataacggagaccgaggatgcacatacgcccctcccctgaaacgcaagtctcactgaaggtagactaagatgccaccttggtgtaaataacaaattacaataaactctgactcagatactg

SEQ ID NO: 11379 - DNA, 555 bp, Homo Sapiens
cgaggacgcgcctgcgcagaggcggcagcaccaccggggttgactccgggggcgcggcgaggagagacatgaggctgagctggttccgggtcctgaccagtactgtccatctgcctgagcgccgtggccacggccacgggggccgagggcaaaaggaagctgcagatcggggtcaagaagcgggtggaccactgtcccatcaaatcgcgcaaaggggatgtcctgcacatgcactacacggggaagctggaagatgggacagagtttgacagcagcctgccccagaaccagccctttgtcttctcccttggcacaggccaggtcatcaagggctgggaccaggggctgctggggatgtgtgagggggaaaagcgcaagctggtgatcccatccgagctagggtatggagagcggggagctcccccaaagattccaggcggtgcaaccctggtgttcgaggtggagctgctcaaaatagagcgacgaactgagctgtaaccagactggggaggggcagggggagaggcccccatcagggaccagactgttccaaag

SEQ ID NO: 11380 - DNA, 636 bp, Homo Sapiens
  misc_feature (421)..(485): n is a, c, g, or t
tcaaggagctttgttataaaagaaatgacgacattgcaatttggctcaagctacgacaaacaatatatccgcagcatataataaagggcagatggggacagatgggcacagatgctaggtttacagatgcaacggtgacaacttttaaagattcttttctgactgcgtctattttctcagggcaatagggagcaaagtgagagggaggagatatgagacgtgcaatgacagagtaaaactatgaaaccagtcatttaggacaatgtaacaggaaagactgggtcactaaggacaagatcacgagtttcaagcaagcctaggtcagcatgcttatgtaatgggttaacattttgacttaaaaaacaaataaacctgctctatagtcttttatttaaccaaatgttctatctgaagttttttnnnnnnnnnnnnnnnnnnnnnnnnnnnnnnnnnnnnnnnnnnnnnnnnnnnnnnnnnnnnnnnnnaatttaaaagaaaagacctgtgccaataggacacagggaaaaaaattaagtttttcttaagggacgggtccattatccttaacagatcatctgatctgcatttgaatatacatggcaacagcaatatttttccatgaaataaacactaaca

SEQ ID NO: 11381 - DNA, 439 bp, Homo Sapiens
tgttgctcgtctctgaggatcccccatcatggggtcctggagtgcctagctctcttcacgttacgcccgctcgttactagcatcgtagtgagctggactcctccagagaatcagaacattgtggtcagaggttacgccattggttatggcattggcagccctcatgcccagaccatcaaagtggactataaacagcgctattacaccattgaaaatctggtatcccagctctcactatgtgattaccctgaaagcatttaataacgtgggtgaaggcatccccctgtatgagagtgctgtgaccaggcctcacacagtgccagatcccactcccatgatgccaccagtgggagttcaggcttccattctgagtcatgacaccatcaagaattacgtgggcagacaactcgctgaccaagcaccagaagattacagaatc

SEQ ID NO: 11382 - DNA, 526 bp, Homo Sapiens
  misc_feature (90)..(294): n is a, c, g, or t
ataaattgcaagatgtcacaggtgtgatgaagggagagtaggagagaccatgagtatgtgtaacaggaggacacagcattattctagtgnnnnnnnnnnnnnnnnnnnnnnnnnnnnnnnnnnnnnnnnnnnnnnnnnnnnnnnnnnnnnnnnnnnnnnnnnnnnnnnnnnnnnnnnnnnnnnnnnnnnnnnnnnnnnnnnnnnnnnnnnnnnnnnnnnnnnnnnnnnnnnnnnnnnnnnnnnnnnnnnnnnnnnnnnnnnnnnnnnnnnnnnnnnnnnnnnnnnnnnnnnnnncttctagatcatcataagactacagagcacttttcaaagctcatgcatgttcatcatgttagtgtcgtattttgagctggggttttgagactccccttagagatagagaaacagacccaagaaatgtgctcaattgcaatgggccacatacctagatctccagatgtcatttcccctctcttattttaagttatgttaagattactaaaacaataaaagctcctaaaaaatc

SEQ ID NO: 11383 - DNA, 485 bp, Homo Sapiens
  misc_feature (200)..(200): n is a, c, g, or t
  misc_feature (230)..(230): n is a, c, g, or t
tgcatgttgttggtcgtctctacaggacccccctgcttggtcgtctggagccctgaacgagaggacgcagtacctgctggtcctccaaagagatccatcagttcaacagggatgtggaggacgagatcttgtgggttggagagaggatgcctttggcaacttccacggatcatggccacaacctccagagctgtgcagcntattaataacagaaaaatcagaccctccangaaagaaatccagggtgcacctagcctcgcgattgacgacatctttgagaaggagccaaaacatcgtcactgacagcagcagcctcagcgctgaggccatcagacagaggcttgccgacctgaagcagctgtggggtctcctcattgaggagacagagaaacgccacaggcggctggaggaggcgcacagggcccagcagtactactttgacgctgctgaggacgaagcctggatgagcgagcaggagctgtgcc

SEQ ID NO: 11384 - DNA, 510 bp, Homo Sapiens
tggttttgggaagggttctttcagggggaggaggacttggagggtctgagggcaactgtcctgaaccgactgaccctgaggaagccgcttaatgctgctttgcttttaatcaccgtcccgaacagtggacggaggtccccggttcctggtcaggtccccatggcttgttctcaggaacctgactttagatgttttgggatcaggagcccccaacacaggcaagtccaccccataataaccctgccagtgccagggtgggctggggactctggcacaatgatcccgggcgccaggacagcagcactcccgctgcacacagacggcctaggggtggcgctcagaccccaccctacgctcatatctggaaggggcaaccctgaatggtcactggtcagggcagtggccaagcctgctgtgtccttcctcaacaaggtccccccaccgctcagtgtcagcgggtaacgtgtgttcttttgagtccttgtatgaataaaaggctggaaacctaaa

SEQ ID NO: 11385 - DNA, 252 bp, Homo Sapiens
agatgttagtgttgtggatgtccttggtcttgtgaagattcaggtcctcctctccgggtagcttagaagtaaggaggttggtttgattcaatagtatggggacagcaatggggacagcaagggcagaagtgtcctctccacgtaactcataatgcccctcctgggggagattgcatctccaggacaagcatctaaaggaggccccatgctgtgcagaggggtattgttcctgtctctttcattgtcctccct

SEQ ID NO: 11386 - DNA, 343 bp, Homo Sapiens
ctcagagcgtcactgtcaacctacagtaaaattgccagagtaagctctttgggactacaacacacatacccttaatgtctttatttctattttgtctacctcttcagtctaggtgaaaaaataggaaggataatagggaagaacttggtttatgcctacttatccgccccttaggaattttgacaaacctctacgtagcaataagaactgcagcatggtatagaaaaagacgaggaaagctgtatagaaatgcataataaatgggcaggaaaagaactgcttggaacaaacagggaggttgaactataaggagagaaagcacagaggctaatcaacaaggctg

SEQ ID NO: 11387 - DNA, 410 bp, Homo Sapiens
catcatggggttcggaatctcccaaatcaggaagtgagtattaggttgggttcatctgggtggccccgtccacctgttctccctcctctagcctttgcacatggccgttcctttgcctgtctcatcctttctccgctctactcttcttcaaagacccagttcattttatgatccctcgctaaggcctcaaagaggactaggggcagaaatcagacctgaactcacttctggcgtccccaccattgccctacacagagcctggtgctaaagtgaagtgaagttatataaatatttacactagtgatctgaactcagggagtaacaactaggtcttcggggtgagaaaggggagtccatgaagccaagtcgatgtctgcctgacagggcccgtctcttcccaccctcagtct

SEQ ID NO: 11388 - DNA, 730 bp, Homo Sapiens
  misc_feature (124)..(124): n is a, c, g, or t
  misc_feature (143)..(143): n is a, c, g, or t
  misc_feature (153)..(153): n is a, c, g, or t
cttcttaaaacgagttatccatttgtaaactgatttctttggagcactgtccctatcaacttttcataaagcatcaattagttcaccattcttccacccaagtgtcaacatatatttgatggtntgttcttgctccaattttnagcagaattncgtgttgttctggatagagcctctttttcaaactgatgtcttattcttcctagtgcttcaaactagatccttattatataaatcttcaacttcttgatcaaataaatatgacaaatgatgttctctaagaaaaacacccttcaattttattccttccctgcatattttgagtaattatcttccaagacccatgtatcttttctcaacatctctgagagtacaattccttatttccttcattgtggcaaagtgtttcagaaaagggttccttgaattaaaagtcggcgtatcctatttgactcctgctcctccggtatcacatacctacagccaaccatgccaagagcttccccattatctccgcatcggagagcctttcctcccgatatcctccagtttcagagaccgcacccggagacccattggcaggttcctggattcgcctcaattttggtcctgcctcctctgcttcgcattttcaggcttggcctcacaagaaggacgatggcgccagattgtgccagaatgggtgaaaacagaaggaaaataaaccggttgcagcaaaacccactattcc

SEQ ID NO: 11389 - DNA, 355 bp, Homo Sapiens
gtttcctggagggtagcatttataacagccttggggcagaggggaacgttccaccccagaggaaggaatttgagtcctaatacgcacaggctgacgaaagtgtcctggggctctaaataagtttgaatgtcagtcaggctacagagaatgttgtaccttggaaaagccctggtacggcattggtctctgaggcaagtgggcattgagatacaaaccagtgcaacacctgcatgcagtaatcacaggagtgttcacattcactctttccccaccaccaggcagtgcagtgcagggagagactccttcagcctgaggaaaggagaaggaagagatcagaagacttggggatcctcta

SEQ ID NO: 11390 - DNA, 590 bp, Homo Sapiens
atctcctgcaatctggaaataatatcctcatttcctgtgcggccaccaaagaccaaatcagaattttctgagtggtcataactccttgagcgttcagtatctgaaagagcatcagcttcaggttgaatttccagctccaggtgtaaccagtcttggtaagttaagtgaacatcttcctctttcaacacccctcggaaggttctgtgtgtccagagagagagggcagctctctgccagtctgcagaaggaaggtgcaagggtctccaggaaaggctggctacgtcctcctcagaaagaggctgtcgggcctctgagaacaatctgaacatgaggaactgaaactttttaataaggcctggagataagcagctgcacaaagtatctcgtgactgggaagaaaacttgcagagagagtaagaaattgctgctgtacaaaatttcaggcagaagaacaaggaatccctcgtcctacaggtcaggaggctgtcaaagagcgcagggacaggaaggccagcatcaggtgcaggaggacccacatccacctctgggagcgcagacctgactcacccaggtggataacacgttccgag

SEQ ID NO: 11391 - DNA, 425 bp, Homo Sapiens
tgttgaattcatctgagtctttcctgacgcccagcaaatattccccctcggattatttaacaccttgagggcattttggtcttcagttcaacactcttgctctgttcccaaatggggcgctatttaggggaatctaaagagaaagctgagaagaataaacatttaccgagttctcttggcattcagtctctgaaaaaccacagtataaactattcatgctgcttcttacatctgtcaaatcgaaaattaaaagccataaaagtgtaacactgaaaatatggcatcaaaaaggataaaggtggcctttgtaaaaataacaagaaaagtatattagccaataaaatattctaactcttcatttaaaagtgcatcccgggcaggacagagatgactctgaagcattgggcctccagaaccccatgatg

SEQ ID NO: 11392 - DNA, 1061 bp, Homo Sapiens
aggctggtaccggtccggaattcccgggatcattagcatgcatatcgagtttgcccttacgtggtgggagttcaaacacacaaagacccactctttgcacaaaactgttctcgctggtttggaataggctcccgtgcttttttaatgttattgcagcatggatgttcattacagaattcagataaaatttgctaatgttctgctatgatgtttgatctcatcttaatcacagtgagctcttccatagctcaatatgcggtttgccctcaagtgtgcactgtttattactttgtaatatgccactatgagtactgacacttagagctgtttaaaggccgagaactggaaacagcctttcctccattttctgtgtattggtgatgggagtgataaccttttgggggagctttctaaatctcgcagaagaggaaagtggcctgctctggcaggtatgtgcaggatacagtgtgtttcatctgttccggtgccaagaatgagcactgtactgtggcagttccctttggatttgtatgtgctctgggctcatgaagatattgcatcgtgagctgcagcagttgcactctttttcagtgacctaaaaatggcttatttccgaggaatgaaaggctgccatcgttggctgtggatgtggaaaacctttcctagcttagagcatttgtatctacaatacattttaaagtcagagttcgtgttccctgttttaatcacatgactacctgtcccagtacacgaaagggcgctggttggcattcttcttaatgtatttagtaaagatcataagacatcctttaagcagtttaaatgtctctgaaacaggccatacaggctctagtcaagaatgaattagagtgaaggaaagctgtgtgacacctggcattcctctctgttcatggaagcttctttgaggcttgaagcttgattttactatctagacctctctggctaatacctattcttcaaccaactcggttactctgacataggaatttacttcttttccttgagtgtataacacgttcgcgagagataacacgttccga

SEQ ID NO: 11393 - DNA, 235 bp, Homo Sapiens
  misc_feature (191)..(191): n is a, c, g, or t
catcatcggggtgctggagaaaggagaccggctgcccaagcctgagtctctgtccaccggtcctttataccgctcatgtacccgctgctgggactacgaccccagtgaccggccccgcttcaccgagctggtgtgcagcctcagtgacgtttatcagatggagaaggacattgccatggagcaagagaggntgctcgtaccgacccccaaaatcttgagcccacacctccagaca

SEQ ID NO: 11394 - DNA, 609 bp, Homo Sapiens
ctcgcgaatcgtgttacatccaatctgaaaacagcagattggatggatacacacaccaaattagaagtaaaggtataagttggactagaagcagaacaaaggtgattttaactgtatttctaatatttgaattattttaaaatagctgatgcaaaaatgacaaagattagcatttatttattctagatggttgatcacacatatttgagatattatttgctaagtctgtagttgtaagcatttcaaaatctaaagaataatttttaaaagctataaaaatatgaataaaggactagaagatcagtaacttttaattaatatgctggattctgggacaactttaaactcaacagtagtatttaccatggtgtcaaatttagcatttatcttgagttcacaaacttgagttcactaattttgtctctgtatttcaaatttctagcgtttacagactactataacaaccatactcttttaggctaagtgtaggaagatagtaatagatttctggctgaaaaagaagtcttactttactaacgtaaatcccagatcactatttcaagcccatcattctcaacgtcccttcacgtggtcatcgtggccacctac

SEQ ID NO: 11395 - DNA, 492 bp, Homo Sapiens
atctgacagatatatgtgtgtcttaagtactttatagagtaatatataggtcttgctgtctggtaatatagttcttccagttttgtttattgaggttgacttgttttttctaggccttttgtatttccatataagtttttaaattgggattacattgaatttatagatcaattttgagatagttgatatctgtatagtatttgagtcttccaattcatgaatatggttcgtccccttattagtctttgatatttgtcagtaatgtttcgcaattttcagcgtgaaggtctcacacatctttttaaagagttattctctgatattctatgatgcagtggtacacgatgttttattctaaaatgtcaatttattatgagttgcttgtacacaaaaatacaactggttcttctatagtttcctaatatccaatggcttgtcgcttttggtatgtgcccttttatcacttgatgtataacttactcacatgtaata

SEQ ID NO: 11396 - DNA, 636 bp, Homo Sapiens
  misc_feature (564)..(564): n is a, c, g, or t
tacccctcgcgaacgtgttatccacacatgtgtaactgcacactctagattaacaggagagaaaacacgctcatttttgtttccagctacacatacttagctttctaaacacaaaaactgaataatttatctgatttatgaatgatggtttggtatgtctaagaaagctatataaaacataaaatgaactcatgttcatgcatgaattaaactgacttcatgagttctagggagacgcattaacctgtgctgttcccctggacgcacacttggcctcatacaggtgccactaacagccctgatggcagtgtcagaggacagcaaggtgaggctggggaagtgaggctgtagggcccagagaggccctagtgcctccaacagtctcagatgctacttgattacttctatgctatgggctgctaactcttacatagcctagaaaatatttacccatgaacactaccatgtttggatttcaaacaactttaaacatttggtatcagattgggggagcaacaaataataaaatttagggtctgtactgttaaaagtatagtatataanagtaataaaacctgtgtggggcatttttggttaatctgtcgtcgaaaacggtaatctaaacctgggagagtt

SEQ ID NO: 11397 - DNA, 643 bp, Homo Sapiens
tggcacataacaggtgctcaaaaactatttgctgaataaacagcacagacctagataatttcccttacatgcaacctttttggaaagccataaaaatgtaaggaaagttggaagggctaagttggggggtttccaaagagctttatagtctcatgaatcttcatgcagtactaccactggaaactcccattccaggcagctttttaaagaaagaagcaagatggctatcatgtcctaatgtaaaaaacagaaatttaattaaagaaaaaagcaagagatacgagtctccctttccaagtacaaaaacaagcaccccaactcccctcaagaaaacagaaggctcaatatctttaccaacaattattagagccacagaatacattccaaaatgtcatccagaagttgctctgtcttaagcagcaggaaataatctaatgacattataccacataaaaatatatttgcctgctcctcttccagtagaatagtgagatccaaccaccttgggagactcttcctccaccccactcccattacatagagtgtaatgctgcagggagaggaagttaaacattactttcaggaagaaggaagggtgtggttttactgctaagcagaagtgtaaaaataagagagcaaccaa

SEQ ID NO: 11398 - DNA, 870 bp, Homo Sapiens
ttacccctcgcgaacgtgttatccattataagtgatctagcggggttcttagcttagtaagagagaaatatatctgatcatgatcacctgtttggggttgacaaacctggttaccaatattcttttagccagatggatgttggaatttgaggatttagaattacacttttatgattcttgtttttcttcagctgctcctggtgtctctgagtgtagatttcttccatttaccctctctaggaaattaagctttgcagttttctagggcaggtgagagccagttacgcgttagtatgtagtgaataagggattgttttgattgcttttcagatggtatgcaattcctgttggttagcctcatctgaaaacgtcactcctggatacatagaacatcactgcgcatgtgcatctccccacccccgatgcctggtgtctaacgttcctccagtttctggtgctctgatgcattgcttttgggcttgtcttactacagcagctttcttcggtcctcagtcatttaccacttgtcatatgtcctttctagtttccagggatattcttttttatatttatggctttatgccatttatctcagttgtcatttggcgtttcaagaaggagaggtggtagtgtttaagtggaattaactacttgtgtttctgatgtggtcttttatatttcttacagggttttgttttaccaagtactagtcttcagtctatcctgtttacttgattttttcccactcaactcacaaacatttttgaatcatctcatgaattctgctttccatttacatttttgcccttttgtcttttcctcttcgctgttaaacttcctgaaaaaataaaactagttgattcacttctt

SEQ ID NO: 11399 - DNA, 617 bp, Homo Sapiens
ttaaatttgcactactgtatacctagggaatgtttcagagaagaaagatggggaatacaataaattgactaattacttgagattttctctagttttatctggtttaaaaacagtattataaatatatcctaattcagaggaagtcatcaatgacgaattatcctatattctctctcttctgtatgagaccattccaatatttctactctggagtacgctaataggctcaccctggaatgcccaaattcctctatacgtgagcttacaactttgttcaaatcccaggagacatctaggtaaataatgcaatcaactcttcacatatgcagaatgagcttggcctttagacaagatgtaacaacttaacattataggatcctcctataactcccttcattcattacgtgtccataaatcaatgtcttccatcctctgagtcatttctctgtaattctattctattgttatttttctttgccttagctctcacctcacttttatggtaaacactttaggtaatatttgtcatgaaggatggactatgaaaataaatgatacacttgtaagccagttgacatgttataccatgataacacgcgcgagggggtccttagagt

SEQ ID NO: 11400 - DNA, 684 bp, Homo Sapiens
  misc_feature (616)..(637): n is a, c, g, or t
ttaattccaggcctgctggaattaatctgatctgttttgctaaagtttttgcaaggcactgtcctggtcaaggcatgaaacacagtgattaaggaaacatagggattatagtgctgccttgtagccaggggtttgaagagcttgggggtggtttgtatcagcctgtcaccattatttataacaattaaattgattatttgctcctggtcttggtgagaccaactccactaagaacgtcctgctattgaggctagttgtggcaggaatatgcctatgtgacaagcaaagtatgagaaacacctgagatgctatgttggaccctgattccaagatgctgtatacacacatcactggttcttgctctgggtggggatagtgtgtccagccacagcccttacaaaagggaggattgtgggagactgcgcctagttctccagagcctttgctctgaaataccggttggccgggacacatattcttaatttaatgccattgctgtattgaatccttttcttgtaataaacgaggtttgtaagcattgtcattttgggtcttgtgacactcctttaggcactgaaccctgttgaaactgccactgttaatgcacattattgtnnnnnnnnnnnnnnnnnnnnnntatatatattgtctgcctctggtcctttatccagtacacgttcgcga

SEQ ID NO: 11401 - DNA, 483 bp, Homo Sapiens
  misc_feature (45)..(45): n is a, c, g, or t
aaagaaaagaaactggggtgtaggtattgacttagggcactaggntattagacttttaaaatttaaatatatatatacatttttttccttctgcaatacatttgaaaacttgtttgggagactctgcattttttattgtggtttttttgttattgttggtttatacaagcatgcgttgcacttcttttttgggagatgtgtgttgttgatgttctatgttttgttttgagtgtagcctgactgttttataatttgggagttctgcatttgatccgcatcccctgtggtttctaagtgtatggtctcagaactgttgcatggatcctgtgtttgcaactggggagacagaaactgtggttgatagccagtcactgccttaagaacatttgatgcaagatggccagcactgaacttttgagatatgacggtgtacttactgccttgtagcaaaataaagatgtgcccttattttacctaaaaaaa

SEQ ID NO: 11402 - DNA, 698 bp, Homo Sapiens
ccagagactgaatagtggtaagaagggggacaatgacagaagcctaggaagcacaaatatttaaggagcattcaaagcagactgagaaaaagttatcagagtcgtagaaggaaatccacgaaagtgtggtatactgaaaaggtagaagaaaacaagattttaaaagataagtattaaatactccagagaggtcaagtaaaagtaaagactgagaagtgcccttcagggaagcatggtgaatgatggggaaggttcaaagctagaagggaaaggaatgaatagcaaacgggacagaattaaaatgtcttttaattattctaattaacttggctatgaagagaaggcaagaagaagaaaagcagatataataggatagaagactgaaggacaattaaaaataacactagttaaaaagagaatagccaatagcacaaaatcccaaggaggagaacaagcaggtggccctgggcacgtccaagctcaactacctggaccccaggatcagcattgcctggtgcaagcggttcagggtgccagtggagaagatctacagcaaaacacagcgggagaggttcgcctgggctctcgccatggcaggagaagactttgaattctaacgacgagccgtgttgaaacttcttttgtatgtgtgtgtgtttttttcactattaaagcagtactggggaattttgtacaaa

SEQ ID NO: 11403 - DNA, 1199 bp, Homo Sapiens
catacagaagatttacctaggcttggcgctgccgcacccactaccaactgatgcgaaagagtcagatcctcatctcctcttgttttcggggaaacatggcccgaaagaattatcgcaaatatttccggtcagaggctgccctcaccttggcagatttcatctacaagagcatggtacagaaattcctatctggggctgaagaacaatttgccatccacaaacgtcttagacaagacatggccagccgccccctacaagtgcctcagcacagcaaatcaggagctgcagcagctcttctaccagtggaagtgcaagaggttccgggatcagctgtccccgaagcaggtagagatcctgagggaaaagctctgtgccagtgaactgttcaagggcaagaaggcttcatatccccagagtgtccccattccattctgtggtgactacattgggctgcaagggaaccccaagctgcagaagctgaaaggcggggaggagggccctgttctgatggcagaggccgtgaagaaggtcaatcgtggcaatggcaagacttcttctcggattctcctcctgaccaaagggccatgtgattctcacagacaccaagaagtcccaggccaaaattgtcattgggctagacaatgtggctggggtgtcagtcaccaccctcaaaggatgggctcttaagcctgcatctaagtaagatgtcatcggtgggctccaagggggacttcctgctggtcagcgagcatgtgattgaactgctgaccaaaatgtaccgggctgtgctggatgccacgcagaggcagcttacagtcaccgtgactgagaagttctcagtgaggttcaaggagaacagtgtggctgtcaaggtcgtccagggccctgcaggtggtgacaacagcaagctacgctacaaaaaaaaggggagtcattgcttggaggtgactgtgcagtgaggagggggcaccatgcagagatggcagttgcttcctcctgaaccagcactaatccccctctgccctcctgtgtgggaggatctctaacccctctgatcgtggcgcatggcttggggattaaactacccttgaagaggacccttgtcccaaacccttcttgttctctcctccaaaagtagcttcctccaacccgcagcctctctgcacactaataaaacatgtggcttggaaaggttcaaa

SEQ ID NO: 11404 - DNA, 234 bp, Homo Sapiens
cgataagagaacaaggcttaaaatatccctcaaaagaacaattgtgagaattccatgttagcggctgtctttaaacgactaccctcaggcagatctgggtttttatatctttatcttcattcagtgaagcaagccaaaagcccacatttgtatgccttaggtcttcttaaaatggtatctgtaaacatgtgtccaatataaaaactatttttaataaaaagttacatgaaacag

SEQ ID NO: 11405 - DNA, 956 bp, Homo Sapiens
gtctctccaggaagttcagagtaggggttaaggtcagttaaaatgatactgaagaggaaaggaatatatccgccacaacagacaatgaaataagtaggactgagtatttaggtgaaaaatctctagaaggtaaaaataaagataattcttcaaatgaagtcgtcccccaaggagcagaagaaagaatgtgtgtacaatgtgagagtgaagatgaaccacaagcaaatggaagtggtctgaccactgcccctccaactcccagggactcattacagccctccattaagcagaggctggcacggctacagctgtcaccagattttaccttcactgctggccttgctgcagaagtggctgctagatctctctcctttaccaccatgcaggaacagacttttggtggtgaggaggaagaacaaataatagaagaaaataaaaatgagatagaagaaaagtaagaaccaagattcatatgaagtgatattagattgttccttttacaaaagtgtttagcttcaagactggaaagggaatatgagtgtaagtttactatatataaagctaagatgtggatttacaggaagaaccctggtttgaataactgatctgaaattagtagttacctgtaaatggcagatcttttaggaaaataagagaaaggtaagggctcttttgaataaactgctgttttatttgtggcacaactgatcaatcttggaaattctttaagtatttttaataagaaatgaattatcatttcttgccagaatttgctaccttaaggtgattgggaaaattctgttgcaagaacattaacatttagtatgactcctttttactgtattcttgcagttaataactgcagctattatgttaataacaagttgtttgtattttatttttgtttataccagtcttaaagatccaggttctgaataaaaaaattaattgataca

SEQ ID NO: 11406 - DNA, 562 bp, Homo Sapiens
ccaccaaggtaagtcgcgaccgcaagtgaagtcggaccgtggacgcgctgtgtgtgctgaccggggcgcagcttttctcgctgcagaaggaggagctgcgggcggtgagccccgaggagggggcacgtgtgtacagccaggtcaccgtgcagcgctcgctgctggaggacaaagagaaagtgtcagagctggaggcagtgatggagaagcaaaagaagaaggtggaaggcgaggtggaaatggaggtcatttgacctgccaggcgcccttcgcaaagagtgacgaggccccgtgggagaacggactcctcagactctccccaatagcggaagtcgatcttctgaaggatggccaatctgctccggccctggtcttcccccatcccggtggacagacttaacgatccttgctgcagtccctccggagaggatctggactggctgggagtggggagggcgtggagacagtctacggaaagcgctagcagacccccgagagggtgcagtggagccctgagcattgtaatatgcggcccagcctataaacagcctccgtgcttaaa

SEQ ID NO: 11407 - DNA, 411 bp, Homo Sapiens
  misc_feature (66)..(66): n is a, c, g, or t
agctccgggagcggcccgcgcaggagcaccagcgaaagcagccagtctgagatattgacactacangaaaaaactgacagcttactcctggtatagattctactcttctctacaaatatagactccgttccctaccacagccttgatcagtcggcaatgtgttgttgacaaggacaaaaggaatcaatgtagatattgtcgattaagaaagtgttttagagcgggaatgaaaaaagaagctgtacaaaatgaacgtgacagaataagcaccagaagaagcacatttgatggcagcaacatcccctccattaacacactggcacaagctgaagttcggtctcgccagatctcagtctcaagccctgtgtcaagcactgacataaacgttaagaaaattgcaagtattggtga

SEQ ID NO: 11408 - DNA, 548 bp, Homo Sapiens
  misc_feature (431)..(431): n is a, c, g, or t
catgactacatcacagccaggcggcattccctgccacagtggcggcttgaatcatcaagaaatggataaatggggctttagtaaatcaggcttgcaggctcaaagctgcaatctgcccactctcaggtactgagactttgtgggcctcagacaccaggaagaaagttgggatacagtcatttgagttaaaaagggaatgacccctcagaaacccgcattagcagtgttactcttggaagtgcctttacttttaacgctctctgttctgaaaaagaggtgtttggttacgtgtgagccaacatcacgttttgttagctgtgatttacctttgtccgtttaaaagacttcacggagccattctgtatacaaggtgtgctctttccaatgtagaaggggttatggaaaagggtgcgatcctttgctgtaaactnggagagaccagtcccaaacagaggggaattttaagcccttctcatcacccaattggatgtttttgcttatagcaaattcctgcaaaataaataaataaatatttgcaaaactaaaaa

SEQ ID NO: 11409 - DNA, 336 bp, Homo Sapiens
aactaccaatcccaactacgtaataggaaaatgtaggatcaaaaggcccatgtatataagtactgaccactgggccataatgttgcttctcaggctatatgcagtcctttagtcagaagtcaataggcctatttattaatattttacagaccatattacctggattaccagggactatcttcgctgcagagatcaagggttaagatctatgggaagatacttatttttctgaggtccttatgtcctgtcatataattaaagactcaagagaatttatgtgaaatgctttctgtatgcccaaatctttagattaaaattatatagctgctcctgaaa

SEQ ID NO: 11410 - DNA, 423 bp, Homo Sapiens
gcaagaaggctatttttttattgtagtttgaatgggttaggaaaagcctcaatttttcactcttaagtccttcagtacatttttctttcatcttattacttatgcaagttaaggttctttggtaacagaattcttgcaactgtaaaataaaactacatagatgtaagaagtcatgtaaacggttaacaagcttaccaaggttagcaaaactttcattgtaaatcagtctgtactgagcaaataaaaatcattattagttgtataaacacaaattccattttgactttcaggatgtcatactacttctgtacctagcattttcagtccttatatttgcaatgttacacaaactgtactattttcttttatgtgcagtttgcatgagtaaaccatcagagaataaattctatctttaaattaaaa

SEQ ID NO: 11411 - DNA, 447 bp, Homo Sapiens
gatcttgtagtccttaaatttgaatccgtcagcacggtcactcataggaaaatgatcaaacaagcaagccagtcatgatttgactccttcccatctcatttcttactgccttacgctcatcctgaggtccaccttggtctctaaaaacaccatgtgttttcatgcctccatgtcttttcacacactgttccatttgctcttcctcccacattacattgaaactttcaagcctcagtcgaaacattgcttcttctggatagcagccttcttgacatccctcctcactccccagtccctacagggcttccatagctctttgtgtgcacttcgatcccagcattttccatcgacttgtaattgtttctgctacctgacaatcatcgccttgagtactgggacaacctttgattactcattatatcctcaataaatatttgttgaactaaa

SEQ ID NO: 11412 - DNA, 896 bp, Homo Sapiens
ttttactgtgttaaaaaaaagatggcacatttattgctacataaatgttatatacatattgtgttttctgttacagtgacagaaaaaaatttgaacttcttgctgctggttgaaaaggtttatcaataataccttgaatgttgacacaggatacaaatctgcaataaaccaacaatggaaactggagaacaagatgagaagcaattcatctccaacaattagctcttacaatactccataggtactacacggtatgctagaatcctactatggtcttaaaatgctattgtaaatttctgatattaatgaacaggttatggtaaataaccctacattttttactacctaatataataaaataaagtaagaaactttttactgaaaactttttgatttcaaaaatctagaaagagtaatatttagaattcaagaaattttcttacaagattattgtataaaagactagctacagtgaaaaataagccaaatgtttttttctttctattttatgaaggaaagcttctgggcatactgcaaagtctaatatagcgaaaaagacaacaagctctgaagaaaaaaaggccaggcagtggcatatgttcactcacacatcataagcaacaacttctgtttagctgattaacactgaaatgaagaacaaggccacagatagagtccgatgtaactggagaatatatgcaaattaaagtaaccaaaaagtccactaagttcacaaatgactgacttgttaggaatcatcctgattagagtaccagaagttctgtcttgtttttgttctttcaaattaacagaaatctttaagctacatagtgatttgggtcctttcctctgtgtgctgattgccactgttgatattggctataaggaattattaa

SEQ ID NO: 11413 - DNA, 500 bp, Homo Sapiens
aggggaggggaaatttagacatacagtggcgaggggatttttcttcagtttcctgtcatacattccaagtaaaccaagtaaaataagtgttggagtaacacttgcataaaagaatttaaggagtgatagctctttctgttctgccattcccaacattcctgggggaaaggagactcaatgagttaatactatttcactgagcccaagatggaaacttggtttgacctaaaacatctgattaatataggctagctgatttcttaaaaattcgttgcattgaaggatattttgcatgtctgtaacacctgtcaatacttgtttgtattgatttctgatattcttgcagctgactacgtgtaattgggcagatcagctttgcagtagattatgctgcatcctcgtggcaaaattctgtattcttagtgattgttacaaacccctttattgctgtctgagaaagtgaaagattgtgtatttctattaaaacatttacaatcaaa

SEQ ID NO: 11414 - DNA, 368 bp, Homo Sapiens
ggcaccattgtgcgtggcattacagggtgagccaccgtgtcccggccaccagaatcctttggtatagccaagccttttggttaccgcctcatgaagaatatgcttcccgcattgtcctagtcccagttgtattctcacaggtgttatgtgcaggacacaatccaaatcataaacctggctcatgcccaacacatttctgctaatagggagagggacccaccacacacccacacatgccagaggtccctcctcacagaggagagggcctgtgtctgtagaaggttaaagctgacaacatgtgaaacatcccagaattatgactcttcccaagtttaaaatacattctcctcatgagagcaaaaaaaaaa

SEQ ID NO: 11415 - DNA, 436 bp, Homo Sapiens
ggagaaacaaacacacccaagcacagtggagctgtcctaggcaacactcgcggtctcaggctgcggtgggcgtctgtcctgcatgtggcccagaccaccctgacccccgggcctgcctgcctggccctgcatgctgcacgctcactgtatttgtgcagatcctggccagtacaaagtcgttgctcttgtcttatcttctcttacagagtctccctccctttatagaatgtcaaccaaagagtgccctcctcccctctcagcctcctctttagctagcctccccatctcatcacaacgcatgtctgtgacctttggtaatcatttacagtgccacacggaaccctgtattttgcacacagcaaaacaaacaatgtttagctttatttatggtatttgatgctgtaaatggaaataaatattgttctttataaagctc

SEQ ID NO: 11416 - DNA, 868 bp, Homo Sapiens
caggttaagtaataaaaatttattgaaaattcctgggttggtgtttatctcctcatcaaaaattacttctatagaaggcatttagttggtttccagttcttgagtaaaataaataacacttaatgagtatgtctttacctaaacattgtctgcatttatgatttaaaagaagctactggatcaaacggtatgaaatattttaagtttctgataaatgtttttcaaaaaaattatactggttttcactcctaccaacagcgcagcctgtgttgctgtttccttgccaacactgtcaccattttaaaaagtcactgttatatcacaggtaaaaaatagaaagtttgctctgagaaaatttcttcctcccattacaaaataaagtcacagtctttccgtatgtccactctagagtgctatcttccaattctaaaaacagaggaactgttttcaaacatcattagtttagcggtctccactaacaaagacatacggataaagtaacatgtaagtcagattaagaatctcaactttttaagaaaaaaccaaatgactaaaggcatatatttattctatactttttgtcctataggtactctaggtccttgtgtaattattgaggacaaaacgtcagttaaaggtgagagggaaaactaggttgcagactagcagctgttttgcatctcacaagaacaaaggccttaacaaaccgtatactttatgcaaacaaagtgatgcctcactgacttaggagacaagtcacatgccatcagtgtgtcagaaaatttctttcttcagtgatagttaaggtaacctcgccagctactttccagagacagctccgggggatactggggaacaaaaaatcagg

SEQ ID NO: 11417 - DNA, 639 bp, Homo Sapiens
tctcacacagtgtggcaatcacactctcatacttgttggggtacttgcggaagatgtccttgatgaccacgatggcctcctggaccacatagttgaccttggtctggatgaggtcgagcagcgtgctcacacagcgctccgcagattgctccaccttgatggcgcagcggccaatagcacgcacagccttccgtacaaagtccacatccacttctgttgcgtactctttcagctctgccaacacctcgggcgatgttggcctgagaggccaggcggatcatgatgtccagcttctccagcttcacgtagatagggtcgttgtacttcacgaagaacaccttcatctcatgcttcaggatctcaggccttttctgcacgatgagattgatgttgcgcagggccacatactgcagctctggctcggctgacagcagtgtgaccaggggtgggccagcttcttgagcagtgtgccgtagtagtccaagtccttagacaacatctccatgaacttcatcagcaccttcacagcagagagcaccacagcggagtaggcatgggagagcctgggggtgacccgctcacagatgctctgggcctcacggtcgtcctgcctgagatgggatcctctagatcacctgc

SEQ ID NO: 11418 - DNA, 651 bp, Homo Sapiens
  misc_feature (632)..(632): n is a, c, g, or t
aagccagcagtcaagaagaggaagatgttactgaggaacagatcacagaaactccagtctggaagaagcatcattattgagaaagagacactagatttttctttttctctaagaatgatgacgaacttcaaggttctgacttattctggagaggagtaggaagtaatatgagcaggaactcttgggaggccagaacaaccaacctgcgtatggattgtcgaaagaaacataaagacgcaaaaaggaaaatgaaaccaaaataataaatgtcagctggttttgatactgaatgtgaacaaggctcacctaaggaaactgacccagaaaacagttttagctgacaaagaagaaatttcagagtgaaggaattttaaaaatctggctgacggaatatcattctggttgccatctttttctgtggaactcctctgcatttcttcctaagtaattacttcaaaaattaaattcaacttcttataaaggaagaacaagatagtccttgaaaatactttttgtatataatctctttgccctctatcctgagtaactaatggacatcttctcatgcaaggtttacatgaagcctttttaaataaatgagtcaaagcacttgtattttccagcctaggctntgtgtgaattataggctat

SEQ ID NO: 11419 - DNA, 729 bp, Homo Sapiens
tgctggcccttacgcgcgaggtactggtgacccaggagatatctggggatttagggccactgaagatagaagatacaatacagtctgagatgctggggacccaggagacagaggtggaagcttctagggtaccagagtcagaggctgaggggacagaagctaaaatattagggacccaggagataacagctagggattcaggggtcagagagatagaagcagagatagcagagtctgacatattggtagcccaggagatagaggtgggacttttgggggttctgggaatagagactggggcagcagaaggtgcgatattggggacccaagagatagcatctagggattcaggggtcccagggttagaagctgatacacacagggatccaggtaaaagaggttgggggttcagagcttccagagatagcgactgggacagcagaaactgagatattggggacccaagagatagcatctaggagttcaggggtcccagggctagaatctgaggtagctggggcccaggagacagaggtcgggggttcagggatctcagggcccgaggctcgaatggcagaggcccgagtactgatgacccgtaagacagaaattatagttccagaggctgagaaggaagaggctcagacttcgggggtccaggaagcagagactagagttgggagtgctctcaaatatgaggcttaaggccccagcactcaccaagattta

SEQ ID NO: 11420 - DNA, 493 bp, Homo Sapiens
  misc_feature (184)..(220): n is a, c, g, or t
gtaaaggcaatgagctagtcccagaaaggatccttcagttacatacaatttgtttaatgaaatgtcatggctctgttcatatttttgtcttgttcttccaattggtatatacaactttcagagcctcttgtatttggaaggctggaagggcccagactttggaatagtgtcttggtttcactgnnnnnnnnnnnnnnnnnnnnnnnnnnnnnnnnnnnnnaaactaaagctatataaagcttgtggattaaacagaataaatttctaaatttaaaaattttgccactcttacttagtagtgcttatgtaaaccttttggtgtgttgggagttgggcaggggaaagaaaaggtgatgaaattaaggttttaccatctttatttcaataattactgtggtgagtgctataaagggaatcagcatgtgattggaacatttagaatactggtgggagaagtccaccaggcaaagagaacaggattgcagtcagacaa

SEQ ID NO: 11421 - DNA, 1011 bp, Homo Sapiens
  misc_feature (374)..(421): n is a, c, g, or t
ctcaagctttatacttctaaatgagctctctcatccttcatcagaaggataaggaacctggcctgcactcttggggttaaacatgggtagagaccgtctcaggatgaggacctcttggggaaagtacaaacctctgctccctgtggccacattcctgcagtggatgaaaaaccgagatgctagaggcctctgctaaagacatcagggtcaacacatgaggatctgctgaaaatgccagcacctcctgacagtcatgccaccgcaagttagagaaggaggtccacaacgaccaaggcaaacatttggcacagaaatgaggcacttggtttggtgcatcaataggagctaaaaagtggaatggtccacctgctttnnnnnnnnnnnnnnnnnnnnnnnnnnnnnnnnnnnnnnnnnnnnnnnnccactgtgattgggctgcttccaactctgcctgtttctaagttttcctcggcccctcactttaaagcagagttcacaaagcacattcccaaaccccagctccctgacaggagcttgtgacacccagtgtggcctaagaatgggggatttgacttttgaaagcagaggagggaatttcgggctggatcgcaatcaggacagtcagcatgcctgcagagcacctagctgtgagaggatgggccaagccttattctgatgtggcccagctccatctttcactctggggatgttccagggtcacaaattcccccaaacctttgaccacgaacagattcaagcaggaaaaccagggcattggaatgttgaaataagcctgaaatacacttgattcagtggcttagatgatgccaaacagtggcactcaaaaacagcttgtcagtaccggggtttcttctctttttcctcatcctcccttctgctcacacatgccacaaccacacatggtccccagcaggaaccccaggtggcaggaccccacaagagggctgataaatgcaggcgaacttcagtcgtgcagcttcaggcctgaag

SEQ ID NO: 11422 - DNA, 446 bp, Homo Sapiens
gctccggcaccggccctcccagcccggccagcctgagcttgctgccctccagtagagacagaggggcagtatttgcaagggaggtgtttctgcctgtccctgcctgaatgtccctgggtggagcaggtacctccgggcgggcaagcctctgatttgcacacctgaaaatcgcggaattgagtttcgatagattgatttttaaaacttttttggagtagggggtataggggaatcatttaatttaaatcattaagattcccctgctcaaacccagattcctgtgtacagatgctatttagagggaatcagaaaaatgccaagccttttctctttgaatgtgctatttttataactgaacttgtacatatgtataaagagagacacatcttccttttactaactggataaaaaaatcttaaataaaatggagtgagataattttatgt

SEQ ID NO: 11423 - DNA, 410 bp, Homo Sapiens
ggtggtgtcggccaagttcgaggggaaaccgctgcttcagagacacagcttggatcctagcatgactatacattgtgacatggtcattacatatggattagaccaactggagaattgccagacttgtggtaccaattatatcatctcagtcttgaatttactcacgctgattgttgaacagataaatacgaaactgccatcatcatttgtagaaaaactgtctataccatcatctaaactactattcttgcgttatcataaagaaaaagaggttgttgctgtagcccatgctgtttatcaagcaatgctcagcttgaagaatattcctgttttggagactgcctataagttaatattgggagaaatgacttgtgccctaaacaacctcctgcacagtctgcaacttcctg

SEQ ID NO: 11424 - DNA, 382 bp, Homo Sapiens
  misc_feature (103)..(103): n is a, c, g, or t
ggtctggacagcaggtggcacattcacggggctggtcacccaaagcacttctccttgtgggccttaagcatgttcgagaagcggaaccgctggccacacacantcacatggatagggcttctcgcctgtgtgagttctgcggtgtctcttcatgttggggcggctggtgaagcttttgccacagatttcacaggtaaagggtttctctccagtgtgtgttttcatgtgttcgtcgaagtactgcttcatgttgaaatccttgccacaccactggcacacgaactgtttgtgcccaatatgaatgctcatgtgggagcgtagctggtacttgtactgaaacctttcgtcacagttctcgcatctaaagggcttctctccagaa

SEQ ID NO: 11425 - DNA, 334 bp, Homo Sapiens
tctggagccagatctgtctctctcctctccacttcttagtccaggtgccctagaacctctggcctctctgtctggtcctcagataggagtgggtcctcagataggagtgggttggttgacccctgggggcagggcagttggagtacagatatcactagcaggtcccagatggtaggaagacagatcagctcagggaaagctgctcacagcctccttcagagttctgggtcttgaaagcagctgttttgggagcctaactgcttttcccagggacttaaggcctttgtaatttttgtagccctttcatcctccagaataaagggaccttcttgag

SEQ ID NO: 11426 - DNA, 620 bp, Homo Sapiens
tccagcagcttttggagctcagcagtacatggcttttctgccccaccacattatggtaaaaatcttcaggttacttcccaccaagagtttagtggcccttaaatgtacctgctgctatttcaagtttatcattgagtactacaatatcaggccagcagattctcgctgggttcgagatccacgctatagagaggatccttgcaaacagtgcaagaaaaagtatgtgaaaggggatgtgtccctgtgccgatggcaccccaagccctattgccaggcattgccctatgcgccaggttattggatgtgctgccaccggtctcagaaaggattccctggctgtaagctggggcttcatgacaatcactgggttcctgcctgccacagctttaatcgggcaatccataagaaagcaaaagggactgaagctgaagaggaatactaaagtccatgtgagaggcaacaaaaggaccggtttctaaagctgcaaaacacctagatacaccgttcaaatgagcgtagccccctgagtcatcactctagaagaatctgtacatcatcaggactgcattgctcaggcattttctaaactctaaatttacgagctgtacaaaaaaattggt

SEQ ID NO: 11427 - DNA, 732 bp, Homo Sapiens
  misc_feature (637)..(637): n is a, c, g, or t
ttcggagatgtgctgtcctgcaagaggactgtgactttgtagtagcccggtgaccttgggcagatactccacagagtatgtcttgttcttgtcactgtcaggggtcactcgtgcctcctctttgttcccttctgggtcctcaacaaacaccatcacgtctccttgcccggcgctgatggtgtccacagtgaacttggctggctgcttcaccatgtttccagtgggctcgattcctctgccataggccctggctttcttcgggttgagttcgggtttgagaggagcccccggcttgagcttggctttgggaaactggaacaggtaagtcataactgagtgctcgtccacatccgggtgaatgatttcttcaggagtgatgacctgtggaacacccagccagtcatctgcctgctgcatggcttctcgtgcattatccacaggcttctgcgggtcccaggattcgcagtctgggcacagacctggagcacagctgtctaccagggctcccagggctttgccgtcttgccagttctggttaaagttggtgatgggcaagtaggggatcttgttctgaatccaccccagcagcctctgctttggcgtctgcttcttggcatcatcatccccttcatcctcncacacggcatggagatggagtagtggagatcagcgccacacagacctagatgagctcagttccatcacaatggcttgctatcgatgacacgagct

SEQ ID NO: 11428 - DNA, 1573 bp, Homo Sapiens
aggtgctggtacgctcggaattatgggattgcgcccgcgcgccccgggagcctacccagcacgcgctccgcgcccactggttccctccagccgccgccgtccagcctgagtccccactccggagtcgccgctgccgcggggacatggtcctctgcgttcagggacctcgtcctttgctggctgtggagcggactgggcagcggcccctgtgggccccgtccctggaactgcccaagccagtcatgcagcccttgcctgctggggccttcctcgaggaggtggcagagggtaccccagcccagacagagagtgagccaaaggtgctggacccagaggaggatctgctgtgcatagccaagaccttctcctaccttcgggaatctggctggtattggggttccattacggccagcgaggcccgacaacacctgcagaagatgccagaaggcacgttcttagtacgtgacagcacgcaccccagctacctgttcacgctgtcagtgaaaaccactcgtggccccaccaatgtacgcattgagtatgccgactccagcttccgtctggactccaactgcttgtccaggccacgcatcctggcctttccggatgtggtcagccttgtgcagcactatgtggcctcctgcactgctgatacccgaagcgacagccccgatcctgctcccaccccggccctgcctatgcctaaggaggatgcgcctagtgacccagcactgcctgctcctccaccagccactgctgtacacctaaaactggtgcagccctttgtacgcagaagcagtgcccgcagcctgcaacacctgtgccgccttgtcatcaaccgtctggtggccgacgtggactgcctgccactgcccccggcgcatggccgactacctccgacagtaccccttccagctctgactgtacggggcaatctgcccaaccctcacccagttcgcaccctgggaggggacatcagccccagctggacttgggcccccactgtccctcctccaggcatcctggggcctgcatacctctggcagctggcccaggaagagccagcaatgagcaaggcatgggagaggggaggtgtcacacaacttggaggtcaatgcccccaggccgcatgtggcttcattatactgagccatgtgtcagaggatggggagacaggcaggaccttgtcatcaccatgtgggctgggcccagagctccacatcgctatgcctagcccatgagccaccatgaactgtatgggcactcttcaagccctggtttatacaatccccagggtcagagtaggacccactactggcagccagcctcatgtatctaggcaggccgacctgccgcaggacactgacgcatcagacagtcgacctagttgaccccgttgtcgcacggctacagccagcgctagagagcactgcaaccacccataccacataacacaacaacactacacatgcgccatcgcgacgatccggagaccagcgcccagaccaccaagccgcagaacctacctaatcgcgctagcacccacgtgagacgagcgagcagacacgcacgg

SEQ ID NO: 11429 - DNA, 424 bp, Homo Sapiens
tttccactaggcacctgagtagtagcaactacagtagctgtattgggtgcaggaagaactgacgttgctgtgagggaacccgaagtcactggagtctgcaatttaggttgactactgacaactgctggaggagtgacaagattggttgaagatactgtattcacaggagtttgaaaggatggtggtgcactctcgcttacatttcttttggactccagcatctgtctcactgtgcctgcatttctgtaagacatgctattattgctgttgacatcatttacagtttattcctggtcgatactggtggcttgggtgaatgttaaagtcttttcgtaagatcttctttgctggcttcaaagcgtttgttaacctgctatctgcgctgtagttcatgagactgtttagcctcttgtacattcatctg

SEQ ID NO: 11430 - DNA, 381 bp, Homo Sapiens
  misc_feature (318)..(318): n is a, c, g, or t
  misc_feature (346)..(346): n is a, c, g, or t
gaactctctttaaaaagtacatttatagattgatcagaattataaccatggagaattttttcttctgagcattttaatatacttgaaaacaacattcacttgaaaaatttcagaacatttttcagtacctagttttattaaatattacacttgagagacactttttaaaaatgtgttaatgtcaatatgatgagattttagcctttctccagaactaaggcattaaagaaaatagcaaatattaaaaaataaaactgttacttttttccttctttcttttcacctttaggttaatatccagtattatgtgttatcccnttggataagtatgctttattttacctcngttaaaaattaaaataaatgatttctattcataaa

SEQ ID NO: 11431 - DNA, 480 bp, Homo Sapiens
tcgccccctgccaaagagtctgccctctccaagtgccaaagctgcgggctgtcctgcagctcctccctctgccagcgctgtgacagcctgctcacctgtcctccagcttccaagcccagcgccttccccagcaaggcctcgactcatgacagccttgcgcacggggcatctctgcgggagaagtacccaggccagactcagggcctcgaccgcctcccgcaccttcactccaaatccaagcccttccccacctctccaggtgtcaaaggtgaaccgagtccagtattagctgaatgtcatttcgtacaccacagctcagtcagcccatggccttcgtgaactttgctccaacacactgatgtgtgggcttcccacagcaggactgacttccccctttctgttgtttgcacatgcccctcttactgtactgtcaatagatatttttgagatttatttttaaataaatattcaacttgcaaa

SEQ ID NO: 11432 - DNA, 470 bp, Homo Sapiens
  misc_feature (229)..(230): n is a, c, g, or t
gttctctgatctgttgtctgttcacgcagcatctctaaggttttcatctgcttgtttctcaactctttgtctcgggcaaaggcaaaatacccaacaccaagttgccgggcctcattttcccgaatgtcttcataatgtacgggccccatgggcctcttcagggcctctctttcttcttcctcccattgctggcgctggaagttcttttctcatatcttcagataatagnnggttttttcattagcaggactaataaaaaagtctcccctgaagatttttatccatctccagcagatctggcaaatcctttctcatacagcgccgggaacgccccaaagagtccacgtaatccacccattcttcactggggtcttggggaggagggatctctccctcaggaaggttttcctcatcgtcgtccctttctcctgccttttgagaatctctatgggcaccagatgcctccattt

SEQ ID NO: 11433 - DNA, 366 bp, Homo Sapiens
  misc_feature (133)..(153): n is a, c, g, or t
tggaattattagagaggagagtttacacaactatgattactatattaagggctgtaatggataaagtagacagcctgaaaggataggcaatgtaacagagagatagaaatcctaagtaagaactaaaatactnnnnnnnnnnnnnnnnnnnnntactgtaatagaaataaagaatatctttgatgagtctattaatagactgagcacagctgataaaagaatctctgagaatgattatatactcatagaaaccccccaaactgaaaagcaaagagagtaaagacttaaaaaacaagcaaacaacaacatatccatgaacaatggaacaactatcaaaaggtataacttacatatactgggaatatc

SEQ ID NO: 11434 - DNA, 617 bp, Homo Sapiens
ctgggaagaaatcctcttctggacatgaccttgacctgggtgggcagaaagaaccacaaactccatctcccaatagaactttgaaagttcaactcagcttttcctttcatgctgtttgttgcctgcttgttgcactcctcctgccccagaactgcaagatttttagcttcacccctttctgagagtaatgttatcttttatcagaatcagtatcagttcccctgtattctgtgcttcatcgaatttgcaagactgacctcttttaagcatttaattcactcccagagtcatctggtcaggttgcaatatgaggacttctctgtcccccgcaaaagcctgggacacggagcttacttaatacatctgagatgctctcaaaagaggagcgttgtttcatctttcaaaatgttagaccattactttagagtataaaatcgacttattaatgattagtaatttttctaaagtattgggaaaactttcatattttataagatcttaacaagcttaaaaaagaattttatgaccagaatccaacaagagctctattttggaattgtgcccaagttggtgatgtttactctaaaattaataataaaactacttgtaagcacaaa

SEQ ID NO: 11435 - DNA, 456 bp, Homo Sapiens
gcataaagttactttatttttaagtatacatataattttgaaaaatataaatgctaaaatatctcatcttcttcatctcttaattccataaaagtcacaatagaaagcttcataaaactgtaaaatactatgttataggaattttaggatttatattggaaaaagttattagtaatatattgaaatgttttctgttctttatcattttgttccaccatgttgatctacttcatttaaaataaaaagatgcatcatttctctctccaaagttaataaagacttaagagaataaaaataagaatatctgaaagtgcgtattgattctgaaaagtaatgcgtacgaatatgtaccagccatgaaaatggctaaaaagaggcaactattcactcttttcacattgtaggactgggacaaagttacttctggctctaaaagtttcactggatgactttagc

SEQ ID NO: 11436 - DNA, 905 bp, Homo Sapiens
  misc_feature (572)..(572): n is a, c, g, or t
  misc_feature (585)..(585): n is a, c, g, or t
  misc_feature (589)..(590): n is a, c, g, or t
  misc_feature (828)..(828): n is a, c, g, or t
  misc_feature (831)..(831): n is a, c, g, or t
  misc_feature (833)..(833): n is a, c, g, or t
  misc_feature (887)..(887): n is a, c, g, or t
tttttcattatcacaagcatttattgagtacccatagaactcatggtaccttcacggtgtttacagaactttgcttatatgccgaccttgcccttaaggagcttacaatctagtggaaagaaagacggagaaactcagatgtgatagagcaatgagtgaacagatactatagactgaaaaataaccataaatgtaaaacacatactgaaaaatgagggttaatggggatggcaaggatgataggtaggcctggatatactcctgacttcttgaaggagtaaatatctagaatattcaaggacgtaaagtgcggttgagaaagccaggatgcaaacaaacatttcctatctgctgtgtattttcttgctccctgcagctgagaattgcaaaaagaaaacagggatagagataatgggtaaaaactttttagtattcttttagtacttctgtttttgaattagaccgaacagtcaccatgtaggtaacttagctatcctagatcatcctaaactgggtaaaaggaagaagatttaaaaactagcttgctatatgagtctataacatatgaattntaccttaactaanaggnntagatgactagactgccactatgctaaagaccactcaactgaatataatactgacatggcagaagtgcgagttttatcagtgatacacattgtgtactgcattgggggcttactagatgtgtggcggaatatacccatttatgaaggcagcacatcggcaagtaaaaatgtaagtgaaggtaggaaatacctagaatacatgatgttttatgcagctgaacaggacaaccctgaaaanacnanaattatggtaataccaaagtgactaaggttgtcttgattccccgcccccaccanaattatgaatcaaaagat

SEQ ID NO: 11437 - DNA, 654 bp, Homo Sapiens
  misc_feature (82)..(82): n is a, c, g, or t
gatctcagtatcatactgagacacctcccctgagccttacctacttaaattggtaaccgtcctaccaaaatttgtcaatttnaatcaagtgaggcaagttgcaagggagccagagatacgtgaaaaaagaaaagcagaaatactgatactttctaagaaagaagttgtaataatttctttggcacattgacttactgatatcttttgaaatgcatagacgactcttgtgaaccaaagagagcagtagtggttattccccggcgcaataaaaatgcctttgtgtatcacttgcgattgccagtcatttctgtgccagttgctttcattccagagaatggcctcattctccaaaaaaagatgatgattttagaagtaggatttcctaacaaattatgtggtggggagggacggcggggattttattcatcccgtctgagctcttcatacagtattaccattaggttttaagaacaaagatgggggaggagggagtagaaagctgagagtacgtagaacagctacaagacattagtgggtattcagattttgagctgtgtaaatatcaaacatcggcttccagccttaagagttatttgagcagagagttaaggaggaatgggagattttgtgaataaaatgtcttgccaaaaaaaa

SEQ ID NO: 11438 - DNA, 644 bp, Homo Sapiens
acttccagggctcgctcagttagcatttcagtgccatctaccccacgacgaggtggggccacccagaaaccaaagcccccttggaaatgatactctttcatcagggttgcctatggggccacggcgacaggtatggccccttgccagggtaggaggacattcatcacccagggaaccccaggtattaaagaagcccctgtgggggcagacagacatagcaggggtgggcagtgcctccctttatcctgacaatctctagtcgattcttgcctttttctcccgattgcggatttgggggccacctctaagatgcctctctccagccctgtctcaaccatactccaaattagtgccaacccaggggcctggcacctcccacatcatccattgtcttgctgccaagtgcgaataaacggcgtgattgccaacctggagggtcccctcttatcccttcaagccaagcttcctgctcaggattagtttccagctaagtctgcaagccctagaggagtttttccaggctgtctgtgaagcctggggaacacaacggcaactgggagatttgtgagtgaacactgtttcatcttaatatgcttctgaatttattttcatgtactaaatagatcagctcatcaaagccaaaa

SEQ ID NO: 11439 - DNA, 611 bp, Homo Sapiens
ctttccaatgacgtcaacagtgtgtgcgatggtacctgtggcaagagcgagggcagtcccagtgagaactctcaagacctcttcccccttgcctttaaccttttctgcagtgatctaagaagccagattcatctgcacaaatacgtggtggtctactttagagagattgatacaaaagacgattacaatgctctcagtgtctgccccaagtaccacctcatgaaggatgccactgctttctgtgcagaacttctccatgtcaagtagcaggtgtcagcaggaaaaagatcacaagcctgccacgatggctgctgctccttgtagcccacccatgagaagcaagagaccttaaaggcttcctatcccaccaattacagggaaaaaacgtgtgatgatcctgaagcttactatgcagcctacaaacagccttagtaattaaaacattttataccaataaaattttcaaatattgctaactaatgtagcattaactaacgattggaaactacatttacaacttcaaagctgttttatacatagaaatcaattacagttttaattgaaaactataaccattttgataatgcaacaataaagcatcttcagccaaa

SEQ ID NO: 11440 - DNA, 1073 bp, Homo Sapiens
  misc_feature (199)..(237): n is a, c, g, or t
cgcctcctttctttccgccttagcggttacctagtcgtcatctcggagagctgcgctgaggggggtcgcttgcccggcttcaggtgccccaaccgagccaggcaggctgccggaccctctcgagctcctccagtgccacccccgtcagcgacccgagcggtggggagaagccgggcgtccctagcgttcgcgccgggtnnnnnnnnnnnnnnnnnnnnnnnnnnnnnnnnnnnnnnnggcctgaggcagagccgccaggctcgcctgagcctcggtcccttggcgcgcggcgtgccctttcccgccccgagtccttgaactaacccaagtgttggggacatcgtgggaccgaggagaacaggaggggtgcagggggtggtgaggctagggccaggctaacgggttaaagaactctcagggtggggatgccacccggaaggggtgcttcgtaggctgcacgtcggggccgcgacctagagaaggctggatgtgcctccatcgccactaggtaaacgcagcaaggaatttggcagcttgagttctccaaggtgggagtgagagcgtgggagcattactgatgagaagttgaagaaaaggggaacaggggagcggggtttccggcctacttctgagagatgattctcaacccgatcactgagagttctgaagagctttgtgaacagcagtcagttcagggtattgattcatttgccgaactcaaaaccaagtgggatgagtcataaggtgatgataactttcagacctaagatggtttcgttaatctcagtgcagaggtgtgctgggggtgggtaatctagcaggtgagctgctagattaacgctgtctccataaagcgtcaaagatttactatagaagattgaaaaagagtgtcagctggtcacagaaattcagcacatgttttgttgaacgttttctgtgcgttagccaagagggagacatggtgaagagaagtaattcaaaatacagtctcatcccttaggaaggcagtttaccattcaaaagaagagttatttgtaagtaaccatattacaaggcagaaggctataggtatc

SEQ ID NO: 11441 - DNA, 508 bp, Homo Sapiens
tttgattattgtattttcatttataatatacaattttccaatcaaatttacacttgtatattcagttgagtagaaatatctggttaaatacaggtttcagatatatgtgttcaacacaaaaaggacactgagaaaaatttatgatcatttcaagagaccatttaaagctaataagcacggtttggaaatttctcactgaaaagctggaactacataccccatttaagaaaagacttgaagatctattattctaacccattgcttgttttgcaccctctttacaatatatctaaataaatttattttctgaatattcaaatttgactatttctgcaatttaaagcatcaaaatgaccctccaaatagtaaatattataaaactgctgattattacttatcatgagaaataacttaatgaaaacctatttacaaattaacagcccatccatccaaagattatatgtatttcaatattataatttataagaacaagatatccaatctgctc

SEQ ID NO: 11442 - DNA, 416 bp, Homo Sapiens
acatcgggcctgtgttacctcatccatacccattgcttgagctataagcaatatgataaaatctccctaagctatagccaagacctgtcttccagctcaacccattttatacctgcttgtctgccaggattaagtaagtgcaaaactgaactcattttctttctaaccaagcctgttctgcacttcccatcttggtgaatggtaccatgagccacctagccacccaccccagaactccacgttatcttacataggtccctcattcctctgttccattacacaatcatgtatacagggctgatgagtctgtcttcttaatagttctcaaatctgctcttgcctctcaaattccactaccgtggtcttaaaggtcctcatcacttcttgctgtccgccctctacaatgaactaaggtt

SEQ ID NO: 11443 - DNA, 636 bp, Homo Sapiens
tcggccgcgatcaggacagcagtaaaatacagacatggcttcccatacacaggtatctagagcagcagtgtgattgtgaacaggagcaaggattatctgaataggaatccccttcgtcgtcattggagcagtggtagaagatgcccttgactaagcacatgcaggttccatattccaccatgctctcagcagagcaaaggcactgccggttacaggccaaacaggatggtagggtcctgggagcagtgcattctccacacttgcacttcccacactgttcacaaatgaacttgtgctgtgtcaggtcctctttcaaggaacccttcaagtcatccacaatcagttgcttgggctgggtccggattgccctttcagacctatgaccagggactggtctggttggtggtgaccttcctaacagtccctgttcagaagaggcactgctgttgctcccagagctggctgcacttccagtgctggttgatctgctcaaaatggggccctggcattacttgggagtactgcatgtcccaggtggcttgtgtgtctgtgctcgtagttatattcacattaattggtatgatttcatagaggtccttgcatgcttttcttgtcttgcttgtcctgttcagacag

SEQ ID NO: 11444 - DNA, 464 bp, Homo Sapiens
aatggtgacagaagctggggttgaaactgaggcaaggatgggggttggagctggggctgaggctggagctgaagaagaggttatagctgcagctgaagtagaggctggaactgaagctgagactgaggctgaggctgaaactggagctaagggtgaggctggaactggagctgaggttgaggccagaactggagctaaagttgaggctggaaccggagctgaggttgaggctggaactggagttaaggttgctggaagtggagctgaggttgaggctggaactgaagctgaggttgaaggtggaagtggagccgaagctagaggtggaactgaggctgaagactgtgcttgctggatccctgtatgcctgttttttggcaaatcttggaggaagcttagaagtctgacttcttcctttttcatttgcattctttttgttccagacctgtatgacttgttctttc

SEQ ID NO: 11445 - DNA, 233 bp, Homo Sapiens
  misc_feature (53)..(64): n is a, c, g, or t
tcgggaccatgcagtagcttgagacccgaagtcaggaaactttgacaatggannnnnnnnnnnnaatccagagacttgtactggaatttgccttacccgtgtcagctcagtggacttaaggtttcatcccgctttatgagtgcttctgaatccaagtcatagttacctgaatttgcaaattaagttgtgatattcgtgactgttaaattcctgtaattagattaacctctttg

SEQ ID NO: 11446 - DNA, 530 bp, Homo Sapiens
agtttcacatctccgggagctcaggaggcctctgagcttccccggtactgtgcatcgtgagggccagagacaggaatgtaaggactggcaactgtgttacctctcaagtttatctcaataaccaggtcatcagggacccattgttctcttcagaaccctatctgggagagaaggcgaaccaactccgggtttccatcatgtcaaggtcacaggcatccatgtgtgcaaaccatctgccccagctgcctccacagactgctgtctccttgtcctcctcggccctgccccacttcagggctgctgtgagatggaattccaggaaagaacttcaggtgtctggaccctttctatctagataatatttttagattcttctgctccctagtgacctacctgggggcaaagaaattgcaaggacttttttttaagggtcagagttttcaaaacaaaagcatcttccctagaaatttttgtgaattgtttgcacttgtgcctgttttaaattaaattgagtgttcaaagccaaaaaa

SEQ ID NO: 11447 - DNA, 179 bp, Homo Sapiens
accgtgaactgacactttcaatatcagagttctgaactgccacatgaaggaaatccggcccttgattatccacctgctcagcagccccggactctcgtttgagaatggcctcggctgacttgttgttcttgaaagtcatggcacaggcaaacggggtcagcccttgcttgtcctgttcg

SEQ ID NO: 11448 - DNA, 433 bp, Homo Sapiens
tgattctgctgggggctgctgagaaggtaatgtaggttgaaaaggggctctaagttcatttaattcgttagattgacacttccacacactccctgtagtccaggtagggcccagaaataggaaaggctaggattggataatgctgcaaatgcttcatttgtgtgagaaactggagagatgtgatttctccttttgggagagaatgtcccaaaattgatcaggctgagccttgggaatagtttggcaggttgaacatcccaaggctaacataacgtatgtagggaaaggtagattgaatgagacatgtattctgtgcttctaagtgttcagtcccttaggtctgctattgcttcatgtatccagttatggccaggtgtagagaatccttcaaaagaaaaattgactagctagcttgaaacctacagtgccctcc

SEQ ID NO: 11449 - DNA, 376 bp, Homo Sapiens
ggtgcactgcacaagacagtccagaacttggttttctccaaggctgaccagagcgaggtgaagctcagcgtcttgagcagtggctgcaggtaccaggaaggccccgtccggctcagccccggcaggctccagggccgcctggagaatgaggacaaggacaggatgatagtgcatgtgccttttggaactcgcgggggagaagctgttctttgccaggtgcacttagaactacctcccagctccaacatagtgcaaactccagaagattttaagcttgctcaagtcaagcaattttagtaagatacgaagtccttagatgagattctgacatacccttgtgtctcgagctgtgacagtgaaacaagttcctagcctt

SEQ ID NO: 11450 - DNA, 150 bp, Homo Sapiens
agcagcaggagagacagtgcaggtatggaatgtcggctgtgggaccagagtctgcaatgccaaaccaccaaggttatgataggaaaataacaccttctgtgtgtttaaggaaagtaactcttttttttgagacagagtctagctttgttg

SEQ ID NO: 11451 - DNA, 382 bp, Homo Sapiens
  misc_feature (64)..(64): n is a, c, g, or t
ctcagagaagtcaaacctggggagaaactctacaaatgtactgaatgtggaaaagtgttaatcncagaaagcaaacttagttgtacatcaaagaactcacaccggagagaaaccttatgaatgctgcgaatgtgcaaaagccttcagccagaagtcaaccctcatagcacaccagagaactcacacaggggagaagccctatgaatgcagtgaatgtggaaaaaccttaatccagaagtcaactctgattcaacataagaaaattcatatggagagagaccctataaatgcagtgtctgtgagaaagccttcagtaggaagtcaactctcattaaacgtcagataattcatatgggagaaaccttatgaatgtaataaatgt

SEQ ID NO: 11452 - DNA, 508 bp, Homo Sapiens
  misc_feature (264)..(264): n is a, c, g, or t
  misc_feature (338)..(338): n is a, c, g, or t
  misc_feature (371)..(372): n is a, c, g, or t
  misc_feature (403)..(403): n is a, c, g, or t
gcgacaggacagcagacatgggacaaagcctgacttttgggactgcttctcttccataagaattttcagtagataaaattttaaaagtgctgcaccttccctgagtgaaaattccctaaggatgcatggttagcatttcagttctaattaaggcagactggatcctggctaactggagtcatggggtatactttcattcatgagtggaacagcagtgtcttagcagcactacatctgcaatgttcattgtgaagctggagtcanggaccgtcgttggaacgacttcatgttctgcgtcatgccaactggcattttatgcgtgataacatatctccaanatagcacctctacaaatcatttttcaggtcgtnntacccttttaactcatgcaggacaaggctanttacagaaatactttctttaaatcagtggtttattgacagggaaaaagcaccagcaaatacacacttaaaccaaatccttgcaaatgtcatctattaaatatttt

SEQ ID NO: 11453 - DNA, 410 bp, Homo Sapiens
gataagagtacgaatgtcttccacacatacgtggtaatctgtggtgcttgccactccctcactcctgggactgacacactgcagcccacgctgctcaccctgcagccccatccttgcgtgagagaatggcgccacctggggctgtgcaacgtgtcagcctgctcattcccttctccagctcaggacagagaaacacaattcattcataaggtttccattctgttataggcagagatttataaatcagcattatttttcaaagagtacaaagttaaaccattctgcttagaaaagaataaacacatccaatcatttttcctctagtttagtcaaaacagagatcaaacttctttgatagcattataatgtctacgtccagacttagtcttccgaatcaaacggacgcgtgg

SEQ ID NO: 11454 - DNA, 232 bp, Homo Sapiens
  misc_feature (14)..(14): n is a, c, g, or t
tgctctttacgaancgggaaacggctcagatcctgctgtggcacggggcctatgtgtctctgtcgcgtctgctgtgaagcacatgatgctctatttattgtagagagtgactttatttgctttctagaatggtttataacagatggtataagagaggtaataaacagagaaaaatctatgcttgtaaagaatacaaaagttaattttacctactataatatggctggctgaa

SEQ ID NO: 11455 - DNA, 371 bp, Homo Sapiens
taaaattgaagccagtagcttgaacaatatggaggccttcttactgtagggaagaggtgtctagcttagaaggatcacatttgatctagatgagattacccatagcagggaaaataattcatcacctaccaaagactgtacggaaaggtgtgttattttcaaaattgcattttagtttgcacacatgtaaatgattatcctatgttaatctaattgacaattcagttacctccgcatcctaagacttaaaactagcaattcctatgcaaatcatctgcttaactgaactacaaacgtttttcattaattcattctttgatgacatattccatgttatataataattcaaaataaagttaatatactaaaaa

SEQ ID NO: 11456 - DNA, 568 bp, Homo Sapiens
taataaggggaaaactgcgcaggggttaagccccgtggaccaaaggaaatgtgaacgtctactgctttaactctattgccatgaattaagtattgaattccaggagcctgttcccgcttcgataccaaactactataaaattataaagaaaccaatggatatatccaccgtgaaaaagaagcttcagaaaaaacattcccaacactaccaaatcccggatgactatgtggccgatgtccgttagatcttcaagaactgtgaaaggtttaatgaaatgatgaaagttgttcaagtttatgcagacacacaagagattaatttgaaggctgattcagaagtagctcaggcagggaaagcagttgcattgtactttgaagataaactcacagagatctactcagacaggaccttcgcacctttgccagagtttgagcaggaagaggatgatggtgaggtaactgaggactctgatgaagactttatacagccccgcagaaaacgcctaaagtcagatgagagaccagtacatataaagtaaaatgacatggatttaaatcaattgtttaaa

SEQ ID NO: 11457 - DNA, 572 bp, Homo Sapiens
atatggctagagaagaagaatggtgttcatatatgtattgtagatatacaactagttgtatctataatttgtaagtgtttatatatatattaagaacatttgaagagtaatgttaacatactgaaactttgaaatctttcacatttaaaatttcaacatatcttaattactgctcatgaaaatgtacattaagtgttaaagtaaaaaattattaaatctgtggctattaaattttaaactaatttttttcctttaaaagtaagagtcacactgacactgtctgaaatttaaagagtgaatgatttaaacttaaaaaaaattttgatctgaaaatttatttcacccagctttcacaattaagtctgtataaaatgtggtaccttttggtacctatccagagaaacctgtacatattcaatgttatctagatgtgattggataatggagaaaatttatttataatgattttgcaatggcatcaataacatttaaatgattttgaagaagtattattttactaccctataaaatgaatcgaaaataataaagttcttaacataattttctctttt

SEQ ID NO: 11458 - DNA, 746 bp, Homo Sapiens
atcggctcggccctgctttcgtcgggtgaatagcaactcaggcaggcgaagagccgacttggcccaagtagttgggaggtgttggctgcacgtgcgggtggtccgggaagtgagggctcactcagccaccctgagttgcttttcagctgaggtttgcacttcctctcgcggccctcagtagtccctgcacagtgacttctgagatctgttgattgatgacccttttcatgattttaagtttctctgcagaaactactgacggagtcctgtgtttgtgagtcgtttcccctatggggaaggttatcagtgcttcccgagtgagcatggaacacttcgagttcccagggttatagacagtcgttcccagtgtggctgaggccacccagaggcagcagagcattcagactccaaacagacccctgttcatgccgacgcttgcacgaccgccccagttcctgtggctccctcggaatgctaaggggatcggacatgaaaggaccctgtgagccgattgtcctatctccagcggccctgtcatccagctcactcatcaatggggccagtcaggcccaggcactgggctccggaggactcaccactgccccctgctgccatgtggactggtgcaagttgaggacttcttgctggtctagtcacgcatgcagtgttggggatgccttggtttttactgctctgagaattgttgagatactttactaataaactgtgtagttggaaaatctaaa

SEQ ID NO: 11459 - DNA, 292 bp, Homo Sapiens
tgctaggaagctcgggctgagtgactcctcatctcttcctcccttactccgagctcccatcactcggaaccatttgcatttctttgtctcagctatattgtctcacctctgagtttttgcccatgatgttggatgccatggaatgccatatcctccccattatctcccccttgtctggataattcctactcatcctacaatactgattttatctgtgcaaagaagtcttccccagtgcctctggttgacaggggtttcctctggcttctccagactttcttccccctctcct

SEQ ID NO: 11460 - DNA, 567 bp, Homo Sapiens
  misc_feature (50)..(50): n is a, c, g, or t
gatctaagaaatcatgtgcatatatctttcagatttctattttgggaaantgaaggtttctacaacatattgtttcagtgttcaaataaactgaaggactcaacattacatttgaactatatccttcctagtgggttagtgtgaaaaagagtttggctgattcctaaaactctgccagccctgcagtaatctccagggcctggttattgttcagacattccatggtgattcctgggaaggaagcttggctgctcagtttctgagtctggggtgagataatgttctgggaagggacatctgttctttggtgtaatctctcatggtgaaatctgctctgtacatcagacaattgcattgctaccaagtttcataccaaatatttgaaaggatggtattgaatctaaaaccaaatattagtttttattaaactcatgggaaggctaatatattccaacgtaaattattacatatggttaagtaattgcatgttaatttattttaatgtaaatatttttgttactgttctgagccaaattctaaagaaaaaataaatacatttccttgttg

SEQ ID NO: 11461 - DNA, 457 bp, Homo Sapiens
ggacagcagttacagcttagaaaatctaagctctaggttcaccccttcacctcctacacacactttacatctttgaagctgaacatccgatctgtaagttgaagttatttcctgcattaatgtaccaatcatcttgcagagcagccaaggatccaataggtcattggatgcggaagtgacctggaggctcaaacagctgaatgagcacattatttcgtacaaacagaagaggaagcactggctgcccgctctgaggcatttctgagtgaactggcatcaggcagagcacttttaagccccttctttcccactagtgagcccctgaagggcagggacagtgaatcagaacatagcgtcataacacagagcaggcatttaatacctgttgaaggaatcaaaagcacagcttcttttacatcaagtggaaatgggggaaatccttttaagcattctgtct

SEQ ID NO: 11462 - DNA, 368 bp, Homo Sapiens
agggtgctggactatgtgaagcctggggctctcgggctcagagactgtgatggtgcatcaggcaaccacctcttcctgggtgcccggctcagggaaccgacaacaggcacacaaagaaacggcagattcagagaacagggacatacaaagccttttatccctcacgtcagaggagtacacagatgatattccactgttgaaagaagcatgagggcagcggccagactttcctctctgcgaggttctctcagcccttcctccctctccctgtgggatagagcaccctgtactctccagccaccttacctggatacctgagctgccacctgtgtatctgtgtatctctgagggccctataggcccacctt

SEQ ID NO: 11463 - DNA, 510 bp, Homo Sapiens
cctggagtcccgtctacaatccgcactctaaagtatcacaccggaaacctaaccagctttgtgtctgcaggtctacagagttgaccttaccaagctgtcaagcatgagtctttagcactgtgagtcacatgagacacctgtgtgtatggtgagcaccagtgctgccccttttggtccagctggggtcagggccagatgtgacaagatggggtgaggggtgggggacatgaggttgatatcagagatttctggctggtggtctgtcttgctggccctgttccccactcttacaccacctctatagaaggaaacaaggcatcctacactcctccctaccccacctccctcctccttgcttcctctggatttgggtggcacagctcctgggtcatgtgcccatccatgggatcctagcccatggatgacccaggtgggcctggatcaagcccacaggcatgccagctggggctgtaatcacgaatgactcccttgggcagtgacagtgcagac

SEQ ID NO: 11464 - DNA, 515 bp, Homo Sapiens
tcatcccggcaaacaacgtataaccgttattagtgcattcactggacgacgtgaatcaacctggaaatatacatccccacatcctcccacttaacctccccattatcaattatcctgcaccagaatgtgttgcatttgttacaatcaatgaacctacattgacatcatcattatcacccaaaactgcgtggtatttttaatccctgtatatcaggtgagaacaccaagacttaaggaggggcaggtgaccacccaaagttacatagcaaattagggatggacagaatggagcctgatgctctctccacagtgccacactccttcctctcacaacgatgccctctttcctgcaatagcttaagtacacccagattcatcgatatgttcataggtattcctgagacgcaaaaacggacgcgagaacttctaccaaaactggaaggcatatgctgctggatttggggaccgcagagaagaattctggcttgggctggacaacctgaacaaaatcacag

SEQ ID NO: 11465 - DNA, 499 bp, Homo Sapiens
ccctgctactcacggagaacagcagccctggccatggcaatgcagcgtctcacacgaaaatcaatcaagaaggacgtcactccggaaacaaacttctgctaaactcgaattcacaaataataatcgcctcatccaatagctgaaccatcatttccacatcctgaaagctttcctgaaaagcaacatgggaagaaaaagtccttatgacagttcctcactcgccttccaaggccaggtgcctttctagaaagatgagctctgctgagcagggcgtccatcttacaacgctgatttccagcgagaggcctcaaggatccaaaagcaaagcattcctgaagctgagttcaacccttctgccccctggggctgtgagtctgaagctgagcctccaactcctgggctcaagctcctccaactcctgagctatgactacaggtgcacaccaccacgcctggccaattattttcttcttttctttctgtcgtgagaggggaaggat

SEQ ID NO: 11466 - DNA, 513 bp, Homo Sapiens
ggtcctttgagatggggagctcggaacattcaaaagaagatgcattgctccggctgcttaacccctcagggtgggcactcagagaagagatgaatcactaatggtgtttctcatcactggcccaacttctcctcccactcctgctcttgccccctgaagtctatgcggacacagcaccagagtaaacacagtatcagtgcacatgggaactaagagtgaaaagttgcagagtcctggctctgccatggatcggctgtgacctccagcaattcacttcccctctctgggcttatttacaaattgtttgcaattgtttacaaatcatttgcaattgtttaccaattgcccttgtttacaaattgaatgtcagaataactctcaaaattctcttctttccatccatatagaccctgctgattcactcatccacttaccaagcatggagtttctcctgtatcgccaggccctattcgtacgtaccagggacacagcagcgggaagatagatgtcttc

SEQ ID NO: 11467 - DNA, 499 bp, Homo Sapiens
ccgagttgggaatgctgcctgcctcaagacctggtggtctagaggtactgtggtataagtagaaacgagcagctggacttagagacaggcgtcctgagtgttgatgccagccttaccctgaccctgtgtgtggcagcagtgggtcggtcaaacctttccaagcctccgcgtcctcatctgaaaatgggaatgaggatgcctatccgaggtgacttagcagaggatgaagcactcccgtgagtgagctgcgcacagtctccttgtacaagcaggacatttctccgtttctccttttctctgcccgtaggattgactttcatcttgcctggtaataagccctcctaggaaaacaaattactctgaaaatttgtcatttcggtgtggtgaattcgttcttttattcatcatccaaaaagttccattgtttgagatgattcaacatgatttggaaaccatggggtaagtctctgaggaacaagaagacagaagaaagaacgcc

SEQ ID NO: 11468 - DNA, 309 bp, Homo Sapiens
gtccatcatcctctctcacgtgtcacacaggtagagacccaccgaccctgtggggctggtccctacaatggtgtctgtagggatcttgtatcttctctgaggtgagctggagggctctttctctagaaggaggggcaaggaagggcctgaaccagtgactggggtgacaagacagttcgggactttgggatgtcacaaatcattaagtggctcactggtggtgggggcagggaaggctgccagtggggcctgaggatactgggggtggatttaactaagctctggggctcaggatgaaggtgcacatac

SEQ ID NO: 11469 - DNA, 396 bp, Homo Sapiens
gtacacagtttcatgcagggggagaaggcctgtcttgggttgcaggggcacgctgtggcagctgggatcagagagaggagcttgtaggccagttgttatgtggtcccacgggccagatggccatggcttacctcacttcagggaggctgtgagaagcactcagaatctggatgtgccttgggggtgggccccactggactttcctggtggacctggtgtggggtgtgagaggagggtgtgtttggctgcagcagacaggagaatggagttgccactccgcgtgatggggatggctgtgggaggagaggtcctggtggtgagggaatccggatctgagtgctgtaccctggcaagtctgaacgcgcagtgatcgctccactcacgagatccttccat

SEQ ID NO: 11470 - DNA, 559 bp, Homo Sapiens
ccagcggaacaagcaaagagaatatggcaaatatttgtatattcccaaggggccgggtgctttcctgtcctgccagagcatggatgaagtttcgctgggtgctcgtgactggccagttttgtgcagctgactgtctcagccaaaccactgatcttccctggaggccttcggcctgcctgcctgcctgcctgaggtccccgctgccagtcccgggccctggagagcagatgctgtcttgttatgtacaggaggaccttttaaaaaaatcaagtttctattttttgctggtagtccgcatacccataccctctgtttttgaaaggcaaaggccaatcagtccccatttgtagcatggcaccagggtcttaggcctagtcctctcattcctcccaccctccgagatggtcagtgtgtcatgggaagcccacccccagctctgccagtgctctctgggcctggctcccagtcagtggtggccacgatgcggtacagggcatccctccttcccatctacgggtgttctcaataaacaatgtacagttgtttgggcccagagaaa

SEQ ID NO: 11471 - DNA, 510 bp, Homo Sapiens
  misc_feature (341)..(341): n is a, c, g, or t
  misc_feature (369)..(369): n is a, c, g, or t
  misc_feature (379)..(379): n is a, c, g, or t
  misc_feature (392)..(392): n is a, c, g, or t
  misc_feature (435)..(435): n is a, c, g, or t
  misc_feature (490)..(490): n is a, c, g, or t
gatctgattttatgttcgtaactttctgtaaagaaagacacaaggacttttcaaagacagtttatatctttccaaggcaggaagctttgcatttgcaatcttagtgttgtgtccctttctgattttcaaatacatcacacctgccttcctgttttgggagcaaagatgtaatttcaattccccttgctaccgtccttatttaaattatttccattctaagagatttttgttatttttttaaatgtaatctgagcacttttttgtattctaaaagatagatgatatcagataaatatgttgtacattttgattaaaattatttagataaatattactatgtngacttttaaatagctttatcctattttncattcatttngcaaatatttgtngtgtgtagtttcttaacgtgtcagaatctattatgtaaaagancctttccagatttctgaacagtatatgctttgattttataggctttatattattncagtatgaataaagataagg

SEQ ID NO: 11472 - DNA, 525 bp, Homo Sapiens
  misc_feature (64)..(64): n is a, c, g, or t
  misc_feature (67)..(67): n is a, c, g, or t
gatctgaggctgtgtctctgccttgtttttagaggacttcagcgtccaagactggggcccaccnttntcaccagcactaaatgcactaacaaggactccagacctgcagccccagacccgccgtagtataagcctaacaagcaacacgtagcaccttagtctttgttccaggagagctgagcaagctggtgaaaccactctccttcctttaaacaccgtttcaaccaacctctccctggagccaacctgtaaaaagtgggttgattgctgacagcatggtcttccctccctgcatttcagacataccagttactgaaagcaaatcagttttaagtgatttctcagtgctgaaaagcctgtccagggtttccttccctttcccaaccctctctctgtaatactccctttgggcgaagctaacatcggtgcctccccgaccttcctgactagggcacatgggacgcaaaaggagggagggaaacaaggcccttgcctggcgagttgtcatgtggttggtggtgactg

SEQ ID NO: 11473 - DNA, 1006 bp, Homo Sapiens
  misc_feature (49)..(76): n is a, c, g, or t
gggtccggaattcccgggatgtaaaggacccaagaaaactgctaaatcnnnnnnnnnnnnnnnnnnnnnnnnnnnncctacacctgtgctattaccacagtcaaagcaacagaaacaaaagcaggcaaatggagtcgttgggaatgaagctgcagtaaaggaagatgaagaagaagtttcagataagggcagtgattctgaagaagaagaaaccaatagagattcccaaagtgagaaagatgatggtagtgacagagactctgatagagagcaagatgaaaaacaaaacaaagatgatgaagcagagtggcaagaattacaacaaagcatacagcgaaaagagagagctctattggaaaccaaatcaaaaataacacatcctgtgtatagcctttactttcctgaggaaaaacaagaatggtggtggctttacattgcagataggaaggagcagacattaatatccatgccatatcatgtgtgtacgctgaaagatacagaggaggtagagctgaagtttcctgcaccaggcaagcctggaaattatcagtatactgtgtttctgagatcagactcctatatgggtttggatcagattaaaccattgaagttggaagttcatgaggctaagcctgtgccagaaaatcacccacagtgggatacagcaatagagggggatgaagaccaggaggacagtgagggctttgaagatagctttgaggaagaagaggaggaagaagaagatgatgactaagcagtactctgaatggacccacagtgtttgcacatatttgcaattttttgctgtctctggaagtgtatcataaaccagaaaacagtacagaactgaatgttgagggaggtgtagttttttttactcctaaaatgggtgcataatataactaagcagtgggcggtgcccttggtaccaccttgaaaaaaggttaagggcttatttgaaccctttcaagtagggggatgggaacatttatttcactctgccaat

SEQ ID NO: 11474 - DNA, 429 bp, Homo Sapiens
  misc_feature (62)..(62): n is a, c, g, or t
  misc_feature (78)..(80): n is a, c, g, or t
  misc_feature (146)..(146): n is a, c, g, or t
gatcaactatgggtttatataaatgccaaatttagtacaacaaatttaggtcatcaggtgantacaagtatttttttnnnaggaaacattttattatagaaaaaagattaatgataaagtcatattggttgaaaaatattttttanctgtgttcatgattgttgattctccttctacttcagtgttatactgtgtgaatcaagcactgtgtcaaaacagagcatttccctcttaaaaattacaaaccgaagtgatagaagcatgtcagaattgagaagacattttgaagcaagaacaatgtgatgtacctattttattatgtttgtatataaatactattgtaaattgttcagagtgaaaacatttgacaaactctaacactacaatcattttttctaaattacataaataaagctaattttcattatc

SEQ ID NO: 11475 - DNA, 572 bp, Homo Sapiens
ggcacgaggtaaccaccaaggatgtgtggccctttggagttcccctttaggttcctagtgatgtggaggtttatgggtgaaaaattagtggagagggaactcctctcccccattttgtgtagagtgaaaatagcctgaagcccctactcagcagggctctgggaatgtgccttccttattttagtttcagaattgctgggaaagttaccccactggtgggtgaggatctatcctcaacctacatccagatcctatgtgctgcttgcacagaggcctttggcttttgacccaggagggccgcgaggctggagctgccctgtctttcattgagccttagcatttccctctcaggcttcctctcaagctcaaggaactcacccccagataagaagctggtgcctcttgtctctctcatttcagaaacggactttctcatcatgctttcctatggtgggtatgaggggccagctgataccaaccaactggcctgtatctatctatctggatttgacttgaatttttaaaatgtgtatcgtttaaaaaaaaaaatgtttgcaaattttgcacattac

SEQ ID NO: 11476 - DNA, 775 bp, Homo Sapiens
ggagaggtctagaggagtcccctagatgctctatagaggttcgtgaagaataccggaagtgggcctgcctagttgctggggggagcaagtactcagaattcacctccaccacgtctggcactggccacaatcagacccgggccctcagggcatcagagtccggcatatgaaggcgcatggttctggacggcccagcagctcctgtggccacagcagctttgtacacgaagaccatccatcctcccttcgtccaccactctactccctccaccctccctccctgatcccgtgtgccaccaggagggagtggcagctatagtctggcaccaaagtccaggacacccagtggggtggagtcggagccactggtcctgctgctggctgcctctctgctccaccttgtgacccagggtggggacaggggctggcccagggctgcaatgcagcatgttgccctggcacctgtggccagtactcgggacagactaagggcgcttgtcccatcctggacttttcctctcatgtctttgctgcagaactgaagagactaggcgctggggctcagcttccctcttaagctaagactgatgtcagaggccccatggcgaggccccttggggccactgcctgaggctcacggtacagaggcctgccctgcctggccgggcaggaggttctcactgttgtgaaggttgtagacgttgtgtaatgtgtttttatctgttaaaatttttcagtgttgacacttaaaattaaacacatgcatacagaaaaa

SEQ ID NO: 11477 - DNA, 427 bp, Homo Sapiens
ggatcgcctgcataaaaattcttggaggggacataattgatatacaataaaatgtcccccttgtaagtgcacagattgaggatgtctacccccatttcgttcagccccccagagggtctgcttgtgccctctgctgtcggcccacagccctggacgggaaggtgttctctgggccgcctctcgccgtcggtgtggatctgtcctttggagcgctcaggtcgctgaaaccccagttgtgtgctccctggtgtccggcttcctactcagagtacttggaggggcatcgtgtgcaacacgtgtccacagtttgttatttttatggggaatggtttctgtttggatgtacgctatacatttgccgctgaggcctctggcatgctctctcccccccgtggctaccccgcctcccgcttcttccttgtacccc

SEQ ID NO: 11478 - DNA, 475 bp, Homo Sapiens
agaggcggaagatgtctccggcaaaagaaaacaaaacagaaacctggctaagaacgcggaggtacagaaagatacgaagaaggacagagacagacatacatagatagagtgatagatagaaagacagggagaaagagaaacagaaaattagacggggagacgaccgacctgcaggaccagatcgcagagctgcaggcgcagactgatgagctcaagcggcagctggccaagaaggaggaggagctgcagggcgcactggccagaggtgatgatgaaacactccataagaacaatgcccttaaagttgtgcgagagctacaagcccaaatggctgacacttcacggaagactttgaatccgagaaggcttcacggaacaaggccgaagagcacaaaagggacttgagtgaggaactggaagctctgaaaacagagctggaggacacgctggacaccacggcagcccagcaggaact

SEQ ID NO: 11479 - DNA, 519 bp, Homo Sapiens
attccctgctcatcacggtgagcaaaaatacaacttttgaccggtatgatgctcccagtcacattgggatcacaaataaataattcattacaaactcatgagaaaagtataacaccttggagaatcagaggaggagtccacaggggcattgtttaacctgggccttgaagaatgagtaggagtttaccaaatagaaaataagtcaagaggagttagtccaaaggaaattggtcaagtagagagagacaggaaggacgataatgagtaaggagagcagcaaccagactcttgtggctgagatggagaagaaagaataaggagggagagacaggccaagactctggtaacgaacgcaggaaccggttggcaatggtaccaaacagtaggctaagaaatcaggactttttcttgtctgaagtagaggtcactgaagcattgagagctagtgaacaacaacacaatcactaacttagaaaaagccttctggaggtaaaaattgagtggaagctagtcgtgaga

SEQ ID NO: 11480 - DNA, 482 bp, Homo Sapiens
cgttatgaagattatgccagatgcagaagcatgacccgtgccggccagcgcaccaggttcaaggcatttgtcgccagatagagttggacgagaaatagcaggagtaacataactccaagggtttatcttgtaagaaggatggtgttgccactaactaagatgggaagcctgtggaagactggtttttcagggaaggtcaggactttgtgaacatataaaactgcagatggctattagatatccaagtagagatgctgaagagatgaatgtatatagaagtctgaatttgggagagagatctggataggagatacttacctggtgtttaacagcttacagattgtgtaaagtcatgaaacggataagaaccttaaaagagagaaaagggaatagaggttaccaaatgaattgcagtttccaaattgcagagggcagagagacaaggagaaaccagcaaaagagagtaggaaagaagcaactag

SEQ ID NO: 11481 - DNA, 413 bp, Homo Sapiens
gtgttttctgggggtcctgtagagaatgtatatctctgtagaggctgactgaagatgccagggaattggagactcagctatggcagagggcagagcagaagcactgtatccgaagagcggtattaatgtaaaagtacacaagccaagcaggctcccctccttacagttcaccgctcatcagagaatacctaaaacaagaaacacagtcacttctatctggagaaactgacaagtctaaaagaaaatactgacagaaaggactcatcaacaaaatcgctgggtccccacctaatcatcctatagcaaggcaagacctgacaaacaacaaaccctgctcacatgcactgaactatcagtcggccttttggtttctcactttcacatatgagtgaacagtcatggatcaccagaga

SEQ ID NO: 11482 - DNA, 454 bp, Homo Sapiens
  misc_feature (90)..(90): n is a, c, g, or t
  misc_feature (92)..(92): n is a, c, g, or t
gggaccccttgggtcgtggcagcagtggcggcgatgtttgtcggctcgggatgggtccaggatgttactccttcttcttttgttggggtntnggcaggggccacagcaagtcggggcgggtcaaacgttcgagtacttgaaacgggagcactcgctgtcgaagccctaccagggtgtgggcacaggcagtctcctcactgtggaatctgatgggcaatgccatggtgatgacccagtatatccgccttaccccagatatgcaaagtaaacagggtgccttgtggaaccgggtgccatgtttcctgagagactgggagtcgcaggtgcacttcaaaatccatggacaaggaaagaagaatctgcatggggatggcttggcaatctggtacaccaaggatcggatgcagccggggcctgtgtttggaaacatggacaaatttgtggggctgggagt

SEQ ID NO: 11483 - DNA, 318 bp, Homo Sapiens
cgggcgccacagcttctcaaatgctgggactacaggcatgatgacaccactgcccggctgttatgtctaataagaagttgccgtcctcttttctcaccccagtggcatttctggggagcatgttttcccacctgctgatcggactccttgtggtggtcatatgggcttggggtgaatcgggaggggagagtttaattggcttacatgtcaagctgttttataacaggccttttcaggctacgttggtttttgatgccggttattttggagaatctgtggcgggcgggggtccgggggctccttcgtaatccttgtgct

SEQ ID NO: 11484 - DNA, 337 bp, Homo Sapiens
gtctgcctctctctctgggcaacacctttgggaatactgctgtgtatggtccctggggaatctcacagcagctgggaagaagttctctgcctccgtggggccgtgctacctgggcagatgctgaggagtggtctctgcagggccgtccagtgcagactggttccacgaaggggctaagagcccagatgagacattatgcctctgggcgtctctcacattacccaggtgtttgggggcaagccaaaacataaatcaggaaggttagtcagaccaaacagtctccctgagccggagctggagagtgttagtttgccatgtcactcatcccgtactggag

SEQ ID NO: 11485 - DNA, 436 bp, Homo Sapiens
cagctccatataccccccactttaggctgggtgttggtgggtttggcccaggcgggtgtgggggggcccgggcctcgagggggacgggcgtaagtggccagaaggaggcggtaggctggattggagagcagcaacgcagagccattggggacacagggagcggagtggggcggattcccacgaggccggggctcctggcacggggggggctctctaggacctgggcggttgttgatgaggatagtgtccccagggacagagaggtgaaccgtcagctcctcttccaacaccctccgttcagccttgctgaggagcctgcgccagtgcagccgccagagcatgagggcaatgatgagcagcaggagcaggatgatggccaccaggcagccgatgaggatggcggtcgggctcccctcggacttggccacgggctgct

SEQ ID NO: 11486 - DNA, 490 bp, Homo Sapiens
ggtcttattttactgttatatatttgaatgctgctacaacagatgatcttcatccctgaagttttcagctaaacttggtttcctagaatagactgttaactttcaaaatttttattggtgaaatggaaatactgtttttccttgtgaatgaattttcatatttgtaagtgctaagtttataattcaggtttgatcaaggtgtgaataactgaagaaaataactcgctggctatataggaaaatgctgtggaaatgaactgtgtatatacttctgggaggaacaaatttaatcatttctcctgttaagcactaatcagtatagtgcaactcctggttctgtactgtattttatatgcaacatatatgctttaatattttaatgtttgtgcattaatattttcaatttgtttaaccactttgctgctaagattttgccgtcccattcccattttttcctttacaattttaaacaagtttcttcattaaaaac

SEQ ID NO: 11487 - DNA, 253 bp, Homo Sapiens
  misc_feature (37)..(38): n is a, c, g, or t
  misc_feature (47)..(47): n is a, c, g, or t
gatctcaagaaaaagcaggaattaaataagacaaggnncagattaanatacctttcccagcaggggaaacagcaaacttaaaggttctaaggcacaagagagcatggcatatatgaagaaccaaaagagtggccagatatccagacatctagaaggtctagctaagtacttaggaagtagtataaacagaaaagaaaaaattgtgcctcttttttaaaaaaatgattttagttaatttaaagactggaaagtg

SEQ ID NO: 11488 - DNA, 298 bp, Homo Sapiens
gatcattcctgtattaaactttcatatgccaaaagggtttgtcccgttttatctgccatcagtgtttgacctgtttagggcagaggcaataagtcagaagtcttgaagttgaaatagttatatgtgtgtcattggactggattataaacagctgtcttggactttccctctcttaacactgactggtcatcagtatcattagtgaaaaagaaagcaaattgtttgttatcatctctttagacagataagctgaatggtgggctttaaataataaaaacatacccatagttgacttgtg

SEQ ID NO: 11489 - DNA, 369 bp, Homo Sapiens
gtttgtttacagatgatctcatttgctgaatgattgatttaagagtaaaattagccactgcgtggctttgtgtatagtaaccggttttgttgcacttgtctgtggctgaaacacttacctgcagtggaaagccgagcaaggaggaggtaaacattggagatgtttgtgaaaatattactcttgctgtgaggttttagtttgttttgaatgagaaaagactaagtaacttaatccatctcaatgtagtgttttaataaaaaaggaacctaatatttgaaatgggtctcagacatgtctacaaatatgggtactatttttatgcccgtgtattttcacatttaataaaaatatttatggtcatatcagtaa

SEQ ID NO: 11490 - DNA, 471 bp, Homo Sapiens
aaacgaaagattccttcaaagccttttcaggcacatggtttcaacaaagcctggctttgacattccttgtcctgaggagcactttccaggcatagttacagcttccccactgtatttacaagccagaattgtgcaactcttctggatcattaataaagtagcaagatcctcaaaaaacccaaaaacaccattctctaatagtcatgacaaatggcttcagtatggcttgtttttcattttccagatggctttttctcttattttttgaagccccagtctttgattttacaggtaactttcaaaacatcatgatgctgccaaatgtacttttgtaaacttaaacattatgattcctgtattatttcagtgagagctacagtgtgatatttcagagtctattaaataaaaatgtgagtttgaattacaccatctgtgccaattacaaagcaattaaaagatttattttttatg

SEQ ID NO: 11491 - DNA, 272 bp, Homo Sapiens
agtaatagtttttaaccatggtttgggacagatatcttttgagaatctaatgaaagttacataatttttcactagaaaaatgcatacatgaatgtcatcgacatattgcataaaatttgggtgactcacagaagcttcctcctctgatgcatctataaacccttgcaccccagttatgaagaagtaatcacttgatttttatgaattttatgttctgtaacaccaaaggaatcctccctactttcacctcctctttcatttcttattaaaaa

SEQ ID NO: 11492 - DNA, 358 bp, Homo Sapiens
cagttgttgtcacagattcctccatgaaatagagatacccatcgtttctgttcttgataaatacaaatagaacattttatctgtccaaagttttatcattattattatatatttattaattacaataacagcatccaatctatgaaaactcctacttagacctgcaatagaaccatgtgtatgttggcaacgtggctagcatctcagtgaagttgtacattgctcttaactaaggtagaataaactttaatttaacaaagaagtttagcaaaataaataactgtttctctaaatattccaataattctaatgtacatatatattttttctttctaataaactggatttttttctcatt

SEQ ID NO: 11493 - DNA, 198 bp, Homo Sapiens
aatatgttttatatcatttttagttaatttatacaatggaaacacattgagttaccacagtatgctttgatttatagttctagatagcataggacaattaatgagtgcttagacatcatccagatatgtgaagtctggcaggcttgacatctacttttatcttacttacatttaattcccaattaaaattttttatta

SEQ ID NO: 11494 - DNA, 565 bp, Homo Sapiens
atgagccactgcgtccggccagatcttcttatttatattgggctaagcatcatatctggcaaaatgaaagcaagtctttgctatatgttcagtttgctactgtcttccatctcctggttcctattgactctatgtcttcatccttttccaagaagtctcttgcacatcttccttcccacaccacaaaagcatctcttgcacgtttgggagtttgtgttgtccaggcggatgctgtaggttcaacttcagccaataaaacttcctctcacctgaggctataggtgtctctgggatcagtaagtcacttactgagcctactttcttaccccagattctgtgcaccaaatcggagaacaataggctggttgtgcaaatagacaatgccaaattggctgcagatgacttcaggaccaagtgagttggggttggacagggatgggaaggagccaagtgagagttggggttggatggggatgggacaatgccaagttggctgcttctgtctcatgtggcatcggatgtcattgacccagaacccaacccagtagttacagcagaagagaac

SEQ ID NO: 11495 - DNA, 255 bp, Homo Sapiens
atctggctcaaagtgtgagctgcagtggccggcgccacagcttctcaaagtgctgggaccacaggcgttgagccaccgcgcccggcccccaacgtttctttttaagcctgtcatatctcacattaaatgtgtaagtctctgaactgtagggactttgaacaaaggaaagttccatgagaatactatatgatgccaatttctactgtaaggaacgcagattaacagagggctgatcggggagtgatgctaggaggg

SEQ ID NO: 11496 - DNA, 804 bp, Homo Sapiens
ccacactatagccaaatgaagaggccagaccctctccattgaatattgctcagggaggagatgtgcagacttcatgtctctcttcagcaaaaccacggctccactgtgattggctctgggagcaccagatagaaaagtgatctcatctttagaaacaatacctttccctgagtccaaagaaaaacctaagtaactgttagcaggaacaggaacgagactttcatcatgctcagtctctccaccaacttcataaggcccatcttcaaagatgttcatgtcaaaaaaagtgttattcttttgctctacacgaacaatccctttccagttataagtacccggggctccaaatacaatgtaatgaaagtctttagtaaaagtagctgctacaccttgctggcaagagccaaatttctcatggcctctcaatcgcccatcacaaaagctccaatctcccccatccatatcgtcttcaatcctgagattctgactcaggacaataacaccgcccaaagatgtctcgagattcctgcttcgtattaacatgctgcctttttttcatatcggtgagcacatgtcacgaccttgccccctggaccttggctctggacggtgacccccatccactgatcttccttgctttctgacgtggggtcagcatcgttatcaaactcgatccgcgtgcatggcccccgggcggtgatgtcgcagctgtacagccctcccgttctgttggctctctgcagtggaagcgcttctcccgcggggcccccacgacacagccgctgtcctcgggctgcatccagt

SEQ ID NO: 11497 - DNA, 647 bp, Homo Sapiens
gggcaatttgcatatttctccaaagaaccatccagaacctgagcagcctgtcttcagacagagagaggcccacggctgtttctgaaaatctggcgctgggaatggccatgtggaaccaggccaatgccagaggctgcctcagcagcctctggtagctgagcccactgcaaagggggagccacaacctgcccacgggccgggagctgactgaggccaaccgcttcgcctatgctgccctctgtggcatctccctgtcccagttatttcctgaacccgaacacagctccttctgcacagagttcatggcaggcctggtgaagtggctggagttgtctgaagctgtcttgccaaccatgactgcttttgcgagcggcctgggaggtgaaggagcagatgtgtttgttcaaattttactgaaggaccccatcttgaaggacgacccgacggtgatcactcaggaccttctgagcttctcactcaaggatgggcactatgacgcccgggccagagtcctcgtttgccacatgacctccctgctccaagtgcccttggaggagctggatgtccttgaagagatgttcctggagagcctgaaggaaatcaaagaagaggaatctgaaatggccgaggcatcccgaaagaagaaa

SEQ ID NO: 11498 - DNA, 421 bp, Homo Sapiens
atccacgtgccattgtggtgggaacctgagcattctctgcagcaacatcaatgcctacgtgagtgccttgccaggcggctggaggccaggtggagccctggaggaatgaaactttctgtcccatggaatgccctcagaacagtcactacgagctctgtgcggacacctgctccctgggctgctcggctctcagtgcccctccacagtgccaagatgggtgtgctgagggctgccagtgtgactccggcttcctctacaacggccaagcctgcgtgcccatccagctaatgcggctgctaccacaatggtgtctactatgaggtaggaacctagtcatctggggcagaatatggggcctcacccctcccactgctcatcagccccacggcctgtctacttggcctcttatttatttctttta

SEQ ID NO: 11499 - DNA, 568 bp, Homo Sapiens
agggtgatctagaggatctcatgtgatccacgtgcattgtgatccacgtgcattgtggatcacgtgcattgtgcatcactctcccttctgcctccttcaactttttttatatttagggggaacgagtacaggattcttacatagtcaaaaagctccttatagagaagctcggaactttcaatacagctttgcattctttaccattttaattttccatttaatttaaatgtattctctcatttgaccttcatactctgtggagaaatatttctattttggcttgtattgacaagctgttttcacacagcccccacatcacccaaccacccagcagagatcctcattcccatgaaacagataaagaaattgagacccagggaggctaagagtcctggcaggatcattcaccttccaaggtaaggagccagttccagacctgggtttgtgcagctccaagctcccccgtctttctacaatgctagatttagactatagcaatctagcaagtgtggccacacaatggtcaagttggatttagatgatgttctctataaatccattctcctct

SEQ ID NO: 11500 - DNA, 510 bp, Homo Sapiens
gactacaggatcctcattgtgatccacgtgccattgctgatccagtatgcattgtgatccacgtgccattgtgatccacgtgccattgtgatccacgtgccattgtgatccacgtgccattgtgatccacgtgccattgtgatccacgtgccattgtgatccacgtgccattgtgatccacgtgccattgtggatccacgtgccatggtgtttactgattgagcaaggcacttttcctctcagccttggtttccttatctgtaaaacatggatggtacttccctaatgagattgttctcaggattcaactagataacatgtgtgcagcatttcacatagcagatggcatggataggcacttagtaaacatcagagccctcccagcagtgtcaggctcttagtaaatatctgattcttgaatattcccatccccaaatatatccccctacctgaggctcctctcatattctctgcctcccttcctgtcactatgcacgggatcctctagat

SEQ ID NO: 11501 - DNA, 694 bp, Homo Sapiens
acgtgccattgtgtcaagaggaggtgtgaagctatgctggccccaggaaagctagttggaagtgtggtgctgacaaggagagttgttaatggagtgcttctttcactggtaattgaaatacgtatggtagtgacttcagcaggtatggagaatgaaccggctttggtagaggtgagcaaaggtgtgctggtatcaccaggaggtgttgaaagtgtgctggcctcagaaggactcatcacagatatagggctgatgaggacagttgtcaataaagtgcttctttcactcgtagttgacataggcatggtggtggtgccttcaagagttgtaggagatgaactgccttcagaggcagtggtcatagacatgctggtgtaaacagatggtatggaaggggtgctactctcaggaaacctcgtaacaggtgtggtactgacaagaatagtggtcccaagggtgcttatttccatgggcattgacacagacatggtggtgctgtcaagagttgcagaagatgaaatggcttcagtagaagtggccacaggtgtgctggtgacaacagaaggtgttgaaagggtgctaccctcagagctggtcacacgtgtggtgctgacaggcatagttgttaatggagtgcttccttcactaggcgtccacaatgcacgtgatcgggatcctctagatgaccagcaga

SEQ ID NO: 11502 - DNA, 560 bp, Homo Sapiens
  misc_feature (69)..(69): n is a, c, g, or t
  misc_feature (120)..(120): n is a, c, g, or t
actcgatcacgtgcattgtgaatcgtgctgtatgcacatatcatgcatgtgtctttataatagaatgancacattgctttgggtaatacccaataatggattgctaggtcaaatggtatnttgtctctaggtcttcaaggagttgccacactgtcttccataatggttgaactaatttacactcccatcaacagtgtatacgcgttcctttgtgaaaaaataattttaattttctaaaaggttagctttctaagacaaatggtatgcgaggaaatttccacaggcctaagccatccagctgctcttctgagaggctacactcttcctcctcaggctgtcctctaagagatgacccaggggatgatattcattagacactccaagagatatggccactgtgggcatcttgggttatccctgacggttctgaaaatcatgaacaagaaaagaccggagggctgccacaaagggccctggaatttctccaaagcaaaacttcaaccgaaagacctactaacaaggtgtatgcaccagggaagataaaaggacagtcacagaga

SEQ ID NO: 11503 - DNA, 445 bp, Homo Sapiens
agagaggtttacaactggagctgctatttaaaggcctagatgagaatgtaatagtaataatgatcctcatttttattctcagctgacagagcaagggaatgtgtgtgaatgctaatccatgcacatacatgtctataaatattctgcatggaaccatctgtgtctatgtcaagctaaactggggttcataccagggtctccaaccatagcccatccccactggggtccttccagctcactcggcttctggatgtacgactcccacaggtggaggaaggcccccagagaagtctgctgaaaattgttattcatgaatggaggttggacttcttcagatacacttcccgagtctgttaacatggtgatgtgacgtttgcccttcatgttactcatagggactattctgttagctaccaattctgctgctttaaataaaaacaccatt

SEQ ID NO: 11504 - DNA, 452 bp, Homo Sapiens
agggtggccgccaacgcctttcctgtgttatggcaacagggagtgggcatctcatctgcctgtggtcagctctcagacggcagggagcggagctgacgttggctgtgcttggtcaccgctgccatgccgcagaggatgcgcctagctgggctggggccacacgactattatgttggccttgaacggggactgcagagccctcagtttgtctcccttgttcctctgtggctgaggtgggagggggagggtggggtaggtcccccagcaagaaagagggacaggagcaccccaggcaggaccaaggagtcgggaggcccctgccttctgtcctccatggtgagggcacagatgtctccccagagcccagcgctggcagaatggattctgctcctggctttgcttctgcggcttcggtggagacagttatggaataaaatgttccttgcacccag

SEQ ID NO: 11505 - DNA, 186 bp, Homo Sapiens
ccataaggagagtcatgatctggttccaggaatacattgttagatgactgaaaaaattgtattacttcaatgaaaatactataaataataacattttcatatattagttggttctcatgcatacataatctaattttatttgatcctcacaactgtttaagttttattaaatatacattatccctg

SEQ ID NO: 11506 - DNA, 441 bp, Homo Sapiens
gaaatgaatgaataaattctctaggtatttagaaagataagaaactgaagacccgagagactaataaggctgcttacctaattattataatcatttcatttgcctgaatgttttaagcaggaagtagaaatactttggctgcccaaatgtatcttttgttcctcttagaagtaaaataagctacatacaataaaaatttatttcagaaccccatttctagaaaataccaccccagagtcctcatttgatagcatctgtctcctgcagacctcatcattccacagtatttccctgccatgtaaaaatcctgactttgtgcgtatataaaatgtatgcaattaagtctgtttaaatgatatttaagttttaaagactgtattttgttgacacatactttgtgcagtttttatgtatgtatgtattataaaaaaagttaaggtt

SEQ ID NO: 11507 - DNA, 460 bp, Homo Sapiens
  misc_feature (21)..(21): n is a, c, g, or t
  misc_feature (83)..(83): n is a, c, g, or t
ccctctcaccctcctgccctntggggtgcggttctttacacacccgtctccttccttcaaccagtggaaggcagcgaactggnccgctcagcacaccgcggcccagggccacggcaggcgctcacaatcgagcacacgcgtgtgcacacacatgtgcacagatcagtgtcagaagcatcgacctgcgagctcacagagctgggagcagagcacccacgcacaccccgaatggctatggaagctgcagggcgccagggacacttgggagtccctgctctcatggcaaagcagggatgggggacttaaaagccaccaacaggaaaatcggggaaaaaagggagatggtggtaacagttggacactatttcttggcaaaaccgtggaaaaacacgttctacaccagcaggtggcaaattgtggccgccatctgtgtttgcaaataaagtttaactggagtttg

SEQ ID NO: 11508 - DNA, 327 bp, Homo Sapiens
ttgttctatgccttctggcctccatggttttttctcagaaatccagaggcattctaactattgtttcccaacaggtaatgctttatttttccccagctgctttttaagattttctccttgtctttggttctcatcagtttaattatgatgtatatggacatggatttctttcggttatccttatcagagttcacagagccacttgattgtgtttcagatatctgggaagttctcagctatgatttcttcaagtattgttttctgtaccatactgtcctgtacttctgtgtcattgataacatgaatgttagagcttttgacattgtc

SEQ ID NO: 11509 - DNA, 458 bp, Homo Sapiens
accattcgaatatttttattattcattaacattttgatgtattttcttccatccttttttctctgctcaattttgaaaacatttgcaacaaaataaccatttaattttatatcctggatttcttccaatttatcattataatctgaacactcttcatattattaaaaacgttctataaatatcatttcaataattccaaaatattatatgaatgtacatagtttatttaaccatgatcagttagaatactttaaacattttaatttgtatgtaatattttgtatgttcaaatttaccaaaatttctgattactcccgcagtatagaaaagttaaattgctaggtcaaagtgctttaacattttaccattcttgatgttatagcttcatgattaagtgcatgaatttttaaagtcagatataccctatatggaatcccgaatccaccaaaattatgaga

SEQ ID NO: 11510 - DNA, 767 bp, Homo Sapiens
gtctgtttcaaaatatgtagcttcctcttttgtacaacaaaaaactcattctcacttttactaaatatactgtaggagtcatcattgatgttatttttctcttatgtatctgtaaagatttttggcatatgaatgtaatattaaagtcaatgatgctataacttgcgatgtttgcatcatgtcaacctttttgaaggagtgaaaaagccctactatgtttttaaatagcaagtgtaagctcagtgctagagtggatatacacaccgcatgttttcatatgtggcacttttatgtatcatgttgggttattgttctagactggactgttaaatactatgtttgaggctgggttgtcatttttataactgtcttggtgttttatggccattatttattacttttgatacacagaatgagctgcatgcatttatagagcaataagaggatgtatttaatgtgccttgtttttaactgaataagaactggaagcatgaatcaataaaactgattaaaatggtctatttgctagcattttgatgttacttgcagtcagataactttgattactgttgaagtttaaaaaaagtttgaaaatatttttacaaactgtgtttttgatgacacaaaagtgaaatatctacagagatagatgtaattttataagactgccagaattatttgtattaatttgttgctgtagcctttagggcatgacttctgtatttgtgcaatcctattctacaattacattcatcctattacaactc

SEQ ID NO: 11511 - DNA, 456 bp, Homo Sapiens
  misc_feature (113)..(113): n is a, c, g, or t
atcccgcgtgacttctgctcctgtgactcagttccctttatctgtgaagggcagctagcattctgaaggatggccagaagggtggtccccccgagcatggcatagatggtccnattggtattggctgggatcctcatctgcctcctctgctctacccagggcaggtgataagggttagagaacccctctgctgcccacacgttccctggcctccatctccagcagcagggttatccccaccccctgtcaaagaatagggggtccctgggcctctcaacaggaagtaccagatcaggcagctagcagacaatcatcggtggaccacagggcccactagagtgagacctatccatagataaagattggccagtgatgaagcccatctgggtgcaaaggccgagctgagaggcttctaccaactggagtgtcccagtcacgcagagcagaacgtcgacg

SEQ ID NO: 11512 - DNA, 345 bp, Homo Sapiens
ctcgatccacgtgcattgtgtgtggcgagaatggatctccagtatcacagcgggatgtgtgtgagtagaaggattctccagtgtccacggcgcgacgtgtgtgtgagtagaaggattctccagagtccacggcgggacgtgtgtggtgagaaggattctccagtgtccacggcaggatgtgtatgggcgagaaggattctccggtgtccacggcaggacacgtgtggcaagaaggattctccaggtgtccacggcggaacgtgtgtggagatggcattctccagtgtccacaggcaggcacatgtctgcccagacaggcatctcccggctgtccaccgccggacg

SEQ ID NO: 11513 - DNA, 463 bp, Homo Sapiens
tcatctagaggatccctatcacgtgcattgtgtttgtaaagtaactaaacaggcaaatgacagcaacacttaaggcatggggcctatatgtaaagagctgaattggacttagacatgcagatactccgatgatgaaatccctctggtaagaagtaactgacaaggcaatactgcaaggaaaagacaatcataatgacatcaggcgggtcaggtgacaggagcaaaattttgaccaaagataaaagtttacatttccctactaatgagaaataagatcatggagaaactacttactctttaaatccagtacgttgcagaggccattgtttaaatctgcctgaagcaagtctcaggaaaacaagatcctgagcgtggcacaacagagcctttgtgccctcaatgaaaatcggattcttgaacaaatactaccatcagtctcacctcaccacaatggcacgtggat

SEQ ID NO: 11514 - DNA, 333 bp, Homo Sapiens
gatcacgtgcattgtgcaactgcttgcagggatcacacacgatgatggatggtccttggcgcctagagagactcacacaatggttgctgctgttgtcagcaataacactcactctagaccagctggcagctgctgtaatggacagtgtaacaatggatatgtgtgtgtcagtgctgtgggagctcagcagagggacttctctcagggatgggaacaggttgttggtggccagggaagtacccacactatagcacgtctgggggcagcttggaggctgggtcagagtctgccaagttggaaaaggcaccagaggcacgtggatccacaatggca

SEQ ID NO: 11515 - DNA, 567 bp, Homo Sapiens
ctgagtatctaaggatccgatcagtgcattgtgggaaaagggtggcatcagtcaatatgtactaggatatggataagagttcgttatgaaattcagtatgcttttcagcacacatcttttaggtgcccagtcctgtaatcagtgctaggaatttaaagattgagtaagacatggtgtatgcccacaatcaaatgaggaggacacacgtatactgggctactttgcaccagcgtggcaagggctctccaagtaggataaacaagccaggttgaagcacaaggagacaaccatcaccaaggcccggaaagaattacggtagaaatcatagagtaagggaacttggcatctggcacaatggcacgtggatcgatccacgtgccattgtggatccacgtgccattgtgacaccaatcccaacacccactggcagacagaccccaaacacgaaacccatcaacaacaacaccacggtgaccccaaacccaaaaaccaccggcacacagaccccaacaacgacacccatcagcaccaccaccacggtgaacccaaacccaaacaatggcacgg

SEQ ID NO: 11516 - DNA, 476 bp, Homo Sapiens
gtggtgtgggcgtgtatatgtgtgtatgtacatagtcctccatccctctgcaacagtcggaaggggcatggagggcatctttctgccccttccttcggtgaggaaacaggtagggggagggtggatgggagctaacctgggaagcagagctgtgaggtgagctggcccttcacgcacgcccggacacggcaccgtgctggggacgatagtgggaggcacagggaccacttgacaacctgggggggtggcgcccgggtctccaccaggcactgagattagactgccttaaatccatgacatggataaataaataataaacaaacaaaaatgataacacttatatagcatttaccaagtgccagtgtgttctagcatttgacgcgtattagcccacttaatcttccaaaaacttccccccacttcacagagacactgaggcacagagaaggtgaatgacttgccccagggaggccaca

SEQ ID NO: 11517 - DNA, 544 bp, Homo Sapiens
atgctatgcgacacagttaggtgccataaaagggtgtgagtcacgtgttctagagatgaaattgctgtaggagggaactacttcagattctgagcagagaggggcacacaaggggagaaggggaggaaacagggggatggcaggagcaagcccagttctcagcccagctccagcaactgcagctcttctgtttctgacctctgcctcacccgaccccactcagccctatgggcctctcctctcacacccccggcctccaaccctgcctggccttcacaaaacctgccttctctgtatagtcctccgcatttccaggcctctgtccccacgcacacacacaatggacacaacacgagcacaaagggccacagctccaggacccaggagcgggctatatactatcctcgacatatcacgggcccagccggcacctgaaactgccctggggatggccctctcctggccagccggggccaaacgcctcagcctcccctccccgggtccacatcgggctggagagcgaccgcctctctccattccagcg

SEQ ID NO: 11518 - DNA, 593 bp, Homo Sapiens
ggatcccgtatcacgtgcattgtggagaaagctgtcataccgcaagactttaatcgagggcaaaatgacacaccccaggactattgtggtggatccactcaaatgggtggatgtactggacagactgggaggaggaccccaaggacagtcggcgtgggcggctggagagggcgtggatggatggctcacaccgagacatctttgtcacctccaagacagtgccttgcgccaatgggctaagcctggacatcccggctgggcgcctctactgggtggatgccttctacgaccgcatcgagacgatactgctcaatggcacagaccggaagattgtgtatgaaggtcctgagctgaaccacgcctttggcctgtgtcaccatggcaactaactcctctggactgagtatcggagtggcagtgtctaccgcttggaacggggtgtaggaggcgcaccccccaatgtgacccttctgcgcagtgagcggtcccacatctttgagatccgaatgtatgatgcccagcagcagcaagttggcaccaacaaaatgccgggtgaacaatggcggctgcagcagcctgtgcttggccacccc

SEQ ID NO: 11519 - DNA, 267 bp, Homo Sapiens
aattctgccacccacagcccaagtgtacctgcctctttctatctcgctgttacgattttggttaagccaccaccttctctcaccttgactgctgcattgcctttccccgtctccttgcttttgctcttcattcgaccattcatgtctgtcacaactgtcagctattcatactgttgtgctgtgtctccacccaaatctcattttgaattgtactcccacaattcccgcgtattactgggagacccgctgtggtggcagattaggtcc

SEQ ID NO: 11520 - DNA, 841 bp, Homo Sapiens
gcaagccccagtcccgatgcagaaagagggggccggggagaaggagccctcccagctgctcaggcccaagcctcccatccccgccaaacctcagctgcccccagaagtctacacaatccctgttccacgacaccgcccggccccacgccccaagccctccaatcctatctacaatgagcctgatgaacccatagctttctatgccatgggccggggcagccctggggaagcccccagcaacatctatgtgaaagtggaagatgagggcctacccgccacccttgggcaccctgtcctacgaaagagctggtccaggcctgtcccaggaggccagaatacaggtggctcccagctgcattctgagaactctgtgattgggcaaggccctccccatgccccaccagcccccacccgcctggagacacaccctcccccacaatctttctagacaggtgcttcaggacagaggacaggcatggcttccccttgggcctcctcagtaggcggtctggcctgacccccaacaaagaagcctggaggtcagagaagcaaatgcggagcctgctccctcctaagaagatcccaagaatccaatggctcagtccttggtgatctaagacagcaaagaagtgtgcaaggagggccctgttagctcccactgtcctggtttctcctcctggagtctaatttccttggccctctgagccttttgagtctgggccctggtccaatgctgctgttgtctgaggaatggtttggtgagaacagatgttagaacttgtttgttgattcttgtctggctaataaatcatcaccaactgccttctcctacagggaaaaa

SEQ ID NO: 11521 - DNA, 663 bp, Homo Sapiens
  misc_feature (139)..(139): n is a, c, g, or t
ttgcagagcacagcgctgccttggcctcccgtgcccgcgtcctgcagcagcgccagaccattgagctgatccccctcacagaagttcactattggtaccaaggaaagacttatgtctactacatctatggcactgaccnccaggtgtatgcggtggactatcctgagcggtattgctgtggctgtaccatcgtgtgacatagcatggctgtccccagagcctgccattcacgtttgccaaggaagatggccgacactctctgagtgtgttcactgttggctgcattggacaatcacatacaaaccctggcatgtccttccagaaaaaccagcttatcatctatcaagctccaaccccttatacagctcctctggtggaatccatgactcatatgtttaacctacaataattcagctatacacattcctgtagaacaaatgagagaaataatttaaatggcaaggactttgcctctggtctccaagttaatgccccgatgatgcgtgtgatttgattttgctttttccctctgtcggtcttggttctggtgtgcttcttctagtgggagcctcttgacgatctgagtattactgaaatgttcaaggatacacacaaatatctggccctaatgcacaataaatactgcacttaggcataaagtgc

SEQ ID NO: 11522 - DNA, 459 bp, Homo Sapiens
gtccacgctccgttacccttgacctggaaacgctcgagcctgtgtggtgaggagcaggggtcccccgaggaactgaggcagcgggaggcggctgagcccctggtggggcgggtgcttcctgtgggtgaggcaggcctgccctggaactttgggcctttgtccaagccccggcgggaactgcgacgagccagcccggggatgattgatgtccggaaaaaccccctgtaagccctcggggcagaccctgccttggagggagactccgagcctgctgaaaggggcagctgcctgttttgcttctgtgaagggcagtccttaccgcacaccctaaatccaggccctcatctgtaccctcactgggatcaacaaatttgggccatggcccaaaagaactggaccctcatttaacaaaataatatgcaaattcccaccacttacttccatgaagctgtggtaccc

SEQ ID NO: 11523 - DNA, 777 bp, Homo Sapiens
  misc_feature (55)..(55): n is a, c, g, or t
  misc_feature (57)..(57): n is a, c, g, or t
  misc_feature (239)..(239): n is a, c, g, or t
ctcatgaaaagttccgttgtcggctggacagctctttgactcgtaaagcagcgcngngggtcattaccccaacttcagttttcatggggcagctgctgaagtttgagaccaggttgctgtgtaatgaggtggtgccctctgcctgcctgccccactgtctgggcagaagctgactgtggactggtgggctccctctgggcaagcacagtcccctcacctctggcagggctgctacctcntcagagtttcagaagcccccacatggggcttctaggaatgccggcatgctggtctttccgacctggtgctcttctgctgggggactgaggctggccctcattcggggtcgggaaccgagggtgtgtctgctctttccctccccatcctctggcagaaatcagctagacgctataccgtggactctccctggtccaccaccatgttgaagcccttggcagcctgagagctccaaggaacaagctgtgacaaccaggagccctgtctgtgggttcgtctgcccagggcctggagcccaagccctgtgttcctggggaagctggggacttgggaagtgatgggtgtgtcatgttgcgtgtgtctgtctgtgagcctttcacacctgtgctggcgctggaaaattatttgtgctcagctgacatttaacactccctcccccgcttcctcctagccctgtgggcaggggttggaaacttagcactttatatttatacagaacattcaggatatgtcaataaaatattgttatatttaaaaaac

SEQ ID NO: 11524 - DNA, 394 bp, Homo Sapiens
tactcacattcatgttagctttgttctaattaaacacatggcaatgttgccagggtactccctttgatttcttaactccaaactctttaagaacaaaatgtgggcctgattcacctttacagtccccacttccttctatggccatttgagtaactactctcatccactgaaactgttgccttcaatgctactgatctgaaaaagatcatgaggccaagttagggtccagtgggcaggaatgttgtgattgattattaatgtctgtcatgggcagtgggtagaggacagtagcagtatctgtgcctggaattttccatctttcattgtatatttaacaaatatttgttgagtgaaattcaacaagaatttagaataaagagatcctaggaaaagg

SEQ ID NO: 11525 - DNA, 468 bp, Homo Sapiens
acaatgcctgggctccagtcatgtctccattgctaagtagaatgagctgcagaggaggttccagtcactgttccatataatctgttgcttaaaccctgatattttttccttatctgtttttaattttagaaaaaaagttttaacatggagattatggcttccactgaactgggatttagtatttcgaaacatataaaaaggatttctaaaatcaaaagatctatacttttttctctttccatctggagtcaactgaatattcaacttttccattgaacaaacaaacaaacaattgtgctcctgactttttccaggcattaaacaatataataacaaaaatgaaatgcaaataaatgtacttttaaaactttaatcctacagcaaaagattctactggctaataatgctacctgcctgaaactttatattctgatatttttccttaataaaaaagtattttttaaaaaa

SEQ ID NO: 11526 - DNA, 548 bp, Homo Sapiens
agcagctgctgccccagctgcctcctacccattgccaagagaggatgcatctggggagagcaaagcactaaggaattcagcatcagcctgcagagggctgagtctgggttagtcctgcccgcaggttagcgagatcctgtgttgttttttgggttggacggtgccgtttcaaaatagaggcacagatgctccatgcacgaggggtccccgggcactggaacaagtgccaagttgaaggcagggggcctgccagagctgggtgtgggtattcaggccctcacctgccctgcctgcagggccagaccctgaggaaagggcgccccctgctggtctttttggatttaaaatgtttgggggaagagttgagttccagttcagtcccaagttaaacaggagggagtgagggagaggagagagggcgttccccggatcccaggagagctgggctatgactgcaataaggagttgttccttcacctgagatgtgcttcttttggttcatttctggcttgacaacaagaaataaacgtggtatgttcctgagaaaa

SEQ ID NO: 11527 - DNA, 338 bp, Homo Sapiens
ctggaaataataccttcaatattgaaaaaaatactatttaggaaaaaggacagaagaaaatctgccaaaatgttgacagtggttgcctttgtattaagaatataaaaggattccctgcctttttacatttttctctgctttccaaaatttccacatgaatattatacctagtaatcagaaaaaaatacagggacactcactcttatcctttacatttctctcctgtttggacctcagattcctcagtagaaaattaaactagatgccagcctgggcaatatgatgtcactctgtctttacaaaaaatgcacaaattagccaggtgtggtgttgtgcac

SEQ ID NO: 11528 - DNA, 390 bp, Homo Sapiens
aaaaaagtatgcagcctactaaatcagaatgaaaatagaagtacaagattataaacaaaatgcaatcaaacttttcttaagcttacctaaagttattttatctgaaaatttcaagcaactttgatcaacattaaattgacaatctaaactaacaagtcttttgaatttatgtatggtagtaaacattctctctattaattttattacctaaggctaaacctaaaatttttaagcaaaattagaaaaatagtcttcactcatcaaaaaataaagtttgttacatttagtattttcccaataaaattggtcgttcttggtttttatttggagagtctgtgcaaaatgtcactaaaaataaattagcactagaaattatttctaaataccaaa

SEQ ID NO: 11529 - DNA, 357 bp, Homo Sapiens
aaagctttctctaatatgctggtctattttgtgataaaggtattgattgcatgaaatgaatcaatttttatctgaattgcttcttacccattatcttctgaaagcgttgacgtaattaattctcgaaacatttgtgtctttgagttgtagtgaataatcttgatatatcacccacaatgttgtatgtaaatcaaaagtaaagacatatttcaggctccaacggaggaagttataataagttgtctggttcagcaactgattggctgaactcccaaatggagtgaaagctcaaaaactgaaaacaagcaagaattgaacttctgcagaagtcaaagaaataaaaagaaaagataattg

SEQ ID NO: 11530 - DNA, 310 bp, Homo Sapiens
ctatgaaaacctgattttggttgtgaagaaaaaaatagaccagttcattagcgtaatttgctaggcattacacaagacattgggagatacaaactgtttagaggtgatatatgctgtggtaaacgtatggtgtgcatgcagagtggggagtactgaacttgtttccgtgttgaggagggcttacagaggctgtaacatgtcgtctgagttcctgtgaagagaaagtaggagtttaggatgaaggttgtctttgataaagagattagcatgtattgaaagacttatattttaggctggatgcagtggctca

SEQ ID NO: 11531 - DNA, 506 bp, Homo Sapiens
  misc_feature (56)..(56): n is a, c, g, or t
  misc_feature (65)..(75): n is a, c, g, or t
  misc_feature (81)..(82): n is a, c, g, or t
  misc_feature (269)..(289): n is a, c, g, or t
ggagttccagttagctagatcggccactgcactcctgcgtgggtgacagagtgagnctcatctcnnnnnnnnnnncaaacnnacaccaacaacaacaaaaaacaaccagagaaatagcacttgttaactacaattgtgactctaggtaaacttgggccttaatatggttagacaagaagggttttaggtaacttgcctttttagatcctatttaggcttattagtctatattctacattcttgcacgatggaaattactagagaagtgnnnnnnnnnnnnnnnnnnnnnaaaataaaatttgttgtgaaaatatactgtattttaaaatatttagaaagattataaataactggagaaaagataatttcatatactaatatgatggaattagcctagcagatgttaaaaatcctttctgaaaattataatctaaaattatttgggaaattacaatggaactgaataatctgtacgttggtatattaaagccatttttatattgtga

SEQ ID NO: 11532 - DNA, 445 bp, Homo Sapiens
cactgttctgctctaagggccaacaaataaggctctattaaaaattatttaactcatctaaactatacaaagttatttgatttggtcagtttccttggattggagaaatttaaaatgacttaaattaatgtgtaatacttagtagtaatgtcaaatgtttaaacctggtatgtaaattagtcaagcaacggcctttcctgtctgtttggtgcagctgaacacatgggtctatataaagttcttttgctctcaaatataaatagcagctcaaaagatagctggaaggttgcaggaagttcttagcaaggtcaaaaacaattctcatgtgaagccatggtgatttcttaccgtttgctgtcatgataattattggggcatataatcggatgtgctcttcaatcatttcgtgagattttcagccaacaataaaagggttttgttttaa

SEQ ID NO: 11533 - DNA, 456 bp, Homo Sapiens
  misc_feature (236)..(236): n is a, c, g, or t
attttacagtcatagaatagacacagaagaatattaagttaatcagacatgatttagtgagatcaaaaatacaaataatctgaaaatttagtgaaaagttctaaatatactatccataccaagcacatcaattatattttagaaaataactgtattgaccaagctggctgaaaataagaattttgtttttctagagagcactaattgctacttaatgtcaaactaatgacatctcncccacccctcctaaaatcctactaaaataaaattatagatattgaaaaaggaaagaatctataatagcaaagaaaaagggccagagttttgctaagaaatgttctgtagttgggtgagctcaggagttcaagtgatggtcctgccacagcatcctcagtagctagagctataggcgtaaccagtctgggcaacataatgagacccccatctcttaaatta

SEQ ID NO: 11534 - DNA, 457 bp, Homo Sapiens
  misc_feature (71)..(71): n is a, c, g, or t
ttctggcaaactctcctttaaattaaaagcgaatgcattatgatttcatttatatgaagtttaaagcaaancaaatctaattgtatcagaatagtgcctaccctaagggttgagggttgatcagaaagagatatgaggaagttatctgggaagttatctgggaagagagaattgttttatatcataataaagatgtggcttactctggtgtactcatttgtcaaaattgtaaagctaatatgtaggcatttcaaggtatgttatatatgtagtgatagatataggtatatagtgataaatgagagatacaggtgaaaaaagaatgacaaaaataatgatagccattgcagttgtataatgtaggacatgaggattctttatactgttttgtttactttgtacatatttgaaattttcataataaacagtttttcataataaagagcttttaaaagcc

SEQ ID NO: 11535 - DNA, 433 bp, Homo Sapiens
tgcccagatgtggattttgctttgtctcacaagcgttgctgaaacactggtagaaaggtggacgacggattggttgtgattagtttgatcttcaccagtacagaaattcaaaaggtcaataagctcaacaagattgctgtctcactgatgatcagagttgccattaaaatcgtatttcccgcacatcaggctggaaaaaagaataaacatgatcattttagttgtcctcaaaggagaagaggacaggtattctgtaatcaggtgttgtgagtgtaactagttaaactctttgggaggtgggcagttttaccttggcaatatctatcaatgcattgcctgtcatcatataattccatttccaattcaatttatcctgtgggggtagaggcccaagtgagcagaggatgttctttccagcattgtttataatcgc

SEQ ID NO: 11536 - DNA, 272 bp, Homo Sapiens
aagctcctgatctttgttggttatgttgcaaaagattgtatcaggagaagcctcagcatggacattggcatcctgacataacccccattaatttagtattctttctgaaactcaaatggattttcaagtccaagagactatggaataaaatcattgtttgtctgtgttaagttttatctctgttattgcctgaagacttttggtaacaataatgcgctttcatcaaacttttaagacttgattggaaaaaataaatgtatgtttcatcagtt

SEQ ID NO: 11537 - DNA, 185 bp, Homo Sapiens
  misc_feature (114)..(128): n is a, c, g, or t
tagaggacctggatgatctgagtgcagactccctaattagagcctgattaacaatgctgcagccctagtgtgctgatgtgactttagagcagttatttctgcctaccgtttacnnnnnnnnnnnnnnngggaaagggatttcggtttttgtggcccgggtggaattgcgggggcaaaatttgggt

SEQ ID NO: 11538 - DNA, 1041 bp, Homo Sapiens
  misc_feature (734)..(734): n is a, c, g, or t
  misc_feature (773)..(774): n is a, c, g, or t
  misc_feature (792)..(792): n is a, c, g, or t
aaatcccaaaccattactgaggggattctctactgccaagcccctgccctggggagaaagtagttggctagtactttgatgctcccttgatggggtccagagagcctccctgcagccaccagacttggcctccagctgttcttagtgacacacactgtctggggccccatcagctgccacaacaccagccccacttctgggtcatgcactgaggtccacagacctactgcactgagttaaaatagcggtacaagttctggcaagagcagatactgtctttgtgctgaatacgctaagcctggaagccatcctgcccttctgacccaaagcaaaacatcacattcaagtctgaagtgcctactggggggctttggccggtgagccattgtccctctttggaacagatatttagctctgtggaattcagtgacaaaatgggaggaggaaagagagtttgtaaggtcatgctggtgggttagctaaaccaagaaggagaccttttcacaatggaaaacctgggggatggtcagagcccagtcgagacctcacacacggctgtccctcagggagacctcatgccatggtctttgctaggcctcttgctgaaagccaaggcagctcttctggagtttctctaaagtcactagtgaacaattcggtggtaaaagtaccacacaaactatgggatccaaggggcagtcttgcaacagtgccatgttaagggttatgttttntaggattcccctcatatgcagtcagtgtttcttgttaanngtatacaacaggagagangatggacatggctcatgtgtagcacaagtccgtattactcttccgtctaacatttttgaaggaagttttgttctaatttatcaatattgagggatcagggctcctaggctcagtggtaagcttcttggctttagacaccacctggagtgatcacctctatggggaccctgcctatcccacttcacaggtgaggcatggcaattctggaagctgattaaaacacacataaaccaaaaccaaacaacagcc

SEQ ID NO: 11539 - DNA, 323 bp, Homo Sapiens
ccatcgtaccgcacgctagggcggggcaccaacttggggaaggtctcggctgcccggcagtctgaagtggctggagttagcccatagcttgctgctcgtcctggtgggaaggtctggcgcgcggacaggacaggctgaaaggaggggtccgccccagccccgctgctacccactgccactgggccggccttggctccccggctagggaaggtggccaggccccgctgggcaggcagggcactggtgggtggccctgcataggtgcccgatgccttccgggactctgggcgagaggctgagaggctaaccgtgcgggctacgag

SEQ ID NO: 11540 - DNA, 314 bp, Homo Sapiens
gcactaccaaaaataaatgaagaacgtggtaggaaaagtttaccatcgagtttgctaaaggctctggaagccacaaatgccagagactactgtgacacctttaactgggtctctttcaaactgggagaggattagcttaatagctgaacactgttttcgggtcaatgaacttggaattatttgttctgcttcagctcactgaaaatctttcagataaaggataataaatgttttgattttaaaacaaattttaaggggaaagctatttttagcaaaaacacatttaaaaaacacacatattttgttgtttcagg

SEQ ID NO: 11541 - DNA, 374 bp, Homo Sapiens
tactttaatgaggtgacttacagacactggaaaaggagttggctggtacactcccatatatagcagctctctcgaggatacagtctgtgaataaatggtaccagaaccctcttgagccatggaattcaaatgctggtgcaataggagacatggtcacacaagggcagggtccagccagagtacttcagttaaagagattcctccaattcacaatctgcccagaaatgcccccaagacggggcttccccctaaagcctccctactaacaggtgctttgttttctcttcacgcaaacagggtagtgcctaccacacttcagcacaagccaggcttgtttgttctcttcttccctctaccctatccctagaaccttc

SEQ ID NO: 11542 - DNA, 416 bp, Homo Sapiens
ggatccctttgatacgggagcagaggtctcaagaacaaggtttacggactaccagctgagggtcttacaggacttcttcgatgccaaatgcttacccaaaggatgatgaatttgagcaactctctaatttactgaaccttccaacccgagtgatagtggtgtggtttcagaatgcccgacagaaggccaggaagaattatgagaatcaggcagagggcaaagatggagagcggcgtgagcttacaaatgatagatacattcgaacaagcaacttgaactaccagtgcaaaaaatgtagcctggtgtttcagcgcatctttgatctcatcaagcaccagaagaagctgtgttacaaggatgaggatgaggaggggcaggacgacagccaaaatgaggattccatggatgccatggaa

SEQ ID NO: 11543 - DNA, 344 bp, Homo Sapiens
tgtcacggggtcagcctgtgtgcttcctgggctccttgtctacatggctgcgcatctgcttggctgtgtgtccgggacctgcttgtgtccactacaggcctgggcccaaggaatctcgggaggtggaaatggacacccggggccgcagaagctgcacaggtggggccaagaaccaaccaagccttgctgccagctccccgctccacccactgtgatgccagctgcttctcacatctgtgaagcctcacccagccttgggccatcattttcaggtaaataaaaaggcctaatgccccatcaggcctgagctcctgcttcctgaggaggggatcctctaatcagcc

SEQ ID NO: 11544 - DNA, 450 bp, Homo Sapiens
tctagaggatcccgtatgactacgggggaaggggggatggggcccctgctaactgaccttaaacgatgattgaaaaaacgaaaaatggactgaaatccttaattggcagaaatgtagtatgacaactatccaaaaaggcatctctataagaaatgactaattgacaatctgctgtaccaaaagttggcatttgagcaagatatgacaagtccttagtgagcaacctactgtgtactagatgtcctgctaaacccttaaccctactaatacctaggcctgcacgtctctctcactctgttctgcaagtcaatataagtattaacattcgtgataaataaaaattctctgcatgtttcagcaatccctgtatctcgcgtctgtcttctgtcttccttcctttgtctgtcttttcccaccaaagcacaaggattaaggtggagacctgaatag

SEQ ID NO: 11545 - DNA, 706 bp, Homo Sapiens
gatctaaggatcccgtttgactacgggggaagggagaggtcagagccacagctgttgggcacggactgctgtaggaagagaaggccagggaggcgctggtggtggcctcaggctatgcaggtgatgcccattgtttccagggccatcccagtttggaggttcctgtttctagaggaggttcccttgtgaccccctcatttccacacccgagcaatgctgagggctgtggggcccccaggggcttgagtgtggtttatggcacagcagggactgatcacagtggcaccgggtgtcagtggccagtggtcagtggccaggaaccctcaggaccctcctccttgtgtgggtggcatttacccacccacaggtcacgctcaggacccgcatctcattccgatcctccttgtgtgcgtggtacttacccaccccacaggtcacgctcaggaccccacatctcattctgaaggccgggcacaggcggttgttttctctccaacttcggtttccccatccccactcttagggcacaaatgcaggtgtagcttccccatgcccactctttacgcacaaatgcaggtgtagcttccccatccccactcttagggcacaaatgcaggtgcagcttccccatccccactcttagggcacaaatgcaggtgcagcttccccatccccactctttagggcacaaatgcaggtgcagctt

SEQ ID NO: 11546 - DNA, 215 bp, Homo Sapiens
tgtccatcccccttcgtggccatggtagcatcacgcagattgccatctcagaagagagcatggaagaggcagggctggaatggaactcagctctcaccgctgctgtcaccatggccacggaggagggtgtaaagaaagactcagaggaaatttcagaggacactttgatgttctggaatagaatagctgacgaaggggtatgacactaacctctg

SEQ ID NO: 11547 - DNA, 654 bp, Homo Sapiens
acacacctactacacagatgataaaatcccacaatcgtatctgttcatgtttctgggttttgcactgaacagagattggaagggagtaaggactctctcccttctgcttaacattcacatcaggaaaaagaagaaaacaaagttgccctttcatcttcatctgcttatttcagaggacacacggaggcagactgaccgagcagtggggcttcatcttcattcttgcacttctcaccctacaaccatttagcaacagaaaccgtggaaagcgctggctacggggctccaggcagccaccccccttattgggcaaaggagttaaaaagagcatcaccacgacctcgctactggtttttggcctgtctgagggagagagttcccgcggagccggcctgggcgtggcccgcagccctactgctgggcctgcctcttgcagtagttgctgtaggcctcctcgaacatggcttgcaggggaagcgggccttcagcttggagcagatgaggaaggagccccccatcttcctgtgcagggagtaggtttcctcgggtggggggacgagacggtgcctcagcatgacgggaatcaggttgtggatcttctcggtggtgctctgagtgccaaaattcaaaaggctcattcagaggcgaaggcct

SEQ ID NO: 11548 - DNA, 343 bp, Homo Sapiens
tctagaggatccctcggcactgcttcggatgcaggtactagctgtgtgtctgcacccctggcaccttcctctcctcccacacaggaagctgccccactgggcagtgccctcaggccaggatccccttagcagggtccttcccaccagactcagggaagggatgccccattaaagtgacaaaagggtggggtgtgggcaccatggcatgaggaagaaacaaggtccctgagcaggcacaagtcctgacagtcaagggactgctttggcatccagggcctccagtcacctcactgccatacattagaaatgagacaatcaaagcccccacacagggtggcacacc

SEQ ID NO: 11549 - DNA, 182 bp, Homo Sapiens
gcatttgtccacagaggtccatcaccacacggggatgagagtggacccgggacagagcaaggccccgtggccagtgctaagtgggcatcctgactaatctgcgaggcactggagggacgcagccttcagggcggggatgtggctgcagccacatccgaagcagtgccgcggatccttagatc

SEQ ID NO: 11550 - DNA, 283 bp, Homo Sapiens
tatgcactgcttcggatgccccagaaagcaagttcttcagttcctgtggggcgggaggggtgtggaagagacggggtctcaccagcaaggcgcctcccccacagcctgtcccatgtcctcagtcccaagggccgaaccagggaccaggagcaacgggtgcctggagccgtggggctctgcccttgatgtccgccctgtgtgctggggctgtcctctctgggaagcccggggacccgcatcccccaccaacctgactaaatcagctcagggacccgcgtccccc

SEQ ID NO: 11551 - DNA, 484 bp, Homo Sapiens
tctagacgagcgtagacggacggataaacagacatggcacctacatccatgaatggatggataaacagacgtggcacctacatccgcggacggatggataaacagacgtggcagctacatccacgaacggatgaataaacagacgtggcacctacatccacgaacggatggataaacagacgtggcacctacatccacggacggatggataaatagacatggcagctacatccacagatggacaggcggataaacagacgtggcagctacatccacgggtgggtggacaaacagatatggcacctacatccacggacggatggataaacagatgtggcacctacatccatggacggatggatgggtaaacagacatggcacctacgtccacagacggatggatggacgaagagacgtggcacctacatccacggacagacagaaggacaaacagacgtggcacctacatccgaagcagacgccg

SEQ ID NO: 11552 - DNA, 224 bp, Homo Sapiens
ccctatgtactgcttcggatggtttctgcttctggtggaggctcaggaaacttaaaatcacgggagaaggcaaaggggaagcaggtgcatcttatatggccgaagcaggaagaagagaaggggggaagagaggggggcagagaaggtgccacacacttttaaacaaccagaacttgtgagaactctatcacgaaaacagcacaaaaggcggaaatccgccccca

SEQ ID NO: 11553 - DNA, 373 bp, Homo Sapiens
tgggctgccttagaggatctccggcactgcttcggatgtctcccaaaaagttgagcctttctagatggcttaggtggcaccatggctcagcaggaggggcgggacggcaccaggttcttgtttggaccctgcccctgggcatggccaggtgaccatggctacattgccaaacctctgactgccacagctgcagactgagagggtgggtctgagtccccaacaatgtctgaagctgcccactgggattctcaggccaacctgccaacagcaagcggattttcttgcaagatcagggaccccatttctgcagccagtgtctcctgggtgccttctgagacgtcccacccccatccaagcagtgccaacatcctct

SEQ ID NO: 11554 - DNA, 802 bp, Homo Sapiens
aactgctcgatcttggcttgcatgccccagtagcggtactcaaccttgcacagcttataggcacacataaggggccccgtctgtgccgccgtccgtgcccagtcatcagacagtggccctcggcccgtcttgaccgagtgataaagccgggggtcctcttctgctttgtactcgcctggggccactgcatcccgcacgatgtcgatggtgtccaggatgcgctgtctcctctcggccccgctcaggttgaagacgtttggctgctgccccccatcaggcaggtaataggtctcaatttcaatggagaatttctccacgaaagggcaggtgtaccgggttcgggtgtaggggtaggcattccaggattcctcttctacctgcagggcagccttgggcagcagtgcccggaaccagcctgggatgtgggagcccacgtggtacaccttctgtgtgtattgcccgctgcccccgggcccatccgtgtagggccggttggccaggatctccacgccgctgccctcaccactagactcctcccggctctttttctggatcatgtagagctgggccacctggtactcgtccaggctcatgggcagcagaatgtggtattccttgatgagcatcctgaaggcgctcggcgggccgcgcgcggcctccgctcctcctctagctcgaggcgggcgcccctcacccagcccggggcaggcccggccggcccctggatcggagcccggagcgcccccagccccggcctcgggttccagcggtggaccggaccctcccgaggcgcagtgccgcc

SEQ ID NO: 11555 - DNA, 363 bp, Homo Sapiens
actccttgattaagaagctaaaatgtttctctcatttactccttaaacaaaagacttaaattagtttgggtcattattacttttattttgcagcatttggtttgttattagcgtaagagcaagtataggatatggagaggcccctggcttcatgagaacaaaggcaggcccaggttataattacagctttctcctgccccttctttactttctctaccacagttttctccactgtttgttttcctcttgccacaatttgctaacatttaaaaaattttcctgcacccagtagtttcatatcctgtagacatcctcttaggacattctcaaatttcaaaataaaaaatattcatctatgtagtt

SEQ ID NO: 11556 - DNA, 511 bp, Homo Sapiens
  misc_feature (413)..(413): n is a, c, g, or t
  misc_feature (425)..(425): n is a, c, g, or t
acggaaactccatctttatcggctgtataaacatctctggtctgtacatacatttcatacatcgtagggtgggaagcgagggccaaagggaggcccagcagcacaacagctcacccgctttccctacagccctacccgctctgtgcaaaccaaggccaacagctcctgctgcctcttcctaacctggaaaagtcactgttaccgggagggggccaggggttgaaggattaaaaggagatagagggcttggtggggaggacacatgtaagtgctagaatcaaacactgaagcgaaacaggcaaactggcacaaagcagcaagctgaggcatgggacggggcaggaaaaggggagggaggggccacgctgcccctctgggcttgctcagctaaggctctggggtcttgccctcangctggcaggganacaggccccagagcctcagccccaatacccgggagctagggacatgggcggacaattttgatctcaattttccctgcagctgtgag

SEQ ID NO: 11557 - DNA, 1524 bp, Homo Sapiens
  misc_feature (1092)..(1113): n is a, c, g, or t
  misc_feature (1295)..(1328): n is a, c, g, or t
cctgcggagtgcatggctccgaatctaagtgctgcccactcccatgctcacacccacagaaggtcttcccatcccctttagattcgtgcctcactccaccagtgaggaagatgcctctgtctttcccacgactgccaggagatagggaagcccagccaggactgaccctccttcctccagcctgccctgacccacctggcaaagcagggcacatggggaggaagagactggaacctttctttgacagccaggcctagacagacaggcctggggacactggccccatgaggggaggaaggcaggcgcacgaggtccagggaggcccttttctgatcatgccccttctctcccaccccatctccccaccaccacctctgtggcctccatggtacccccacagggctggcctcccctagagggtgggcctcaaccacctgctcccgccacgcaccggttagtgagacagggctgccacggcaaccgccaagcccccctcaaggtgggacagtaccccggacccatccactcactcctgagagggctccggcccagaatgggaacctcagagaagagctctaaggagaagaaaccccatagcgtcagagaggatatgtctggcttccaagagaaaggaggctccgttttgcaaagtggaggagggacgagggacaggggtttcaccagccagcaacctgggccttgtactgtctgtgtttttaaaaccactaaagtgcaagaattacattgcactgtttctccactttttattttctcttaggcttttgtttctatttcaaacacactttcttggttttctaatggagtatatagtttagtcatttcacagactctggcctcctctcctgaaatccttttggatggggaaagggaaggtggggagggtccgaggggaaggggaccccagcttccctgtgcccgctcaccccactccaccagtccccggtcgccagccggagtctcctctctaccgccactgtcacaccgtagcccacatggatagcacagttgtcagacaagattccttcagattccgagttgcctaccggttgttttcgttggtggtggtgttgnnnnnnnnnnnnnnnnnnnnnngaagacagcaataaccacagtacatattactgtagttctctatagttttacatacattcataccataactctgttctctcctcttttttgttttcaactttaaaaacaaaaataaacgatgataatctttactggtgaaaaggatggaaaaataaatcaacaaatgcaaccagtttgtgagnnnnnnnnnnnnnnnnnnnnnnnnnnnnnnnnnncacctgaatgcggaagagctcggctcccgtttagcattttgtacttaaggaaataaaaaaccaacaaaggatctcacattttctaaaaaagtgaagattgctgtatactatttattcaacttataatttatgttactccttgatctttgtcttttgtcatgaaaaagccctaatttaataaagttatgcattcagt

SEQ ID NO: 11558 - DNA, 628 bp, Homo Sapiens
  misc_feature (148)..(178): n is a, c, g, or t
atacatgtgtatataagacagtggacctttttatgacacataatcagaagagaaatccccctggctttggttggtttcgtaaatttagctatatgtagcttgcgtgctttctcctgttcttttaattatgtgaaactgaagagttgcnnnnnnnnnnnnnnnnnnnnnnnnnnnnnnnccttaatgtgaaagtaatttgaccaagttataatgcatttttgtttttaacaaatcccctccttaaacggagctataaggtggccaaatctgagaacaattaaattcattttagttataataaatttaatatttgtaaatgtaacatagtttcagtgtgatttctagagctaattcaaaatagtattgatatattttatgtgactgcatttttggggaggggtaccgaaatcgttaaatttgtcagtttgcaaaaatatcaatctttaatgggagaattttcaatttgccaattttttccttgaatgggtttaagtatgctacaatatacagttcaggcaaaatttaagatgtaattatcttcaatacttaagtgtgcttgctttctagtgccttggttttctttcttgatgctggaaaaataaacaaaccggtattgagtgtttaggcg

SEQ ID NO: 11559 - DNA, 519 bp, Homo Sapiens
gtaatggagaagaagctcaagtacgccatccacttctgcaagtccatagacacagatgactacgctcgcatcgcacttacaggagagccagccgccgacgacagcagcgacgattcagataacgaggatgtcgactcctttgcttcggactctacacaagattatttaacaggacactaagatggggaaacgtcctcgtgagatgagagcctgagccaggcagcagagcactcgctgctgtgtagactgtaggctgcctggtgtgtctgatgagaagcgtccgtcctcgagccaggcgggaggagggagtggagagactgactggccgtgatgggaatgacagtgagaaggtccgcctgtgcgcgtggaacactgtggacgctcgacttccaagggtcttctcacccgtaatgctgcattacatgtaggactgtgtttactaaagtgtgtaaatgtttatataaataccaaattgcagcatccccaaaatgaataaagcctttttacttgtgggtgcaa

SEQ ID NO: 11560 - DNA, 421 bp, Homo Sapiens
gggaggaagtgtcagtagctgggcaggccttcttggcaagcattcctccctgggttgtggcgggggctcccggcctgctgtgtggcagctgcaggctcctggggacctgaaggaaaagcttaaccgttctcccttcccttgcttggcacttagagcactagttccattccagacattccgattatcttgccaacgtggcacaaaggcctaggagcctccctgggaggaagaggcaggccaaggtcttgcctggctgcttctagggggaaagatgtagggaggaagctgccttatgcttggatctgcagcctttgcctggacctgtggagcctacgtggccagggtgagggagacagaaattagaacccaatgtattcagctaatcctcttcttgcctctgaacattgccgttaatacttga

SEQ ID NO: 11561 - DNA, 493 bp, Homo Sapiens
cagtatggcctcattgttttgtttgaggtgtgttattcataacaatattttacaccattcgtatcaatgtaattatagaacacaatatacgatcaaggataagtaattgtgtggttatctgccatttaaaagtatccagtatttgatcacattattataaataatgaaaaaatgatttaatctgtaataaactggtttattgtgcagtgactgtaatatactagagttataataaattgtttactctgcctcaccaaacacatgctaggatataacccccaaaataagtatttaactttgcattaggtataaaggagactgggtgctataattagattattttgaggcagacagagagctgttatcctaactgatttagtatgttctgtaattgagaaaatgttcaccaaattatactttttagtgatttacatgtacattttataggggacatgttctgtgtatagcgaataaataacttttatagtatcac

SEQ ID NO: 11562 - DNA, 589 bp, Homo Sapiens
tacctggctttccctaattcaccgaccccaggattaaccccatggtggttggtatcaggggatgaggccagagccctttgagctgtgcccctcacaggggtagggtcatggcctcagccatcccggtaccatctgtgcccagccggggactgggaacctggtttctccatgaggagccatcccagggcctgcaggagggactagaagccagaggactctgaggctccgcttcctggggactgcagggggatcagaatgtcccaagcttgggacagtctgggaaggcagtggccatcccatccagatgagtacatccctctctccgtgcctacttccctcctaccagccgtcgaggaggccactgatcctgtgtggtgttcaccccaggacgtgggaggctgctctgtccctctggccttagtttccacatctgtatggtggggttggggggcatgagtcagcttctgttggccagcttactgccccctgtgccccaagcagccccacccggaggaagctccctgcttccctcctggtctccacagccctcatcagcctgtttgtgtcaggggctggatgtgcaaataac

SEQ ID NO: 11563 - DNA, 334 bp, Homo Sapiens
aaaaaaagcgaagatgtgctgaggtgatctacagggattaggcactgcttcggatgcctggcatggaaagtggcaccagcgctgtgagatggtttccttcctgccgtcaggcgtcaggaggcctgctcgggtctgcatgtgcctgggcttggcaggtggggaggcggcacccaggacagcccccgcattggaagctctaggaacttggatctaggctgaaggcctttgctctagagttccggattgctgagcttggaacagctcctcctagacacagtgtggcgcgggagcagctgcatgaggtgcctcacgtactctgcacacatcagcagcc

SEQ ID NO: 11564 - DNA, 371 bp, Homo Sapiens
tcaacaggaaaccgatcttcccctgactccccaccgaggagagcctctcctcgaccctgcacgggctctgaggccagcgtcacactccctctctgctctcctgtcccttgagcccttcctctacaggtggggcagagagggtggtggacaccaggcttatctgcctgctcctctccctcctaaggaaaagggagtagcagattgatctgaggggaaagcacaggctgtgctgtcgaggcgcctgctcgcttactcgcctgccaggaggccgggctctcagtttggggtgtttgtgcaaccttcatctgcactgggccctgtgcccctcctccccatccatggtccccagcagtgcctggttctgagcaaac

SEQ ID NO: 11565 - DNA, 830 bp, Homo Sapiens
gcttggagctgggcaaacgcccggagagctgctcaacccgctggtgctgaactctgtgctgagcaaggccctgcagtgcagcctgcatggggacaccccgcacgcctccaacctctccctcgctctcaagtacctgcccgaggtgtttgcccccaacgccccggatgtgctgagctgcctggagctcaggtacaaggtggactggcctctcaacattgtcatcaccgagggctgcctgagcaagtacagcggcgtcttctccttcctgctgcagctgaagctcatgatgtgggcgctcaaggacgtctgcttccacctcaagcgcacagccctgctgagccacatggccggctctgtgcagttccgtcagctgcagctgttcaagcacgagatgcagcatttcgtgaaggtcatccagggctacatcgccaaccagatcctgcacgtcacctggtgcgagttcagggccaggttggccaccgtgggcgacctggaggagatccagcgtgcgcacagcagagtacactgcacaaggccgtcttcaggggcctgctcacggagaaggcggcgcccgtcatgaacgtcatccacagcatcttcagcctcgtgctcaagttccgcagccagctcatctcccaggcctgggggccccctgggggcccgcggggtgcagagcaccccaactttgcactcatgcagcagtcctacaacaccttcaagtactaatcccagatttctcttcaaggtggtgaccaagctggtgaaaccgcggtaccagcccacctggaaggactttctgctgcggccatcaactttcaacaactactaca

SEQ ID NO: 11566 - DNA, 424 bp, Homo Sapiens
ggtatgggagtgggggaggaggcagattatggcaaaacagaaagggaggccactaaagtttatcacaaggcagataatctgccacaaatgaagctactactctgttccctcacgggaagagaggtctaaaccctgggtgtggatagcaggttggccagggatctgatgcctccccacccgaggcctgggaaacctgagggtaggcagatgtcctgaagatccaggaataccccaggacctttgaaccccatgtatggagggtctccatcccacaggacaagtccaccaccaggcggaccactagaaggcgccacgggagcaaagggaggccatgggcagcaaggagacagaggctgaagagaccccccagatttggcgagaggacacagtaaagctaggtgaaggggaaggagccagcggcctg

SEQ ID NO: 11567 - DNA, 484 bp, Homo Sapiens
caggccacagccgagtcctgaggtgggctcagggcctggacacgcagccttacctgtgcacacaaagccggggcagttagcaaacgggccgtctgaggctcggcctgggagagctgcctggtcttgttgttttgccaggtgtgggcgaaggtggctatgcctttgactgtggtcacacccggccacgcaccacaccagagaggctgcacaagggctcctgccttccctgggggcttccctggccttccccgcctggcttcactctggttttcagtggatttggcatgttttctgctgttccctgcctgggccatctccatctgatagaactccctgcgacagtggcaacgcctcatccacactgtcgtgtacaggagccaccagcccatgggaccactgagtacagggacaggcgccacagtgaccactgaatgtctcatcagacccatccgaagcagtgccgaggatcctgtagatcacctca

SEQ ID NO: 11568 - DNA, 275 bp, Homo Sapiens
gggcatgccatgcatggggaccttcctcctccaccagggcatccagcgacggattacggtgacactactgcatgagacaggcagccatatcctgctggaaggaagtgcgcgagctgctcgtgggccgcatccgaaacactccagagaccgacgagtccctgatcgaccccaacatcttgtctctcaacatcctctcttccggatacatccacccagcccaagatgaccggaccttttaccaatttgaggctgcgtgggacagctccatgcacaaa

SEQ ID NO: 11569 - DNA, 463 bp, Homo Sapiens
tcggcactgcttcggatgggcttgaaataggctgagtgaaaacctgcgagcccctggctgcttccctgtgcatggacaaggagctgtcggtgagtatggagatctctgcccttgtcagaggaaggcttcctcatcacaaggcagggcaggtgtctgtgcccaagagctgagcagagaacaagcagccagtggaggctttcgcctgaactgtgcaatccctacctgatggggaagtgcaagtgacaattaataaattaatagcgagtcactttatgtaaatacctctctttttgtacactatatttagagaaacaaactgctttggcatttagagataaattgtatgtaagagtttatcgctgcttctgctgttgtcactgttcatcatccagataataaaagcaaactagaaatactcaaatgccagtaccacctccaatatataaaatatatcctaggcccc

SEQ ID NO: 11570 - DNA, 326 bp, Homo Sapiens
aagtcagggggttaaaggagaggcacaggaaggtgaggacacacagaagaatccgtgagcggtctaccatgcccagcgccacaggaggagagtctggctcatctttgacctttgcatcatccaatagagggcttcctggctcagagtcaatggagtagggagagaagccagcctgggaccctgagtcagaggctgggggggacatcagaaggacattctgattaaagtcctcgatcttcaggtccacctcattgtccaccagactgcctaggtcgatgccccttagaagcttgttcttttgatttgccagcttcagcaccatgttc

SEQ ID NO: 11571 - DNA, 667 bp, Homo Sapiens
  misc_feature (439)..(439): n is a, c, g, or t
ctgctccgcccctctctggcactgtggctggtgggattcatgtgcttgcttgcttggccaagtaggcaggagacaacggccgaggcccgaggaaggcagtggaactcacaagggcgagggccatcacccggcctcacctgcatctgcttcatctagtatttatgggaaaggagtgacttcatttagctgcatgtgttcagggctgaggaattaaatattaaccatggaaatgggtctggtcacactccccagtggggctgtgacagttggagggagacagaggggtgtagggtggactacggaattgatgctacacaagagggaagtgaaggcagaaggttactcatgagaatgtcagggctggttagaagaatgaagggtgagggtggaaaagcagcctctatttaaaaggttataagacaatcaatgtcctcagggnaataatcaggtttcaaataaagtcaggagatggatggaccattcaaaacaaagttaaggatagagagatttgccagccaccttctggaagtgatagatggtgcagagtgggagagatgaggtcgtatgtggggatggacacagcagctggaggtgagcactcccgtacacagggtgactagaaaggcggggagaacagcacgaggcaccatgggctcctgagcgtctc

SEQ ID NO: 11572 - DNA, 506 bp, Homo Sapiens
agcggccgctgatgcaggtaatgtgcgtgcacctcctggatgaagcgcagcaagttgctggggctgtcgggcaggcctaactcaggccaagtggggaagtgcaggtgcacaagagagcgcttgaggctctggtctcggaactgcaggctcagcacgcgctccacatgggtttcggtgctgcggacgctgctcaatgccaggctcagggcaccgtgcaccatgggctggcccctctcggtggggaagtagcgtgccactttttgcttctccatctcagcctcagaaaccagcatgacaatgactgacactttctgctcatggaccatgagccagaagtcagcagctgtgccaggcagtggggcctgagttgccactagcggggggcagtatggtgagagcccctacacgcatctggcattgatgtagtcatccttgcctgagcgccacaccccactgctactgtcatcaggcatgacatgatggtgcccgttcttcaatgagtagca

SEQ ID NO: 11573 - DNA, 536 bp, Homo Sapiens
ggcgcccttcctggtttctgtggctccaattttctatgcagccccacaccccttgttgttttgatcctgagaaataaaagggaggctgaattattcaaatttaaatgaggtttccccttcatggaagtgctgctgacccttcgtgcagaaatggggagcacttgaggacacaggtgggtggaggccctttgtgcgtggctggtcgtattcgggcagccctccgtcgctttttataaaactttgtgtgagaagaatatattgataatgtcagtgaaacaagcagacattgaaatggaggcacagattactccacaaggagttcttctgtatattttttctagatgcaaatacctttttaattatgttaattaatgttaagactttctaggcttatatcgaagctgtgtgtgggtcacggggtgatcactgctaactggataaagtttgtgcagcacattcctgagtgtacgatattgacctgtagcccagcgtgaaaaatttataaataaatttttcattgatctttttatattaaa

SEQ ID NO: 11574 - DNA, 475 bp, Homo Sapiens
  misc_feature (68)..(100): n is a, c, g, or t
agcccagggcgacagaggggcactggtttacactttgccgggaccatcagggccgccaagcaggtcannnnnnnnnnnnnnnnnnnnnnnnnnnnnnnnntgctttctctgggtcttcaattagaatgtggctggcccatattggtttgtgtttaaatgctgtacttactacaagaaggatcttttttcaagctgtacatttataaaaacagatcatatactgtatatataaaaatcttgagatggtagaaacatgtatgaatgtactaagtagtattccactgtactcattcataaggtaggttttcttacaaaactcacaccaggtacttaaagatgtgctctgcttttttccaactacggagtgtcactgctttctagctcagtccctgcagactcttctcaactctttccctataggaaacttactccgcgtcctgcccccacctcctaaataaataaaggaatcggcgaa

SEQ ID NO: 11575 - DNA, 525 bp, Homo Sapiens
cacaacaataagagcaaggtgatttttggtggaaaaccaaaggctgagggaaggttggcatttaatgaccactatcttattgagcaaatccagtcaggaaaagagccagaagtacgacagttcttcttcttgctcgcagtttgccacacagtcatggtggataggactgatggtcagctcaactaccaggcagcctctcccgatgaaggtgccctggtaaacgctgccaggaactttggctttgccttcctcgccaggacccagaacaccatcaccatcagtgaactgggcactgaaaggacttacaatgttcttgccattttggacttcaacagtgaccggaagcgaatgtctatcattgtaagaaccccagaaggcaatatcaagctttactgtaaaggtgctgacactgttatttatgaacggttacatcgaatgaatcctactaagcaagaaacacaggatgccctggatatctttgcaaatgaaactcttagaaccctatgcctttgctacaaggaaatt

SEQ ID NO: 11576 - DNA, 464 bp, Homo Sapiens
tgctgacttttaacgcatgtatgaatattatactctcaacgtgaacgaccagtaacatataagtcactttacagtgctacttcacacttaaaagtgcatggtatttctcatggtattttgcatgcagccagttaactctcgtagatagagaagtcaggtgatagatgatattaaaaattagcaaacaaaagtgacttgctcagggtcatgcagctgggtgatgatagaagagtgggctttaactggcaggcctgtatgtttacagactaccatactgtaaatatgagctttatggtgtcattctcagaaacttatacatttctgctctcctttctcctaagtttcatgcagatgaatataaggtaatatactattatataattcatttgtgatatccacaataatatgactggcaagaattggtggaaatttgtaattaaaataattattaaacctaaaaaaaa

SEQ ID NO: 11577 - DNA, 604 bp, Homo Sapiens
tttaaaatgctcttagagacgttctccagccagaagagaaagaagccaggagggtgctctgagatattcagtcaccacagttcccaaatggcctaggaattcagagagtcagaatatcaccattactccccaatggaacccccgacagtctcagcatggtgtgagggtgtggacggggggcctggcaggtaccaatcactcatcccgctcagtgaagacacagtgttcagctacggaagccataaggcaggccgagcttctgcccatccggaggaaatctcagctatccaacggcggtcaggagcagaggaaaataaagcagaataactagaaaacacgctcacagatcctaatgttaacggttacaaatgacgacggaaaaacaaactcctgaccatatattatatagtttcaagcagcaagaaggaggatattgaacattctcaacacacataataaacgcttgagatgatgatatgctcattaccctgatttgatcactagacatcccatgtatcaaaacatcactgtgtatccgatgaatatctacaattattgtcaattaaaaacatcattaaaaacagactagactgcattaaaaata

SEQ ID NO: 11578 - DNA, 382 bp, Homo Sapiens
gcccctttaatcccctcacaggcgctctgagaatgtacagatgctatccccctgggcacccagtgtttccccttcctccctgtctgccttttgctcaatcttctcagcgccctcaggaagccctttcacagctcaagcaagggaaacctctgggcttcctccccctccaacaagtcacctggaagctctcaggctggccatggaaagctgaacccactgccaggggactggacagagaggctgttctcattttccaatcccttccaagaaggaaggagaatgcttctcctgtagagcagcgacaggtttgtgtcctgtgacctctgccttcctcgcccaggttaaggctcccggtggtaaggctcccgggagatcctctaga

SEQ ID NO: 11579 - DNA, 277 bp, Homo Sapiens
ccgggagcccttacccctattcctctgggtaattcttgaactgatatcatcttgaatgataacatccacctttcttgtctctctccgccaccaaccagtgtgactcatttctggaagataccatcctgacataccatgcaacagtccgtatttccctactattcctctggcgtcattttgatatcactccactcacaaaactatctacacccattccctagggttaacggcctcacgggattctctgcatattaggtaaggctccaaggggtcctct

SEQ ID NO: 11580 - DNA, 358 bp, Homo Sapiens
ccaggacttcacgggagccttaccctattcgacagtttaaaaactgcaggcacaaggattaatggagtctttctcaaggccatccagcctgtgagcagcaggataggagcagggaggacccagagggctgactccagtggtttatggtccttccttgtgaccacgtggtaagaaagcaaagtttctctgtgttttatcagaaagtaaactgtaagagtgttgtggcacacatggaaagatcctatttttcagaggaggaaaatagctttcctaattattactcattttgtgtttaaagtatgggtgagaaaacaaaacatcagagaacacttgaagtctaggaaagaattcttaaggc

SEQ ID NO: 11581 - DNA, 208 bp, Homo Sapiens
gatccgaggagctcctgggaagccctgggtgcaggacactgatcgagagccaaaggtccctccccagacatctggacactgggcatagatttctcaagaaggaagactcccctgcctccccagggcctctgctctcctgggagacaaagcaataataaaaggaagtgtttgtatcccagcactttgggggtcgagttggcggatcacc

SEQ ID NO: 11582 - DNA, 393 bp, Homo Sapiens
cggtatgcatgaaccttctaatggagatgtgactgggttaacccaaatgcagtggcacagatgtgggacaagtcccaatatgatcaaaatggagtttcagaaaaatgaacctgttactgttatgaagagtgtgttaacacagatgaaactgttactgaaatgccagggtttcggtctaggtcccactgatcactgtacagaaggccaatccctgagacaacaatattgccagggaagaaggctttaatcaggtactatagccaaggagctgggagatcagtctcaattccgtcttgctgaccgactaaaattagaggtattatatagcagggaagaaatgtaaccatatgtggaaaacaggaattagggagaaataggcgttggaggctatca

SEQ ID NO: 11583 - DNA, 288 bp, Homo Sapiens
ctgatagcctcgggcctggtagtatcaggaggacaaggaagccatttaaactgaaggtctacctagacacgggtatatgagcctgaatatagaacaacaggaggttattcatgcaagagaagagggaaaccctgacacaggttttggatcccaagtaggctgaagaaagcctcctctgcgtagaagggcagcttgagcctgagagaggtgagaaggatatcagcataggaagacagttcagcagggagtactacagcataggcagagtgaagatggtatctgcatggg

SEQ ID NO: 11584 - DNA, 551 bp, Homo Sapiens
aattgagctcgggtacccacgcgctgatagactccggtattgaggctgcctgcctcccttggttcgcactgtccctgttccccttgtgccacctgtgcaagacttgagaatgggagctcaactgtggtgttcaatacccgggcctgtcttagcttcctcaccccaccgatgttgaccagtgcaactaccacgggacattgtgttgacctcgggccttgcgtcctctggaaaacagcttgtggagtgggtgtgatgaggacaggtgccctggaaagcatcaggaccttgtgaggcaaaaagcaaaagccagcactccacgttcccgccatgctctcctcaccgtgtgggcatccacctggccaagcgccagcctccgcagtgcccctccctctggtcgctcccgcgcagcatgcgaaggtgttatctgcccgcgtcctgccttttccccacaccggcacggaggagcctacgtgttcggtggtcgtatcggacgtggtgatttgcaggtgacatcgcaggtgttgagatgacactgagatactgaatggtgg

SEQ ID NO: 11585 - DNA, 504 bp, Homo Sapiens
acgtttttaaaaaatatttatttaaaaataagatttcaaaaaatacagtacttaatacattttgagaagtaaaaattccacaatttaaattaaaaacaatctgcaaagaaaatagaaatattacgtgaaaaaaactaaatcgctacaataaattaaaaacaacaacattgttcttaaggtagatacatggtttgattttcacattaagaaccagtgtagacttttcatctaaacaaatacatctcagctacatggttcccacttgtcatttcacccattttactcactcttctcaatctattcttacatctctcaactactattttcctaattaccatcaacactagaaatattggtgaagattttcttcaaattctcttaggggaaagacaaggtaaaaataatagacaatgcaaggaaaacagcactcagatctatacatattatgtactgaataataaaatgcctgacaaatttaaaaacaggatcttcttatgccacttg

SEQ ID NO: 11586 - DNA, 543 bp, Homo Sapiens
ctccgagaggaatacacggtgtgtgtggatagtcagcctccagctatgaactctgtgagccttcgttgttctgcagatggcctggactccgatgcaaatcagactctccattggcaagcaattggtaatcctcggtgtcaaggaacttggaaaaaagttcggcgagtagaccagtgttcttgtccagctgttcacagttttatttttatatagatggtgatataaatatttccaaatgcatttgtaaacattctaaatattctcaagtcatgttcaatgtttcctaaaccttcaattttggccaaagtccccaaacacatcattgccacactctgaagtagagaaagaaaatttaggggccagttctcaaggaacacaggtcctttatttttattttaactaagttgaagacccactcaaaaagctcttgtggttttatgttcttgacctttcaactggagtcctctcattcagcaggtggcccgtgagacacagaatacatgtctgtttgctaaagtaaaattactgtaactcagtccgaaa

SEQ ID NO: 11587 - DNA, 715 bp, Homo Sapiens
ccacggtccgcacggcttccacgcaccacaacgtgctgccatcgcgcacggttttttgcgacgctgtttctgctggagcacgcatcgtgtccacctggtgccggcgtgattgcaccgggcaccccaagccagaacacgcagtgccagccgtgccccccaggcaccttctcagccagcagctccagctcagagcagtgccagccccaccgcaactgcacggccctgggcctggccctcaatgtgccaggctcttcctcccatgacaccctgtgcaccagctgcactggcttccccctcagcaccagggtaccaggagctgaggagtgtgagcgtgccgtcatcgactttgtggctttccaggacatctccatcaagaggctgcagcggctgctgcaggccctcgaggccccggagggctggggtccgacaccaagggcgggccgcgcggccttgcagctgaagctgcgtcggcggctcacggagctcctgggggcgcaggacggggcgctgctggtgcggctgctgcaggcgctgcgcgtggccaggatgcccgggctggagcggagcgtccgtgagcgcttcctccctgtgcactgatcctggccccctcttatttattctacatccttggcaccccacttgcactgaaagaggcttttttttaaatagaagaaatgaggtttcttaaagcttatttttataaagctttttcata

SEQ ID NO: 11588 - DNA, 576 bp, Homo Sapiens
gccttgcctacgtgggattctcagggggctcgagtagggctcggggaagcatagccctataggtattaagggtcacacacctttgagaccaggtgggcactggatgggtacggtgccctccacaggactctccatactgcctgagcaaacctgagcgctcccggcagacccacccaccccctggggctgctcagcctcaggcacggacagggcacatgataccaactgctgcccactacggcacgccgcaccggagcacggcaccgagggagccgccacacggtcacctgcaaggacgtcacgggcccctctaaaggattcgtggtgctcatccccaagcttcagagaccctttggggttccacacttcacgtggactgaggtagaccctgcatgaagatgaaattatagggaggacgctccttccctcccctcctagaggagaggaaagggagtcattaacaactagggggttgggtaggattcctaggtatggggaagagttttggaaggggaggaaaatggcaagtgtatttatattgtaaccacatgcaaataaaaagaatgggacctaaaa

SEQ ID NO: 11589 - DNA, 882 bp, Homo Sapiens
  misc_feature (287)..(287): n is a, c, g, or t
cagagatcctgagcactgtctccctgaccaacactccctattttagaggagcttcaccagcacacagagcagcttgtacaggatccatatggaaattatgtaatccaacatgtactggagcacggtcgtcctgaggataaaagcaaaattgtagcagaaatccggaggccatgtacttgtattgagtcagcacaaatttgcaagcaatgttgtggagaagtgtgttactcacgcctcacgtacggagcgcgctgtgctcatcgatgaggtgtgcaccaatgaacgancggtccccacagtgccttatacaccatgatgaaggaccagtatgccaactacgtggtccagaagatgattgacgtggcggagccaggccagcggaagatcgtcatgcataagatccggccccacatcgcaactcttcgtaagtacacctatggcaagcacattctggccaagctggagaagtactacatgaagaacggtgttgacttagggcccatctgtggcccccctaatggtatcatctgaggcagtgtcacccgctgttccctcattcccgctgacctcactggcccactggcaaatccaaccagcaaccagaaatgttctagtgtagagtctgagacgggcaagtggttgctccaggattactccctcctccaaaaaaggaatcaaatccacgagtggaaaagcctttgtaaatttaattttattacacataacatgtactattttttttaattgactaattgccctgctgttttactggtgtataggatacttgtacataggtaaccaatgtacatgggaggccacatattttgttcactgttgtatctatatttcacatgtggaaactttcagggtggttggtttaac

SEQ ID NO: 11590 - DNA, 432 bp, Homo Sapiens
catccctttcccacacccacttctctcctatcaccttcccccaagattacctgaacagggtccatggccactcaacctgtcagcttgcaccatccccacctgccacctacagtcaggccacatgcctggtcactgaatcatgcaaaactggcctcagtccctaaaaatgatgtggaaaggaaagcccaggatctgacaatgagccctggtggatttgtggggaaaaaatacacagcactccccacctttctttcgttcatctccagggccccacctcagatcaaagcagctctggatgagatgggacctgcagctctccctccacaaggtgactcttagcaacctcatttcgacagtggtttgtagcgtggtgcaccagggccttgttgaacagatccacactgctctaataaagttcccatcctgtaatga

SEQ ID NO: 11591 - DNA, 560 bp, Homo Sapiens
acgtgagcagaaacaccgtgggggaggaaggcagcagctgaagaaaaaagctcaaatgatctagtcactttcgatactgtacttcagatgcgaaatggatattcgagtggaaacctgacaaagtgcgcctgctttgatgtgaactggtatagacaatgaccagtggctgggtcagtgggatgtctctctgtgagcacaaaggcttatcaaatgacactaaagataagttcaacaaccatcacattggaagggagaaggcgaacatttcatgtttggcgggcatgtgagtgcacaagatggaaagagcgattggagcatcctggtataattacccccattgtgctcttaatggaaatttcaaaggacgggagtattctgttggttggtgtccaggtttgtggcactgttccaagaggccttacacacacacacaaatatataattttctatacatatatatcctctagcttgaaacttttgctcaagtttatttatgtcactggctggctggatccaaagtcatgtgtccacacattcataaataaaaattttacctatga

SEQ ID NO: 11592 - DNA, 805 bp, Homo Sapiens
cggacgcattcaccagtccacctatggcaagagcctagccatcatgaccgaggcccagctctccgcagccgtcattgagaaccctgagatgctcaagtaccagcgaaggcagcagcagcagcagctggaccagaagagtgctgcgaccagggagatgggctcagccacctcagtcgcaggcgttgtcaacggggagagtcttgaacatatcagcaagaatcttttgaagaaacaagttgagactcggacagcagatggccggagaagaatcacgcctctctgcatagcacagctggacactggggacttctccacggcattctttaacagcatccccctctcgggctccctggcgggcaccatgctctcttctcatagcagtccacagctactgccactggactccagtacccctaactccttcggcgcctcgaagccttgcacagagcctgtggtggctgccagtgccagacctgcaggcgattctgtcaataaagacagtatgaatgctacctctactcctgctgcattgtcaccttctgtgttaacgaccccgtccaagatcgaacccatgaaagcgtttgactcccggttcacagagcggtccaaagccacaccaggtgctcctgccctgaccagcatgactccgacagctgtggaaaggttaaaagagcagaaccttgtgaaagagctgaggcccgctgagacctcctggagagcagcagtgacagcgatgagaaagtccctttggctaaggcttcctcactgtccaagcgaaaacttgagcttgaggtagagacagtag

SEQ ID NO: 11593 - DNA, 440 bp, Homo Sapiens
gggatcccgtcaggtgtgtgggtagagctgtacctgctccagggtgtagagcggcagcacctggaacgggttgacggccaccaggatggagcctgtgtatgtatagatcttgtgctgctggtagcggatcaggaggttgtgcaccatgcctgcctcgttcaggtcccccaggcggatcatgtcgtccacaccctggactgagttggggtgcatgggactgaggacaccaaagtcctctgctcggatccagtgttccttgccctcgtcatcttcaaccaagactttgcctggctttgcctctttgatgatgcccccgatggccacgctggtcttgtgggtggaaggaggctccagccacacgtggtcacccagcctgaaccccgacatcctgagtcagcagttccacaagccttgtcaggatgggggtctggctgactccc

SEQ ID NO: 11594 - DNA, 210 bp, Homo Sapiens
  misc_feature (45)..(53): n is a, c, g, or t
tgcactgttgttcatacctgtttacatggaattacatccatgttnnnnnnnnnctaagacacaagaatcttaacattaaaacagaaagtagctcctcaagagtctaagcattacaaaattacatacactatttaaatctatcaagcatggatccgaatatggtaacagaatgctcatgcgatactcaggtccacaaccaatgtagtatat

SEQ ID NO: 11595 - DNA, 229 bp, Homo Sapiens
tctagaggatcctcggtcgctgtatagggggcttccatgtgtgctgacagacccttctacataccatcatggacccagcagcactgtgatcctttcccttatttcaaagggaccaagtgaatgagcatgcatcatacttcacttacacatacacacaagtgacacctaccaccacgcctccctgcctaccatccccggaagggtgcttattctttaacaaagagaatct

SEQ ID NO: 11596 - DNA, 1056 bp, Homo Sapiens
aaacggggaccgtattgagagatgacacgcactctacctgaagcatgtgtgcagccaggccgcaaacaccatccagatcaccgtcaccgcctgctgctgctcccacctcttcgtgctgcagctagtgcaccgcccatccgtccgctcggtgctgcagggcctcctcaaaaagcgcctcctgcctgctgagcactgcatcaccaagataaagcggaacttcagcagcggcaccatccctggcacccctgggcccaacggagaggacggggtggagcagacagctatcaaggtgtccctgaagtgcccccatcaccttccgcaggatccagctccctgcccgaggtcatgactgtcgccacatacagtgctttgacctggagtcgtacctgcagctcaactgtgagcgggggacttggaggtgtcctgtgtgcaacaagacagctttgctggagggcctggaggtggaccagtacatgctgggcatcctgatttacattcagaactctgactatgaggagatcaccatcgaccccacgtgcagctggaagccagtgcccggtgaagcctgacatgcacatcaaggaggagcctggatgggccagcactgaagcagctgccgcgaccgtgagccccgcccacgtgctcatgcccagcgtgatggagatgatcaccgacctgggccccgtgcgctggtttttggatcagctagtacggaccacgtttgtagcatggcacagtcgtgggatagcggcggtgaaactttttgcgcacccatcgcaggggagtacgtcgtagacggcgtgacggccgggttctcatcagatgcatcaagttgaccccacgcatagttgacttggatagattgattcggcgtcgctcctttagagaccacaagagaagacgttggcttaaaaatattgtccttcaagacattaaagaacaggaagaggagggagaaagtgatagcgaagcagcaacgcaggagacgtcaaagagagaaataactcagagagagacagtagaagtacaggtagacaggcgacgacaacgcgcaga

SEQ ID NO: 11597 - DNA, 170 bp, Homo Sapiens
tccctggagaaatatgtgggggaaggtaagggtggggacagaggtaaggccgggtgatttactgttggcctggggcaggcccttcgactactcgggccagattttttccttcttgatccactccgcccacggggggcggggggcagctccacaccagggatcctctagaa

SEQ ID NO: 11598 - DNA, 525 bp, Homo Sapiens
gcgaggtgatctagaggatcccggtcgctgtatcgagggatagtttgttgagttatcttttagaatatttgtaaagctaaaaaatcaagttccaggtagaccatcactacagcaagcccactgcagtattaatctattaatactgtcaatgttaattaaaccattattcgtgtagcccctacccatcccattccagtctctcaggaggcttagctgtatcccagagaccccagtgctatgaccgcaggtctctcctggggcgggaagaggtaagaagtggctgatgtcaaagtcaacagccagcaagtggcgtgagcagtctcgatgaattctttcaaataagcgtttttcagatccactctagggcttgccttttccctctgttgcagtctcagaagctcttgaggtagaccttgtgagacctgcagcagtacttgctgtcttaggtacagaagccaggatattgattatttctccctgactcaacaaagagttgagatgtttatccaggttaggatgacactg

SEQ ID NO: 11599 - DNA, 316 bp, Homo Sapiens
tggtgtatcgggggccagaagccaactgcagcaaggcttggagagtagtccagccacgatcaacgaggtcgtccaggtgcacgcggccgagagcatctcctctccttacaaaatctgcatggtttgtggcttcctatttcccaaataaagaaagtctatattgagcaccgcaaaggtgcacacccaaaaaaactgctttcggtaccagcagcgcgcagacagactctccacaaggaggaatgccgtcctcgagggaggacttcctgcagttgttcaacttgagaccaaatctcacctgcccgggggggtcctctag

SEQ ID NO: 11600 - DNA, 452 bp, Homo Sapiens
gccagggccaggagcttggcggcggcaaaggcatcctggacccgggtggcggccttcacgctgtagcagttcacggccgtgagcagcagcacgcagaggcaggccacgagcttggctgcctcctcgggcaccgggcaggtggggaagagcggcttgagcaggtaggtggcgaagaccagggccacgatgtactgcgatgaaggccggatgatgagcagctcgatccagagcttgaggaaggcgggcagcgagccgtagacctccagcatgtaggcgtagtcgccgcccgatttggagatggtggtgcccagctccgcgtagcagagcgcgcccacgatggagaagacgccgcacgcggcccacaccaccagcgccagccccggcgagcctgcctccttgagcacgcccgtgggcgtcacgaagatgcccgagcccatgatggcgaccacgat

SEQ ID NO: 11601 - DNA, 575 bp, Homo Sapiens
  misc_feature (489)..(489): n is a, c, g, or t
caacgataggtcctcagctggggctgggggtcagttccgggtggtcaaggagcccctcggctttgtgaaggtgctgcaatgggtcttcgccatcttcgcctttgccacatgcggcagctacagtggggagctccagctgagcgtggattgtgccaacaagaccgaaagtgacctcagcatcgaggtcgagttcgagtaccccttcaggctgcaccaagtgtactttgatgcacccacctgccgagggggcaccaccaaggtcttcttagttggggactactcctcgtcagccgaattctttgtcaccgtggccgtgtttgccttcctctactccatgggggctctggccacctacatcttcctgcagaacaagtaccgagagaataacaaagggcccatgctggactttctggccacggctgtgttcgccttcatgtggctagttagctcatcggcatgggccaaggggctgtcagatgtgaagatggncacagacccagagaacattatcaaggagatgcctgtctggcgccagacagggaacacatgcaaggagctgaggaccatcgttgggg

SEQ ID NO: 11602 - DNA, 521 bp, Homo Sapiens
attatttcatcatttaatcttaatcattttgaaacaaagacagacttcaattttacactgcttgcactttattttgtacagacatttcattaattattactcaattttgaggtgcaaaccttctgaatatagctttcattttggaccaaacaatttgttatggcaataaataatgatgcattgaaaaaccaatttttgtatttgatttaatgcactcttacatttaagaaattatatatacattcttgaatttcaacttaccaaaatagaatagcttttatttaacagcctaagcttttgttttcctgacaaatactgaaactttttgttacattaatgctgcaaagttgtttatcacctcaactttctcactgctttgctcataactaagtgtgattacatggagagagaaagttttgtaacagtaacacatgatttagagtttaaaatcatatcagaagatgggaattatttaaatataccttataaaaataagtggcttaatcaatgagaaaaaaacc

SEQ ID NO: 11603 - DNA, 376 bp, Homo Sapiens
ttcctcaaaccattttcttatgctccatacaattgaggtagaatattttcattattcttgcagctaagcaagacagccatatgatgcaggttatgcagtgccttcatatctaaaacttttatactgcactttttaaagcttttatgttgaggaaaggaaaagggcatttgtctaaacatggattctgagttgtatatatttcctatcattctaaaaaagtgaatttgtgaagcaaagttttgccagatgttaaactttgaatttaatataccagattattaaaatattgtccattaactagttcatagattttaaaagtaaaatacttctgactgttaaaactatataaagaaaatctcatttgtctaattgcaat

SEQ ID NO: 11604 - DNA, 513 bp, Homo Sapiens
agagaatgacactcgggggaggtgaacggtttcttggtcgctgttttgggggggttgtagcctgattttctttgaccccaagaaattgttgaaaaagaaaactttttaaagagattttttgcatattctctgccttgtccttatcaacttgaaatgttggcattttctaaccttgttttgttggctacaataattcagtattcatgtcaaaattgagaagtgccctaattgaatgtgtttgaatgttatccttgcacaattctttaaattgaaagataaaatgttttacctcactgttggacatacattccaagcttttcaactctaggagaaaaagaaaatcatgttttcctgtattgtaaattttagactatttcatatacattgtattaaaactgccatatcaattttaatgtatagattttgcaaatattatgctatatgtaatacctaactgtatctgtagtgtatatgtaatatatttatgcccaataaatgttttaattctttctg

SEQ ID NO: 11605 - DNA, 609 bp, Homo Sapiens
gctgcacccatgggccgctgtgcagctggcgtcatgcatctgttctacgtgcgggcgagagtgtctcgtgccatgctgctgcgcctcttcttggccatggagaagggcaggcatatggagtatgaatgcccctacttggtatatgtgcccgtggtcgccttccgcttggagcccaaggatgggaaaggtgtgtttgcagtggatggggaattgatggttagcgaggccgtgcagggccaggtgcacccaaactacttctggatggtcagcggttgcgtggagcccccgcccagctggaagccccagcagatgccaccgccagaagagcccttatgacccctgggccgcgctgtgccttagtgtctacttgcaggacccttcctccttccctagggctgcagggcctgtccacagctcctgtgggggtggaggagactcctctggagaagggtgagaaggtggaggctatgctttggggggacaggccagaatgaagtcctgggtcagggaacccagctggctgggcccagctgcctatgtaaggccttctagtttgttctgagacccccaccccacgaaccaaatccaaataaagtgacattcccagcc

SEQ ID NO: 11606 - DNA, 648 bp, Homo Sapiens
agcggccgccctccatcattggcccaggccgggctctagggcctgctgggaagctgtctggggccctgcgcctgatgagctgccatgaaagtggccgcctctcacactggcaggcggtggctcagatctgctgaggttctggagtggcacaggaacaggaggagcaaatgacactgggtctttgtgctgaggcaggacacagcggctttccgaaacacacacacagaaaatatgactcctgctgccatctcaaggacattttcctaaggacagtcctggtgtcctgatggagtgaaagggatcacacgtgggatgtcccagcagggcctaagccaagtccatcagatgtctcaacggcttatgaaacaaaaacagaggactgaagtctgttcacagtggcccatggttgggcagcagccctgggtgagctcctgtgttctccagcctctcgctcacccagggcttggctatcctggcctccaggtgctggttcctgaggcttcccttgcggcagtggcgcagatacagggacactcatgtcccattgctcctcagaagtcctagcagcagccagactaggggcaaagtaagttttcacagggggaaaaaccccagcaaaaaccccctaaagtaactggacaatccttt

SEQ ID NO: 11607 - DNA, 902 bp, Homo Sapiens
  misc_feature (704)..(712): n is a, c, g, or t
gggtacacctgggatcccaggtcgggatggattcaaaggagaaaagggggaatgtctgggggaaagctttgaggagtcctggacacccaactacaagcagtgttcatggagttcattgaattatggcatagatcttgggaaaattgcggagtgtacatttacaaagatgcgttcaaatagtgctctaagagttttgttcaggggctcacttcggctaaaatgcagaaatgcatgctgtcagcgttggtatttcacattcaatggagctgaatgttcaggacctcttcccattgaagctataatttatttggaccaaggaagccctgaaatgaattcaacaattaatattcatcgcacttcttctgtggaaggactttgtgaaggaattggtgctggattagtggatgttgctatctgggttggtacttgttcagattacccaaaaggagatgcttctactggatggaattcagtttctcgcatcattattgaagaactaccaaaataaatgctttaattttcatttgctacctctttttttattatgccttggaatggttcacttaaatgacattttaaataagtttatgtatacatctgaatgaaaagcaaagctaaatatgtttacagaccaaagtgtgatttcacactgtttttaaatctagcattattcattttgcttcaatcaaaagtggtttcaatannnnnnnnnagttggttagaatactttcttcatagtcacattctctcaacctataatttggaatattgttgtggtcttttgttttttctcttagtatagcatttttaaaaaaatataaaagctaccaatctttgtacaatttgtaaatgttaagaattttttttatatctgttaaataaaaattatttccaacaacctt

SEQ ID NO: 11608 - DNA, 890 bp, Homo Sapiens
atcaggtgacagagatgatgatgtagaagaaacacatccaatggatgggaatgatagatgaatatgatcccaaaaaagaagccaacaaagagggtaatactgaacaacctgtccacactagcaagattggacttggaagaagagagtatcagagtttacaacatcgccatcattctcagcgttctaagtgccgtccacctaagggcatgtatttaacccaggaagatgtggtagcagtttcctgtagtcccaatgcagccaacaccatcctgaggcaactggacatggagttgatctctctaaaacgtcaggttcagaatgctaagcaagtaaacagtgcacttaaacagaaaatggaaggtggaattgaagaattcaaacctcctgagtcaaatcagaaaattaatgcccgttggaccacagaggagcagcttctagcagtgcaaggtgtccgcaaatatggtaaagattttcaagctattgcagatgtaattggcaacaagactgttggccaagtgaagaacttctttgtaaactacaggcgtcggtttaacttagaggaggtattgcaggagtgggaagcagaacaaggaacccaggcttctaatggtgatgcttctactttaggggaggagacaaaaagtgcttctaatcgtgccatcagggaagagcactgatgaagaagaggaggcacagaccccacaggctcctcggacactgggtccatcacctcctgccccatcatccactcctacaccaacagcccctattagccactctgaaccagcctccaccacttcttcgtccaacactgcctgctcgccccggctcttcaccggcagcctcctccactccagcagcaggctcggttcatccagaaccccatgatg

SEQ ID NO: 11609 - DNA, 478 bp, Homo Sapiens
  misc_feature (171)..(180): n is a, c, g, or t
tttttatagtaaagccaacatttgttctctcaccaaaccccatgccaaattcatcatgaagaaagctcagcataagtaattcaaatactgcttataattttagaggggggtagaatttagtaaatattccagccggtcgttttatgcacaaggcttcagtcagaacatagnnnnnnnnnncattctgtgaatgaaatattgtatgttcagattttataaaagacatttttaaaagcccaatttacagccgtatattttcttatgatgtaatttatgaaaaagatgtctgtactaacaggtgctgtaacactactgttgttggattttattgtttggtgataaatgtatacaatatttctaagggaaactatgtactgtgatgtaaaagtctgggcaaaatgtatataatcctgtatataattatgtatttgattataattactgattgtaaagatttaataaaatatgtaaatattcc

SEQ ID NO: 11610 - DNA, 424 bp, Homo Sapiens
tgaccctcgcttggaatggaatgccagaaatgcatggcagcagctaataagtaaagctgattaactatttatttgtcaatgttattatttaatgagctttcacatgtgatttgtttccaaaactttaattttttaatgttttgaaactttttcatggacctaaatattttcctatatgatttgtggttgattagaaatatgaaatacatgttgtagatatgtaaaatgaatattttagtctccttattacatatatgttcatggtgaactttatcaatagtatggatctttttaaatcaataagatgctttgtaaagttgaaataagtaatactttcttgtttaatctgtgcaatcagaaggtgtcttgaccttcaattcaattggtttcttttaacaaaaataaacactgctaaaagttaaaa

SEQ ID NO: 11611 - DNA, 235 bp, Homo Sapiens
atcagaggattccgcggatacggcgttaaatgtgagcccactgtccactacatgaatctttttacttttgacatccagaggctcatatattcgctcaaattcatcaggatctgctacagctgcatccagttcatcatcatcaaaggagtcctgtgtggcaaagtcactcaaaggagacagtggataagatgtattgagattcaagcccagcatgaagttgtgtaccttcccagca

SEQ ID NO: 11612 - DNA, 166 bp, Homo Sapiens
gtattagctcgagtctcgagttaatctcacgatggtgccatataaaagaatgagtgcagatacaaagtatggggtcctcaatctagagacctcatcatgttaaaaattcacataaattctgcctattcttacgggaatctctatgtgtgatcctaataccttttag

SEQ ID NO: 11613 - DNA, 695 bp, Homo Sapiens
ctgtgctttgggacggcgtgtggttctagcctgttcagccctgaagaaaacgtacagagacatattaacacaaggaaaagatggtgtagctctgaagtgtgaggagtcgggaaaggaagcaaagcaggctgagatgcagctcctggtggtccatctgagcgggtcgtttgaggtcatctctggacgcttactcaaaaagagagggacattttatgccccctgaattattgcagtcccagtttgagactctggagcccccagcagctccagaaaactttatccaaataagtgtggacaaaaatgtttcagagataattgctacaattatggaaaccctaacaatgaaatgacaatgattttgtatcagtggtccaaacagaactaagcataaatcattgtgccatcccaaacctcgttccagccgccttgcccatactagattctaaatgtttctaaaggcaaaccccaatgtgtcaagacagacttgtttaggtgtaattttaggaattatgctggttcatcaggaagcagagggggagttttaaaagtcaagcttaaattgaagtttaaattcatctataaccaaatcaaatgatcagaggaaattctgtaatcaatgctggaaatcgttacattgtttagaacattcttgctcatgcctgtatttgcacaaataaatgaaaattcgctgtcaa

SEQ ID NO: 11614 - DNA, 657 bp, Homo Sapiens
gcaaggacggctgcatcaaattatgggatggtgtttcaaatcgatgcatcacaacttttgagaaagcacatgacggtgctgaagtttgttctgccattttttccaaaaattctaaatacattctctcaagtggaaaagactctgtagctaaactttgggaaatatcaacgggacgaacactggtcagatacacgggcgcgggtttaagtggacgccaggtgcaccggacacaggctgtgtttaaccacaccgaggactatgtgttgctgcccgacgagaggacgatcagtctttgctgctgggactcgaggacagccgagcggagaaacctgctgtcgttggggcacaacaatattgtacgctgcatagtgcactcccccaccaaccccgggttcatgacgtgcagcgatgacttcagagcgcggttttggtaccggagatcgaccactgactgagccaccctctccgtagggttctttctcgaggactctaccctcctccgggacgtcctgtctcagctgcagtcgtatatttgaacagataagcaggcatgcagctctgagactcctgagttttatgccattatcaaaagcattttcaagaatccctcaattctatcctgaaatgatgttattctgataataaagctcagatctg

SEQ ID NO: 11615 - DNA, 582 bp, Homo Sapiens
agctcgtacccctgagagaaacgaccacccccaacctctaggggccggaagtaagcacggggtgggcaccctacctttcagagttctggacctgaggcaggatggggcatcctcactggcgccccccccatccctccttggggggagtctgccacagtgccgggaggcagtggccacagctgcaacaggcaattggctgcagaaaagctggtttgggaaggggtgcctgttctgggagcgagtggctctccgtggccatcctagtgatccactcggccctggcccccctggggcctctctgctctgagggaggaaaggcaacagagggcttctgccagctctgggcaggggcgggcagcagagagctgctgtcatggctacggagtgttgcacggagaggccctgggggcctgctgaggtctgggcgagtccctggtttagcagcactggtaggtattgcactgagcaagaggaagtgcctatcaatcaatcaatcagggaggaaggaaaccaggccagctttttctttttgccctttttcacactccagggattatgggtttcttccaaggaacggcccct

SEQ ID NO: 11616 - DNA, 364 bp, Homo Sapiens
tagaggatcccccgatctgactacgcggctggataaacagagcctggtggtaaggcccccacgaacagatgtcactgcctttggaattaaaaacattcctagtgaaccatcccatcctccctcagcccctccccaggctctctgcaaggggagtgagaggggctgtccccggggagacgtgggtgggaccccgcattacacctagggagggggtcatgccacccagcacagctgtgactgaggtaaaatcgggttaaggtgttcactggcggcatcaacgaggaaaaaaggtcacatcctgccctgtgcgagcgggaggggcaaaggctgcagtagccgcgtagtcagaaaggggtaccgagct

SEQ ID NO: 11617 - DNA, 410 bp, Homo Sapiens
  misc_feature (142)..(239): n is a, c, g, or t
  misc_feature (397)..(397): n is a, c, g, or t
agatcccctcaccgcacaaaccccctccaacaaacatgccttttcccttaccttgttttttttaaattgtattcatcactgtctagcatattatttattgtttggcgtccctgcctgtagtaaccccactccatcctgcagnnnnnnnnnnnnnnnnnnnnnnnnnnnnnnnnnnnnnnnnnnnnnnnnnnnnnnnnnnnnnnnnnnnnnnnnnnnnnnnnnnnnnnnnnnnnnnnnnnatatgaccaccagaaggaatgatagcacatgcgtaacctctcatggaggggttcattttttagtcactcagaatagtactgatctgtctgcccatgttgtcatacacacagtcacagcatggcagcaatggggtactaactagaaagagccatgaggnggtttgtgggtga

SEQ ID NO: 11618 - DNA, 456 bp, Homo Sapiens
acactgtatcagaaagcgggaaggaggcgggggaggtgggggacagattcataggttggtgttttcgaagatattccacatcgtgctactaatgggccgctggtaggattcctcttgccaccccacaggccactccaaagcaagttactatcaacacgtctccaactgtgcaggaggtttctagttaactgcaacaagcctgaaaatttggttacgtatgtaggtgcaaaagctggttcatcagatccctgttctggccctcaacccagtgcatctccactaaggcatcgtccacctccttcttaacgtttatcaaacacttaaacaggtactgtccggccactcctgggagacgtttccccctttcagccactgggctgccgaactgctcagaagcctcttggtcctgggctccgttgctagagccttgacaactttccaaaacctccaccaacc

SEQ ID NO: 11619 - DNA, 485 bp, Homo Sapiens
gcttgtagaggccaggtccccaaggaagcaggactgtgagcgcgggcagtcgggggaagataggaaccaacggccggagccaaaataggaaaaaagctagaagtagatgtttcccatggactgactttcttaaatagtggttcagttgctgttggtttacatgactctgtccaacttaaatccaatagcttttccacacctccacgttccaaatttgatgtgaaagctggtagtacacctaagccatcctcttcaaaatcttcagaaacttctggctgagataattccatttttcttttagaaaatggaattctcctatgtattcgttcggataaacgtaattctggccactgcggaggatgctaaaagagactggttcctgacggcttcttggggctccccctgccagctcatgtacgggcaggaagtctacatcttctttggcataagttcagacacttttggaatatcaggcaaagcgactt

SEQ ID NO: 11620 - DNA, 361 bp, Homo Sapiens
tggcctgtagagtccactgggagggagagcttggtctggagaggcacactggagtaagttcagggcttggagaggatgcacaaaaggaaatgctcagcctggaaagtgtgctgtgaggcattagcttggcctacacagcacttggaggcaggagctgggcctgcagagggtgacttcaggacgattttggcctgcagaagcctttgggaggaagagcttggcctggactggctgactggaggaagttttgggaccggagtatgcgtcaaaaagcaaaagttaggctaggaaaggccacttcgcggcatgatcttggcctacaaaggcaatcgcgaggcaggagctgggcctctagcaagct

SEQ ID NO: 11621 - DNA, 653 bp, Homo Sapiens
cgcatcttctcccatcagtgaacggaagggaagggaatgcagggcagcagggagacagagaccatcattaactacaggtctgaaaccctaattctttactcactcatcaggttgcttttaatcactgctgttgcttggtaacaggtttcagcagatttgaaatggatttcttcctcccacagtctaacaaaaacaagtagggaaacaaccaaagaataaggcaacttaaggaaaaacgcaggaagaccctgggaggcagggtcatgcaaaagctgccaatggtgtccatcttgctcccatcagtagacaccacctagttctttctgtagtgaagggaggtagtgtgtattatagccacatttttatcctgctttgtaaaataaatgtaacttactctattagatctcagacacatctctttgattacaaggaacatgcagctttaaaaatgctttaaccccaaactggcaacttttctatcacttttttactctgttttcaagtttgaaatatttagaaaataaagatcacctctgacagttattgatgaaaaataaattgttttagatattataactttgatgtttaatgctctcaatttaaaactctgaacttggaacaaagtgctgtggtttataagacctgatgagggc

SEQ ID NO: 11622 - DNA, 868 bp, Homo Sapiens
accccatttccaggctgtttggcacacagagacatcaaaaaacagacagccaatacatctagaacaagcctctctccgagggcggcccatggatggactgtcctcccagacctcccaggtggctcatcagtggtgggattgcggcgcacgaccccatcaccgcacccctcagcagtgcctgggctcacctctccacccacctccccacacagccagaggaggccctcagccgcaatcagtaacattcagtgaggacatgtgtttatcatgtgttgtgggtgggtgcagtgagttctctattcaggtaggagtggaagctggctcagggctcatccagtccaatgtcccacaggtatagaagtgccctgataaaatctcagagctggctgtccagtcaagattcgcatacctccagaaatggggctcttactacccctcacagtagcccattctactgttgggcacctccaatggtcagcattttctttccggcagcctctttcttgggctggggggtgggcggaaactgtcactccagcctaaccctcaggacaagagaggcagctggggtggaaacagaagcagaaaaagtaataagttaaatccaagaatgaacagagacacggcaggatgggcagggacattcctggggtgccagcagtctctagcttgatccaggaggcactggggaggaggattgctgatggcaaaaggccaggcaagagatgactcagtagcaccggctggaacgaggaccctgtgatccacggaatattgtttaggcacggaaaactgatgaggagcagggacgatctgtgagaataggcgccggtgggaaaagaatcacatcactgtgggtaagggtgtt

SEQ ID NO: 11623 - DNA, 800 bp, Homo Sapiens
cggatgcacgggccgcaggtcaaaaaccaggaaagagtattcaccgtagacgagacgccattccgcagacaccccaaacaagaagaacagtccccacggaccgtgggcataaaaaccagtaagaaaagtcagtcaggctagcaaaacgttactacaaaactagtaaataccagagccaacaactgtcccctctccaaagttcacagatttgaaacctctaaaaccaatactacccctccccatcaccccccaaaaaaacttgctgaagcactggcaaagttagacatttcacagtaaatgtgaaagttcatattatataatctcttaaaatgaaccttttcaccctctttccacagcatgaaactgttatggcttaatttatattaaaagtagaaaagtcttttctgaaggaaataccatctgcgaagatgcatttcctgatcagtgctatttcatacctaacaactgtatgacttgcttttgcagtcagaagctgtttttggaaaaattgaggttatagcttttgattcagtctaaccataaactgtaaggcccttagtttggtttaggtttcttttgcaagataaaataaccttggggttcacttagtaagttacacctcaggtccctgactgtaatgtggaagttatacgtagctctgtaaaaataaaaggttacttatgaatcttaaaaggaagaaatagttctaggtaaggaattaactcctcattatattttacatttaatgctggtaagttttaccaaccaaaatacaccaaagaaatatgagagtatgtctg

SEQ ID NO: 11624 - DNA, 140 bp, Homo Sapiens
cataagacaaggctacgtattgatcagtttacaaaaatattgggacagaggctctcaggattctaaccctgtatttctcctgtgagcaaattcagtgatcacagtgaccttatgaaacacgactactggccaggtgccat

SEQ ID NO: 11625 - DNA, 473 bp, Homo Sapiens
gtacaaggcatgtgttagtttttactaattgctctgaatgtgtatatttagatttctgaattgaaaaaaaatagcgtacaataagtagatttaaagtaattagaacactttattgatttttctgatgttttctgtatctaaaatttatcaccaccaggttgtgctaaaacagcaggaagtttttatattgtgagtgacagtacccattatttctcttaattttactaacatttactataagaatattctctcgctcttttctccactcacagccattctccctccttctcttcataacatcaagctgtcacagacaaatctgaaaatgttacaagcacagactatgttgtatgttttgaaattttagaacagtaatgttctttttaaaattgaacttctgcagagtaagaaaatgaatacatttattactttaaatttgtaaaattttccaaagtaaaaccatacaaagctag

SEQ ID NO: 11626 - DNA, 734 bp, Homo Sapiens
  misc_feature (584)..(626): n is a, c, g, or t
ttgaggatccccaaccctgccacccacagcccatttacgagatggccgacgaccccgttttttgggtgcgcagccggccctgcgcccgcgacgcccaccgcaaggagatttgctctgcgcccatcatctccggcgggcagggctaccgcaactttggcagcgctctgggcagcagtgggaggcaggccccgtgtggggagacggacagcaccctcctcatctggcaggtgcccttgatgctatagcgcctcccctctcccctcagagggcacagctgcaggcctgaccaaggccacgcccggctctcgtgctctaggacctgcacgggacttgtggatgggcctggactctccagaaactacttgggccagagcaaaggaaaacctcttgttttaaaaaaatttttttcagagtgttttggggaggagttttagggcttggggagagggaggacacatctggaggaaatggccttctttttaaaagcaaaaaacacaaaacctcacaactgcctggcaagcccagtatcacttgtttgggccctagcgggactccaaggcagccacacgcccctcctggaaggnnnnnnnnnnnnnnnnnnnnnnnnnnnnnnnnnnnnnnnnnnnaatatctataaataagtatatatggtgtatattatatgtgtataaataaagtctgtacatattggagctctgggagatgctggaataaaagacaagagttacatctgg

SEQ ID NO: 11627 - DNA, 531 bp, Homo Sapiens
  misc_feature (63)..(63): n is a, c, g, or t
acgatccatagcaccacagcctctgagcagctgtgatgacaggtgtgtgccaccgcacctggncacaagatagcatatctcaatggaatgatgttcacagcagagtctgtgtcagacacaaaattatctccttgaaaaacaaaatgtgtaattgaatatctggttcatttaaaataagctgtatttttatcctctcccaaatcattttaaggatatatagccgataaaagaaatctggtcttcataaattccatggattctcagtgtccgacagacttccaagtctagcccagcttcaaaaccaccacgtgaacctgagcacggctcatcatgatcctggacccttcttggctgatctaagtaattagactcattgcaatccttaaaacagcttattattcgcaagcaaataaatagtcatttgaccttaataggcatgttttttacatttgacataaaaatgtgaaagttggatcagggtgttatgaaaaaattactgaggcactgaggttgctagtgggtggcagaatt

SEQ ID NO: 11628 - DNA, 570 bp, Homo Sapiens
gaaaagagtaaatgatgccatatatcagtaattctcaaggcctatatgtgaatattcctgaggaacattatcacccccatcccagcccctcatagtaagggtggcagtgtctatgaatgtcacagtcatttggaagcttcttcaaactccgttaccccctgtcttctgcctaatgactcatctatacatactggcccctcctggttgggaataaccacaatgttttcattaaacagtgataagaaggcttcatgttgctcaagtatgttgggggagattgaaagttgagaacctccacagtagataataaaggtaacatgtattacaatctcagacatcatatcaagtggaaagcagtacgaacttctaagctgtcaatctcaatctacctacttatagttaagggcttatgtagacagcaccacaagggcttcatcccactttgctgtgagcaactcaaacaatcacctgggtgatcaacactgaaaaatgccccaactgttccttttccttacagtttcccttcaagaaagctgaaaactgatacttctaggtgctgctgtgggtgca

SEQ ID NO: 11629 - DNA, 259 bp, Homo Sapiens
cctcactggcctccttcccctaaacctataaccctggtctagtcctgagaaaacaccagacaaatccaaactgagggacaatgacacctgactggtattcttcaaaagtgtcaagttaatgaagaacaagactgagaagcccgtcaccgatcaaagatgacaataaatgtaatgatcgatcctagatgggatcttggaacagaaaaaggacattagtagttaaactggggaaatccaaataaatttataactctagctt

SEQ ID NO: 11630 - DNA, 491 bp, Homo Sapiens
tttggaagggatgttgatcgggaaggcagccttatggacttgggctcaatggacagtgttccataggcttcttagttcagcctcagagtcccactgtgactggtgcagcttggtgtagctctcctcgggccccatctctgggcctttggtggaggcttctgagggccccactcccccttgttttgaggcactgctccccatcacatctcaactgtaacactctgctgcagaacctctgtttccatgtcaacaccctagtccctgcatgcacacaaagagggcaccatggctgattgtctccatggctgcttctcccctgcatcgtgtccttaaagggcaagtttcctgctgcacttgttgacgactcacccctttcagccccagtgtctagcacaatttccctgtacacagtatcaacagaattgtatttgttgaatgggaggcacgagtcatgttagaaggccgattatggcagcacaagaggctgtggg

SEQ ID NO: 11631 - DNA, 203 bp, Homo Sapiens
gtcacatttaatgttttcaccactgtacttcaaatctacattgtacaaagtgaccagaaagtgtgccacggtaattgaccaacctctgagattgtacctttcacaccagtgtcttcttgggctcttttgatactaaacacgtttctcattcaagtgaattgaaatgcttcagttgggttgattctcaggagcctcataaaaaa

SEQ ID NO: 11632 - DNA, 674 bp, Homo Sapiens
tctacagatccattctgcacccacagcgtggattggactggaagagtgggagggcaggtggagaaggcattgtgctgcagtggggagcagcctgggccagccagtccctgtgcctgacagtgtatgcatgatgatggtcacttctgggcgcaggatgacaggtactggttgtcttcaccatggcgataatgaggaggcaccggtcagcaggaaggtgggccagaacgagggagaagaggagggcctggggcccgtagaggcgctggaataggacgctggtctcgtcccccccgaggtgcggagaagcagtagaagacctgctgctcttggaatttggctctgaccttctccacgtcggcccgggccgtctggtaattgtccaggctgcctgggatgtaggagcactgctggttctggtcccgagtgtcctccgtgtggtacagcacagcccacctgccggcagatgacacgttgacccacaggcatgggtactggggcaccttcttgcccttcagctcctcctgggccctgatgttggtctcaatcaggtggcacttggattcctgggtccacacgcttttctggtagaggggcagcacagtcgtgaccaggatgtagtaggtcccgacggcacacacctccatggttacacccaggcaaagggctcgtgtctc

SEQ ID NO: 11633 - DNA, 363 bp, Homo Sapiens
tgctctagctggaagctggtgtcctggctggttttaccccgaaggagtcccagtgtgatgactgcttgggagtggactttggtgaaggtggtgagagatacttgagcatgggagtggagaggaggtttggagggcaaacctccaaggatttcatgatccttgaaggacaaatattatcccaagttagttcaagggaagatcacacagagcttctggttaatagcagtggctgagctctgaaggcaccccttttcctcgaccaggaagctcctagggtaatgtagtggaccaggcatttcctaccctcctcccaactcccctgtaaacgtgtacactgatggccgggcacatctgtaatcctgt

SEQ ID NO: 11634 - DNA, 866 bp, Homo Sapiens
gctatctgagatgtcttcaggactcgatatcctgttccttctaaaaacaatacttcctagacctggacgattgagaatggattcatggtgcacaccgccgtcctcctctgctgacaactggagcttctctttgaagtcccctgagaacgagtcttcctcttcctctctgaacacttccatcacgttcctctgcccacttctgccttccttccccacctgttctgctgtatctttgttcttcttgaacttgatcttgaaagtgtctttaatgcccttagatagtgacccgaatgtgccaggagcagaagcatttgaaggggatgatctggagaaggtacccttggaagaagagagagtcccggattcctccttgctgtaggtgtgggccatcttattttggtgcttctcctggagcctctcacactctttgatctgcctcctggcattcttctgagcctgctccttcagcctggtgaccttcttggggttcatgatgttctgtgcagtggcagccttgtccaggagagcaacacattcattctgctccctgctggcagcagcatccagtggagtctgtaagtcattatccagggcaaagatgttggcaccaaagttgaccaggaatgagacgcagtgggcatggccattggaggctgcaaaatgtagaggagtgtttccccagatgtcacacctatcagggtcccctcctctactgcagattatctctagggcttccaagttcccatggtaggctgccaagagagtaggagtcatgccgtcttcatccgaaagatttagatctcgcttggtagcctcttttagaagttccaggtaactatcactagcagcttggtggtaacgagtag

SEQ ID NO: 11635 - DNA, 254 bp, Homo Sapiens
taaggttatagatatctaaaaggtctatgtttaatcagatggattagtcattctagtcttacacacctgtggtgactaattcaaaggaaaagccctatcattttgccagctggtgtataagagttgcttagtattctgtaaaaccaggtgtactgcattagaacaagtttcattcaacttttaatcattaaacattgtgcataaatagtaaacttagaaattgtttggtattactgtattaaaaatgttggatt

SEQ ID NO: 11636 - DNA, 456 bp, Homo Sapiens
tcataagcagtagactccacaatcttccctttctcagtgaacaggcagccccaggcttcagtttgctgtgaccacacccacacagtcatcctcttctttctccagcccagcatctgtccagcagccgatcctccaaaacaagttcagagctcacactgctgtcaccacatccactgctgctaccctagtcagggccggctctcgcctggttcctgtaacaaacctaagccaggtctcctggctgctgagctttgcccgctatgctctgctctcctgtagcagccagagtgtccctgctgagaacacaagtcagatccagtcacttctctactcatggcctttctgtgctgctcctgttgcactccagataaaagccagagccttcatggtgactagtgagctccccacaggctcctgacctctccccccacatcccgctctatcgtctacatttat

SEQ ID NO: 11637 - DNA, 363 bp, Homo Sapiens
tgccacgagcatctacaggcgtgacacagactttacccccagctgccttcctggggcattccccatcttaaggggccagggtcaccctggcagtcattccagccgctctgagaccagcacaccaccctgcactctctgtgcccctccagcctgatgggtgccctcccagctcctccaactcctccagcttctcctcctcacactccagtcattgttcctgctgctgccactactgttagttctccgagtgctgccatcacagtcacagagagtcctagaggaggacgagagcataagaacttgccttagtgaagattaaacgagagtcagaacaaatagagtataagctcctgtagatcaccg

SEQ ID NO: 11638 - DNA, 603 bp, Homo Sapiens
acccattctgcacccacagcccgggccacttcgagggggctggcccacaacctcctgggtcagaggtcaggacagtgacagcattagcagctcttcttcggactccctgggctcctcatcctccagtggaagtcgccggccagtgccagtggaggagcccgggcgaagactgttgaagttggcaggtacaagggccgccgccccgagagtcatgcccatcatgtacccaatcagccatcagaggcagctgcacaacttctacttcgagctggcgaagacagtgcttgatcaaggcagggggcaacagcagcacttccattttcacacatccatcttcctcagggggccaaccagggtcctcaccgcaaacctgcacctttgcgccttcgagattgggctttatgcccttggcctgcacaaactttgtttctcccaactggctctcacgtacttattcttcacacgtttcctggattacaggccaggccatggagataagcagcgcagccctgactatactggtagaatgctgggatgggcacctgacaccccctgaggttgcatcctggctgacagggcatcacgggcaagagactccaatat

SEQ ID NO: 11639 - DNA, 644 bp, Homo Sapiens
tgtcaggcactcacacagcaagggcccactcatcaatcatcagttagctacaaacaccacaaattcagcctcaaatgctcatgcagcaggggtgaaggtggctcataaaaagcaaaggtgtagggaaagaagcagtacaggacaggggaatggttgagagtcaactcttagcaaggttgcttgaattctaatccccatctcctcacttactagctcactgaccttgggccagattcagaacttccctgtgcctcgttttcttcatctgtgaaatggaaaaaataacagtgccaaccttgcagggttgttctatgggttcaatgagataatataatgtcaagtgcttaaaacatgtctagaacacaacaaatgctatgccaagtgttaactacttcttagcattcagtgacccagctcactgcttggcacatcacaggagttcaaagaacattcattgaatgaatgttaaataagaaaaaacaaactgatctcattcctatgtactaggcacactaggaaattataaaaagtaaatgagctcatctccaatgagtcagtcaaatgaaaagatgagaacatggtccctgaaattattctgcttaattacttccttgttgattcaacatggaagtataaagcgttga

SEQ ID NO: 11640 - DNA, 416 bp, Homo Sapiens
  misc_feature (252)..(261): n is a, c, g, or t
tgggaaagcattatatagtggtgcattagtttagaaagtcagctatgattttgcctatagttctagtcattagctttggggttttcttgtactttaagacatacctgtaaattgaacctatttgaattatattccactgtatgtgtattatggctcttttcctattagagcaacttgtgtttccctgataatgtgtacattttttaggcatggacttaatagttcacaatgttctaaatttggaaggacttnnnnnnnnnncttgtttaaatttccatctgttttgtaatatctagctctatatgtaaatgatgggtttgttggtatttaaaatgaatacaacttgaatgtaattaaagggctgttttttggaagcgataaactttaaatatacttattaaaatgaaattctatta

SEQ ID NO: 11641 - DNA, 457 bp, Homo Sapiens
  misc_feature (11)..(11): n is a, c, g, or t
ctcagcctggntgtggcggccattccagagggtctgcccatcgtcgtcatggtgacgctggtcctgggagtgctgcggatggccaagaagcgggtcatcgtgaagaagttacccatcgtggagactttaggttgctgcagcgttctctgttctgacaagacggggactctgactgccaatgaaatgacagtgacccagcttgtaacgtcagatgggcttcgtgccgaggtcagcggagttgggtatgacggtcaagggactgtgtgtcttctaccatccaaggaagtcattaaggaattttccaatgtctcagtgggaaagttagtggaggcgggctgtgttgccaacaatgcggtcatcagaaagaacgccgtgatggggcagcccaccgagggtgcattgatggccctggcgatgaagatggacttaagtgatattaaaaattcatatataagaa

SEQ ID NO: 11642 - DNA, 409 bp, Homo Sapiens
  misc_feature (59)..(59): n is a, c, g, or t
tttaacaaagcttagtcacaaacagttccccagttgatgagaaaaactaaaacaacagnacaattgaaagtccgaatctgcaagttcatctctgagaaccgaattttacagccactccagatttgtactccaaatggatagtttgattgtagaaatcacatcccttcagtctgccaatgtgataactgcccaagagaaagtgatgcctacattcatagataatcccctttcccccatcctatatataactggagtcaacagcagctggaggaaaatggcaagaacttggaatcaagattaggttagaataacactgctgtagacagtttatcagctcttcagcatatgtccattttccttgaaggatgagcctttagaaacctctgacaataaagtttattttacatcc

SEQ ID NO: 11643 - DNA, 525 bp, Homo Sapiens
  misc_feature (470)..(470): n is a, c, g, or t
ttttttgggtttacaaaagtcacctgtatttcagccaaaatagctttaaaaaggaatccctgcttaagggggggacaaactacgtaagacacaatacatttaaaatatgtattgaaattacaaatcaaactttttccatatgattccagagtacaaaacacaacattaaaaggcattcaaacagctcttttatacatcacagtgttagtggcacaaaatgtactgacatttcaaaaacacaaatcaaatctgttttgattttgtttcaccaccacttgtcaaatacataacgtatacatgtgcatgactcattcatgcatatttttatacaagattaaaatacacccatagtaaagtgagcaaagaaggaaagaaagggcaggcatggggcatgtagctacccctcactgaaggctccggaactgtggaagacagaattgcacaaatcaaaggaagggtggagaccctgngttttttaaacatcaagacggcatgctctcctagttgtgaagcattagcaattag

SEQ ID NO: 11644 - DNA, 419 bp, Homo Sapiens
aggagataaaaggtttacttagaaattgcaaacatttagcaaaggtaagacaaatactattttccatattctacagaaatacaatactttatagctggcttggtacatggtcacataagaacaaatctaatggaaaaagaatatttcattctacttttctgccacttatcacagtgtaataagtgccagtaagtcctggaagacagttgcagaggaagattaaaatcccagggctgtttgttaatatacatgattatattgtaagaataatataaaaacaaaataggtaagatatacaattaacatgcaatttaagctatattattttgaagaaacaggacagaatttagtgaacgcaacttaaaaatgtgttaatgtagtataatcagcatatcatggtattttacatggtatggaat

SEQ ID NO: 11645 - DNA, 404 bp, Homo Sapiens
cgatacaaccatgcattagcccaaaaattggaatacaggtagtgttcagatcagcaaaacattcagtctggtaaatgcctgcctggggctatgatatcattctcaaagcaggttttatggaaaaactaaaagaatatgttgttagatgatgttggttttgaaaaaaaacaaagacattaacatacacattagttagcccagttaattgcattctactaatatagttgcacattagcaataattttgctgtctctggtctttattttgtggcttcaactaactggaccatgtggactgtaaaggtcaaatggaaaaaacgagcagtggcccctcatcctgtaaggtactgctacatcagagtgacctaaaagtctaacactgtgaggaaaactgtgatttgtagg

SEQ ID NO: 11646 - DNA, 431 bp, Homo Sapiens
tgtgccccagccacagtgagctgcttacatgttttcaaatgggttgtgttcctttccctcccagcggctttgtccacactgttccctttgcttagaatgttttctccaaggctctctagaacctgtttttacctgatttataccagaaaaccttagcccccagcccagaaccattcttcctcatggaagctcttccagatccttcagggtgtattgggttcttctaagttgctgtgatcttgcagttttcctttttagcttacctcaacttaaaataatgaagaatctctgataatgtgggtgtgggtgtctctctcttccttaaattggaagctccttgagggcagggactgcgtccgttttgttatcgatgattatattgatagtgcctagcaaaagtaggcacaaaataaatatttttttgaatgata

SEQ ID NO: 11647 - DNA, 445 bp, Homo Sapiens
atgtagcacttacgtatgtacttagctgtcttatgaatgtgaggtaggctgttatttctccattttacagacagggaaactgtctgacatagggaggttaagtatttttaataaaaatatggaaaccgaggcaagacagattaaggaatctgctgaagattacatggagattaagtagtagaacaaggatttgaacccaatgtatgtctgcatgcttcaccatgttgctatgctgtctctataatagatactaccaaactgaacaattacctgagcagatttggacccttccaggtgagggaggcaatcagcaggacttgttttctgagtattggtcacaactccaccaatcaaaataggatgcattaaagaaaccaagcaaagccagctaaaaccaagatggtgatgaaagcaagctctggttgccctcactgctcattacatg

SEQ ID NO: 11648 - DNA, 510 bp, Homo Sapiens
ccaccagttctgacagctttagaaatagataatgcggttgtggcaaatagcctaattgacatgagaggcatagagacagtgctactaatcaaaaataattctgtagctcgtgcagtaatgcagtcccaaaagccacccaaaaattgtagagaagcttttactgctgatggtgatcaagtttttgcaggacgttattattcatctgaaaatacaagacctaagttcctaagcagagatgtggattctgaaataagtgacttggagaatgaggttgaaaataagacggcccagatattaaatcttcagcaacatttatctgcccttgaaaaagatattaaacacaatgaggaacttcttaaaaggtgccaactacattataaagaactaaagatgaaaataagaaaaaatatttctgaaattcgggaacttgagaacatagaagaacaccagtctgtagatattgcaactttggaagatgaagctcaggaaaataaaagcaaaatgaaaatg

SEQ ID NO: 11649 - DNA, 858 bp, Homo Sapiens
ctgctccgcccctctctggctgccctacccttcccctccacgctgcctgggcagcaaggacagggaccaacaggagcaagtgtgccttcctcagggcccttcctgagagctccacagcccaccctgtggccccctgcttggcttggcctggcctgcccggccccagccttccaatgctgctgcacgtcctcattttcctttttggtcccctcctgccccctctggctgttctgcctttgggcctcagccccagctgcctgagtttgggcaaggttctttctctgtggccttcaggctcacccccagggctctgacccgggcctctcccaccggccccaccctacctgacagctgcacccctggtttcagctcttctaactgtgaaagccccatccaaggctaacattcgagaggcacagggctgccaagggtttcttctgcccacttagtccccagtggctcaggctccttccttggaagttccctggggtaggtgaggcagaggcagatctccgaggaacttgactgactgagcaacgaagaccctctctgagttttcctcccaaggtcttagggtggcttggcagtccccaccccctcacactgtctcagggtctctaccctcaacaagattagattccttttagccagaaagagtagtgagaggctgccaattgggtacacctggggccttcagggctggagtgcccagagcctcctgaggtcagagttcagaggttaaggtatgtcaggggatggaaaaggagcagatgaccccatttgacctttaccagcgaggtctgagggtcctgccttcaagtgcagagcccccaacacattcagagaggggcgaagcag

SEQ ID NO: 11650 - DNA, 257 bp, Homo Sapiens
  misc_feature (210)..(210): n is a, c, g, or t
  misc_feature (231)..(231): n is a, c, g, or t
gtgacttgtaatataagcacagactccaagtcattaacaatgtagcctaacgctctcttatctcatcttaacctctgtcccctaaacccagcccaaaagggttgctttaaattccccagaaggcaccctgttttcccttcctgagatgcttttcgtcctcaaagcatgggttacagtctgtccttttccggaggcagcagcacctgtaantggttaaaatgctcagattcntggccaggcatacgtggctcacgcct

SEQ ID NO: 11651 - DNA, 754 bp, Homo Sapiens
gcaggagactctcgaggatccccagcttctgcctcccagcctcccagacccctggatattgccccctgggcagttgataacagggccccgtgccagctgctcccctggggcctggtgcttattgctccaacagaagggccctgctccaggcctgtcccctcaataccaggtgctccacccctcacttctgcaccctctctctcctggcctgcagcagccctggccccctcgaggtcaccaagttgcccagagtgccctgcaggctccgctgggggcaggctcaggcctgagggagcctcatccctggtcctgactcccaagcctcccctgagagccccttggaggagcctcaggggtccccctgcatcttgcctcaggcatcacccctgtcgcctctggtcccttagtgtccacatgtctcacctttgacctctgctaagcatccacttgacaaactgctgaactctcttcagcctccccagctctgactcctgacctcttagtgtttgcctctctgcctcctgaccttggctcagtgtccaccccactggcctctggcctgtcctcagtgtccatctcttcagccttgagtctctgccttccaaaagggtctccagaacctttatcctcaatgctcgggcccagcctagctccatgggcttctgtcccttcctgagggcatgcctgggcctgggtctccctagcagagcccaatcctgctggaggagcccctgaggctttggggacctcatct

SEQ ID NO: 11652 - DNA, 563 bp, Homo Sapiens
ctagaggatcccctcacgcttatatcttcctttgcatagcctcagtgtaaaagccagagttctctagaaggaaaggctggcactgaagttttctaggacctgtctgcttcagatatgcaaaggaagtgggggtgaatgaggaaacaccctgacaaaccacatggcagaacatgtctgcctgagatacttgcctgactctgggccgtgaagaagaaaaggctcagaatgctcacggtcaaacttacgtcaccacaaggaaaatctctgtgcccggacctatattaagttcttccagatagctggatccgaaaaagcatactcgacgataagaagaagaaacagcataggcaccacacaaaggaaaaaggcgaatgagaaaagcaaaggcaggaagacatttctctcaaaatgttgccatcatgaggataaacactgcagacaatttgtaacaactaaaacaagtgattgttgatataaacaagatcatgacttagaagggatcaggtaggaaatagtaaggaaattaagtttgaagaccccaaataagaagtataaagcgttga

SEQ ID NO: 11653 - DNA, 293 bp, Homo Sapiens
cccggtgttgcgctctgggactattccctcagacaagcctttctgctcttgacacatgggctgatgttgtttggctgaggatcaaaataatgccacaacggaaacacctttcatcagaagtcatccagaacatacccgttaaaattttgctccacagacacagctcactttatgctgtatgttttttcttttgcttggtaatagaacctacacatatcctactgagatcaatatgaacacagcagaatgcaggcaatggaatgttttcctgaggccggcggagccaacaccgc

SEQ ID NO: 11654 - DNA, 586 bp, Homo Sapiens
gctcggtacccctccacgctttatacttctccagctattaacataattttctcctcttcttcagaattaaatttctcaaaaagaacgtttatattcaagtattcctgttcgtattccttaccctggtcttctctatagaatgcaatctggctgggagatgcttcactccactggaacaaggcttactgattcccaagggcctccttgcttctaaaaccaccgaagtgcttctgtctttatcttatttgtcctcttggcagcataaatgctggttttcttcctacttgtttggtctctcctcttcagtcttcatcatgtttttgtccctcaaacatcagccttacgtcctcttttcttccctctgcatcctctctccttgagagacctcatccagcccatgttttcaacaatcatctatacaacaatgatcttctacatacattcctggcccagatccctgccctgaattcccagcctatagatccaacaaccctcctccaatactgtctttcccagccattctccaggcctctgctatggtctgaatgtttgtgtccaaaaacatgatgaagtataaagcgttgag

SEQ ID NO: 11655 - DNA, 417 bp, Homo Sapiens
aggtgctctagaggatcgcgaggtatgcctgcacaaggcgaattaaatcctttatttggtgggccgggagcgaatgaagtttcgctgcaggactgtgaaacaggtagaaaactctcctcccgggaggtccgaggatttatacagatcaatgagccctgcataaacctcggggctgggtgtggagccagaactcagctgacccagtgcattaaaggcaggaagcacatcaaagctgacactttcgttgaggacttgggatttcagagagaagctcagcaccctgggagccttccacttgggaggctcaaagctgacttcaagctcctcctccctctccctccaaaaggctttcagctgttcatggatttccttgacgattctgtgccgctcgttttttagggaggtgtagcttttaag

SEQ ID NO: 11656 - DNA, 502 bp, Homo Sapiens
caaagacatggggctacatagcgtgaccaaggacatggtagtcaccatagtgctagcacatcaaggcagataggaccataggtgaccataggtaaaagattcctacgttacccaagcagggacctgagtggacataaagatgggaggatgatgtctcaagggcaacctatatctgttaatgtctagggacacctgaaacctcatataactccgaggagggatagctcaagaataacaaattaagttttccacccgtccagtggcacgagaactcaaagttagaaatcaggttgagagacatgatacagtatcatctgcacatctgaatctgcagctgctcttcatagcatgtagaagtcattcaaagatgagactcagctggtggtggcctggggtgtcatgggagtcctgcttgtagcaggacatgacttagtgactgctaaatcatagcggcatgtattccttcagcccagtgactcacatctcctgtcatactgctttc

SEQ ID NO: 11657 - DNA, 295 bp, Homo Sapiens
cctctctgggccagagaccagggacacttagcaacaagtacaatgcacaggacagtccccagcaacagagttatctggcccaatatatctaatggtgctgatggttgaaaacccctgactgattttgacccctgtatgacacgtaatatgcagtcacgaactacatcctgctgtcgccatcatcatcatcatcagaaccttcctacttctctgtcctcgttgtgtgctattcacagtagctgcacaatcacactatgttaatataatcacctgccaatagtagtctctgcccgga

SEQ ID NO: 11658 - DNA, 582 bp, Homo Sapiens
cccgcttatacttcagaatatcttatggtgtgtggctcagagactctaagcatggtttccaaatctcgatgctcttggtagagattttccatgtattgatttgaccatgttcctgtttacaaaacctaagattatattctgaagtatctgtgacttgagtgatagctcaggaataatctgagggcattctattaggaaggaggactagcaaagcctatagttagcctatcctaggcatgaactattctcattttagataggatgacttgataaataggatgaagtgagcaacctgtttgtcttcggttatgggtatctacaagacattctgctagtcactgtggaaaagtttccttctcttgggttttttcctcttccccttcctcttaacagtgttggttatctttattatgtttctgtgtatttgtaacagctgtttcacccttgtatggcataatggggatttttcttggaataaaaagtgaggcatgtaaattcattgagaactaaccgtagtttgtccagaagtataaagcgttgagctcaaagctttatacttcaagaaaagatccgaagcatgtt

SEQ ID NO: 11659 - DNA, 300 bp, Homo Sapiens
  misc_feature (226)..(226): n is a, c, g, or t
tcaacgctttatacttccacgatgcagaaagcttcacgttaacgtctcccacaagctatatagctagctctcggcaataaacatgacatataatacttgggtgcattgggcgtgtcaaaaatatgcaattttaacatgtcagaaagaatcatgtttcaaaaacagtctcctttggagaagagagttatgcaaacaatatccaaaacctttttggatctcacatttngaagaggtccaacttccgttggttgaaagaaaagtctatgatataatgaaagccttacaactgagggtaccgag

SEQ ID NO: 11660 - DNA, 909 bp, Homo Sapiens
  misc_feature (586)..(586): n is a, c, g, or t
  misc_feature (601)..(735): n is a, c, g, or t
ggactctatcaggcttacgtgttaggcacaacgttggctcaccttgttcctagtctcactttctcaagtctcctactctgcccaacccacccattccaacacatatacatatatacatgtcttatctagcagactgcaaggtctctaagaacaggttccatgtctgattgatcttgcactgggacacacagatatgaccaatactccactgaattgaacaaatgatccacatgatagcatctgcactccaagtaatctttagtattctgagctagccacccaaccttctctcccagtcccactcataagaaacagaacaaagttaaatgacccatccaagcatccaaacagtaaaatttcaaatgaaatgcatcttgtattaaatatctaagagtgaacaacaggacataagaattctagatgctaatatatctgtatgagcaaaacaaccacagaaattatggaacagtcaagcttcctaatgtttcctccaaagtttctaagttttaatggttcagaatggagtttgtactaaaatctacaaattctacctgtcacttcttcgaagtataaagcgttgagctcnacgctttatacttcnnnnnnnnnnnnnnnnnnnnnnnnnnnnnnnnnnnnnnnnnnnnnnnnnnnnnnnnnnnnnnnnnnnnnnnnnnnnnnnnnnnnnnnnnnnnnnnnnnnnnnnnnnnnnnnnnnnnnnnnnnnnnnnnnnnnnnntagttctattggtttgtgcttcatgtattttgtagttccgttgtctggtacatggacatttaggattgctgtgtcttagtggattgatgctttaattattatgtcacgtcctactctatctctgataattttatttgctctgaaatatgctttatttgaagtaaaacacccttg

SEQ ID NO: 11661 - DNA, 423 bp, Homo Sapiens
  misc_feature (85)..(96): n is a, c, g, or t
aaccccgaagaccgaggctgccatgagcccagatcatgccccccccactcccagcctgggttaccaaacccagactctgtctccnnnnnnnnnnnntcaacaatcagatatgtcctatccttcccactgtatttttgctaaaatactaaattgcatttttggtaaccaaacaatccgagtgatgagaccttcattacactgtaattccaggcactaaatttagaaggaataaaagaatcagaaaaatggccatttgcaactcttaatgaaataagtgattcagggcaatcatcataaatagagctaaaccatgaggaaaatacaatcatgcacatggctagtcaatcctagcatcactaaaagcaggatcaccagacattatgcacctcctaatgccgtgaataagaagtataaagcgttgag

SEQ ID NO: 11662 - DNA, 523 bp, Homo Sapiens
cggtacccctcaacgctttatacttcagttctgtatatctaatttcctattagacacttccaactaaatatcccagttactccaaaatttgtatgttcaaaaggtaaataaaactttctccctaaacgatctcctcctgtattctctatctcagtaagagccattaaaccaaacccaaccagtaggccaagctggaaactggtcttcccctcaattcctacagactacctcgcctagtaaattgccaaatcctgacttgtcattctcctaaacttctctcaaatctaccctctctcttccaccagctgaactgctacttactattcacgcaccagttcaaaaacttccctccctaaaataggcttggctcatatctctcctttatccctccttgcccaaatagtaaccacctcctttgtgctctctaagtggtttataatttaatcctctggtgccactgtttgggcaaggaagtataaagcgttgagctcaacgctttatacttctaaataacacatgggtt

SEQ ID NO: 11663 - DNA, 457 bp, Homo Sapiens
tctgccttttgcattccaccatgggatgatcctagtcagaggctggcaccatgctcttggacctcctagcctccagaactatgagccaaataaatctcttttctttctgaattactcagtttgtggtattctgttatagcagcagaaagcagatgaagacaaatacttttattataaaatttcacactaactgtacatggcaagaattagaaaactatatgaatctgtaaaaattcttccttggaaatcaatgaatatttggatggaggaatatgtattcatatttttggctttgttcaaaaccaaatgatttgttaaaacatatcattgaaatgtctgtataccaattttgggaagcatgaaacctttctctgtgattggccaactttccatgtacccttaaaacccaaaaatactatcaattatgtcaataataaatatttatatttctgaagta

SEQ ID NO: 11664 - DNA, 478 bp, Homo Sapiens
tctgtaatgattacaccaccttgtactttgctcccatttctggtctctggattttaatccctttccttccttctgagatggaactggaagctgagaagtgatttgttaactgaagtgcagagcttcataatctcctttggttaaatttcctacctattagtgtcagactatattctggttcagtagttctcaaaattttgggaggaaagtcctctcatggtcactgttccgaaaaaggtaacatcaagagattttaaaaagatgaaccttggtagtgtagttctgtaacttgattgtagtggttacaagagtctacacgtgctaaaattgcaaatacacacatacacaagtgcacgtaaaactagcaaaatctgacaactctgaggaatgcaccaatgtgaatgtatacaggatgttacccaagatattatcactgggggaaactgggtagtgtgtccagggaaactttctgtgcatt

SEQ ID NO: 11665 - DNA, 579 bp, Homo Sapiens
  misc_feature (70)..(70): n is a, c, g, or t
acgagggcgggcggcgcgggcgcgggtcccagctggcacgggcgcagcggtgtgcacagccacatgaccnacacacgcatcaccgaccctgagatcctggagagccggtacccggtcatcctgcgccgcttcgagctgcggcggggctcggggggcagaggccgcttccgaggcggcgacggcgtcacccgcgagctgctctttcgtgagaaggcgctgctgtcagtgctgaccgagcgccgcgccttccgcccatacgggctccacgggggcgagcctggcgcccgcggcctaaacctgctgatccgcaaaaacggccggacggtgaatctgggcggcaagacgtcggtgaccgtgtaccccggggatgtgttctgtctccacacgcccggcggcggtggctatggggacccggaggaccccgccccaccgccggggtcgcccccgcaagcactggcctttcccgagcacggcagcgtctatgagtatcgccgggcccaggaggccgtgtgaggatcccgcaataaagatgccttaagtctcccggttctggggacgcagctacggcgcctaaaaaaa

SEQ ID NO: 11666 - DNA, 237 bp, Homo Sapiens
atgagccaccgcgcccagcatgactggacttttacatgtgacttgtggagggaggagactaaaccccagggctccgggtatttgagtcagtagtgaactccctttttgcattcttgctgctgagcctctgctgtcctttgcttggagtgcctcattccaaccttctgtaaatctcacccatccttcaaggcccatcaggccacctccacaaaagccacgcaagtggtttccacttca

SEQ ID NO: 11667 - DNA, 542 bp, Homo Sapiens
ccgggtgccaccaatggcagcatgggccggtccgacggtgtggccaagatgagccccaagcacctgtatgagcagagtaagaagtattccaactccaacgtcatcatgcacgagacctcgcagtaccacgtccagcacctggccacattcatcatggacaagagcgaagccatcacgtctgtggacgacgccatccggaagctggtgcagctgagctccaaggagaagatctggacccaggagatgctgctgcaggtgaacgaccagtcgctgcggctgctggacatcgagtcacaggaggagctggaagacttcccgctgcccacggtgcagcgcagccagacggtcctcaaccagctgcgctacccgtctgtgctgctgctcgtgtgccaggactcggagcagagcaagccggatgtccacttcttccactgcgatgaggtggaggcagagctggtgcacgaggacatcgagagcgctatgccgatctgccgctgggcaagaaaatgcgttccccagaccgagaaggaacaccagggcac

SEQ ID NO: 11668 - DNA, 782 bp, Homo Sapiens
  misc_feature (610)..(618): n is a, c, g, or t
gaacctcagcttaagaaaggcagctaagtgtaggcactcttcagttatgaggctacccaaccagaggacctggagtttcaggaaggggatataatcctggtgtcatcaaaggtgaatgaagaatggctggaaggggagtgcaaagggaaggtgggcattttccccaaagtttttgttgaagactgcgcaactacagatttggaaagcactcggagagaagtctaggatgtttcacaaactacaaagctgaagaaaatgaagccctattacttgtttgtaagatttagcacccttctgctgtatactgtactgagacattacagtttggaagtgttaactatttattccctgttaaaatttaacctactagacaatgatgtgagtacccaggatgatttcctggggcacagtgggtgaggagatggggacaggtgaatggaggagttaggggagaggaaaagtggatggaagtgtctggaaagggcacgagagagtcttccaggtactgatcctgtttcttgctctgagtgctagctagccagctgtgttcacactgtaaacattcatcaagctgtacatttggtgcacttttctgtgtcataccacaatnnnnnnnnncctatcatcttacaaaaacaagacacccaagtccaggcccaaggagtaagtacaaatattcctgtttctgaaccattactgtaattggctcttaaggcttgaagtaaccttataggttactcataaggcatatacaaataaacttgtttgttttcttttttcaa

SEQ ID NO: 11669 - DNA, 312 bp, Homo Sapiens
agaatatcagctggtagtaacggggatgatatatgatttgttaaatagtgaatacaagaagaattccctgcttcggagcccttgttatgtaagctggccttctcaatgacacgattgtaaagaaaagaaacaactttttctcctggtactaagtacaggcctggataggtcagcatgcttcatgcttctccagactcatttgtagcactttcttcttgtactctaagcctgactgtgcaacatccagctgtctcctgtattttcattgctctcctccaacctagcacagggatccgctagagtccgagcgca

SEQ ID NO: 11670 - DNA, 407 bp, Homo Sapiens
tcagttgcctttttcgacctctctgtctctcctgggtgtgagccattgtctgctattggtgcattttgtaatcttttgcgacatccttgtccttgcctgttactgtgtatagaacagggtttatttctgcctctctggaagggtgggctagagtctggatatgttggagggaatattatgtgtagtgacttcagtgttgtctctccctttaaggaatgggaggtcctctgccttccatgtagtcactgctgtttccattctaccatgtcggcatccagcctctacccctttgttgcaagaaagaataaatctgataagaggtacaggagaatcccgagacctgggatgcgcagggcagatatgcccacctacaccgctgtctggggacctaaaaacaactcagacac

SEQ ID NO: 11671 - DNA, 504 bp, Homo Sapiens
aatgttaggatttttcggcatcgcatgttagaatctctaaaatttaaacattcctgttaaatgactaaggtttgcttttatcaatatgaattctgaaggccaatatcataccattaactatgaaagcttttaattcctaaaaatagttttagagatattcaagcaatgctctcctaatatccatacgcaagtgtgtttatgacacaaattcactagtctgtttaaaaatgaattctttatattgactggtgttccacatatttcagtaatttctgttatgagaggacttgaaatagcaaattgccacacagttaactggatagaccatgtacgtggtgatcataaccacttggtactacacccagaaactcaaaattgtctttctcctgatgagatatgggtgtccttttgtacgtctaggcctaggtaaccagtggagtgattatattagcaaatgtgtttgtatccagagtcttcctgtcattgtaataaaaaatttattta

SEQ ID NO: 11672 - DNA, 1104 bp, Homo Sapiens
  misc_feature (891)..(899): n is a, c, g, or t
atcctcaagtgatccacccaccttggcctccactttacagacatgagccactgcacccagctgagtctattatttccttatcaccaagaaaaagaaataccatcaagtaattttacaatgccacaaatatgatatatcccactgtaggagattttaaggtgtgatcaatgtatgtattaaaattgatgaaatatgggagttgtcacctatgtaaatgtgaacttgattgttaactctggcagaatgtccactcagcagcaacccttcagtgtttctgtcaacaaaccatatgagaagtcagatgagttgtattgtttgaaaatgtttcattggataacaaaatgttgatggttgctaacgcttagtgatgggcatttggaatttgtatgtacactccacttctgtatatagtagtaagttttttataataaaaagaataaaactagaacaagcaaccttccattggcactttctggcatgatcaagaaagcatctgcattaaaattttcagtgtcgtgttagtggatggaaagaaaattccagagacaaaagtcaaaagaatgttttaaagaaatgttgggttatgatctcagtgatgtttttaatgacacataaggtagaaatgtatggaaaaataggacacagttgacaaatttgaaaagatattcagaagaatctaactctaaatatgaaaaagttttaggaatacctacaccaatttattttgcatctgtttttctttttacaggctgtatgagagtgattttaataatctctgtccaaataagtctaaaggagcttatcaagaagtaaagcataacattctaggggataagtcatagttggtcgtagtttaagcagcatactttttagtatctcttattttgaatnnnnnnnnnttaagtaccatgtatatagttaatcatttttagtgtttccaagatactgcttttcttcataggctataaaaagcttttgttgcttatattagtaacaaaaacaattttgcaaatggaaacatttctagaaaccttactatttatattagtattatataaatttatccaatttccagaaatttgggtaatgctaaaatcactttcc

SEQ ID NO: 11673 - DNA, 416 bp, Homo Sapiens
acatctaccctaaaccatctgctatggacccataataagaggcctgttgtatatgaaattgtctagaattcaggtgcaggtctttgccggttaagtaagggagcaacacgtaaaatgggagaggagtggggtgtactcacttgcctcctcttttgtcctgatttaaccagcatttttcaaccctgggaaaatttgcagaatctaagttgattgtaatgattttgagctgcagcagctttaactcttaccctttttccacatagttatggtgtttgagttggaaagaaacaactataggtagctacacgtacataattatctctttattcacaaagggtatagtaaaattgattgtaaataactttctaagtgccaatattcaaaacttttggattaaaatgtatttttcaccgtgc

SEQ ID NO: 11674 - DNA, 483 bp, Homo Sapiens
  misc_feature (131)..(131): n is a, c, g, or t
ggcgtttacctggttcaggagacaggatttagtattcctgagttcaaacctcagttttgcctctttctgcagtataacctggagtaaatttctctacttctttgagactcgatattctcatatgtataaanaaggagatgatgatggtagcctcatagaagtattgtgaagtgcatagcatcatttctgatacaagaatatgtttagtcaattttagttcttaaatatatgaatatgcagagtaattttagatgtcagtatacttaaccccagacaaacacatgcaatagcccttaaacttttagattgggcacttgtcagtttcctataccccttccctgcaattgcctcatgattttttgattatgtggcaaatgcacaaaaggaaaccacatgtagctgccatttcacaccattaaatactcagaaagtcacctttgaggaaaaccagtacttctaagaaaaagcaaagccacgaagttc

SEQ ID NO: 11675 - DNA, 590 bp, Homo Sapiens
  misc_feature (80)..(80): n is a, c, g, or t
aaaacgtggcttccggagcaggcaaaaaacttccaaaggttgccccaatgctgaaaaaatttgccccggatgatcgaccngagagctgtggacaacatccttgtacatactgcccaaggaaggacagggaaagtctttcagatggcagtaggcccattcctccacatcctagagagcaacctgctgaaagccatggactctgccactgcccccgacaagatcagaaagctgtatctctatgcggctcatgatgtgaccttcataccgctcttaatgaccctggggatttttgaccacaaatggccaccgtttgctgttgacctgaccatggaactttaccagcacctggaatctaaggagtggtttgtgcagctctattaccacgggaaggagcaggtgccgagaggttgccctgaagggctctgcccgctggacatgttcttgaatgccatgtcagtttataccttaagcccagaaaaataccacgcactctgctctcaaactcaggtgatggaagttggaaatgaagagtaactgatttataaaagcaggatgtgttgattttaaaataaagtgcctttatacaatga

SEQ ID NO: 11676 - DNA, 529 bp, Homo Sapiens
ggtctcccaggtggagccagaaatccttgtttaaatttaacaacaagggtccccctctgggtccgggcacacctcattctggcctcagccgactgcacagcggcccctgcatccccttggctgtgaggccactggacaagcagaggtggccagagctggaaggcatggccctggggtcccacgaatttgctgaggaatctcgtttttcttcttaagacttttgggacatggtttgactcccgaacatcaccgacgtgtctcctgtttttctgggtggcctcgggacacctgccctgcccccacgagggtcaggactgtgactctttttagggccaggcaggtgcctggacatttgccttgctggacggggactggggatgtgggagggagcagacaggaggaatcatgtcaggcctgtgtgtgaaaggaagctccactgtcaccctccacctcttcaccccccactcaccagtgtcccctccactgtcacattgtaactgaacttcaggataataaagtgtttgcctcc

SEQ ID NO: 11677 - DNA, 433 bp, Homo Sapiens
gaaagaaattacttcctgaaaatttccaaggggcatcaagtggcagctggcttcctggggtgaagaggcaggcaccccagagtcctcaactggacctaggggaagaaggagatatcccacatttaaagttcttatttaaaaaaacacacacacacaaatgaaatttttaatctttgaaaattatttttaagcgaattggggaggggagtattttaatcatcttaaatgaaacagatcagaagctggatgagagcagtcaccagtttgtagggcaggaggcagctgagaggcagggtttgggcctcaggaccatccaggtggagccctgggagagagggtactgatcagcagactgggaggtggggagaagtccgctggtgttgttttagtgttatatatctttggtttttttaataaaatctttgaaaaccta

SEQ ID NO: 11678 - DNA, 462 bp, Homo Sapiens
agtaaataagtgcatcttttttgagacaaatgcagtaggcaaatgttgacattcaccagggcacagtcaatccctgacaatttcagaagttttgttgccaatactgatttatgtgggcagattctgtagtctgctgctccttctctcatggattaccttcttgttcctacagttgcacctattctacacaagagtggcattcatttgtatccaggaaagctagaacaagtagtcttttaatcttggctatattatcacagattcgacttaggatatgttgcatctgtatttttgttttaaataacaactcaagttccttctcagagttgggcatctatgtattttgtttattatgtacaaatgacctgaagacagcattttacccacttgataagttctcaaatagtctttgtttcttagtgccgtccatatcctgaataaagataccgtgttttctttcct

SEQ ID NO: 11679 - DNA, 865 bp, Homo Sapiens
ctcttggccttctattggcccccgccaccccatgatgtccaaactttggctgtccactttggactgtccagtccagccaattccctgtgattccccactccatggaagatggccacctcaaaaaattaagacagggacgcctcatgccagaggaggagttcctgcgcagaaacaagggtccagtgtccatcaaagtccaggtgcccaacatgcaggataagacggaatggaaactgaatgggcaggtgctggtcttcaccctcccactcacggaccaggtctctgtcattaaggtgaagattcatgaagccacaggcatgcctgcagggaaacagaagctacagtatgagggtatcttcatcaaagattccaactcactggcttactacaacatggccaatggcgcagtcatccacctggccctcaaggagagagacgggaggaagaagtagacaagaggaacctgctgtcaagtccctgccattttgcctctcctgtctcccaccccctgccccagacccaggagcccccctgaggctttgccttgcctgcatatttgtttcgctcttactcagtttgggaattcaaattgtcctgcagaggttcattcccctgaccctttccccacattggtaagagtagctgggttttctaagccactctctggaatctctttgtgttagggtctcgatttgaggacattcatttcttcagcagcccattagcaactgagagcccagggatgtcctacaggatagtttcatagtgacaggtggcacttggctaatagaatatggctgatattgtcattaatcattttgtaccttgacatgggttgtctaataaaactcggacccttcttgtg

SEQ ID NO: 11680 - DNA, 287 bp, Homo Sapiens
tgctgggatgacaggtgtgagccccgtgcctggcctggtcatttctcttgctgtgcccaacctgccattaatcccatccatcctgagcccgacgtggtcatttctctcaccacccagcataccgcccaacgtggtcctttccctcaccacccagcctaccgcccgacgtggtcctttccctacaccacccagcctaccgcccgacgtggtcctttccctcaccacccagcctaccgcccgacgtggatcctttccctcaccacccagcctaccggggtaccgagctc

SEQ ID NO: 11681 - DNA, 324 bp, Homo Sapiens
aggttttttctttaaatgatttgtattactttattaaaactaaatctgaaatggaatagaaaatagaatggattacatacaagatggtttccttgttagcagatgcccttcaaatatattttacgtttgcagcacaacaccattgcccggaggcttccgaatctagcaaagcagcatattaaatgactccacctgcgcagtccttgtgttcagtggatgaatacctgtgggctcttgtaatgtgtggtaatatttggagctttatagcctgtattccttgggagaaaaaaatgggaattggagtaaaaagtgtgtcaagacaaa

SEQ ID NO: 11682 - DNA, 412 bp, Homo Sapiens
gtcatcgctcactctagaggatacacagacgatgcggagaaccctcggcccaggacatcagccagcccctgcagaacagcttcatccacacagggcatggcgacagtgacccccgccactgctggggcttcccggacaggattgacgaactgtatctgggaaaccccatggacccccccgacctcctgagcgtggaactgagcacctcccggcccccccacagctcccaggtgtcagttctcattctacccaccctcacactaagagaggttctgggggtcacattttttgttccactcagtcctctctcttggagtgggttggggcaaatcctgatcatcgtctgtgttacatgtttccctgtcccccttccccagggtggtttggtgtaggtccttctcaaaacacactg

SEQ ID NO: 11683 - DNA, 467 bp, Homo Sapiens
  misc_feature (344)..(417): n is a, c, g, or t
cagaagctgaagccgggaggagtgggagcccctcttattcctccccctctccctatccgtgggcccggccaggcccgcccccgtctgaggaagccatggatttccgggaggaggggcctgagtgcgagaccccgggcatcttcatcagcatggatgacgactcggggctgaccgaggccgcgctgttggactctagtctcgagggccccctacccaaggaaacggcagcgggcgggctgaccttgaaggaggagcggagcccccagaccctcgcacctgttggagaagatgctatgaagactcccagcccggctgccgaggacgccagggaacccgaggccaannnnnnnnnnnnnnnnnnnnnnnnnnnnnnnnnnnnnnnnnnnnnnnnnnnnnnnnnnnnnnnnnnnnnnnnnntgacctgcgggtgctttgccttaaaaagaaataaaagatgtgaacttgaa

SEQ ID NO: 11684 - DNA, 449 bp, Homo Sapiens
ttaacaggatctcggggtgtgtagcatggtactgcctgagtgtcaagggattacgaggttgtagccgtctcgtggttctagtaatggggtgcactgctagtgtgtggaggtcgcagttgttgtgtgacacatgatgaaacagaggggcaggggctaccagctgctaagtggggtgggaagatgatgaatttgagatgttctgagagtgacaggctaggctcggagatgtccagcagctggaaagtccgaaagggagggaggccgttcctcaccctggtctgatttcaaagtccctactccttccactcttttcacaatttcccgatcctcgcatgggccctgggcctggccttccatgggctctcacatgccgctgccactggaggatcctctgggagggtgcgtgtctgcattttataatggttggatggacgagctccccgggtacc

SEQ ID NO: 11685 - DNA, 427 bp, Homo Sapiens
  misc_feature (208)..(208): n is a, c, g, or t
ttaaacatcttcattacatctttaatgctctcacgtggagctgctctgggttaaattacagctgtatgcatcctgaattcctggcagcctccagtcgactcaagtgctaacgtatttatagcatttagaggagggaataaatccagaaccttccccatgggggcttcctaggcctttccctcctgacacatggcatttgcccagtggnaagggtctgcatacactacccctgcatcccctccagccagcagcggacagtgacggtggagaggctgggcacgggacatgcctctgtgcatgcttgtgtgcatatgtatgcccagcgtaaaaaaatgccctgctcttgtggttctgtctctgcccaatggcttgccaggacccctggtatcagccctgaccctccaaggcttatggagaggccaagtgc

SEQ ID NO: 11686 - DNA, 432 bp, Homo Sapiens
cctccgaaggcgggatacaagtgtgagccacggtgcccagctccaatttggtttctttataataacatatacattagaatagccggggagtataacctcatatcaatcaacaaccaattttaacctgacagaactaacactatgcaaaatccaaaaacctaagaattggtaactcataatttcaattattcacaggacagcaaaacagtcaaaggcttatactctattttttacaaaactaccacggcctaatagtaatttatcttaataataaagagcagacaacactggttttccgggcataaaaaaggatagaaagggtcaaagttcgtttatccaatatggccttattttataaatagcacacctcactaaatctcaagcacttaatggattatataaccttaacgcacaaggctgggcgtgcagtgg

SEQ ID NO: 11687 - DNA, 190 bp, Homo Sapiens
ggaagaggggaagggaggcagggagggagggatattattttccatagccattaccatgatacatatgatactgcctaggtagagctgggactgtagggtggggaaccaatgctgtcctgcacactgaaactatgaatgccaagatatcactgccagatccttctgtggatagctggcggcattgggtccg

SEQ ID NO: 11688 - DNA, 255 bp, Homo Sapiens
  misc_feature (240)..(240): n is a, c, g, or t
cactatgtgggccaggctggatctggaactcctgacctggtgatctggcccaactcggcctcccaaatgtgctggggattacaggcatgagccacggcgcccaactcaacttcttttttaattaataaaaggatcactcactcactggcttcatattttatgctctttgaatatatatagttgactgcagtaaagtatactcactacatattattacttccttttttaaaaaaaaggaangtataaagcgttgag

SEQ ID NO: 11689 - DNA, 210 bp, Homo Sapiens
ggggtaaaaccctgttcagttaaaaaaagaatgatctcacgtgcccatcgcccagctaggcacaggttaatgatgtgtggccagtcatgcttcatctgtgtccccacccttggccaccaaccagatcattgcttctgaagtatttctaccagacagacatcaagacattttatccaatgttacaagtaaggaagctggcctggcgccgtt

SEQ ID NO: 11690 - DNA, 519 bp, Homo Sapiens
tcaacgctttatacttccttagctataatcagcacatcacttagttcaaacaaaattccccagcaaatgttagatagtaggtatatcagtcacctggggagttttcttcataatatgcatattcatcttgtaatgcatacatagttatcatcctccttctcaacccatctccctaaccccacatgcttgccagttcttgaagggataaagtgattctaataatgttttacttctctctgttcaatttaatgtgatataattctagtataaaaatattttggacagttgcttaacatggtcataagaggatttgtactatagaatatcttctagtactaatttttctgtagagcaaattatatttctctcactggatagtttttagatgtgtttcttcatataaaattaaaaactgagatggaattcatttcagaggtccggtcattcatcccctgccttcaaaccaagctttacctagactaacctagataattaagcatttctcttggcaacatgagg

SEQ ID NO: 11691 - DNA, 380 bp, Homo Sapiens
cccctccatctgcacgctccaggccgtccaagtctgtgtccactagcgtataaagtaatggtcatggttcaacatgttttctgcttttagcgtttgtccgtagtgttgaatgtatttctttaggaaaaactcgtcagaaggtagaattaacagggtaaaaagaggtagaagcatttttatggtttggacacacaggcggttttagaaaggaccattctggttttcacgaccatcactaactagagtccaaaaatggcacctagtctcaattggcatttctctgatactagtgaggctagaaatttttccacatttgttatccagttctacttccttgtttacaggtggtcagtttattttcttggatcatcgtatcttcc

SEQ ID NO: 11692 - DNA, 481 bp, Homo Sapiens
ccttagtattcgtagccacaccatatgtggctatttacatttaaattaattaagtaaagttaaagaaatagggtacagtccttcggttacactggccacatttcaagtgctcaataatgaactgtggctacgactgccttacaggctagtgcagatgtagactgtttccctcatcacagaaagttacatggggtggtgctggatggtaatttctcggaaatgttcaaagactggctaaatactgttatgatggctgtaagtagtgtgaggccaccttttaataacatgcaaaggtattgccactgacttagtacaaaaaggagacaggcatcacctgatttttaaaaaatgttttgttttcactctgtgcctattggcaagctagtcaattcatctcttcagaagaagagtattcttgtgtgtggtgaaacagatacccctgtcgacttaggaaaatagttttgaagtataacgcgtcgag

SEQ ID NO: 11693 - DNA, 245 bp, Homo Sapiens
ctgaaaccgaactatgcagcagtgcgaggacaaaagatcatggagtggtctaaatattcagatgagacatttggcatgtcttcctttattcactgatattttctacccatggtcttatatcaccgtatgaaatggaaacttacaggacttaaatatcagtgaaatattttgagatctttgaataattcctttagaggaattatacaaaattaatatatatgagtcctttgtaatttatttttttt

SEQ ID NO: 11694 - DNA, 770 bp, Homo Sapiens
  misc_feature (201)..(210): n is a, c, g, or t
  misc_feature (571)..(583): n is a, c, g, or t
ctcaacgctttatacttctttccttccacagcttatattccatgttccattagtcagaccaccatcatgtcaatatcttactctccatgtacccacctgaagtagcaccacataagcatgtaatcagactgctgaaccaaacccataccatgatgtatactggtgctgctttccatttaagacctctaattaagctagtgnnnnnnnnnntcccaagttgcactagtctaatttctacagtatctattaccaactgtcctcccgttccctaagtcttcgactttaccctaattgtaaataatcccaacctcttcctagagaaaatgaaagtcacgggaatacctcttcttccaatcactaaactagtttccacaaacttttgcttcactcttcaccaatacaaagtaatagtgaagtataaagcgttgagctccaccgcgtttatacttccctcctccctttttggaaacaggactggaagagggaagaaaagatgaatattaaaatcacttgaggccagaagttccagacccggtggaccacctggtgagacccctgtctctttaaaagnnnnnnnnnnnnnggaagacaatttattttaaaaacatctgagaatcattactgcttttataatatttaaattttctacatgaattaaatagccgaagtacatagttatctatcattcatctatccagtaaaatgttatgtatttatgatgcaccagcattataactaactctgagatcagaagaagtataaagcgttga

SEQ ID NO: 11695 - DNA, 325 bp, Homo Sapiens
  misc_feature (310)..(310): n is a, c, g, or t
acaatctcaccatttgaatgtcttttatgaaaagagaaaactgatcaccattttaatgaaatacaatgtttcattttttacttgatggggcctgcactttattttgaaaactcttctgcaccttctgagttttctctgggcagagcagttataagcatctctacctcctactcatcctcatctcccactttctcaggaacagctgctctgagctttggcttgggcctttcctgtgataacactcggttctaccttagagccttgcagggccgggaagggtcagcctgagtcagcctcctcctcagagaangtataaagcgttgag

SEQ ID NO: 11696 - DNA, 255 bp, Homo Sapiens
ttcgtggtgctgctggtgctgctacagatgggaagccactgatgggaggacccagagtagattttaagcagagacttgtcccagtcaaacctcacgcagcccagctcgtcactcttcagcttgcagtccaccaccccgtcacagcgaacagcgtgcttgggacagctctccctctgctccttgtacctgatccctgtgtggccctgccagaactggaagaggatgatgagcgaaaccaccagggcaatgaggagg

SEQ ID NO: 11697 - DNA, 645 bp, Homo Sapiens
  misc_feature (21)..(21): n is a, c, g, or t
ctcaacgctttatacttccanaatgacacgctttgatctcaacgctttatacttcaagaaaaaagctaagtttaaatgaaccatgtgacctctgataagtcacttgaacttgtgccttggtcaggttcactgtaggtttacatatgtatgtatgttttacacaactcttgtaattgtcatttgaggggttttgtttttgagagttctgcataagaacagaactttattaaggattagagggaagatacaaatattactgcgtttaattgatgtctaatttcatgtggcttagcagcaattaataacctgatttaaggtctttattcagaatgttaatttgcattctctgccgtgtctaatgttcttaataatgaagctaaaattaacccattttatttagtgaattatctatttaattttactttggctagtctggtagctttaagatagctttgccttagcaaggatcaaagtcctacccaaatataaaaaatatctagaagtatctaagagttctttttttctatttaccttgattaggagataaaagttttatctgttagttgcttttccttttggaattatcgtggattttaaaacttaaaacttgcctgcaagtatttatataaacattcaggtatataa

SEQ ID NO: 11698 - DNA, 579 bp, Homo Sapiens
ctcaacgctttatacttcctccacttagtagctgtggaggaggtgtgaagaggtcagcttctggacacatttggcagtaaaatgaaaggattttttgacagaatgcctgcaattgtgagagagagaagtgaagaatgactaaggtttttggccaaaaccactggaaagttgaaagtagttcaggtttacaggaattagagttcagtctcagaggtgtatacattgagagaattagtagagctccatgtgccatcatcctggagccctgttgacttttagggatggcaccatgtttgagaggctacagaggagacccagagccagtaagcaagacatagagtttatagagaggacttacagcatagtccagtggcagcgggctagacaggagaaccgcaatggcttgaaaaagcacgaagtataaagcgttgagctcaacggtttatacttcagagaaactcaacaatcaactgaaggcactaactgagaaaaacaaagaacttgaaatggctcaggatcgcaatatggccattcagagccaatttacaagaccaaaggaagcatcagaagctgagaaaa

SEQ ID NO: 11699 - DNA, 629 bp, Homo Sapiens
taagctttgagccaacgctttaacttcattctgattcatccatatcgtctgaatcatcatcctcgtcttcctcctcttcctcctccgcctcttcttccatctcttcatattcatcaggacccattcccaatcgggctatagacaccctgaatgttgcacatgccatatggaatcggggaatggcaacattaaagatcttgtctttaaagtaaagaaaatggaaggtataatatccttccatgtatcctgatgttgtagagaatgtggtacagcttgtgtattcatatacccgacctgggctgatgattggaaattcaccaactactccaggtccttgaacttcttccacgtcacccttagcatttgttattctccaatagcgactgtccaactgacaggccttctcaggaagtgcatcttttgacattccaatcctgattcggtatgtgaagaaatagtggggtggatgtacagagctaagttctggcagaaacgatgtggaaactgacacagtaatatccccagttgttgctacacattctggatcgtgaacatatctgaaaatttggtctctgatgatggggaagccacctggaatataaaggcgtgaggaagtataaagcgttgag

SEQ ID NO: 11700 - DNA, 610 bp, Homo Sapiens
tcaacgctttatactttccgtgtgcagcaagaaggggacatggccccaagatagccaatcaggtgagtcgctgcggggctgacggggtggcagtgcggcgggttacggcctggtcagaccataatgacttcagcaaataaagcaatcgaattacaactacaagtgaaacaaaatgcagaagaattacaagactttatgcgggatttagaaaactgggaaaaagacattaaacaaaaggatatggaactaagaagacagaatggtgttcctgaagagaatttacctcctattcgaaatgggaattttaggaaaaagaagaaaggcaaagctaaagagtcttccaaaaaagccagagaggaaaacacaaaaaacaggataaaatcttatgattatgaggcatgggcaaaacttgatgtggaccgtatccttgatgagcttgacaaagacgatagtacccatgagtctctgtctcaagaatcagagtcggaagaagatgggattcatgtagattcacaaaaggctcttgttttaaaagaaaagggcaataaatacttcaaacaaggaaaatatgatgaagcaattgactgctacacaaaaggcatggatgccg

SEQ ID NO: 11701 - DNA, 485 bp, Homo Sapiens
acgctttatacttccttaagacactctgtattagaattatgattgaatcattaaaatagtcagtgacccagtgcatgagtttttaatttgatagatgtgtcttaaggaagtaatttcaaatgttttctaacagctatattgtaaataatatagatttctagtagccatgggaaaattgtggttttataatactgtaatgcatctccataggtgggcattaaaacagtcattgtgtagtaacatgtaaagtatttaaactgatgttaaatgaaagttggatattctagaattataaacatgaaaaaataaagactttaaagataggcccaagtgcagacattgttcttgggcagtggttctcaactggcatgattttgccccccaaggggacattggaaagtgtctggagatacttgtggttgtcataacagtgtgtcagtagtactaaagtccagaaaccctattccgaagtataaagcgttgag

SEQ ID NO: 11702 - DNA, 394 bp, Homo Sapiens
gaaattcagcagatgtcttagtgtgtacccttttcaactaaacaaacatttctcttttaggatttgtacacacagatatgacgaaagacttgaaagaagaacatttaaagaaaaatattcctcttgggaggtttggagaaactattgaggtggcacatgcggttgtgtttcttttagaatcaccgtatattacagggcatgttctggtagtggatgggggattacaactcattttgtaatttgcagattattcagttataggggtgattagcatcaagggcacactttggctactgattagacaattatacctacatgggtaacatgtgctaatcaaacctgctgatgctacaaatgttaatttctgtctttataaaaatatgtctcaaaagaa

SEQ ID NO: 11703 - DNA, 470 bp, Homo Sapiens
tagtagggtgtatagtatgtttgagtatctttttccaataagcattgcatgtataatcattcactcattgcatgtataattattaattaaatattctttattaattaaagacctctctggtctctccagaagtcttccatggctgccctcatccccaccctccagaggaatctgaagccacatgtgctccctggcacccacagcccctgcctctcccagagcaccagtacctgagcctcagtggattccaagaatcgaaacccttggtctgctgcccctccctcccagaatgtttctgtctcattcttacctactcagggccctttcagtagccccttggggtattctcttcctatgcaccagggcaacttctgaactcaccactttcctggaaagacccccaacatcttcggggagcggtcccctacaggcctggctgcagatgcccgtgcacacaggaacactgttta

SEQ ID NO: 11704 - DNA, 487 bp, Homo Sapiens
tagctgaaggacatccagttccccagctgtagttatgtatctgccttcaagtctctgacaaatgtgctgtgttagtagagtttgatttgtatcatatgataatcttgcacttgactgagttgggacaaggcttcacataaaaaattatttcttcacttttaacacaagttagaaattatatcccatttagttaaatgcgtgatttatattcagaacaacctactatgtagcgtttattttactgaatgtggagatttaaacactgaggtttctgttcaaactgtgagttctgttctttgtgagaaattttacatatattggaagtgaaaatatgttctgagtaaacaaatattgctatgggagttatctttttagatttagaataactgttccaatgataattattacttttatatttcaaagtacactaagatcgttgaagagcaatagaacctttaagacagtattaaaggtgtgaaacaatggc

SEQ ID NO: 11705 - DNA, 464 bp, Homo Sapiens
aaggaggcattgggtggggaaccaagttgtcctggggagtcagtgccaagatgtgagccccggacgcggcctcgtcactcacagccccgtgctcctcagctcccacatcactgccgcttgacagtcgttttaatcactacctgggctgtggcgaacaatgccaggctctgatagatcctgctgtctcatttctcaacctagtttcccttaactaatatttcatggctatcgttaatgtgcgtttttcatcgagtaatttccacagcccgaacttgtaacacatcccaatgacaaacgtccccagttcggaagcccccgtcagtagcaatgtcacccttgctgctgcctcgacaccttccgacagcccattcagttttatgatcgccctgtcccagtgatcactactgaacctttaagaatccagatgcatttcaagtttaattgaataaaattctttgtataat

SEQ ID NO: 11706 - DNA, 723 bp, Homo Sapiens
tatgccaatgtcttcctgcagcctggtacaagatgacatagcgccctggctcccccagcattgggcaaagggcctatggatttgtcaactataagaaaaacatataaaatggctgatccgaagcccaccttaatttcagcgtggcactatgctgatgttcagaaatgctgtaatgtacaatagctcagaccatgatgtctatcacatggcagtggagatgcagcgagatgtcttggaacagatccagcaattcttggccacgcagttgattatgcaaacatccgagtctggaatcagtgctaaaagtcttcgagggagagattctacccgcaaacaggatgcttcagagaaggatggaggaaccaggggacgccgctgtgccattgaagcagatatgaagatgaaaaagtgaagcctcagagttaccctctttgagccgaacctaaaataaaagtaaacaagatagagcttgggcttgcgggcccagttccagaggtggaagttacagaagaggaggtacctgggccacacgacatgagctggaaaatctctcttagagagttggagtagcacaattgcctgttttagggcagaaaccatgggctatgttaatgtcctaatgtgtagctagcagatcgtagctagtttgtattgtcttgtcaattgtacagactttttaaaaaaaacaaccaccagtgaaatgtgtgtgtatacaataaactg

SEQ ID NO: 11707 - DNA, 464 bp, Homo Sapiens
acctggggcccaggcatactacacttgtgctgttcaggggccagtcctgcaccaggagcccatcagccacagctccgccgagaagcactgatatgcagagctaagcagctttgtttccacgtggatcctgcgtaggttttcttggtccatccgtagacaccgcactcctgcagaggatcttctcgggatgccccactgtctctgttttccctcttcactgaacactcagtcggggctcgccatgatgcctctgtgtctgctggcttctcccccattggaacagccttcttggcacgccacactgctagctgctgggcactgtgctttctgcctttaccgttctgccgtgatgttgccaaaatagcagcaacaacaacaacaacaaaggctgggcacctggctcatgcctgtattcccagcagttcgagatcagcctgggcaacatggtgagaccctatctctac

SEQ ID NO: 11708 - DNA, 451 bp, Homo Sapiens
tagtaggaataacctaagacttgagttagtatttttgtgtacatcagatacaacactcttctcatctttttgtcattatttttcaatgttgttttaatctttccactgttgtttcatgtcatgcactttgttaatattctttaagttattcttagtttttaacaatgatacttaagaaagacttaataggactatagaataggtactccctattccccaaccctgggaacacaatataacatattagttcatttgtatttaagatctatcttgtttacacctcagtttagttattgctcttacctttcaaacagttaatattttgtatctagttctgtgaaagcaaaaagcaactttattctttcttacaattccccttttacttaatcggaacatttctttcctgtttgttcattagtcactctcagataaatgaatagtctctttttct

SEQ ID NO: 11709 - DNA, 482 bp, Homo Sapiens
  misc_feature (34)..(34): n is a, c, g, or t
  misc_feature (67)..(67): n is a, c, g, or t
  misc_feature (85)..(85): n is a, c, g, or t
  misc_feature (259)..(303): n is a, c, g, or t
aaccacttgggggagtcccaggggtgggagtatngcttggagggtaaggaagttggagactaggccngggtccccataggtaagncccctgtctcttaaaaaataaatactatctttctctctggcctctccatgctccagacaatcactgaattacaatatttgcttaacagtagattaatgtcaattttctggaattttatatgactgatataacatgtttcctcttttcatacctgagtactctcctgagccctannnnnnnnnnnnnnnnnnnnnnnnnnnnnnnnnnnnnnnnnnnnnacatagcagggatgcatattttgacattcatcaatcatgatatatgagtagttcattctttttatcttagaatatgacatgctatggaaatcactgtatacgaattcatctgcttatggatatgttattgcttcttatttttgtctgttaggaataaaactgcttgttaagcacaaaaa

SEQ ID NO: 11710 - DNA, 253 bp, Homo Sapiens
catctttatatctttcacagttcctagtatatagtatgacttaatgagtgtttgtttaacttagtttgaagctgtcaccttagggtagactgaaaggcaatgtactgattagatttggcacaatttgttagtataaacggcctacttgttgtcttcatttaacttgattttccccatcttctgtcttatgaaattccagtgtcttaagtgactaaaattttgaatttcttataaagaaatatctgtgaggcag

SEQ ID NO: 11711 - DNA, 1316 bp, Homo Sapiens
  misc_feature (437)..(470): n is a, c, g, or t
  misc_feature (680)..(691): n is a, c, g, or t
  misc_feature (881)..(889): n is a, c, g, or t
  misc_feature (926)..(1011): n is a, c, g, or t
agcctgccgggcagggagcagccccaggccagagaggcctcccggtccagctcagggatgctcctgccagcacaggggccagggactcctggagcaggcacatagtgagcccgggcagccctgcccagctcaggcccctttccttccccattgaggttggggtaggtgggggcggtgagggctccacgttgtcagcgctcaggaatgtgctccggcagagtgctgaagccataatccccaaccatttcccttggctgacgcccaggtactcagctggcccactccacagccaggcctggccctgcccttcaccgtggatgttttcagaagtggccatcgagaggtctggatggttttatagcaactttgctgtgattccgtttgtatctgtaaatatttgttctatagataagatacaaataaatattatccacatnnnnnnnnnnnnnnnnnnnnnnnnnnnnnnnnnngggggggggggcaaaaggtttccccgggggggcccaagtttaacggcgtacccgggttttgctggtgtcacaaggggggccccaaagaggggaggccgctattaaaagagcctagagggcagcggggcgcgggcgtttaaacaaggtgcgggaagcggggaaaacagcgggcaacgggggaacctggggggaaggggaccctttacttcnnnnnnnnnnnncgcatatctgcgggcgcaaacttaccctacggagaagattataaagaggcctcaaggcggagaactttaacacatcttaaacgggtgttatacgtgggcgtgaacaccatagggccggaaatatatcgatggaggggttggaacagttcggggaaccgaccggggaattgtggtattctgggggaaaccnnnnnnnnnacgccgggtatctttgttgtttataatataaaatagnnnnnnnnnnnnnnnnnnnnnnnnnnnnnnnnnnnnnnnnnnnnnnnnnnnnnnnnnnnnnnnnnnnnnnnnnnnnnnnnnnnnnntgattagaagaaagaagaggataagaatgcgagggaagggaaagacaccagagacggcacgaagagtcgacacggacggcacgagaagcaccaaaaaaagacaacagcacaatcaacgagaccaaaaaagcgaagaagcacgaagagcgaaccagggcaccccgacagacacacaacaggacacagaaggcccgcggggcagggcgagcgagacagcaaaacacaccaacacacaagggacacaaagcgcgattcagcacaacaagacagagaccgctaacaggaggcaaccacacagatggagg

SEQ ID NO: 11712 - DNA, 477 bp, Homo Sapiens
atagagcctctgatgtacgaagtaggtccaaagttgttgaccgtatttacagtctctacaaacttacagctcataaacataaaatgaatactgaaagaatactttacaagcaaaagaagaattcttctataagcattccttttatcccagaaacacctgtaaggaccagaatagtttcaagacttaagccagattgggttttgagaagagataacatggaagaaatcacaaatcccctgcaagctattcaaatggtgatggatacgcttggcattccttattagtaaatgtaaacattttcagtatgtatagtgtaaagaaatattaaagccaatcatgagtacgtaaagtgatttttgctctctgtgtacaacttttaaaatctgactttgttttaaaaaaacataaactgttcattacattcttcatttttatcatttatagttttatgcatgtaataaactaatatgtcataag

SEQ ID NO: 11713 - DNA, 422 bp, Homo Sapiens
  misc_feature (196)..(196): n is a, c, g, or t
tatgaatctataggtatctaaatgttaaggcatgtatgatctttggatcatttcttttttcaaattaaagttgtataaaagtttcaatatcttgccttaaatcagttgcctattctttctaggattcaaatagtgtgacatttaaaaaagaaaacattcacttttgaaacttagacttcagatcaaaaaggactgnagacccccactatcataatccatacattcatttccatgttgtttgactagcagtgcatatatgaatgaatatggtaattaatcttacctataagaaccaaatactttaattatattaagatagtgaataaagatgtataatatttttattaacaccttgaatatattcagtggattgaatgtgacttcataactgtactacgactgtattaaaatatttctggaat

SEQ ID NO: 11714 - DNA, 480 bp, Homo Sapiens
gcttaaatggaggccaggtttctggatgttttaacattctcttaagccttcagaagggtaaaaaatttaaagcaaaatgatctaccagggtttaaagcaaagttgcaaattactgaagctaatctttgcttcctgattttgaggtttttggttttttgtgcccacgttgtggggagctcttttttacctcattacatggtgctgtagtactccattcaggcactgaaacaaagttaaccctataagtaactcatggatggaaacccgtagaacttaacagcctcctcctgaccttaaaagaataaaggttcacagtttacctttaattccctagcagtcttgccagatgtatggcataaagtcatgtgagaagagtaggtggaaaaaactgtacaaacttaaccccttcaggtgttcagaacagattaatataccatgtatttaataccaataataatgcaaaataaaagtttcatacta

SEQ ID NO: 11715 - DNA, 2506 bp, Homo Sapiens
taacgataatggtcaggtatcatggctctgtgttaattcggcacgaggaaccatcgcctcccaagccccctaaatgacctccaaagcagagaccccgacggaaagcgtgtcagagcctgaggtggccacgaagcaggaactgcaggaggaggaagagcagaccaagcctccccgcagagctcccaagactgctcagcagcttcttcagccccgccggaacgccagcatgtcaaaaaagaatgtgagaggaatgatggatgccagtgggctccaggaaaggagggagctgctgagggacccctggatccatctggttacaatcctgccaagaacaactatcatcccgtggaagatgcctgctggaaaccgggccagaaggtaccttacctggctgtggcccggacgtttgagaagatcgaggaggtgtctgctcggctccggatggtggagacgctgagcaacttgctgcgctccgtggtggccctgtcgcctccatgacctcctccctgtcctctacctcagcctcaaccaccttgggccaccccagcagggcctggagcttggcgtgggtgatggtgtccttctcaaggcacgtggcccaggccacaggtcggcagctggagtccgtccgggctgaggcagccgagaaaggcgacgtggggctggtggccgagaacagccgcagcacccagaggctcatgctgccaccacctccgctcactgactccggggtcttcagcaagttccgcgacatcgccaggctcactggcagtgcttccacagccaagacgatagacatcattcaaaggcctccttgtggcctgccgccactcagaagcccggttcatcgctaggtccctgagcggacggctgcgccttgggctggcagagcagtcggtgctggctgccctctcgccaggcagtgagcctcacgcccccgggccaagaattcccaccaggccatggtggatgctgggaagggcaagacagcagaggccagaaagacgtggctggaggagcaaggcatgatcctgaagcagacgttctgcgaggttcccgacctggaccgaattatccccgtgctgctggagcacggcctggaacgtctcccggagcactgcaagctgagcccagggattcccctgaaaccaatgttggcccatcccacccggggcatcagcgaggtcctgaaacgcctttgagagaggcagctttcacctgcgaatacaaatatgacgggcagagggctacagatccacgccctggaaggcggggcaggtgaagatcttcagcaggaatcacggaagacaacactgggaagtacccggacatcatcagccgcgtcccctagagattaaactcccagtcggtcacatccttcatcctggacaccgaatgccgtgtgcttggtgaccgggaaaaagaagcagatccaagccattccaagtgctcaccacccgcaaacgcaaggaggtggatgcgtctgagatccaggtgcaggtgtgttctgtacgccttcgacctcatctacctcaagtggagagtccctggtacgtgagcccctttcccggcgccggcagctgctccgggagaactttgtggagacagagggcgagtttgtcttcgccacctccctggacaccaaggacatcgagcagatcgccgagttcctggagcagtcagtgaaagactcctgcgaggggctgatggtgaagaccctggatgttgatgccacctacgagatcgccaagagatcgcacaactggctcaagctgaagaaggactaccttgatggcgtgggtgacaccctggacctggtggtgatcggcgcctacctgggccgggggaagcgggccggccggtacgggggcttcctgctggcctcctacgacgaggacagtgaggagctgcaggccatatgcaagcttggaactggcttcagtgatgaggagctggaggagcatcaccagagcctcaaggcgctggtgctgcccagcccacgcccttacgtgcggatagatggcgctgtgattcccgaccactggctggaccccagcgctgtgtgggaggtgaagtgcgctgacctctccctctctcccatctaccctgctgcgcggggcctggtggatagtgacaagggcatctcccttcgcttccctcggtttattcgagtccgtgaagacaagcagccggagcaggccaccaccagtgctcaggtggcctgtttgtaccggaagcaaagtcagattcagaaccaacaaggcgaggactcaggctctgaccctgaagatacctactaagccctcggcctcctagggcctgggtacagggcatgagttggacggaccccagggttattattgcctttgctttttagcaaatctgctgtggcaggctgtggattttgagagtcaggggaggggtgtgtgtgtgagggggtggcttactccggagtctgggattcatcccgtcatttctttcaataaataattatcggataaaaaaa

SEQ ID NO: 11716 - DNA, 691 bp, Homo Sapiens
  misc_feature (39)..(40): n is a, c, g, or t
  misc_feature (60)..(61): n is a, c, g, or t
  misc_feature (111)..(111): n is a, c, g, or t
  misc_feature (113)..(113): n is a, c, g, or t
  misc_feature (162)..(163): n is a, c, g, or t
tattccaagcagccctgtgaacccaggaggggcagaagnnatttcccagatcccagtctnnagctagtcagctcccactcctaatgggacacaaaaagcccagaaggaganancagagggatgcccccaggagcacatcaaagggcaaagagaccacccccnnccttagctagcagtgacccaggaccatggcccacaaaagctcccgagtgtgtgaaggacccaaggaatggcaaaccagaggaagactgccctggagttctgtggagagacttggagctctctctgcacattcttcctcagcatagtgcaggacacgtcatgctaatgaggtcaaaagagaacgggttcccttaagagatgtcatgtcgtaagtccctctgtatactttaaagctctctacagtccccccaaaatatgaacttttgtgcttagtgagtgcaacgaaatatttaaacaagttttgtattttttgcttttgtgttttggaatttgccttatttttcttggatgcgatgttcagaggctgtttcctgcagcatgtatttccatggcccacacagctatgtgtttgagcagcgaagagtctttgagctgaatgagccagagtgataatttcagtgcaacgaactttctgctgaattaatggtaataaaactctgggtgtttttcagaaatacattcaaaaaaa

SEQ ID NO: 11717 - DNA, 308 bp, Homo Sapiens
gtggtgctgctctgtgatgctctggtatgtgcgaatggctgtcgtcaattctgtgtagtgctgtacaatcaattcatccaggtcacggtcacatttctcgtaggcttcttcaaggcgacccttttcattttccctgtcttcgacatcgtcactacgtagacagagtcctgatcacagagatgagcagccccgaggggtctttgcttttgctgactgtgcttctgtatttcccaccagctgcttctgccgcctatcttgtacgcgggtatacccgctaggctccccctaacgctgtaatagggatcgtc

SEQ ID NO: 11718 - DNA, 479 bp, Homo Sapiens
cacttttgaattctgttttatatcaagctataaaaacctggatcctgttcaacatacatacaaaagcagtactctaaaaaataattattattatattaacaatatcaaacacgctaactcctacacacgtacaaagaccttgggcatcctttataccggccacttcctggccacagctttgtaaggcagtacctgggaaaaggggacagacccaagagagccggccccaaatcctgactcagcactgcagaggcatcagccgggctgagtcatgcctgagatcgaagggccccctttcaggctgagaaggaactttcaggcccagggaggagcagagccttagggggagcacatgccgagcaggaaaacgagctcacattttcctggggtagaacgaggtgcccggcagggcaggggatgaacggagggtgccgtgggcagaataacgggcttccaaaaatgttccgtgacagtcccca

SEQ ID NO: 11719 - DNA, 461 bp, Homo Sapiens
taaccctgcgagagcatcgtgagtgagcagccgggccttttgtcagcgatggagtacgtgcagaaaactctcacggacgaggagctggctgactggaagaggcggccacagattgcctgcattggaggcccgcccaacatctgcctagatcggctagaaaactggataacgtcattagcagaatctcaacttcagacccgtcaacaaattaagaaactggaggagttgcagcaaaaagtttcctacaaaggggaccccattgtacagcaccggccgatgctggaggagagaatcgtggagctgtttagaaacttaatgaaaaggtaatttagcatccttgtccctttccctcatctaaaaaatacctaaaagactcacgtggtagagtgagaggcgggctgacttctggtcatggccgtgcgcgtgagcccatcttctctttcctcagtccggcgagcgag

SEQ ID NO: 11720 - DNA, 325 bp, Homo Sapiens
  misc_feature (41)..(58): n is a, c, g, or t
aaactcatatattgggattttcaccaaaataatgcttttgnnnnnnnnnnnnnnnnnncggatatattgagaatcaaagtagaagttttaggaatgcaaaataagtcatcttgcatacagggagtggttaagtaaggtttcatcacccatttagcactgcttttctgaagacttcagttttgttaaggagatttagttttactgctttgactggtgggtctctagaagcaaaactgagtgataactcatgagaagtactgataggacctttatctggatatggtcctataggttattctgaaataaagataaacatttctaagtg

SEQ ID NO: 11721 - DNA, 370 bp, Homo Sapiens
taaccccttggttcccttccagaagaggagtatgtgaatggaaaaaaagggaggcggcactgcttgactcccctgcaagcttgtagcccatgggcctgcccagtgagggccaagaatggggtgtgacagagaacatcagttggagcacggcagtcctggcacaatggaacttggcaaatggaaaaggaaacccctaggcttggccagattttccaaggtcactgccaatagatacagggcacattatgatagatgtacagtgtgacagaccaaaatcacacctgcagcagttattggtgtagaggttcagaaggtacagattccaactacagaaataattcatttaataataattgtgcccatatagaca

SEQ ID NO: 11722 - DNA, 264 bp, Homo Sapiens
agcggccgccgccggggctgccgccgccgaagcgctttctctatccggaaaccatttttaaataaagattatgtcccaactggttatcctgggagggtggagttgggggtgaggagaatgttgagggatatattggttaagggagattacagaaaaagtatttactgtgctataaactttggtaatgtgtgaacttgtttttaaaagaaacatgatttttgatggcaggaaaagaaccccatttttgagacagagtttcactct

SEQ ID NO: 11723 - DNA, 495 bp, Homo Sapiens
ggtgcgttcttgcagaaggtgaagctgttgggggtgggggagaaggggtgtgggccagtggtgacagtgggatgctgcctgctgacttgcgccgtggagagcggtactggcgttggagcttgggtgccagaccgtggagggagctgggccgtgtgtgcccagagccggctggggaactgggcatgctggagctgggggagctgctctgtgatgaattccctcccactttgtacagagacagacagacagacagacaaaagcagagcagtgttagctgttagaagtgactcaagggcaagacagggcttagccctgttatgtcccagaaaccaagctacccccttccccatcaattaattcctccccaagactacaggatctttcagggggtgggctaaatgagagactcagagtgggatctgtcagaagcacacagggcctaggaactttcctatttcccagggggtagtcactgatctgcaaggaacccacgcg

SEQ ID NO: 11724 - DNA, 492 bp, Homo Sapiens
  misc_feature (399)..(399): n is a, c, g, or t
gctcggtacccctcaacgctttatacttcattaaaaaaatataatcacagtgacttttgggctaggaaaagaagtgcattaacttcatttatgttttttccttccacaaagagcggccacaattttgtacatcccacatacaaatacccaattcatttatctttcaaaatactatatacacacaaaaggggaagaaaatatacagcatgtgcttttggtaacatatggaatttgcttaaagaaaaaaagtcagaaacacaaattcaccccaccactccctcacatacctcttaaaacaaactaaacccctcaacgactccctactccaaccttgttgacggaattttcttattcatgtcatttttcttttcctttaatatatacctctttgtcacacantaggccaagactttgcacttgcccgaatccactgaaggcagttagttgggaagctcactatgggcagttgtgtgacaagagtataaagcgtga

SEQ ID NO: 11725 - DNA, 462 bp, Homo Sapiens
cgtgggttccttgcagacgtgattaagttaaggatcttacaatgaggagattatgctgggtaattcaggtgggcccaatgtaatctcaagggtctttacagtgacagagagagaagcatgagagaaattagaagacacagaatcgctggctttgaaggggaggaagggaccaccagccaagaaacacaggcagtccctagatgctgggacaggccaggaaatgaatcctccctggagcctccagaagaaacatggtcctgctgacattcttgaattgagcccactgagagccatttaggacttctgacctccagagagggaagataataaatctggatcggtttaagccaccagagtttgtagtcacttgttatagcaacaacaggtaatgaacacagaggtcacagcaagttcttctctagtaggccagtagcctcactctcccttctctgcagaccctac

SEQ ID NO: 11726 - DNA, 1077 bp, Homo Sapiens
ctcaacgctttatacttctgtagttgctttaatgcccagctcaaacgtcatctttttgtgaacttttccccaaccttctgaaatagttaagtcttctgcatttccatgccaccatgacacccttctatcggaacatttatcatattacattctaattatttgcatttaagagtacacttctatcttgagtttaaggttacaggagagctcactttattacactttgaattctaaataccttaacagttttatggtacaaaaaaagcaccaatgacttcatttagacaaatgaaatgtttcgtgtatatctaaggaaataagttcatagcaagcagaatctattctttattcttctgtaagtatcgcctctataacacctatagcactgtaccatgattccagtctggaagaggatctgaggatgtagattagattatacctggtctgactggatcactggaatatttggggcgctaaagcataaatcatgggtaatgaattagtttctttaaatagctttagcgagcttggaaaattagaaagtgcagccaaaagagtaagtatttgctgagtgtcaagtcagtgatgcaaaaataatttattacagaagctcagagcagggcacagttacagaacaccatcatgctgtggaaggttaagaatggagtgagggtccgggtatgggatggaggaccggcacttaatgctgttgctgggaacgtggaaggtaggtagagcttaaacaaatgaaggacagcaggaaaagcacttgtggcaaagagaacgcaaaagcttggtctgagaaaagacaagcaatgttcagaagatatgaatttaagcttctgtaaaatgctataccgtcaaagatagataaaggagagaaaatgtgtgtctgtatgcattggggtggtccaggcctgatgtgaatggcaactaacagctgtacctaatgtgtgccagcatagtcagaagtttttaatttagctctcacaaagactaagtctaaagtagctcctgacagaacagattttaggtaatctgccccaagtcacatggcaaatgttttgtgaggtctgt

SEQ ID NO: 11727 - DNA, 412 bp, Homo Sapiens
tctagaggatccctgtttattaacccagtgtggcatttcctgcatctcacctctcccctcccactacagcataatcctcctcagtctggttctctttcttttggcaggttctacctcccttgcttcctaagcaggtctttccccggagtcagtcatcctgttggtcctgcaataagtggcttccaaaaaatggaataaataatcaaattcttctactctgacacccatcttctatttctttctgaaaatgaacttggattagttgaatagcttttcacaattcaattcagtttcaagggctctacagcctcttcacaatttcttgcaaatttatttccatctacttgtctataaaaggtatttgtttcagagacattgttctcctttctccatcacactgggttaagtagca

SEQ ID NO: 11728 - DNA, 427 bp, Homo Sapiens
gctatattctaggtgggatgcaaggtgagcacaaactagcagtcccatttctttttggtttcatttttcctgccttcttttgaactacttacatattttttgtgattggattttgtttcccatttgggacttactagctatatttcttggtttctaagtggttgctgtagcattttcagtattaatcttcaacttatcaaagtctatcttcaaatattaatctcactttacataaagtgtaagatccttacaaaactatacttccagttttccctcttttcctctgtgctgctattatatatttgaattttacatatagtataaaccccaaaatatatggttactatttttgcttttaaacaattaacttttaaaaagattataaacgagaaaaagagagaaaactggaagtataaagcgtggaggg

SEQ ID NO: 11729 - DNA, 536 bp, Homo Sapiens
  misc_feature (120)..(147): n is a, c, g, or t
tcgctccaaccgacggggtgggcaggctggacagtgagtttcggccagagtcggatagcgtccctgatgggcagccactggcccagccactaaatgccaggggtttgtcagcagctgaannnnnnnnnnnnnnnnnnnnnnnnnnnncagggcccccaaacagctgcgtcaggctgacctggctcccagacagcccggtggcccgaggacccatgaagctaggcaggggacggagcccctcgaggtttgggcagcactggcttggaggctgttgggcggatcaggatcttctccatgttcttctccagctttccagagacagggatgagctttggtggtgggccgcggaggtgggcatttgtgtgcccgctgctctcgggcatcctcaacatcactgctttgggcttggggggtgactctgtccggaagtcctcattgatgtaggtgaagctggtgacagggacagccttcctagggggcacagctgggcaacaacgctcctgtgcctcatagccacccctcggtgaacggatcct

SEQ ID NO: 11730 - DNA, 687 bp, Homo Sapiens
  misc_feature (212)..(212): n is a, c, g, or t
ctcaacgctttatacttcctctggccttgaaagcctggcttcgtttactctatgcccaagtgctagctcagaagtttttacctgctgacacatacttgggtaaggggattctgcctgtcttgctataacatatctcagaccctcccagatttgtcacaagaaagtgcaaccagctctgaccctgttggcttctccttcctctgggggctctngtcccttggcaaagctctcctttcaaagcagtggcctgaggacggactcaaagcctttccttagttctcccttcacatttaataaatacagaacagcacaggggtgaatgtccaaactggaatcatacacttgaatttaaataccgaatattccacttactagctgcaccttcaagcaagctccttaatctgaacttgttctctcacctgtaaatgaggacaatagtcatacctatctcatatggttgagataatgctgcaaagctacaataaaatatcatgtacaactttataagctaaagaacccagcaaatgttaatgataacagcattctacaggatctgccctattgcctctctgacttcatctgctactcttttcacttctactccagccacactggccgccttgctggtcttccacacactgggctgcccatgcctcagagcttttgcactggctagttcgctggagt

SEQ ID NO: 11731 - DNA, 515 bp, Homo Sapiens
ggcgacctagaggacctctcttaacgccccaaactccaatcagcagtagataagatgcaaggcagcatttcgtaaaatctcaaacctaaacagattcctttggacaaggaagcctcccctttaggagcaggcgactaacctgaaaagtgggatataagaaacgtgaaagagctgcaccctttgtcttaaatcacagcgtctaattacacaatgactataagcagagataacagagggcgagggagctacttgatagtggagaccaaggacatttttaactgagtcatttaggcagctagtgaatttagaataattgttttcctccttaattgctgtaaaaatgtcatagtcacactttatcaagacatcattagatgggttggcatgggaacatcatggtgatatcagctgtaacagtagccacagagctgaaagcaagagcaggtctgatactggaaagtgtatataaatatgtgggtgtgagtatggggcgttaagataagatccggtgagct

SEQ ID NO: 11732 - DNA, 358 bp, Homo Sapiens
  misc_feature (233)..(247): n is a, c, g, or t
acccctcaacgctttatacttcctattgagtactgacaatcttaacagtctattagttttatccctgtgtgattagtgggcagcaatatcttagttttagctaaccaagcctaagcttcctgctcttctcatgtaaaatcatgtatattcaggaagatgagttagctttattaatatacaagtaagaaaatgagctgtggaaagaagtatatgcaagaaaggttaagtgaccnnnnnnnnnnnnnnnttagtgattttggaaatctgcctttacttcacctgccatctccctagtgactttaagaatgctacataaagccaggcgtgagccaccgtgcgccaccgcgttcagccatcc

SEQ ID NO: 11733 - DNA, 602 bp, Homo Sapiens
  misc_feature (51)..(51): n is a, c, g, or t
atcaggatatcttacgccaactctcacctagttatacctagccctaacctnaaaactaacctagctcataaacttacgtagtctaacctaacatatttaacttacctaaccccctagatatatttacttgtgggactataaaatgtcccagtttcttttcttttactcttcttgtgcggacacacaaacaaacgcacacggctcactggagtgtgtaagggctgttcagagattaacccttcactggaagtgtgttagggctgttcagagagaacccttcactggagtgtgttagggctgttcagagagaacccttcactggagtgtgttagggctgttcagagagaacccttcactggagtgtgtaagggctgttcagagagaacgcttcactggagtgtgttagggctgattagagagaacctttcactggagtgtgttaggcctgttcagagggaacccttcaatggagtgtgttaggcctgttcagagagaacccttcactggagtgtgttaaacatgttcagtagagaacccttcactggagtgtgttatgactgttcatagagaatacattcacagagtgagtttgggcgttaaga

SEQ ID NO: 11734 - DNA, 650 bp, Homo Sapiens
  misc_feature (576)..(576): n is a, c, g, or t
  misc_feature (583)..(583): n is a, c, g, or t
ggatcccctcacgctttatacttcacattttatggaagtcacttcataaaatgttaagtaaaaagtgggaagtgcttctgtcttctcttttgcatgagttgcttttaggagcaggaagaaggtaggcaaagtaagataaagatgcaacacatttaactacaaaaatcaggttcattttttagtttattagaatttttttgaaatcttaagagggccagcatttctggctacaattttgcacccagaacattgccaaaatgaacattcagtaaatagaacctgattgaaatttactcctggaagctttcctttgcattttcgggaagtggccacctgccaagcgcaagagttggggggcaggaggggaggactcaaattcagggtgtctggattaaatttcggtgaacatggtgatatctcagtttgaaaactagagggcctatcctgagtatacatcaatgtctctttgatggcctactttcctcagtgaggatctttgggaatacttgagatggaacaacagaaatgtgtgaaaggaagcagaaacttcttgtaaataacgtgacctcccacgangaactgnctgaggcttcagggttttttcttgcttttaacactcttaaatctcctctgttggttctaatagatcc

SEQ ID NO: 11735 - DNA, 940 bp, Homo Sapiens
tcaacgctttatacttccttgtgatcacagtaactggatgttttgaggtgctcaattggaataaaaatattccaatctatttggagaccaaaggcaaaatcagttttcttaccttggaattattcgtaccttttatggtaaatttcagctttgacatgtattatgaggaacgtaccaaaaaccggtttgtaacaaatctgtagagaaggtctgaatctatcgtgtttgccttttcaggtgccatttctactgcctaatacagtgccatttgccttgtgaagacccataaacattcattgtgttgaatgtaagatagagactctccctagtcttactgatctcagtaccccacaaatgattaagaatgatatgaaaaccagcagctaaggaacatcttattatttagttgtagcatattcataacaagtgtccttcaaggataaacatatattctctatttgtatttagcaagtaaaacttgtgttgacctttagtgcattatattcagcttttaacagtattatgtatgtactggaaagcaaagaaatcttagagtcttggacattgtttatttgtgcaacaactagaaaggagcaatgaagtttatttcagttgtatttttccctaagcacaatctgcaatagtttatgtatgacagagataattcaaaaaggaaaactatatataaaagttgtatataaagtttgtctctgaaatatttctttgaagtttttaaaaaattgactcatgtttaaaaacaaaaacacatattcagagcattggacttttttaacttgttttcatctgtttatcatgacttttttatttctggtgtagagtccacattatttagtttgttgtacttttaaatttcaagttcaatctgaagtataaagctgaggtgcgtagcgacgccgcgggaagtatagctgaggacttg

SEQ ID NO: 11736 - DNA, 612 bp, Homo Sapiens
tcaacgctttatacttcatttcttgacactgggaaaaggtgactaaatcctttctttactaagaatcaaagaaagtgaccacattgttcccctcattctgtgtgtgctccagactaagaaagattcagataagatgttgcaggggtggtgggttcacaaatgatgtattggtaataaagcagaagtgttttgtaagggcatgggtgatggctatctgctcccaaactgtgtcacctgccttatcagagggagactcacttgggttcctcaagcttacaagcctctttgaggaattctcaaactaaagatctatccccatgtgtctagaattagcttaagacatttctatgagtatttacaaccagcacagtaccagggaatgcattactgattgtcagacagacttattggtaaatactggagtctctaattgcacagatcattaaaaaatttatggctactttacatagtactattacaatggcatgagaataaatcggttccatggaagtataaagcgttgagctcaacgctttatacttcagaaatgttcgcccattcaaaaatgtcgggcaggggctgttccatgttataagcttgactaaaacaacc

SEQ ID NO: 11737 - DNA, 912 bp, Homo Sapiens
ggcacatctaactggcagcacaaggaggatgagaatttgcaactaaaggcctcacttggacaaaacactttggggtcacaatgcccaggaccgaagacatgttcaaggacagcacgaggcatctttctattgggagacccatgtccttggtaagcctgcacacctggcttcctaatccctgagagcctgcccactgtccagatccagtgagttggtacaaaacgtacagactgaagtccctgggcttgcttttcccatgggtgaggaccagaaccagactctgagcatccttacccctggccacccgaattgttccaagtttgaggtaccccgttcccagagatctgggggtccttctttggagggcttgctttgttctagatggccttcagaaaggaatcacatgaagtataaaaggacaggccccttggtcaccaagttttggctcctcatacagataggactcatccaggttcccagcgaggcactgactaagcgaggctcagagcttccatatcaaattcctcagctttgttctgtgcccagagggggtgggccccattctgggccctgcgaactttgtcttatatatcaccatctgtatcagaactcctcctcaattgcagttaagtgaaaatacgtggaagtctgcttttccatcctgtattctcccacatcactactggctgtgcggaccccgctgcttgccaagcttgggaatccagagaggggcagtagtagagtgggccagttgggacccacccgcagagctgaagaaacacgccagactaactgatgggattccacaccggagcctctgagcgcacaggcaggcatgccaagggggctgcagggtttgtcctttacttatctgcccctttcctagaaaactcctcgtctctgaaatgtagg

SEQ ID NO: 11738 - DNA, 786 bp, Homo Sapiens
tggatacgtcactttgcctgtgtacacagttgtcagataggggagaagccctttagtccgtcttcttgacacagccctcctacctggttacgctggtgctttcgctggtttagacaaccaagacacttgagaattatgctgtcctcagaatgtctgatgaaaagaacagattcacttttttgacacaatgcccattagccatctttggcagtgtttctgatcaaaggttccccatgcctgctctaggaaagacaagaaacactgaaacatcctaacagcaaaacagctttttgcactgagcgtgaccattcagtctgattagcctgatgggaatggtgcaaagactactcagtaatccatttgaggatttattctgaaaaaagtttactttcctagagcaggcatggggaacctttgatcagaaacactgccaaagatggctaatgggcattgtgtcaaaaaagtgaatctgttcttttcatcagacattctgaggacagcataattctcaagtgtcttggttgtctaaaccaagcgaaagcaccagcgtaaccaggtaggagggctgtgtcaagaagacggacctaaagggcttctcccctatcctgacaactgtgtccacaggcaaaggtgacagtatgccctgcccggactgcatcatgagtagcaatctgattctgctcgcttcccaacagagaaaggcaagtggcttcatacaccaaggcccagaggaagaggcacagaaagctataaaagtgatgctgggccgggcacagcagctcacgc

SEQ ID NO: 11739 - DNA, 315 bp, Homo Sapiens
ggcgctgcagggccaggcggccaccgcagatatccgaaaagctccgctcatcctccatgacaccccaactctgccgcccgcaccgcaccgcgcggcactccactgcgctcgcctgccctagccgtttcatgcaatatcagaattctaaatacttttagaaactctgcctagagatattatgtaattttgaaagaataataagcatttctcattcattttagaaacatgacaggtttaaagtaaaagaataaaagtaccatttaaaaatgattatatgcatacagtaagttgaaaaagtacaaaagaatttgtagt

SEQ ID NO: 11740 - DNA, 536 bp, Homo Sapiens
aaacagcttccccttatagaaatttgccccttgggacaaaaaatccgccaagtggggttcctcagttacgtgccagttccccgcaatgcgatacctgagctacatgtcaccaagccaggtgggctggtgtgtctgaccaccaaggaccaactcgtccaaccttcaatacaaggaggctctggaggccaccctggacaggctggagcaggctgggatgtgggaaggcctggtggcctggcctgtggaccgcctgtggaccgctgggagctggctacctccgagctggaggtggtatccggcatctctgccaaggatggcttcatctccggcattgtctacctgtaccgaaagtggaaggcgacccaggttgaggaagtgagatccagcccccagcccccagctggcccctgactccatgtggccttagctgggcccatctgctgggcctcctctgcctcccctgtaaaatgggacctccgaaccaaccctgcccctcagaaatgccctgcctattaaatgagctcccagaaaaaaaa

SEQ ID NO: 11741 - DNA, 487 bp, Homo Sapiens
cgccgcaaggctccagtgtccgatcccaaggcagcgacctccgcccaccccagcagtcgcgagcctcggccctgccagaggaagcgctgccgccggacctgactgacttcccagtggaactgccttcttgggctgggacagcccctttcctctgtcccttctttctctgtcccttccttccagccacactccagggcggagttggatgaggcccgtccggagggagccatctcttgctcccgaggctgggacagtcctttctgtgggggctctagggcccctctgctgctgtgctgggtggggaagcggctgccctgagccccaggtcttgtgggaggctgcgaggacgagagcctggctggagcccgcgttgctgttcccacagggcctcggtttttcctaacttgctctgcatgctgtcagcggctgccccgccgtcatagacttaaaggactgcaataaatgtagagttgatgtctaacaccca

SEQ ID NO: 11742 - DNA, 479 bp, Homo Sapiens
actgataccagaggggaaggctgtgaggtggctgggggttgagacttgaggtttctaactttcctctgcacacctgtggctacctggtgtttgtctcttgattccctccacctgcctcacaccctgcctccgtcgggattttccacctacaccattcaaaaggaacataggagagggcatgaaggggctaggctgaagcactctgatgactggggccaatttgtggctgaaaatgaatacattttttgaaatttatggtcattttcaagtgatttagaaggttgatccttagcctcatacagtgatgaaataatctgtgtgttcagagccaagcaggactttagcaagagtctgattgtattgtcactatctcggggaaaaacaaatacaaaatacatttctctgatctctgatggcaatgaagtttgacttgtaatttctctggctgaggcttcttaatagcttactgggcagaatgt

SEQ ID NO: 11743 - DNA, 437 bp, Homo Sapiens
  misc_feature (216)..(216): n is a, c, g, or t
  misc_feature (230)..(231): n is a, c, g, or t
  misc_feature (240)..(241): n is a, c, g, or t
  misc_feature (249)..(259): n is a, c, g, or t
ttcttcccaagagccctgcaaagaaccccagtttcctatttggatgcccctacactgttgtgtttcagtggaatgtattttcatttaaaaacaactttgaatggggcactttttctttcctgttttaaaaattgaaaaattcttccagtacaaacaggactgtcagggtgggggtgttggtgctgtaagaggtcactcttgagtgcattttggcantgggatgggatggnngggggtggnnagcccatnnnnnnnnnnnaacttcttttctaatatttaaggagtgttttgtaggattcaacaaccaccacaacttgaatttgtatcatgggaggtgggagggagtggcttagaggtgtctgcctatgcttaaagccaactgtggaagttttgttttcccttttttgtataataaagtgaaaaacaaaggttaaaaa

SEQ ID NO: 11744 - DNA, 456 bp, Homo Sapiens
ctgctatgtcaggtgctaaatgcgtctcagaggaaagagacacggtctactgcccggagtttaatgaatgaagactttccgcattatcaccagggtcaaattattcattcttcaaattatctggtacagacatagtccacattatacagggttcacaagtaaattttctaaatgaattcaaatgaaaatttcccaaagggaattactcaatttagaaagtccatcattgttaccacgtttctattgagaaagcatacatagcatatgaaaactgcttcactaagaattgactgaacactattgtatcaggcatttaggggcaaattacctgggcaggtgggctatcagatacagctgattttcatcaattaattgattagaggaaagatctaataacttgactgtctggagaacatctgttggcctgtatggaaaataaaattttttcaccgtgaa

SEQ ID NO: 11745 - DNA, 273 bp, Homo Sapiens
caagtatctctctaataactaaatgccacttatttgcattctccttgtggattttttgtcacctaaggaaatgcatttgatgagtgctggaaacttcttaagtgctttacagtttgttttcattgtttgcagcggatcactggacatcaaagattcattgcacttatgaacaaggaaccttcttttcaatttctgtgtaatttgcaaggctgtacaatgtgtgctgatgcaagcctttttcagttcaagagaataaatgtttacaaatataaa

SEQ ID NO: 11746 - DNA, 373 bp, Homo Sapiens
  misc_feature (119)..(174): n is a, c, g, or t
cattggggtgccaggcaggcatgtacagactctatatctctatatataatgtacagacagacagagtcccttccctctttaaccccctgacctttcttgacttccccttcagcttcagnnnnnnnnnnnnnnnnnnnnnnnnnnnnnnnnnnnnnnnnnnnnnnnnnnnnnnnnttgtcttctgtgaagacaggacctatgcaacgcacagacacttttggagaccgtaaaacaacagcgccccctcccttccagtcctgagccgggaaccatctcccaggaccttgccctgctcaccctatgtggtcccacctatcctcctgggcctttttcaagtgctttggctgtgactttcatactctgctcttagtct

SEQ ID NO: 11747 - DNA, 935 bp, Homo Sapiens
gcgggcgggccgccgcgggccccgccctgcatacccagaggtggcaccgggccgggaaatacaaaatgggggggagagcgggggtttgccgctccgcggaccggcactaggagccgggggcgggtccgtgaccctccggctgctcggagcgaacaggcggccaggaaagaagcgggcctgaacaccatgatccctttggagaagccaggcagcggcggctcctccccaggcgccacctcaggctcgggccgggcaggccggggtctgagcgggccgtgccggccgccgccgccgccccaggcccgcgggctgctgacagagatacgcgccgtggtgcgcaccgagcccttccaggacggctacagcctgtgcccgggccgggagctgggcagggggaaatttgcagtggtgagaaaatgtataaagaaagattctgggaaagcaatttgctgcaaagttcatgagaaaaagaagaaaaggccaagattgtcggatggaaataattcatgagattgctgtacttgaactagcacaagacaatccttgggtcattaatttacatgaagtttatgagactgcatcagaaatgatcttagttctggaatatgctgctgggggtgaaatctttgaccagtgtgttgcagacagagaagaagcctttaaagaaaaagatgttcaaacgacttatgcgaccagattttagaaggtgtacactattttacaacactcgtgactgtagttcatctggcatttgaagcctcaggaatattctggtgaaccagtgaatctccattgggtgacattaccgatcgcagatttgggctacccaagactattgaagaccagtgaagagctcgaggaacatcatgggtaaccctgaatatgtgggtccggacatcctaagttatgatcctcatagccatgccacacgatat

SEQ ID NO: 11748 - DNA, 494 bp, Homo Sapiens
ttgatgttgcatgatgcaatgtcaatatacagaagcaattgtatttatatacacaatccaaaaacaggaaattccattttttttacagtagcaatacttagaaataaatctaacaaaagtatgagacttagcaaaaattataatccactgttaaaagacattaaaaacccaataaatggaaagacatctcatgttcatggactggaaggcttaatatggcaatattctccacatttgctttatgtcatgaatacaacgcttatgaaaatcccaactgcctttattttagtatagaaattgacaagctgatcctgcaattcatatggaaatacaagggacctagaatagccaaaacaacctagaaaaaacaaacttaggactctcgctttcaaaatttcctacaaagcaacagaaatcaaggcaatgtggtattggcataagaagatattatagatcattagaatacaattaagaatctataaataaacccatac

SEQ ID NO: 11749 - DNA, 541 bp, Homo Sapiens
cactatgtagatggagcaaataattcaaattaggctgcttataggtaagaatcacaaggagcagcattattgttaaacagtttaattcccaaagctagtaattttagttaaatatacattagagcctttttagatggctgctaataaacactatgtcaaaatgtgtagttttaaactcagactcgaaagccaagataagcaactccttcagttattactctgaccaaggcataagaattcacttagacaaaaagctttcaaaacctacctaaaaataagatagttcataaattttcaaaactgttcttccctgttgcggacagcccttgatctttgtaagacttagcaaattttggcatgctcttcatgttagcttttttaagttactgaaaactataaatttagcatcatttctcaaatctgtatagttttctcattcggaatgcttaaacatttaggtcaagaattaaaataccagtagaaaaatattcatctttagccaggttgtatagttaacaacatggcaagaaactgatgagcc

SEQ ID NO: 11750 - DNA, 289 bp, Homo Sapiens
tatattggcccagcaaggcaaagaactgaagttccaggatggaagaacctgtgttctcctcataatagtatagaataattcaagataggcaagaaggacagcagtaaatgaagaccatggaagaaaagaaggaatgccaaagatcgaggaaatctaccaagactagtagggtagtccagaagaagctgtttcagggcctgttgccagctatgcctttgagaacctcgggatcccaaagaatgaggggaatttcttcagaaagacaatctcggcatgcattatttctttg

SEQ ID NO: 11751 - DNA, 367 bp, Homo Sapiens
catgatcatcattcccttctagagaacattctagatgaagaaatgcaactgttgaccttctggttcacccatctccccctcgaggcattcttgataccccttctcacctgcatttctgtcccagggataccagatgcagccactacctaactaggcttgtcctgggggagtgagccgtgaacctggagacatggctttgacccacagctactgttcatttcctcaggctttgcgctgattccctcaataatatgacagtaaggcaagtagtctccttgcctttctcctgaaaggtatgagatgtggacatttcagtgtttgaattattttaagagatgttttatagaaataaaacgttttgtagcta

SEQ ID NO: 11752 - DNA, 491 bp, Homo Sapiens
gtggctgtgagcctgcattatggacgggagcagagcggcagggcatgttgctaggactaagcagtcgattcacgtgagtctggacaccatgtataaatattttgaaaacttcctgttacaatttaatttactccattgtgttagagggagtgcttccctgcacatggtgttctgtatatttattggttgatgtgctttagggtatagtaattatttatagcaatagattgatacccaggttgcagagttgctttagttatatctttatttccttttcttagagattatagacataatttgcttctgtcatcttttgaccaaaaatctaatgggaatgaagaattacacttgaatgtttatttttaagtaataagttctgtgatagtgattataggtgtctgcatttaaaaaaatgttttaaaaagtacagaggtcaaacaagcatctgtatgattgaacaaatgttatttcgtatatttctgtcaaatttt

SEQ ID NO: 11753 - DNA, 422 bp, Homo Sapiens
atgtcacctacaaggaacgtgttgggcgcggatgtgctggacgaggtggtgactgtgctcagtgacactgcgtgggacgcgaagcttgcagtggtgagagagcagcgcaaccgtctgtgtgaccttctgggcgtacccaggtccccagctggtgccccagcctggtgccggctgaagccatcgtcctggagcccatacctcacccctgcctggtgaggatgtcttgttcctgagggaggccggtgtggaaagcctcgcacagtggtgcctccagctgttgaagggtagcgctggcccttggaggctggcactagctgacagcttttcctctctgcacctgcgctctggtgacttggggtggacgcctctgccttcacttgaacacaaatgtgcttcctataaaatcatgtaccaagaaaaaa

SEQ ID NO: 11754 - DNA, 180 bp, Homo Sapiens
ttaaactggctctttaaaaacactaataaaatggacaaatccatcaagactgacaaaggaaaaaagagaaaattttaagcaaaatgcagaatgaaaaagaattatgaacaatcaatgtgataacaatggatacagttctggaaagagtatatagtgccaaatgtggtaaaagattaactc

SEQ ID NO: 11755 - DNA, 513 bp, Homo Sapiens
ctgatccacttgagcgacctccgggagtacaggcgctttgagaagtagaagctcaagtcccagtggaacaatgataatccccttttcaagagcgccaccacgacggtcatgaaccccaagtttgctgagagttaggagcacttggtgaagacaaggccgtcaggacccaccatgtctgccccatcacgcggccgagacatggcttgccacagctcttgaggatgtcaccaattaaccagaaatccagttattttccgccctcaaaatgacagccatggccggccgggtgcttctgggggctcgtcggggggacagctccactctgactggcacagtctttgcatggagacttgaggagggagggcttgaggttggtgaggttaggtgcgtgtttcctgtgcaagtcaggacatcagtctgattaaaggtggtgccaatttatttacatttaaacttgtcagggtataaaatgacatcccattaattatattgttaatcaatcacggtgtatag

SEQ ID NO: 11756 - DNA, 417 bp, Homo Sapiens
tcttaacgccccaaactcggaaaggctgggactgaattggaaccttcttatttcacgtgttaactctcgttcctgttttcgcgttaacaccaccgggcgcgcaatgagagggccagtaaaaaccttaacgacttcttctcgagttggagttgtaatccctcaggtgctctcgagacgctcctcgattgcggtgttatggctactgtggtccattccaactaatgggctttggttctctttacgttgtcagacacacatacacgaaacacactcttcacacaatctttcacagcctgccactgtgcgtttgctttgtggatggcactgagaggggagagagggtgaaagctgactttagtggaggggcggcgcgaggctgaggggaacgtatgggagtgagtttggggcgttaaataa

SEQ ID NO: 11757 - DNA, 175 bp, Homo Sapiens
tattattaaatctaattaatatttggaaatattaacaaataggtattttatttactgtaaaaagtcaaacttcattatgtagataaatcttattcttttcattctttcccctgtttacatcctttttacaaagcttagtcaccaattaaagctttcctatcaaaatcaaaaaaaa

SEQ ID NO: 11758 - DNA, 546 bp, Homo Sapiens
  misc_feature (28)..(28): n is a, c, g, or t
caggttcaaagcccatctgtggaatccntaaactgccttcaaagaaagggagttccccgatctaaaatggtcattatatatttgtgtcaagaattagaaggcaagggtcactaaatattttaaggattaaggtaccagaggcatcagtggtataaggatggagtctggtctttaattacgacaagggtattgcttacattctactctctggttttcaaaaagatctgacatgctgacaaatccagctcctcacaaatcttgtttgaaggacttgtgggaagtgatattccttactattagatcacgccccttataactacatgttaacatccagccttttatctgtttgagtaattgtagggatagaaagtgaagcccccagagttaggtgcaagtatagcacccagctgaaaggcatcatggagtctaagggccttctacagaaggggcaatcctttgggttatttctggtgtaccactgtcttctctacctcggtccaacaccacctctcttggacaaaaaataaaacaagcaacagccatcaa

SEQ ID NO: 11759 - DNA, 290 bp, Homo Sapiens
cagagacagaaagaataaaggttacaaaaaagaatcacaaaaacacactaggtgagcgaggacagtgtggagtgcaattgagattgcgtcttctatggatctgttaggaaagtatggagtgggtcacagggtgtcatgggattatggagttgatgtgtgccataaccagcctttcaatgtgaccacattcaccacgcattattaaggtttgattatagtacctgttgtgacccatcataatccatcgttgagtgtgggcgtaataaggatcggtgatcaccacagcatca

SEQ ID NO: 11760 - DNA, 310 bp, Homo Sapiens
  misc_feature (122)..(185): n is a, c, g, or t
cttttcctcagaggagcaggcaacagtgtgggataaacagagtcacgatcagaggaaccccagggtctggtgatggcagggatggggggagagagagaaaatccacaaattccaatgtcacnnnnnnnnnnnnnnnnnnnnnnnnnnnnnnnnnnnnnnnnnnnnnnnnnnnnnnnnnnnnnnnnggcaaccaaccacattagaagtcttggcactttgtaacggaacgggtactacactttatcttaattcttaatttaaaaacatgtttacaagttacaaccaacttctatgaaaagttgaaaagaca

SEQ ID NO: 11761 - DNA, 661 bp, Homo Sapiens
gaggatctctcttaacgccccaaactcacaaattctatagaaagctagcaaaaatagacaagatcttgcaaccatggtgaggtaaataccagtctatttatgggaaaatcacaccgatgaactcttaagtcatatcacagtttacttatttacttatggtgctgcctatgtggccgatgtgaaatggctagctagttagtggtggtgcacgctaatagtgtttcagtcggtgacgtcactcactctgagacggtgacgtcactcactctgagacctagaagtagttgttccccttgctctgcaagggccacggcttttgtggagtgatgggtaacgatgcttcgtgagtggctgtggttgatgtgtgcagagggtccctagttcaagcccaggttggagcgaggagagggacggaagctatactgttacacctactccagattacttgtttttatataagcaaaaaatatttcactttatattggtattttgttcagccaaggcagcagctactcttcatggtgtccacacaggaataaaacaattacatcataaaaagacaatatatcatacaagaacttattacattattactccattattgcacatttacagtatcacatttacaacactacaatatactgtgtgtgtgtgcgggggt

SEQ ID NO: 11762 - DNA, 733 bp, Homo Sapiens
ggtgatgctgaggtcgctctaccggatccttattacgccccaaactcaaccatgcattgcataccggggtctaaattacattatggttaagaatcgttaccccataacactctctcctcagcttttgaacctctccagagggtcaccattttttccaagctagacctaccacctggttcggataccgtcttccaggtaaacgatgtgctccgggacatgctcaaccgttttgtgttcatctaccttgacgacatcctgatttttttcccggtctgcccaagaacacgttcttcatgtcagacaggtccttcagcacctcctcgagaaccaactttcgtgaaagccgagaagtgtaagttccaccgctctacaatctcctttctgggatatatcatcgctgagggaaatgtccagatggatcctggtgaaagcagcggtggattggcctcaacctacgtccagttgaaacgtttcctgggttttgctaacttctaccgcctttcatttggggttacatcaccctggcggccctcctctctgcactcatctctcccaaggtaccgttcacatggtctccagcggtcgacagagcctttgtggaactgaaacattggttcaccacagcccccatccttatccatccggatccggcccgtcaatttgtggttgaggttgaagcttctgatgttggagtttggggcgtaagaaaggtccggtagatcacctcagcaaa

SEQ ID NO: 11763 - DNA, 510 bp, Homo Sapiens
acctacaggatcttctcttacgccccaaactctaccctccactggatgtacccaaatgcagtcctcaggttgcccagcaacacacattcacattttagagccagacaagcacacttgattcaatttgttaactaatccttcaattagttaatcagtccagagctacaacaacgtgtgctgattgaaccaaactaaatacttggaggatgcaggcattgatcccgctacccctcgcatgctaagcaagcgctctttaccatttaagataatccctctgtgcctccaacaagaagtatgaaatctcaatgaccgcactgccaaatccctcgtccataagacaggatactttttaaaaagtatgcttgcttcaactgtctaaaagtatttttcatggtaagtacagtaagggtggaagtagtgactgcagtaagcccagtggtggaaatagttgtattgtggggtaagtatccagagctaacacaaatgtgtgctgattgaactaaactaaat

SEQ ID NO: 11764 - DNA, 827 bp, Homo Sapiens
  misc_feature (396)..(424): n is a, c, g, or t
  misc_feature (764)..(776): n is a, c, g, or t
attaccggatcttattacgcccaaactcctatcaagaatgatggaggcactgtgtactaagggacttcaatgctgcagacatttttgggggcccttccccagatctgtgcctcgacacaaccctgtctcggaggtctacggacaattctttcgacctcatggcttggtttttgctctgacatgcactgtcaactgtgggaccttgtatagacaggtgtgtgcctctccaaatcatgtcaaatccattgaatgtacaacaggtggactccaatcaagttgtcaaaacatctcaaggatgatcaatggaaacaggatgcacctgagatcaattttgagtctcatagcaaagggtcagaataattatgtaaagaagtttagttttttttatacatttgnnnnnnnnnnnnnnnnnnnnnnnnnnnnncctgtccagctgtgccaatcaatggtgtgtagcattgatgaggaaaaacatgaattgaatccaatttcagaataaggctgtaacgtaacaaaatgtggaaaaagtcatgggtctgaatactttccgaatgctctgtatacccagatgaatcaagactatttaatagttaggaaactttttcaaaatgaaggcctctggctatggctctccgatggttttgtgtcatgtaactaatttgtctatttttgatcaaggggaaggatagccgaccacacagctgctcaccatcattccatctcaagtaccccttttgtggtaaaaatgggagctagcccagttnnnnnnnnnnnnnttgtctcataactcaataaattactgggttttgagtttggggcgtattagc

SEQ ID NO: 11765 - DNA, 578 bp, Homo Sapiens
tcgagccgggtaccctcttaacgccccaaactcaaaaacagacatcacattaaacagatactcatggtccactctatcaaaagccttctcttggtctaaagagaccagtccaaagttcacatttgaacctctcgaacagtccaacatgtacctgattaagaacaagttgtccttgattgagcgtcccggtacacaatatgtttggtccccgtgtactgtagagtccagatgggacttcagtctgttagagaggcctttggcaaatatcttgtagtccgcacagagcaatgccacaggcctccagttcttaagttcacacaagtccccttttttaggcaggagagtcagagccgaccgacggcagctcatcggtattcacgcaacacgcaaaagaagtccagtccaattattcacccaattttttattaactccactgggagtccatcgacccccggtgtacggctgggccacatctgggttacggcctttgccagttcatgggacagcagaggaatgcccatttcataactctgtgccagagagtttgggcgtaagaaagatcatgtagagtcaccca

SEQ ID NO: 11766 - DNA, 458 bp, Homo Sapiens
agataggtgtgaagcttctcgtagtagctatagaagtagttggtgacagcaaagatggggatgatgttgtgcttggcgagcaggcgcaccagggtgggcaccgacgggtagtcctgtgtcctgtactgggtgtaggtgcccgtggtgtccaggtggcaccgttcatcgttgcggctcatgatgccagccagcacgttggcgccatcagcctcatagtggaaggctgactcggtggagaagaccagcaggtgggtgctgtccgggcgccagccaatgtccctcgtgcacacagctgtctgcaggatggcatcgaagccgccctcaggagcatccaggttgcctgagatccgctctccctgcagtttattccggaactcatccacatcttctgtcaggctgatgacgttcttgaaggagaagggggggtcactgttgggccagggctccttcagcttctc

SEQ ID NO: 11767 - DNA, 506 bp, Homo Sapiens
gtcctagcaggatgctttgagccttctcattccgaggtctgcgtatgcatccctgtcgtgtctccctcgaggggtccttccccagcctgtgggggcctgggtctgttctgagctgattcccttttctccagttctctgctgggatgaagaaagttggacactcagtgggaccagctgcaggtggtttcactgtgtacacagcagtgtccccatcatgcctctcaatggggcctgcaagcctgggaacttgggcatcgttgggccagcaggatgagcagcaaagggtctgaggacagggtggcatgtctgcttgtgtgctcatgaagacatgcccacgccatggagccaggggcttacagagaggggcagtgacttccagagtcccatccgtcagtgaggggactgggctgcgggatgggtgaggatcttacagctcccaggttcggaaatctaccctctaggcctggaggcctctctcgcagagcatggaaggcaggagaggtggg

SEQ ID NO: 11768 - DNA, 486 bp, Homo Sapiens
gtggattcagcgagggtttttagtgtttgtgcctgtgtccccgtgtgcctgtttcctggtgaggctggatgcctggcatgtctgaacactcacattccccaggcatgcatgtgcagccgccgccgccacccatgtactgtggcgctgacccctcctgtaacagctgtggtcttggcctctcgtgttggtggcagatgtcccatttcccagttactttctgttgtccaaaagtttaactgtcctgccagccaaagctgctgagcattactctgatagaccatcagtccttggtaagtgtcctgtgcatctgggataagcatccgtttgttttcagctgcgctttctgtgacttgctctgcgtgagtcctcggtccacgtgggccgttgcgctggttcccagcctgcccgacacactcactgcgacgcctcccttgcctactgcttgctggcttctgtgttctctgcagtaaacattgatttctgaaa

SEQ ID NO: 11769 - DNA, 451 bp, Homo Sapiens
gaatttgcagggcagaataacaaaaggagggaactgcccactaagagtttcaggtatctgccttggaatcccctcatgttttcggctaactgttaagcagtgtgtacgctgactgagactttatgattcaagctaagaactactagggggctgtaagctgacaactcccaaaggtttaaaacagctgggagacgttcacattctgacaagtcagaggggaaagactttgtgaacacccagggtattcacttagacctcagagaagctatgccttagcagtggggctgtataccttacccaacaaacctttgaaaacaagtcttgaatggatcaagctgatccgccaatgaattaactgccgcaaaatgttttgcaggcagaccagaaaataaaagaaatccagacaacattcaaaagcccagaatccagttaaaaaataaatagttattaa

SEQ ID NO: 11770 - DNA, 215 bp, Homo Sapiens
ttaaatagcgtttttgaactgtctttaactacataatatgggatggcacaataacgttaatatgagagtgtgcgtagccaacccttctcccacgaaagggaagacctttgtggtcagagatttttctgccctgctcctcacttctagagagaaagaaatatccacatgagaaaaaaaggaattatctttgtaataaagagctgagataggcaatg

SEQ ID NO: 11771 - DNA, 545 bp, Homo Sapiens
aggggagaaacctttgaagttccagaaattgtgccatttcgcctgactcataatatggttaatggaatgggtcctatggaacagagggtctttttcgaagagcatgtgaagttacaatgaggctgatgcgtgatcagcgagagcctttaatgagtgtcttaaagacttttctacatgatcctcttgtggaatggagtaaaccagtgaaagggcattccaaagcgccactgaatgaaactggagaagttgtcaatgaaaaggccaagacccatgttcttgacattgagcagcgactacaaggtgtaatcaagactcgaaatagagtgacaggactgccgttatctattgaaggacatgtgcattaccttatacaagaagctactgatgaaaacttactatgccagatgtatcttggttggactccatatatgtgaaatgaaattatgtaaaagaatatgttaataatctaaaagtaatgcatttggtatgaatctgtggttgtatctgttcaattctaaagtacaacataaatttacgttctcagc

SEQ ID NO: 11772 - DNA, 448 bp, Homo Sapiens
ttggaggctggtgtggccttgaggagggaagcctcgcatggccgctggaagagaggcgcctcctggcctggctctgcagaacccaggggcacgctctgggcctgggctgaggaagtcccgctctccccgcggctctgagttggactgaggacaggtgtgggcgccagtgtgggtgcaggcgcaggtgcaggcacagggccactgtcctccaggcaggctttttggtgctaggccctgggactggaagtcgcccagcccgtatttatgtaaaggtatttatgggccactgcacatgcccgctgcagccctgggatcagctggaagctgcctgtcatctcctgcccaatccccagaaaccctgattcaggtctgcaggctcctgcgggctcaccaggctgctggctccggtaccatgtaaacctaggaaggtaaaggagcaggcaacctc

SEQ ID NO: 11773 - DNA, 572 bp, Homo Sapiens
  misc_feature (510)..(510): n is a, c, g, or t
ttttgtaagtcagatgttcatttattaaatacaagttttgaacaaacactgccaggcaagtttgacaagaagtaaccttcctggaatgtttcaaaatacagtcgcgttgatcaagttttatttcaatcaaccttttcattttctgtttctaggttcatttcctgttgagcagttagagcatgtgcattatttcctcacatgacatcaacagtgcagcatcagcctctggcatgtaaaggcacccagtagacttatgctctgtgcaatggctgcttagcaaccaccatcaaataaagtaatgaagcttttgtagagtgtgatatcaaatagcaactggcaccttcacttgcaccattaaaaaacctttaacatttccttcagttttcacatatccattaaaaagtatattaaaaaacaaaacccagactgcttgataaaacatacttaaacaattttccaagtttagtattagcctcttggtaagttatgagcaataccagagctgagtanaagagtcttcattttgctatcatactccagcaaagccaatacacaaaactaggtatgttaga

SEQ ID NO: 11774 - DNA, 190 bp, Homo Sapiens
gctgatgagggtctcgtggagcatttggagttgctccagaagaagcagaatgtgcttcgaagtgaaaaggagacgcggaatatactcattgagtcagatctgaacagcaagattcagagtgggttctttaagaacaaagagaagatgctctatgaggaggagacacctaagtcccaagaaatggaggaag

SEQ ID NO: 11775 - DNA, 526 bp, Homo Sapiens
  misc_feature (103)..(103): n is a, c, g, or t
tcatgggaagctgggagcggggagacctgggtttgaagtgttgaagttttgtatactttttcatttgtttatttctctattccctccttctcataactgccancccctcaggacttaagttctccataatgggcagtaccttctcaataatttatacctacgtgatagcgtgagaaagtctatttgcattttcaacattttcttaggaagaaccgaaaagcaattcccatttttatttttaataagcaaaagcataaatcttagaaaacctatgaaaaagaaatacttttatgttatccctaatcgtcccactaaatggaatgcctatgattagcttcattaagagttttatactgtgaagattttattagaagcaatatatgaaaattacttggattaatgtgttaatcttcctctttaaaatgctaatatccattttatgcacattaaagctcagtatgcattttctttgatgcatgcagtttctatcaattaaatataaagaatgaaacttagcaccaactta

SEQ ID NO: 11776 - DNA, 385 bp, Homo Sapiens
ctcatttgccataaaaatcaagatatagatgttctgttccgtaaactccttgaaaaacattttaaagtcatcaatatgatctgtttcccatgaaacttaagttagctttcttattggagttatttcttttctgtaagtctgaaaagtagagattttgttttacgcattttagtaacctgcaacaaccaactctaaaaaagatttggcttgtaatgacggtctctgcttttttgggtttggagtacacaattgtaatatttacttagttatttgtgtttttctttgttcaaggtattgactagtttcataaattttttgaaagtttttctttcattggttggaaagcagattacattttgcactattaaaataagtttattacttt

SEQ ID NO: 11777 - DNA, 470 bp, Homo Sapiens
ctttaaaaaatatatatatttatttaaaatacatcaaaatgacaaacagccatatcccacaaggcctaatttcacagcaacatatgctacagacatcttcccaaaatgcactatggtggatagtgggttttttatcctgccatttaaaggaatgttctacatttgagcattagtgactggaaatgtgttacaaagagcttatctttggaactaatttgcgtgcaagaccagccaattaaatcgctttgcctattcagacacacaagaatactgaaaatggcagaattcaaagaggaacacaggaagcaccattcagatgacactctagacccatcccaccacaatgccatgacgagcttgccagaagccctttcttcagtccttgggaagagttttgctttaaaacaagtgcccacgctcagcagggttcctgcatgtgtacgttaaaagtctgcagtatcaagaggacc

SEQ ID NO: 11778 - DNA, 1160 bp, Homo Sapiens
agcggccgcagaagctgcggttgaagccgtgggcgcagatgtcaggcactgccggtgccgtcgtgccgtggtacagcacctgctccaccgggcgccgctcgcatcgctgcagcaggcgctcccggtacagctcatactgctgctgcagcagcgggtgcgacacgcgctccacacgaacgacgcggatgctgctgcgggcagcgtccagggtgtcgtagaaggcccgcaccacctcctggaactccccggtgttctctgccagacgctccaggttgttccagggccccttcagcgtctgccccgccaaggtagggcctgaagctgccaagggaaaggccaaactctgatcccaggggccagccagaagtgccaccaagtggcgggcagcacgggcagggtgggccccgaagccacggaggatggtgcagtcaccacgcagggcaacactcacaccatggcaccgctccaggcgagcacgcagctctgcaggcagtgtgcggcgccagggccccaccgtctcctcctggacgtggacctccaaggcagccctgagcgcccggtccagctcctccacatcctgctcaaaggccgagtgcaccaccagctgggccttgccatcagtccccccatctgggggctcttctgcctccaacgggggctgctccagcagggagagggttagggcttgccgcagggcagcagcctcctcctgctcagccacctgaccttgaggctccagtgaccggtggagggccagctgcagagcggcctcctcctccagccacctgggtgccacagtgctgggggccacaggctcctcctcctcatgccctggggtcacctcctcctctggctgctcctgaggcccttcctcctccagctcccgaggcagccagtcctccccgtctaggtctaggccctccagggtggccagcagttctcggacctcctccaggctcacgtcctcctggtcaccacctgtactgtctggggtccacagggtgtgggcgttgccagggagcactgggagggcctcggtagggtccacctcttcaaggcctgtgtccaacgtggctgtggccaggcgctctcgtcccaaagacacactggaactgagcctccagccccggagaaggtgctcccttcgatcccgggaatcc

SEQ ID NO: 11779 - DNA, 414 bp, Homo Sapiens
gcaaatgggattaaggactcatggaatgggaaggggaaggggagtcttactatatgtggaataaacttgctcagtgttgccacagagttacattaccaatgtgtagaagtcagaaactagacttctagtttggttcaacatttgagggttgttttatagccatcaaagtattcaagaggttggatggcactcaaaagattctacatgtctagaatcaaactcaaatctggcacgtaggtgcttcttagtaaatgcttaatgaatgccaccaactctgcaaagtattcattgattttgagaccttagtcatgttgctactaaaagtagggcatatgaccgcctaagaaacagaacttcgagaagtcctaacgtaaccacagtaaagcagactcccctttcagcaacctcaaagca

SEQ ID NO: 11780 - DNA, 459 bp, Homo Sapiens
ctccactgtcagatcctttgccagtcaaatcccagatccccgggggggcactgtggcaccctctttgagcgtggcctccctggagctgctgtcagagccatgggctgtgggagtgagtgtgcacactccttctcctgaagtgtctgccccagcctgagctatgcagaccggagctctcaaccagggtatggggctgtctggcagggtttcccagaaccctgtttcctgtggtcataaatatgggttttcctgacaatgttgggaggtcagggactgatacagctggggttccaaccgccgtgggtcagacctggctcctccggaccccactgctgtgaccaaggaaatctcaccagctgtgtccaagatcaaccctgaccctgttactccaatgcctttgtaggagtatttttagcagaaccgtttttttcccaaaataaatgtgaattgtaaaaatta

SEQ ID NO: 11781 - DNA, 410 bp, Homo Sapiens
actaagtgacaactaatcttaggcttggaggatagctgtgctgacattctacctggtgatctctctagtgatttagaagtctgcacagatgggacagggagagagcactcttaattagcataggagatgtaggaattcaagcagaacctgtataaaatgctggaatccccagttttatgtgatgaaggagagaatctcttcagttttcaagattttttaattgaaagtttttaaacacaaaaatcacataaaacttgattcttgaaacatagcatcttcacatatagacttaaactaccaggtaagtatttgtcattcactggttttcaccagaagatgaatttgtatcataaaaagttatcaacatgggccgggtacagtggtttatgcctgtaatcctggcagacttt

SEQ ID NO: 11782 - DNA, 647 bp, Homo Sapiens
cagcccccgcaagacgggcagcccccagcacagagagtctcgtaagggagagggatgaccccattggcccttctctgtcttgtgcttctcctgtattggggtttgtcctctggaagcctgcgtcctcttcaagtcgccttgtgagagcccccacccctgtgaccctgaggggcaagatcacgcttggaggtatcagagtgaacactccctggtccctccgttggggatgtcactgaagagggggtcacagcctcttgccagctgccatttgccctcatttcccgtgggctgtacatctggcctcccccgaggttatccccatagccccctggccccatcgagtgtcggagtgattccacctgggaagcagaataggaatctccgttgagcccaggcatccccagaaacatgtctccagatcctgagagattgaaagagccgccagagcctgcagaggaagggggtgtcggggagctggtgcggctgtggcccccctgggtgactgacacggcggtcttgacagcatagatgtttgcctcctcttggaactttccgatgtttttcttatagcgaatcctcttgttgccaaaccagtggagacctgagacacggtgatgccacacttctcagctgctcaccttcggaca

SEQ ID NO: 11783 - DNA, 662 bp, Homo Sapiens
aaggcttgaaaaggggggacctcaggtttcctggagattcctgcagtggaactccatgccccgcctcccaacggacctggacgtagagggcccttggttccgccattatgatttcagacagagctgctgggtccgtgccatatcccaggaggaccagctggccccctgctggcaggctgaacaccctgcggagcgggtgagatcggctttcgctgcacccagcactgattccgaccagggcacccccttcagagctagggacgaacagccgtgtgctcccacctcagggccttgcctctgcggcctccacttggaaagttctcagttccctccaggcttctagaagcatctgggccagggctcatggctggataatttccctaggcttaacaacccaagcaagcttcgcatcctcgttttatttttggttaaacttatgaaaatgtattaagaaagagtgcagctcgagagagattcagagatggaacacaccagaccccagatcacaaagccaaccatgcccagcccctcccagcacccccagccccacgaccatcgttttgaattctgacgacaccgtgaccctgcctttgtacttcaaactcatggaaggataaccaccttcatgttttgaaataaatgtttcctgttgaaatgaaaaa

SEQ ID NO: 11784 - DNA, 690 bp, Homo Sapiens
  misc_feature (350)..(350): n is a, c, g, or t
gagtgctttccatccacaatcctctgataaggcctctattaattcaagattcaccttttcaaaatccatgatggacattgttttgatgactgacttgctaacccctttatagcgggccaggagctgcttaaaatctaactgttgatctggcactgcatctttgacagaatcctgatcctggaggtgaagggagagccttaggtcttcttccacttcttcaaatgcagttctgttccgccttgctttaagcttttcctttgaaatctgtttcatggaccgcatatatgggctcccatcctgtaatacataccttgtcacagcaattgcatcttccaaaaaaaattgatcancaggaaatgtacgacctggtatagtaataacggggcaggaattaaaatagtctgaaaaaagctcagcgtttagagttgcactcattaaaataacttgaagacctggcctctgcgatacaatgtccttcaaaactagcagcaagaagtcactttcttctgtcctctcatgaacttcatcaacaatgatatgggaaactccttgtagagctgtatctccttctagccttctcagcaggactcccgtggtgcagtataacagtctggtggctgaggacttgacactttctaaccgaatctggtatcccacggtcagacccaccctctctgctctttctttagc

SEQ ID NO: 11785 - DNA, 467 bp, Homo Sapiens
ccgttttagcacgtggtagcagttgatacagcctctgtcgtgtcaggcattactgaagttacagttggcctaagagaaaaatccacctctgtggctggtccttctttcaccactacattagtaacagtcaatggcatatacccagttaaaactactgtaaggttgtaagttccaggaacaagtaatcggtagaaatcaccaaatctgcctgttgtgatattatgattaataccagccactgagatggttgcattctctaacccagatcctgttatggaatctttaacaaatcctttcactccaatgtgaaccttttcaatcaatgtgatcaaagactcacgattgttctcccattcctgtcgaagctgtgaagcaggtgggtacttgcaacaagacagttctaatgtgatctcaaaacagttggcccacacataattgtaatcttgcataccaccttccacatcata

SEQ ID NO: 11786 - DNA, 167 bp, Homo Sapiens
gaaatgtccattataggtagctattgagaaaaagataaattgtatagtgtgtgtactaacatgaagagattacaaagacattgttgagtagaaaaggcaggttgcagaactggacacaggacaaggagtaccttcaaaacattatatggccaggcacggtggcttat

SEQ ID NO: 11787 - DNA, 452 bp, Homo Sapiens
tgttttcaccgtggtacagtaaaatctcaaagccaagatacaagtgtggtgggttctatttaggggttatctattctcatgagaaattgagagctgacaatttgagagtagcacagttatcccaggccagaaaggaagaccacactaagtactcagttcccatttttcacagtcttcattccaaatccttgattatagaggactgatagaaatctttacagaagctcttgggaatgacttagaaaggtggcagagagagtgagctatgttcccacgaatttcaggactatccagggtcccaaagagtatatacattttatcactggctaccttgagaaatgacagtaccttggacaaaaacactacttgcaattcctttctaagagcaggagctagcaaacaagtgcttaaggacagggttcaagggtactaagtaacatggaaatattcga

SEQ ID NO: 11788 - DNA, 464 bp, Homo Sapiens
atagcaccgtggtaacagtagtcatgatatcagcatttgtttgtttgcaccagttcttcaagccctgattctcacagagcgacttgcagaaggccagttgtgcacacacagtgggttgcattgcaggaaaggaaccctgaatataaggtacccgaatctcttatactggactgcaagcatgcctgctttttgttcttaagggagatgctgtctctgtcttccaagtctgtaagcatacctgccctttgctctggaggaagacactattctctaagtctattcactataaaaatatccttgtaatgatagtccagaacaaagatagtcattgcctctgcttaaatcatgtacagaattgcaagagacccacggagaattatctaccaacaatatgcatcatagaaatttagaaaacagaagaaaagtcactacagtcctaccacggtgctataacgggggatcct

SEQ ID NO: 11789 - DNA, 696 bp, Homo Sapiens
caagggggtcataaaacccaggagagatgtgtccctaaacaggaacgagacataccagttggccatggagcaccaagccgtccctacatcatatgcagtgtcgcctcgatatgttgagatccgaacattagaaccgaggcttctggtccaaagcattgaattgcaaaggccccgtatcattacctcaggaggatcaaacattatctatgtggccagcaatcattttgtatggagactcatccctgtccccatggcaacccaaatccaacaacttctccaggacaagcagtttgaattggctctgcagcgcgcagaaatgaaagatgattctgacagggaaaagcagcaacaaattcatcacatcaagaacttgtatgccttcaacctcttctgccagaagcgttttgatgagtccatgcaggtctttgctaaacttggcacagagtcccacccatgtgatgggcctgtaccctgacctgctgcccacagactacagtaagcaggtgcagtatcccaaccccttgcctgtgctctccggggctggattggagaaggctcacgtagctctgattgactacctgacactagaaacgaagtcaagtggtataagaagctgaatgactctgatcatcccagtctagcacctctccgctcatggtaggcacttccaccatcaagcctagaagtagctgcact

SEQ ID NO: 11790 - DNA, 482 bp, Homo Sapiens
  misc_feature (399)..(416): n is a, c, g, or t
agcacgtggtatttacaggttatgtagtgataaattaaacacatgtgacaaacataaccagcacacactagttagggagcaaatatactgcctcttgtcaggaatacaacttgactggtgagacacttgagtgcattacagagtagagtttgcagaaatgcttgaacatattacagaatagagtttaggaaaaggaggatatctgctccaattaatcagtcaagtgaaggttaaggttaagagagcttccacattaagctgtgtatgcagaagacaaaaatacacaaagataaacaacaaacctggaattggaatggggaaataaaataagatttgattactttttaaaatacaattgtatgttgctaacttccaacaagcatgtattattagatttannnnnnnnnnnnnnnnnngggaaacgggtcctggccctttctccaaggctaaggtatagaatggggataatagtccccggggcc

SEQ ID NO: 11791 - DNA, 402 bp, Homo Sapiens
  misc_feature (326)..(350): n is a, c, g, or t
agcagcagttctacaccatcacctattcctaatacagttgcagtaacagctgtggtgtcctctacaccatctgtggtcatgtcaacagtagcacaaggtgtaagctgttcagatgaagatgaaaaacccagaaaacgaaggcgaacaaactcttccagctcctctcctgttgttctaaaggaagttccaaaggccgttgttccagtctcaaagacgatcactgtgcctgtgagtggtagtcccaagatgagcaacatcatgcagagcattgccaactccttaccaccccacatgtctcctgtaaaaataaccttcactaaaccatnnnnnnnnnnnnnnnnnnnnnnnnngaaggttattatagtcaccaatcaccaagctcaacccttcgtgcccaacagg

SEQ ID NO: 11792 - DNA, 794 bp, Homo Sapiens
gtgtaggatgtgggtaggctatacagatttatgctgtggtcccttacgtggcttaatgtgtgccctgtgctgcgggacatttgcttacgcatgcactggaacctgcagattgaggaagaaagcttgtgggaaactaccattcttcagcatgacatgcttacgtttagggatatcgacatgctacaccaagcagtgtacacagtgccactctctttctcctcacatccttgtctggtggaaggaataggaaatataataccataaacttgaataattcatacttctgtaattggggcagagttgagtcagaggatggaaaagaactcttattacttctaagaatagcacctattacagactccttcacccccccgccccaatctctatagtttgaagattaaacttgtatgtgccaatggatgttttccctcattcatgtaccattggtcttggcttttattaatcccatttctctgctcagttgaattgcagtcttactgtacaggcatgatttttgtaacttaagcagtttcccctttctattttgtaattaagagaaataagatcatgtgcgtgaaagagttctgtgaaaggtggtgctatctgtgtgtaggttgttttcatttgtaatcttcattaaaaattacttggcttctgaagcactttcagttataaaaagctgccaagtaacagagttgtgtgtgtatgagactcttcatatgttttccttttgacagtaggaaaccattcagcctgacgattcagctgcctggaaataatacccggtgctaaac

SEQ ID NO: 11793 - DNA, 459 bp, Homo Sapiens
taaccatatgtaaagagaaggagaagaattatttatcccagatttatagatgagactttatctgctcagtgtaagatcaaaaaactggaaattgggagaagtggaactcattcagaaagcctcatgatgtcctggtagcttgctgacatcggagctcaagatccctaaaataattactttaatcttttgggtataaacttgtgtgcttataatgttcagaatatctatgttcatataatatgctcttttgaagtggtataattaaattagtaagagtgcaatcactggagctagactacttgggttcaaatcctggttccgctattcgctaacaattataaccttagagaaatgacttaacctctctgtgattcagtttatgccactgtaaaatgggaggaaaaattaaatgagttgataacgtaaagtactacttaatccataccacgtgctataacg

SEQ ID NO: 11794 - DNA, 491 bp, Homo Sapiens
  misc_feature (62)..(233): n is a, c, g, or t
aaagaaatgcaggaaacctatttaaaagtaacagaaacagctgggtgcattggctcatgctnnnnnnnnnnnnnnnnnnnnnnnnnnnnnnnnnnnnnnnnnnnnnnnnnnnnnnnnnnnnnnnnnnnnnnnnnnnnnnnnnnnnnnnnnnnnnnnnnnnnnnnnnnnnnnnnnnnnnnnnnnnnnnnnnnnnnnnnnnnnnnnnnnnnnnnnnnnnnnnnnnnnnnnnnnnntgcttgagcccaggagttttaggctgcggtgagctatgatcgtgccactgcacaaaaccaagaatttagaaaaaggaatccacataattggaaattgagtattaagtttttgcttcctaggaaggtagtctaaatccttatacaaaaacttagctatgcagtgccaaggttggattgcttgtgaatgggtttgcatgctctgtaacctatcagttattctgaatcaagacttgaatatttaaacatacttggaaaaaa

SEQ ID NO: 11795 - DNA, 252 bp, Homo Sapiens
caatgtaaaactagtattccgtttaatatgcttcatcaaaaataaagtatctgtgcatttaaacatgtaaaagtatataaatacacagctgttttatagtcataatcatacaattggtacaatttggtttccttttttactggatatttcaaacattttacaaagctttcaaaattatcactccacatggctcattcttaagtgagatataccacatcaaataagtaaatggttaaactgttttgaaaggag

SEQ ID NO: 11796 - DNA, 434 bp, Homo Sapiens
  misc_feature (146)..(185): n is a, c, g, or t
  misc_feature (211)..(263): n is a, c, g, or t
cccccaggcgtggtggcctgcacggaggggaccacttacgtctgctccgtctgcccagcaaagtttgaccaaatcgagcagttcaacgaccacatgaggatgcatgtgtctgacggataagtagtatctttctctctttcttatgnnnnnnnnnnnnnnnnnnnnnnnnnnnnnnnnnnnnnnnngctatggcactagaatttaagaaatnnnnnnnnnnnnnnnnnnnnnnnnnnnnnnnnnnnnnnnnnnnnnnnnnnnnnactacatgaagaactgttttttgcctgctggtacattacatttccggaggcttgggtgaataatagttttcccagtctccctcggatggtggccttaaggcctggtagtgcttcaagaggtccactggttggatctctagctactggcctctaaatacaacccttctttac

SEQ ID NO: 11797 - DNA, 393 bp, Homo Sapiens
cagtagtcatcctgacaggaaatggggaaggtgagcactaagataaagataagtatcatgaacagaaagaattaaatttttgtaacagaattgttagaactggtgagatataatgatgagggaaggagaggagtcgaacatgatcttgaggactctactcttggaggcttaaaggaatgtgttgtctgtaattgtcacagggaatcaggaaggaagagccagttagggtcaagcgttagaatatgttaagcttaataggctttgacactcagatgtgcccatcaagcagttaggaattggattattttgtttggaagaggtcagaactagtcaagagatttcatagtccttggtaaaaatatggtgtgaaaacactaaaagggatgagttcgt

SEQ ID NO: 11798 - DNA, 479 bp, Homo Sapiens
ctgctgttttctaggccaaaaatggtgagcgatcatttatttcatgattcaacctgatacatttacatagtgcaaaactgtgtcacagtttcaggcttttatgaggaaagcgtttctgtgtagaaactggaagctgttcagggcatcggcagctgaaccctgctccgttggtcagcgttactatcatctcggatcatatggagctcatgtcagccgtgtgggtggcgggtgcacagagacggtgtggaaggaaacacgcggatctgaacagcagtaatcctgggggatacgggggttgggctagattacagagggctcattttctacgtcatgtattttatgatacttgaattttttgaaatgggcatttattttataacatgttaaaatgtactttttaaattaagtcattttgtaatatttgaatttttacatttgttgtacaatcaggaaaagcaataaagatttttcaaaaatag

SEQ ID NO: 11799 - DNA, 364 bp, Homo Sapiens
gcttggttcacagtcctgtgggtacatggtggagtaaaataagtacaattaatttctcagagctgtgcacagcaacacacagaaggagagataactcacccagcttcagaggggtgggacagagaatgaggttagcctcccagatgtccttgtgctagttttagctgttttcaggtgttgataaaagctccaggagctggcaggaggagagcagaggaagctagagcttacaaagcacaaaggccatgacagcatgccagacgggtgaaagaggacaggggaaatgtaggcaagtgtctcttctcagaggatgttatatactatgtttaaaagtgttgatctgctgggcacagtggttcacgca

SEQ ID NO: 11800 - DNA, 380 bp, Homo Sapiens
tttgcactaacttttctactaagttgggcttttgtgctagaatttaggagatgctgaagatgttagttttattactgtctgattcatatgtataaatattatttacattgagtaattaagctgtattctaacagagaccagtgaactttctgttttactttttgttaaaacagacttctgattacaattaccagaattctaaagtatatctgtgcattttgaaatacagatgttaagatgctttaattagctctttatataattaatctaatgcttcctaatgaagaatagagtgacatcagaaatctcagatgtagaacagtcaccaaatcagtaataatatatttgatcctaaaatatggccgggtgctgtggctcgt

SEQ ID NO: 11801 - DNA, 416 bp, Homo Sapiens
gcagtatggagttggaaaggccatctgtgcttttgtgtcccagaaattcaactacaaaataaagagctgatcctctttccagatgcacttactttatagcagcaaagtcaaaataattaaaatagtaaaaggttattcccttccccatgtattttatacccttcctatatattaaggtattctgtaagtatttaatgatttaaactaagcttgtattctttgccttggtcatgaaacgattagaataaactccccccaaatagctcattgtctgtctagtctccaattatctctgtagagaaaagtactattgtaagtagcaaaaaatatttatgttttacttgagaaaccatatttattctttaatatgtgtgtttacacagaagcttgttctctgaataaaattgtgaaatgct

SEQ ID NO: 11802 - DNA, 1176 bp, Homo Sapiens
  misc_feature (1037)..(1085): n is a, c, g, or t
gagccacttctgctccgggacacggcatatggttaccgggccgccctgggtgcccgagctggctaccaggcttgccctggccataaaccgctggtcgggagagaaggaggagcagcagtgccaaacttggaccttcacctgcagcccgggggtcaagcaagcgcttcagcccctcaacaccctgggtgctcgcagcagagaagtgggccctgttgccagctatgaagcttgggcccctgcctgacggtgccgcagtcgggctggcactgcggaggagggcgaggcctgcccgctgctgggcagccagggcgctgggcgaaatagcgtcctcttcttcaccgtggactccgaggactcgccccttggcagcagcacccccatggcgtctcctgacctccttccagaggacgtgagggagcacctcgaaggcttgatgctctcgctcttcgagcagagtctgagctgccaggcccaggggggctgcagtagacccgccatggtcctcacagacccacacacccctacgaggaggagcagcggcagtcagtgcagtctgaccagggctacatctccaggagctccccgcagccccccgagggactcacggaaatggaggaagaggaggaagaggagcaggacccagggaagccggccctgccactctctcccgaggacctggagagcctgaggagcctccagcggcagctgcttttccgccagctgcagaagaactcgggctgggacacgatggggtcagagtcagaggggcccagtgcatgagggcggctccccagggaccgcccagatcccagctttgagagaggagtgtgtgtgcacgtattcatctgtgtgaacatgtctgcatgtgtatatgttcgtgtgtgaaatgtaggctttaaaatgtaaatgtctggattttaatcccaggcatccctcctaacttttctttgtgcagcggtctggttatcgtctatccccaggggaatccacacagcccgctcccaggagctaatggtagagcgtccttgaggctccannnnnnnnnnnnnnnnnnnnnnnnnnnnnnnnnnnnnnnnnnnnnnnnntgggataccaagataaattgcatgcggcatggccccagccatgaaggaacttaaccgctagtgccgaggacacattaaacgaacaggatgg

SEQ ID NO: 11803 - DNA, 491 bp, Homo Sapiens
atgccaccatcagaatcaattctgcaacacacccatgaaatcagtagatgctaggaagaatttctggcacattgaaaatctgaatgtgaaaacaagtaatagctgaaaggttatgagattctgctacagcagtggttaatagcatgccaatttattgcaaaaaggctcgtttttggtcacttacgtattgtggaaaatgcatgccattctgtttttcccagggagaacaattacataatgcaataacactggattagaacaagtacttacacaacagaaaatacacagagagcattttagttcacatgtacattcactaactacctaaaatcccttgtatttccagtatctaatgaaagaacatctatactaaaacactatcaaggttgacaagggaattgtagtctttggcctcatctctttatataaaaaatagtttattgattacaagtaccattaaaacatcaattctatcaacagtgtcaacgcga

SEQ ID NO: 11804 - DNA, 390 bp, Homo Sapiens
gcccgtttagcaccgtggtattccaacataactccacacatgcaccacgaaggctataaattccaaagctaatggaatttccaagcaaaggtgcaagcctgacactgcatgaggggccctcacgccagtgcctctacttacgtcaccctcagatctccacacaggcacacctcggccactagtctgtaccaggacacactaataacacagcacacagtaccacagcatgccaataatgcagcacccagtatcatggcacgctaattacacagcacccagtaccacggcacactaattacacagcacccagtaccacagcacaccaataacatagcactcagtaccacagcacgccaataacacagcacccagtaccacggtgctataacg

SEQ ID NO: 11805 - DNA, 505 bp, Homo Sapiens
tgcagtcaaaagtcttcagtaaaccaaaaatctctaattatcgttgttttatatcatgtgctatgacgatcagagactaaacagctctttcgttagaattctaattctgagaaatatcagaggaagtgttttaataccctccagtctcaacaggaatcgattatatcttataagatacattttgttattttgcttgtatcgtttctttcttctcctaacttgctccttctttgctctttgtatactttttaagatgtagttgacatgggggaggggaatgagtaaaacactagtaggatagaccaacaggttttgtcttctttaaagtgtaatttctccatgatcccccttccaccttttctgtctcctttactggattcgcctcttctcccctacatcttaatgttgggatgctacagacctcattccctactctttaatatttactttttggtgattcatatgtgttcacgatttacatacccggtgcaaaacggccaggtca

SEQ ID NO: 11806 - DNA, 460 bp, Homo Sapiens
cgtttagcaccgtggtactgtggatgtcttgcagaaagagccagggcccttcttgaagctatatgtggccaagaagtcagagaggctgaaggataatccaggcgaagatagagtagttataggcccacctgctgcctcacagtaacaacgttaatctgcacatctgtgacatcacagttgagctacaaaattactactgctttacctctgttgaacaaatttcacccaagactccctcctgtggtccacactaaccagaagtttacaaggaaggcagtcctaggaaatgagcagcctaaccaagttgacacattacaaagtcatcatgctctctaagacccttcaacctggatttcctgccagcaactcaatacatcccaaacagaattcttcaaaacctgcttctccttctgggtcaccctattttgttttttaacagtgccactttccttctatgctt

SEQ ID NO: 11807 - DNA, 377 bp, Homo Sapiens
cgttatagcaccgtggtacaagtcgtggtgttggctttgctaggacggaatcaacagaaaaatgtgaagctgttactggtcattttaatggaaaatttattaagacaccaccaggagtttctgcccccacagaacctttattgtgtaagttttctgatggaggacagaaaaagagacagaacccaaacaaatacatccctaatggaagaccatggcatagagaaggagaggtgagacttactggaatgacacttacttacgacccaactacagctgctatacaaaacggattttatccttcaccatacagtattgctacaaaccgaatgatcactcaaacttctattacaccctatatgtatcctcctgtatctgcc

SEQ ID NO: 11808 - DNA, 418 bp, Homo Sapiens
tggactgggacaacctcgggacccgtttatagcaccgtggtactggacatgttaagggtgaggtgtctaagtacacttccaaatagagacgtcaagcagacagttggacataaaagtctggagttcaggtaaagaagagtaacggaaatgaacacgtgagactcttaagggcacacacagaggttacagccattagaatgaatgagctttctttcccagggagtgaacagagacaaaaagtagacaagatatctgaggacttatccttaagaactccaaaattataaacatgtagagtctccacagcaactagcaaaagataaaatgaggagtgagatgtcccaaaagcaaaagaaagaaaatggttcaagaagatgagagaggtcaggtgcagtggttcatgcttgcacttccacca

SEQ ID NO: 11809 - DNA, 748 bp, Homo Sapiens
cccggacctgcagccgggtaacgagggctggcaggccctggacccaacgccccaggagaagagcgaagggacgaactgctgtggcccagttccagttcgtgccatcaaggagggcgacctgagcaccaagtacgatgcgccctttgtctttgcggaggtcaatgccgacgtggtagactggatccagcaggacgatgggtctgtgcacaaatccatcaaccgttccctgatcgttgggctgaagatcagcactaagagcgtgggccgagacgagcgggaggatatcacccacacctacaaatacccagaggggtcctcagaggagagggaggccttcacaagggcgaaccacctgaacaaactggccgagaaggaggagacagggatggccatgcggatccgtgtgggccagagcatgaacatgggcagtgactttgacgtcttagcccacatcaccaacaacaccgctgaggagtacgtctgccgcctcctgctctgtgcccgcaccgtcagctacaatgggatcttggggcccgagtgtggcaccaagtacctgctcaacctcaacctggagcctttctctggtaaagccctgtgttcctggagcatttgttgaccgccaactgacaacatgctaggtagtgacctaaccacttagcatgtgtgatttcaccccacagacacttacatggcgctgactctggggcaggccctgtcctaagcactttataaatatcaacccacttaa

SEQ ID NO: 11810 - DNA, 747 bp, Homo Sapiens
ttgggccaacgcaccgtgttgggccaacgcaccgtgttgggcctttttgcctatttcctgctgtgtgagatattcttctagtctttgcaggccttcctgggaagacagatcaacaaaacagcccagaaattcccagtattcaacccagggataccccagctcatgagctagctccctgtaagaaacacaacacaattataccagctgtacggtgcgatggccccacgttgggccaacgcaccgtgcaagctggaacagcaatgccagaagcagcaggagcaggctgacagcctggaacgcagcctcgaggctgagcgggcctcccgggctgagcgggacagtgctctggagactctgcagggccagttagaggagaaggcccaggagctagggcacagtcagagtgccttagcctcggcccaacgggagttggctgccttcctgcaccaaggtacaagaccacagcaaggctgaagatgagtggaaggcccaggtggcccggggccggcaagaggctgagaggaacaatagcctcatcagcagcttggaggaggaggtgtccatcctgaatcgcttttgttcctggagaaaggagggggagagcaaggagttgaagcggctggtgatggccgagtcagagaagagccagaagctggaggagaggctgcgcctgctgcaggcagagacagccagcaacaggtgccagagctgcagaacgcagctctgctctgggggaggaggtgcaga

SEQ ID NO: 11811 - DNA, 433 bp, Homo Sapiens
cggaggcgttgaatggccaagacctggggggtggcagtgaggccagaggagatggggtccacttatggatcgccggggctgagggtgtcgctgttaggatcgagaatcaggggtacggggccaatcacatctggatcgaggtcgaaactcgaagacatggggtcgggatcttggggttccgagcccggagcttcggcgtcggggtccagatcctccgagacgggctccagatcttcatagctggggtccgcgtcttccgggacagtgttgaggtcttcaggatcaggctctgggtcttcagaaaccgggtccagatcttcaggattggggtctaggtcctcggagtcagagtcgagctcttcataaacgggtctcaggcctttgtggcctgggttactgaccaggactgagcgccgcatttcaggcgtggatg

SEQ ID NO: 11812 - DNA, 407 bp, Homo Sapiens
tgacagggagctaggcagccgtgctccctccagtgcggacttgtctccctctgagggaggcaagaggctggcgatcagggatcttgttgcattgggagcaggggcggctctcctggtccccaggagagatgctttgaggagcattcctctagattgcacaagggacagtgcctttaaccaagcgaggagtccaaagctcaggacctgactaccctgagggcacgctgacgcctctccccagggggatggggagctttctgcacccccagtggcatctcctcatcacgttctgtgccgtccttgggaaaggcctgcattctgatccttccaggcccttcgagcatggaggggcactggggaaggtcccccgagggaggagcacgttgctgagtaaagaggtgttactc

SEQ ID NO: 11813 - DNA, 167 bp, Homo Sapiens
ccacgcgtccggcgacacctagctgaactatggtttggtgtctgatcttgagaggttgatgtaaccttttaaaggcctcacgttcgctcacctgtgaaatgggtctaagaatagccctgatctcacagggttgtgatgcagattaaaggagatggcatgtgtaatgt

SEQ ID NO: 11814 - DNA, 314 bp, Homo Sapiens
gaaactttagaacatggaaattgttaaaagctttgaattgcacatttagattgtggctattaggaatttttaaagttgtaattcccaaaataacaggtcacactaaccagtcttgtccatattcagggttgagtgtaaaaatgaaaggaatcacaaaactgaacttagacctgtggtttaaggattaaggtgttcactagaagtcactgttactaatacttgatgacaatgtaaagaaacattaaggattatatttgattgttttcaaagacactggctggatgtggtggctcacacttgtaattcctagcact

SEQ ID NO: 11815 - DNA, 507 bp, Homo Sapiens
tcaagtagttctgctatatttattcattcacacaacaaactgagagccacaatgtaccacgcacagtgataggatctagatacacaagtatttattttcctattcatttcttttcctcagaacagaacatgagattcacaagtgtgagggtgaggaaaggagatgtcaaaaacaaaaacctacaacaaagatcttacttactagtgaaacttaaaaatattaaagattagaaaaaagacaaggatgtacaccaataatacttcaatttaaccatgtgctacatatcatagccagtgaaaaaaattaaacaagaagtataaggactagaaagtaagaaataattgtgatcatatagacaagggaacatcattaataagggggtttaataagattgctagacacaaaataaactgcgacattttagggggaaaaacaaaattatactagcataaatactataaaatcataaatttccttttaatggagaaaatgaaaaactattactga

SEQ ID NO: 11816 - DNA, 454 bp, Homo Sapiens
cagagggccttgtactgggatgtgatgctggagaattatggaaatgtgacctccctagaatgggagaccatgaccgagaatgaggaggtgacatcaaagccaagtagtttctcaaagagcagactctcataaagggaacatcaaaaagacttcaagggaagtgttccccaggtccttgattttgaagaagagtgtgaatggcaagttttggcaagtcagtggggaaatgaaacagatgaaagggcagatacagtgaagaaagtttccctttgtgaacgagacaagaagaaaaggactccaccagagaaacaaggccaaaagtggaaggaattaggagacagcttgactttcggttcagctatttctgaaagtttaataggtactgaaggaaagaagttttataaatgtgatatgtgttgtaaacattttaataaaatctcccatcttataaacc

SEQ ID NO: 11817 - DNA, 652 bp, Homo Sapiens
aatggaggcataagagaaaataaatctattggaaacacgggatgaggataaaaagggaaatggataaaatatgtaaggactgcaagtaaactacaaacataatagcagaattaaacttcactgtagagatcaaattaaataaagacagtgacatagaatcccaaactgataagctttcccacaggaaaatcaaataagaaatcagaatattgtgaaagaagataatagatacagacaacagagaatggaaacccaaaataagctgtactcctgaaaaagaggacaaaataaatggaacacaaataataatcaaattaatatatggaaattttgtggagctgaaaacatacctgtatgcagatggcaagtgcctgatctaccccagtgaaagaagacatctatgcctaaataaatgttaagaaaactactaacttagttaaaagataaataaacatcttacaaatgtctagatacaactgacaaaaaagaaaacaagcaaataatgcatgaacgaaaataaggctggtgatattcttctcctattgtaagcctgaaagtcggaagacaatgaaacatgtctgctgagtattcagagcctttcacaaatgataagagagaaagagatcttcagtattcacctccctcccatgcg

SEQ ID NO: 11818 - DNA, 467 bp, Homo Sapiens
ccgaccatgttttatatattcgtcactgaattctagaactgaccactgtttctgacatataatagtggttctccttaacactaactttatgcttggaccaaatcaggtttcccgtcagtattatattctacagtatatctttcatagtaatactgtgttcaactttaaaagcttgttaattgtgatcatactcttactaggattatactaaaggttctacttgtgtttgtgaacatacatgacaaaaacacacatattaaaattatttgtttccgagttttatactatctaatgacacaactgtgtaagcatggtattttactgtttaaaattgtaaagtatcctgttaaactttacttttaaatttttcttaagacttcttaagttgcagtaactgtctatcagatgttgaccttaacaacatctcctgttaggtagaatgacaaaattaaaatggagcttagttg

SEQ ID NO: 11819 - DNA, 376 bp, Homo Sapiens
aaaagctaactgcataacatcacccatggctggagaatgtgaatatgtaatgagtccagtgcagagaacgctgggttcctgtttccatctactccaaggcagccacatccctcctcgtgctaccatggtattcagtgggcaacaggtattgctgcacgtgcacggtttactgccaacaccaaatctcactgtaaattcagactaaaaaaatacgaggaactctccactggttttttgttctgaatcaatataacggtgtaaaatagttaccagggtacccggcatatacaaagagtccttaatcgttcattacaataatcattactgttcagtggagactttgccatgcagaataaaatttactttgacagtaaaa

SEQ ID NO: 11820 - DNA, 629 bp, Homo Sapiens
gcttaaggatccccggaggcgttgaatggccaggagcagcagtctgggccgcgagtgcgggacaccgaggtcaggtctcggaaagggaggacctcctcgtccccaggggccccaggccaggtgcacccttggccgcaggtgcacggtctccggaaagtgcaggcgcccacgtcccagctgggccatggcgcctccgcggaacgtggtgaagattgccatcaagatgcgtgacgccatcccgcagctcatccagctggaccaggcgaagcccctggccgctgtgctgaaggaggtgtgcgacgcgtggagcctgacgcactctgagcgttacgccctgcagtttgcggatgggcaccggagatacatcaccgagaataaccgcgcggagatcaagaatggcagcatcctgtgcctcagcacggccccagaccttgaggctgagcagctcttgggtgggctgcagagtaacagtcctgaagggcgccgggaagccctgaggcgccttgttccgctggcctcggacatgatctttgccagggaggtcatcagccgtaatggctccagatactaggcaccatcattgaagatggggacgacctaggagaggtgctggccctcagcctgagggg

SEQ ID NO: 11821 - DNA, 896 bp, Homo Sapiens
  misc_feature (179)..(207): n is a, c, g, or t
agcggctgctcgtaagcggggaaagccggcctctggggccggggctggcgcgggggccggcaagcggcggcgaaaggccgactctgcgggggacaggtgcaaatccaagggtggcggcaagatgaatgaggagatctccagcgactctgagagcgagagcctagctccaaggaagcctnnnnnnnnnnnnnnnnnnnnnnnnnnnnnaactgcacaggaaaagaagctgcgcttggccaagctctacctagagcagctccgtcagcaagaggaggagaaggctgaggcccgtgcatttgaggaggaccaggtggcggggcgcctgaaggaggatgtgcttgagcagaggggcaggctgcagaagttggtggcaaaagagatccaggccccagcctcagctgacattcgcgttttacgggggcaccagctctctatcacatgtttggtcgtcacccccgatgactcagccatcttctctgctgccaaagactgcagcatcattaagtggagcgtggagagtggacggaagctgcatgtgattcctcgagccaagaagggtgccgagggaaagccccctggccacagcagccacgtcctctgcatggccatctcctccgacggcaagtaccttgcctctggtgaccgcagcaagctcattctcatttgggaggcccagagctgccagcacttgtacaccttcacaggacaccgggatgcagtgtcgggtctggcattccgcagaggcaaccaccagctctacagcacatcccacgattcgctccgtgaaggtgtggaatgtggcagagaactcctaagtggaggacgctcttcggacaccaggaacgctgtggctgcactggatgccttgagcgggaagtgctgtgtgacggcctggg

SEQ ID NO: 11822 - DNA, 353 bp, Homo Sapiens
tagatactgagggaccaacccccagatactgagggatggctgtcatgtcatgaggtgttcccacagtacccactgcgtggcatgcaactgacaacgttcttacttaatctggcacccagggccacccctactggagggatccttggtgccgatgaatagcgaggtgccgatgaatagcgatcgctattcatcggcaccacggctcagccccctggattcagcctttttcctaaggatatgtacagaggtcaaacctcccgctttgctggagttgcaactacttttgctgggaagtctggagagtccgagtatcaaagcttttctgggtctccacatgtgcctgagtggctgtt

SEQ ID NO: 11823 - DNA, 329 bp, Homo Sapiens
cccgagctctgagaagtatgtgtctccaaatttctgtatcacgttcctgtgccacgttttacctactccctggcacacagtctatttggctccaggtcagtctgtctagaacacatttgttcatgcctctctatagatgcaggcctgtagaggcaaatatgggtgtacaaatgcagatataggtctctctatagagatcagcagagctgcctagatacagaactacagatggagttcatgcgaaaagatggtcacttaacctacttcatttcataacacaagttaatactgaattggtaacgatcatatcaggtgccgatgaatagcga

SEQ ID NO: 11824 - DNA, 136 bp, Homo Sapiens
tcgctattcatcggcacccatgtactgctttgtatgacatctttcactcagcattgtttgtgagtcatcatgtttttaggatagcagtagtagttcattgattttcggtgcccgatgaatagcgagggatctctag

SEQ ID NO: 11825 - DNA, 429 bp, Homo Sapiens
ggtcctcgctatcatcggcaccacaggccagtaatatgggaacacaaacccctcaggacaagcccctctacaatgcctaatacaatcaaggaacgccccattcctaaccgtgcacctcacagaagcaggtccagggcctgctccgataccagggagcggctctgagagtcacatccccactctacccaacagtgcactcagcaggggctgccatggctcacaaccatccccaccaaggagaggccagggaggaccctggaggccagaggccaagttctctccacgtgcacatggggtgccagctcgggcaagtcccgcccaggctgaccgcccacctcccctccttacctaacaccctgtacatcccaccgttcccagctatctccctaattgaaaacaaaatactcaaatgggccgatgaatagcgag

SEQ ID NO: 11826 - DNA, 487 bp, Homo Sapiens
ttacaaccccacgatcacccccatgactgggtcaccccataggcagatcaggcctgtgcttgacgggggaggggaagatggaacaggaagagccccccggtgtttcgggaagggctggctttgcaccacacatcctgactcctggggactcccagcaccagccctgatgctggcaggatgtggatacgtcccagaaaatctgtgagcctctgctgtctcctcaccgtggctgactgtgtccttccactgcctgagcgtctccaggacttcctcaccaccctccttcagggtaaacttcaaaagatgggcccttgtttcctcctctgtaaaatggggataatagtgcctccctcatctgaggattataagagttaagtaaaaatgcatgcaaaatgtttagctgcactgcctggcccatagacaacactcagtaagcaatgattttcttactgtttattatgttgtcatcgtgatcgtggggttgtaa

SEQ ID NO: 11827 - DNA, 387 bp, Homo Sapiens
  misc_feature (60)..(76): n is a, c, g, or t
cacacccgtgcaaccacacacacacataaatacaaaagtacacccgtgcaatcagacatnnnnnnnnnnnnnnnnntaaatacaaagctacactcagacacataaacaccagatgccctcatgaacacactcaggtacacgtgtgtacctgcgtagaggcccctctgcttctggttccttccctgcatcaagtatgggaatactgcaagaggctgggtcatagaggtgggcaaagacggtcggctaacacaaaactgggccttgtcttaactctactctccaactgggaggaaaccccaagggggcgccgcaccccttgggcagaggagctgggcttgtgtgaaggagtggggcagacagtctgcctgggtgatcgtggggttgtaa

SEQ ID NO: 11828 - DNA, 233 bp, Homo Sapiens
cttccctccccttatcaagggttgaaggaagggagccatccttactgttcagagacagcaactccctcccgtaactcaggctgagaaggaaccagccagctcttacctcctcctggttgcttttcttgcccccaccccaagtttatttttgttttcccccggccccctacctctgaagccattttatgatctgtcatgtgccacctgagcctccagtaaaaacaaaaacaggc

SEQ ID NO: 11829 - DNA, 344 bp, Homo Sapiens
  misc_feature (72)..(72): n is a, c, g, or t
  misc_feature (80)..(80): n is a, c, g, or t
  misc_feature (96)..(96): n is a, c, g, or t
  misc_feature (181)..(182): n is a, c, g, or t
cagggttgagatcttgttcatctttgtgatgccagacagaattgcatttgccagaaactttttatgcctgtntcccaaanagttatagctatttgncctcatatgacatattccatgactctagtcttttttagtaactcattccagcaattcaaagccttagagccataaagaaatgctnntaaatggaaactcaaggagagaaaggcaaatactgtttcccatttattactctggcattcactccaaaactggctgaattattttacttcccactatggtcagcacccctccttgcattgaccatcatccaaattagagaggagcctgatctgaattttctc

SEQ ID NO: 11830 - DNA, 469 bp, Homo Sapiens
  misc_feature (220)..(220): n is a, c, g, or t
ggtgacattgggcaccttctggagacagaacagggctcccacacaccactccgggctgcaccctcctgctgtcttgccacaggggccctgtgccccacaagtggcccgtcctattgtggatcctcaaatttacatgcactgtttcagcataagcctcccattccactctggctttgttttctctttacatccctttgaaaggacagggatataaaaaaanatgggctaagagtaaccctactatgcccaggagtggctgctgcatgggggctggatttccttatctgagaggctgtctcacagcgctctgaacgaagctcctgccttagaacaattcgaagccatacacgtgtggcctgtgacaccaaggatctactgggcttttcccatggggctcagtagtgacctaggtgcccagatccctcttctaggcatccatgcaaataaaccgtggtctgtttgaaaggtt

SEQ ID NO: 11831 - DNA, 564 bp, Homo Sapiens
  misc_feature (412)..(420): n is a, c, g, or t
taacccacctttcttacccagtcttatataatgtgcctaccaaaaagcctagtcctagcccatctgcctcaactcctctcccttttaggttgtagggaagaggccggagtgtagagtatattatatcttctgtcccccttatgccaacaagatggccttcccctctgaaacaaagtaaaactgcaacactgtgacttcttaaatgagggatatgtgaaaaggctatgaaaaatacaaaggctttcctaggaaatgtgttataatgcagcgggaagctaattcttgaaatatgcacattatagttactcagtctcacatactctagttactggcaaagaagttactgagaatatgtcattcaaaggcataggggcctttgaatggaacaaatgctttcacatcatttaaagtnnnnnnnnncctccaacaactgtgaatttatagtttaagagtgatttacactgaatttcaaataaaaggactataaaacgtgttatttttctgtaagggctataacatacatgtcaatatcactgtttttaaataaaatatacttttatacag

SEQ ID NO: 11832 - DNA, 475 bp, Homo Sapiens
aaaggtatcgagggctccgcaaagacgaagatcactaaagagtgcgtggaggattacctggcaaggatcaccccagagggccagaggtaccaagccctgaaggcccacgcggaggagaagctgcagctggcaaacgaggagatcgcccaggtccggagcaaggcccaggcggaagcgttggccctccaggccagcctgaggaaggagcagatgcgcatccagtcgctggagaagacagtggagcagaagactaaagagaacgaggagctgaccaggatctgcgacgacctcatctccaagatggagaagatctgacctccacggagccgctgtccccgcccccctgctcccgtctgtctgtcctgtctgattctcttaggtgtcatgttcttttttctgtcttgtcttcaacttttttaaaaactagattgctttgaaaacatgactcaataaaagtttcctttcaatttaaaaa

SEQ ID NO: 11833 - DNA, 279 bp, Homo Sapiens
gcacatctttcattctttttatgtagtaaaaagtataaggccacacatggtttatttgaagtattttataatttaaaaaaatacagaagcaggaaaaccaattataagttcaagtgagggatgatggttgcttgaaccaaagggttgcatgtagtaagaaattgtgatttaagatatattttaaagttataagtagcaggatattctgatggagtttgactttggttttgggcccagggagtttcagatgcctttgagaaatgaatgaagtagagagaa

SEQ ID NO: 11834 - DNA, 897 bp, Homo Sapiens
  misc_feature (62)..(76): n is a, c, g, or t
  misc_feature (82)..(105): n is a, c, g, or t
tgcaggggccaggatcgcccccactgcactcaagctgccaatagaccgagactcggtctccnnnnnnnnnnnnnnntacaannnnnnnnnnnnnnnnnnnnnnnngtaagttaatgtatataaaaatggcttcggacaaaatatctctgagttctgtgtattttcagtcaaaactttaaacctgtagaatcaatttaagtgttggaaaaaatttgtctgaaacatttcataatttgtttccagcatgaggtatctaaggatttagaccagaggtctagattaatactctatttttacatttaaaccttttattataagtcttacataaaccatttttgttactctcttccacatgttactggataaattgtttagtggaaaataggctttttaatcatgaatatgatgacaatcagttatacagttataaaattaaaagtttgaaaagcaatattgtatatttttatctatataaaataactaaaatgtatctaagaataataaaatcacgttaaaccaaatacacgtttgtctgtattgttaagtgccaaacaaaggatacttagtgcactgctacattgtgggatttatttctagatgatgtgcacatctaaggatatggatgtgtctaattttagtcttttcctgtaccaggtttttcttacaatacctgaagacttaccagtattctagtgtattatgaagctttcaacattactatgcacaaactagtgtttttcgatgttactaaattttaggtaaatgctttcatggcttttttcttcaaaatgttactgcttacatatatcatgcatagatttttgcttaaagtatgatttataatatcctcattatcaaagttgtatacaataatatataataaaataacaaatatga

SEQ ID NO: 11835 - DNA, 444 bp, Homo Sapiens
ttacaaccccacgatcactctgccccagagcccctgcatgcatctgccctggggaagcacggcccccaacaactgatatacaacgccccagcagtctcccggcctcaggaggacctgcggtcaaagccgccaaaactgtgatagtagcacagcagagctgcctcgatttgtgggaatgcaaagggagcctgggctgctctgccaaagccaaaaccgcactgattttctaccaggcaccagctactccgaatgcacaaacacaccctccacttcccggagaggagacatctatgaagcctgtgtgggccctgcccgctgatgcccagggcagtgggatttggttttttgtccaggaaaggcatggatataaatcatggctgatggggtcggtggctgtgtgttggtttttgggctgccccacatccacccctgcctattggcccc

SEQ ID NO: 11836 - DNA, 436 bp, Homo Sapiens
cagatcacgcactcaagtgcagccggaatgagctttgcaaaatgcaatcagagcctgttgttcccctgctcagcaccctcctggggcctccccagtactcctggtaatccccaatcccaccatggtctcccaggcctgcagggtggtctcagccacccacaccagcccagacctcaccgacccttcctgcctagctccctcctcagggtccccacaggcccgtcgcgcctggagtccccctgagatgtgatcacttgtttcaacgtccaaacttctggacacccgacattccccaatgactgaggtccctgccccctccttcagggagcaccacgcctgtgccagtcctcccacagctctggcctaaatcagaccctccaaaggaggaggaggctactgcctccgtctgcctgtccctaagtctggcagcggcata

SEQ ID NO: 11837 - DNA, 661 bp, Homo Sapiens
aaaatgaactgcctggaataaaaaacttggtttcatttctaaaggcttattttagagatttacaaaagaaaatgaactgcctggaataaaagacttaattttgctcatgttgcctttccaaggaggattaattgaagtaacagaatcctgccttacgtatacctcttacatagaaacctcagtggccctccagtgtttgcccttaccctatcccctcaaatgccaccctgtacacgagccttccctcttgttgtctacagatacatgattataaacttggcaaatgcagtgaggaaaaaaactacctgagagtctaacggagagacctaatataattaagatttaaggaaggtgcctgtaaagaagcgatgtttgagtcaggatctaaaggatggaaaagtaggtgggcagctgaggactggagggaagaatgctcctgacaagaggacagcgtgtgtgagggcccagcagtgggaaagctaggctagtccaagatgttgaaagaaggcccatcctgatttatatcgggggctgtcccaaaatgaggcagcattcctttacagacgaatgtcttcgagaccatgttctgtatcctaagtgcactggagcccagtggagggtgatactagaggtggtaaaggggatcctttagatgtcgagc

SEQ ID NO: 11838 - DNA, 319 bp, Homo Sapiens
ggtcatttacgaagtcaagaaaagatgtaaaagtaaaatccttcagggacacacctgttaatatgaatcaccacctttctagcacaggggtattatgcgcatcttgctgcaacaatcaccaccggagacattaggatccctgaaacacctgcctcactcacttgtcatgtctgcagtgaatgcagaacagtgtctgattaccaagtacatccagcacacgcattggacatggatgttgaccgagttccacttggtgtgcctgaggcaggcaggaaattctcttggaaacagaatccttaaggtgatcgtggggttgtaa

SEQ ID NO: 11839 - DNA, 436 bp, Homo Sapiens
cagagaaagccacctcacgccacactgcagcccagaagcagaaaaccaaacagaaccaaacacacgtttcaaacagacaacttccctgaagtccagcaacacgttcaacaagcacccggagtattggcgaaaatgccctgtaacggccaacaccaagacacggcaatgacagtgagtcactgatgagatcgagaactcagacatcgccagacttctgcacacacacccaccctccagacagtgcccggtagggccctaaaaagcactgggggaaggaagtggagttaagactggcatcttcagccaaaccgaccttcatggtgaagggtccaggccgttttgaacaagcaagaactcgggaaggttgttcccatgagccagtcgtgaactagacacaaagcggacagcagggctgggcagcactttgcagaaggac

SEQ ID NO: 11840 - DNA, 438 bp, Homo Sapiens
  misc_feature (426)..(426): n is a, c, g, or t
ggccggtgacccaacaccatgaaggaaacgccactctcaaactgcgaacgccgcttcctactccgtgccatcgaagagaagaagcggctggatggcagacaaacctatgattataggaacatcaggatctcatttggaacagattacggatgctgcattgtggaacttggaaaaacaagagttcttggacaggtttcctgtgaacttgtgtctccaaaactcaatcgggcaacagaaggtattcttttttttaaccttgaactctctcagatggccgctccagctttcgaacctggcaggcagtcagatctcttggtgaagttgaatcgactcatggaaagatgtctaagaaattcgaagtgtatagacactgagtctctctgtgttgttgctggtgaaaaggtttggcaaatacgtgtagacctncatttattaaat

SEQ ID NO: 11841 - DNA, 458 bp, Homo Sapiens
actcggtccttataccccacgatcactgctcagctgagggagaagctcacggaggaagagggacttgagttttgctctgaaagcaggtctggggttgggggaagagggtactccaggaactgtgtcaagtgtgggtgactaagtggacatatgtgggtggaagcagaggtccctggagggagagaccttggcagaggtagggctgcagggagaagcacagagggccaactgccaatccccccaactgcagttcaatgtgtcagagctgagggtgaacacagggaaaggagcagggaagacaggagttggggtcccagggctgtggagctggagcagccaactctccctttgtaaacacacaccaggcacactcagacacagagatgcccctagagctccagtcacacagatttgcacacacacccagccagggtcagagacacacagaggcacacccg

SEQ ID NO: 11842 - DNA, 214 bp, Homo Sapiens
ttacaaccccacgatcacctggtagtgcatttcagagagaggagtatctgatatgtgtgtggaggcagccatcttttcctgaaagtccttttaggaatcattatttctggtcctctgaagtttgccgctaccactcataaatatctatccacaccccttacaagaagaataaggaagatcttaagacctagaaggaaaagatgggccgagctcg

SEQ ID NO: 11843 - DNA, 401 bp, Homo Sapiens
ttacaacccacgatcaccttccatatatggctgcatattaacaattttaatatttgctcagccattccaacacacaccaaaaaagttctcctagaagcagcaagaaatatttgatgtgttaactaccaagctgatgtatttagctttctcctataaacattaggtggtacacggtaatttgacaattggtacatctctcagaccacaaaactgaacacaaagcacgtgaattaaaaatgattctaccataatgaataataacaacgaaagttttgattagcacagaaccatttaaatgtgaaagccaaattagtgatgttgtagcaatcaatgcaagctggaaacaaagaacaactttttaatggattaagataaaaccaagactttttggttagatgcaa

SEQ ID NO: 11844 - DNA, 1080 bp, Homo Sapiens
  misc_feature (797)..(797): n is a, c, g, or t
cggtccggaattcccgggatccagcccggagccctggacccctggccacggggcctgctccacttccagtgctgccatcatggccactgccacctccagaaactgtgacaaactcaagtccttccacctgtccccccgaggaccacccacatctgagcccccacctgtgccagccaacaagcccaagttcctgaagatagctgaagaggaccccccaagggaggcagccatgcccggactctttgtgccccccgtggctccccggcctcctgcgctgaagctgccagtgcctgaggccatggcgcggcccgcagtcctgcccaggccagagaagccgcagctcccgcacctccagcgatcaccccccgatgggcagagtttcaggagcttctcctttgaaaagccccggcaaccctcacaggctgacactggcggggacgactcggacgaggactatgagaaggtgccactgcccaactcggtcttcgtcaacaccacggagtcctgcgaagtggaaaggttgttcaaggctacaagcccccggggagagccccaggatggactctactgcatccggaactcctctaccaagtcggggaaggtcctggttgtgtgggacgaaacctctaacaaagtgaggaactatcgcatttttgagaaggactctaagttctacctggagggcgaggtcctgtttgtgagtgtgggcagcatggtggagcactaccacacccacgtgctgcccagccaccagagcctgctgctgcggcacccctacggctacactggggcctagngtgatggcagtccatgtggctgccaggccaagggcagtcacaggggccctgacccccggccacacagacggacatggcccctccatggggaagggtgagcaaggagcacaggctgtgccttgcctaggggcctctgggatgggacatctccgaaggacccagccagtctctttccaccaggggtgggtttccaaggccctgaacccaagccgccaggcttcccccagggaccaaaaggggacccttggttgcccccccacataaacttttgcccctgggcccc

SEQ ID NO: 11845 - DNA, 623 bp, Homo Sapiens
cggcacgagttcactcctaacatgatctgtgctggaggagagaagggcatggatagctgtaaagggaacagtggtggggccttttgctgtacaggatcccaatgacaagaccaaattctacgcagctggcctggtgtcctgggggccccagtgtgggacctatgggctctacacacgggtaaagaactatgttgactggataatgaagactatgcaggaaaatagcaccccccgtgaggactaatccagatacatcccaccagcctctccaagggtggtgaccaatgcattaccttctgttccttatgatattctcattatttcatcatgactgaaagaagacacgagcgaatgatttaaatagaacttgattgttgagacgccttgctagaggtagagtttgatcatagaattgtgctggtcatacatttgtggtctgactccttggggtcctttccccggagtacctattgtagataacactatgggtggggcactcctttcttgcactattccacagggataccttaattctttgtttcctctttacctgttcaaaattccatttacttgatcattctcagtatccactgtctatgtacaataaaggatgtttataagca

SEQ ID NO: 11846 - DNA, 426 bp, Homo Sapiens
cccactttggccagtgaggtcgtagccttttaggtgcaagaagtgagggtgcagcgtgtcagacacaacattcatgttactcttacattggaatctgaaggtagttcagacttcgtgggttttgtttttaagcaaaacaatgtgaaaacatttaagtttgaaatgttgcatttgaagttatgatcatttaatatattcatattaccaagactattatactggaagtggtttttgtgttataaaggtttaattttacataaggcagttacttaatgtgatttttaacccttaaaaaagtggagatgtatacatttgttaacaatgccatgaaagcattttctttctcctaaggaaaagtgaatttcttatcagaatatctggctggccctgtaatttaaattaaaataaaattttggagaaacaaaa

SEQ ID NO: 11847 - DNA, 607 bp, Homo Sapiens
ccagctgttgagcttctcaattctatccctcctgatgaagtgatccctattggtgcagctatagaagcaggaattcttattgggaaagaaaacctgttggtggaagactctcttatgatagagtgttcagccagagatattttagttaagggtgtggacgaatcaggagccagtagattcacagtgctgtttccatcagggactcctttgccagctcgaagacaacacacattgcaagcccctggaagcatatcttcagtgtgccttgaactctatgagtctgatgggaagaactctgccaaagaggaaaccaagtttgcacaggttgtactccaggatttagataaaaaagaaaatggattacgtgatatattagctgttcttactatgaaaagggatggatctttacatgtgacatgcacagatcaagaaactggaaaatgtgaagcaatctctattgagatagcatcttagtgttttagagaaatcaagaatttttaaaaacaagaatatcaacatttggttttgtgtataagtggtgtttgtattaaaatactttttcaatgaactgtataaactatgttttatttaactcccatatatcagt

SEQ ID NO: 11848 - DNA, 362 bp, Homo Sapiens
attggtgtgagacaccatgcttgttcaactgctccctttttactgacttctttccatttattctgccagttaaatttctcaagacataaagcagcttatttactgaatttgatttatgttactgggtaatggaatgagaaggacttcaggtaatggacattagttcgtaactctcaaaattcggttactttttatggagggctttgttgccttaaggtgtcagtttctttccttgtgcatttttctgtattgatacaattaaaccatcttcatgtaagtaatctaatcaactcaattatctcagatttctcttcctccacggtaatgtgtatggataacatagggtccgcgctcgattcgtt

SEQ ID NO: 11849 - DNA, 560 bp, Homo Sapiens
tctttgtgtataaacaatgttaaatacaggtagactcagtctttaagatattagacagtttttttagtccatgggattgtacatataaacattaactttcctataagaatattttggctttgtaatctatagcctcaaattggtatttattatggattcactagacaaacagctgtttccttattgtcttttttctttagtgtttctgatttgctatcagtagctgtttttaaagccgtccaaggaaaataattatttacagtttttgaagtcacttttgagccctcatcaagctctcattgtgatgggagggatacctttttgttgttaaaagcctattattgttaaaggccttttatggaaaccaacttggaaaacaaccttaaatgtggatgtatcagatttggtttatccagccatgggagagaaaacaaacctaagtttactttacttgtacatatacactacaatggatagtatatttgctgtaaactacaatgtaaaacctcaataaaagtgcgctgtacttcttaatgtttattaaaagatgtatttttaca

SEQ ID NO: 11850 - DNA, 984 bp, Homo Sapiens
  misc_feature (923)..(940): n is a, c, g, or t
ggtgtgccgtgggctttggccttcttgccaagtacgtgcggtgggaattgtcgcggggcgcctgtttgtgccgctgacgagggattcgtaccccttttatgtctatttgtgtgtgcttttgtagtatggcttttgtggggttcgttggtgtcgcgtggcggtgttagtggttggtgtattggattttgggtctcttgtgagcgggtgtaccgttcgcgttgatgtgctgtgtcggtgtgtgtgtagttatcctcttgttctacttgtcgtgtgagtggcgcagagtgagtggatgttcagaggtaagtttgatagatgccttgaatgcaagttctccagtttgttgtatgcatatgtgggatgtgttggctaagtgtcgtgttcgactatagctttgatggttcctgaagcatgatctgcaatgctttatttactcgaatggactatactggatgacttgatatactggatttgggtttgaatggggacatttgccattttcttcccagaaatatgtaatcccctggctgagctaggactgttaaacatagtgtggactggatgatgccttcgacaaaccagagaagccaagttggggggagctggtgcctggagtgggccctgtgcacctcacctggcggaggctgggggggctctgtcagcaggaccctagaggagactctcattcgattttaaagaagcacaacgggtcattttcctttgtatgttcctagcgcagaactgtttctaaaacaacttgaagtatagttttgttatctaagcaatttttgttttaagtaagtaagtgtactagaatgcgaagccgttatggttcaggtttttaaaaactggtacagtattgtatttgtctcatctgttgcactgtatttcaatcatctgtaattaaaatgatcatatgtttnnnnnnnnnnnnnnnnnngggcggccgctctagagtatccctcgaggggtactagcttacgc

SEQ ID NO: 11851 - DNA, 767 bp, Homo Sapiens
  misc_feature (143)..(143): n is a, c, g, or t
  misc_feature (180)..(180): n is a, c, g, or t
  misc_feature (281)..(300): n is a, c, g, or t
  misc_feature (307)..(307): n is a, c, g, or t
tagccagaaaaggagatttgtcagcttccagtaaactaagcaaaccagactagatcaagtcttcaattccagccagttgattttcctgcagaatgtgatgtcaaggacaggacccagaaccccaggaagtaagaagaagagcncagcaggatcagaggagtgagaacaaatgatgtcccncaggtcacagggagtaagtagctgctctaggggtgaaccccgaagtggtgattcactgtcaaaactactggctgaaggagagctcgtggtggtcatgtacnnnnnnnnnnnnnnnnnnnnctatatntgagtggggcaagggaggggattggggaccgggggagacagccttctaaacacatgatacaaatactatggctatgacacaacaggtgtttgtcaacctgttccagctcttcccaactatggcagtggctatggcctaacagctggaggcaggaacagggcagtgacaagaatcagcaactgcataggggcctcatcaatttccagtcctccatccagaagaggacaggacatgctcaagctgccccaaagagaaaggacaaaggagaggaattctgagatgcaagtccctatggaagaggggacagagttaaattccagcagtccaacagactatggctagagccatagtcttctcttacctgtatctttaacgttcagcttactattggttccttattatctcctgttagtgaggttcctttcaaaaacaataaaacaaaacaatattttcccgctca

SEQ ID NO: 11852 - DNA, 526 bp, Homo Sapiens
tgcctgacaaaactggacatctggatgtccctccagtctacttatatactcacagagagaataagtttaaatattaaagagaaaacacaaagatacttggaataaatgtgcatttaaaaccctgactaaaatatcaacataatgatcataattacaatggtaataaaaataattagtacaataatattatctttatgagcagcatggaaatttcattcctgatctggaagaataaaaggaaagaaaatgtcaggtgaaagagtaagtagcctccaacttaagcagacagaataattttctttaaaatgaaaagaacattttaagctgtctttccccctaaaagatcagatctagaaagggctggaaatgaactgtgcccaggaatctgggggtgctctccagtaaggcgaactgaggctcatttgcagccaagacttggaactcgggatgagacctaatgggctattgctgccatctggctgccaaaagtccctaatagatggattttccaggctgacccagctgt

SEQ ID NO: 11853 - DNA, 323 bp, Homo Sapiens
tcaatacaaccacctcaggcactacccccagaaccacctacctttggttcagcctgagccccactgaggtccatgctggggtcaccccagcacagggtaccctccctgatcacaggacataggacctgcagggagtggagaacgcagaggggaggaagggggaggaagtgccggtgctgggtggccacggaggcttcccaggactggggcttcagttgatactgaaggacatttgcagtctagacaaggtcatgaccaacaatgcccaagccatgtgagggggcagcagaagcaaaggcgaggaggtgatcgtggggttgtaa

SEQ ID NO: 11854 - DNA, 848 bp, Homo Sapiens
atgctgaggctccccaaacccacgatcaccgaggatatttggatgcattcaggttcttggaagagaagggtatgtatgggctgggaggatcagccatgcccttttgacaagcatttactagcggtcttggtaaatgacttgagatttgccttagttctaacacttagtgcccaacgccttccttgtgttcctcaacctactcatgagcccaggagataggaaatctccgtcccattgtacagatggggaaacagaattttggaaaggagagccaagcagcacacacccctccctgaggggcagagccgagatttgaactgggatgtcatgactccagggccctctccctccccagggtccccttatctgaaggcggtttttctttccagctcgacctcttgtgacccttagtttaacaagggccgaagttaaagagtttctgcgcctggacccctaatgaagcaatcagatttctcatctccagtcaggtgtgggtccaagcccactagacaagtttgctcttcccagagcacatttctgccttcaagtcatcctggcttgtcagggctgggggagttctgctgtagaaatattagagtggaaggaaaaagatgtgttgggagctatttttctttaatactaaaagttggttgatgaatttgtcgttggccaagaccaaggagactgcatttttaaggacatatgtgtatttatctgctcagaaaatgttcattgctgtgtgctagggatactgcagtgaacacagaggtgtgacccttgccagccttgtgagagaagtgagcagataagtaagcagaagggtgatgctgtgatcgtggggttaataa

SEQ ID NO: 11855 - DNA, 278 bp, Homo Sapiens
ttacaaccccacgatcacagaatgttcatggtacatgctacagtaagcctacttgcatgaattatttctcccaggaatgtctaacaacaaaatcttttttaaaaaaacaaaggatatatgtacacaagttcttatagtgttgtcatttatttcagacaaggtctcactttgtcacctgggctggaatggagtggcacaacctcaacctcctgggccgaggcgatcctcccacttcagcctccctaggactacaggtgcgcccattacactcagctaat

SEQ ID NO: 11856 - DNA, 419 bp, Homo Sapiens
ttacaaccccacgatcaccaagactaagagacagtgacatctgactttcattcgtgaaccccagatatctgagacaggtctcaagtcaatttagaaagtgtattttgccaaggttaaggatgtgccagtgacacagcctcaggaggtcctgatgacatgtgctcaaggtggctggggacagcttgcttttatacattttagggagacatgagacatcagtcattatgtgtaagatgtacattggttcggtttggtttggtaaggcgggacaacttgaggtatgggcttccaggtcttaagtagatgagagacaaaaggttgcattcttttgagtccttggttagccttccactgaatagacactttagtctggctcagttaatctgcattcataaacaatagggcagaggaagcagtta

SEQ ID NO: 11857 - DNA, 674 bp, Homo Sapiens
cgatcaccagtaactacagaaagaagttagatccaattagtaaaggcagaaagaaacatgccttgtgagttctgtttccctgtgcatatctgccaccttaaactaatggagctatttattgagttcaagctgtccccaacgaaagctgctttttactttgcttctgtgcaaatcttgttcactttttacaactggctacagaatcaaagccagcagctggcctccatgctactacacagaacaatagcctgagcccaagcttctgaagagcaggcctgccccagtatcttgaatgtatgcctgcataaaaagcagacaccacccaggatggctgtatctgctgcttctgctcaggcagtaaatatgtaaaataggaagccaaaacacatccagggccacatctcattgagtgcccttgggaaactcaattggacatcagtttatctttaaaataggaatcataatggcttcctctgattatgtcctgtaaagtatataagtggtttataaactacagttttaacatactggttgttaggtgatcgtgttcccattttttatgtggttgctttctcaagcacatacataatcatgctaaagaacggtaaaatagcagcagtcctcctgccatgcccaggacttatgctactttgtaatgtgatcgtgggttgtaa

SEQ ID NO: 11858 - DNA, 442 bp, Homo Sapiens
gtctaaaaggtgttggacaagccttgtgactatgtgaattaacttagactgcttattggttatcctggaaatcggtaacagcagataaaattaggaaaggagatgattctgcttttaaagtagtgagtggcatgtcttaaccacagagtgcagtgattataaaattccatttgattctttgtttttctcaaattgcataagcagtgagcaggaagaagatgatgaaccacaggaggagtagtcagaaggggagaagaacgagaaaagtaatgtcacagactgtgagggaaaattatccacaaagatgggatgttacagtgtcagatgctgcagaggaggataggtgaagaaagtagaacaaaatactgatggttgttgaagtctgtgtctgttaggtacatgggagtttattgtatttagtctatctgcatttgtgtcgtgg

SEQ ID NO: 11859 - DNA, 413 bp, Homo Sapiens
ctcggcccttacttcccacgatcacagccatgctgcctgatacaaggaggcttaaagcagttgttgctcctgaaccaggaatgagaagtgtttcaagggcaagaagcacaaggttgagcccaagagagagaataaagaagagctgttgtcagatagaaaaaagtgaagaggtacaagtcctctacctgaagaaagttacagtgacaacggaaaatgccaggtttgaggctgttgctgtcatctgagaggtatgtattaattacttcatagagtaacttgtccaaggcatagctgaaaatatagttgaaccagaatttgaactcggccatctggctccaaagcttatactatatgagaatttagttttatttggaagtagggttgtgctgtttctacacatcaaagttaataag

SEQ ID NO: 11860 - DNA, 410 bp, Homo Sapiens
ttacaaccccacgatcacctatgtcagactgtgtgtgtacagtatttaaagggaaggaacatgtaatatatcagaaggtgtgctttaattgaggagacaaaagaaaatgaaccaagtaaagaggtttcattgttttaaaaaaatgcagtgagatttatgcctggttcctgctgaacctgtaaattgtttagagcagagaagctgtgtagatgaaatgcttttgagatatttttattcacagaaagttgaattagacgagaatagcttttggattaggacttatccaggtcttcctttagttccacacaattccatgtactcaacaaaagggtgcctaattaaattccgattgaagaaattcatatgaaaagcaatgtgcaacattgattctccgtatgtgcaaagtactg

SEQ ID NO: 11861 - DNA, 467 bp, Homo Sapiens
cctcccccatttagatacactactgtattagtgagaatacttggtacagtaacttgaaagcacttgctattctggaaagaagcctcttggtgattttggaaggagctttattgtaaatactatggaaggggctttgttgtaaatactatgtaatatatataaaatattgtgacatgttttggatgggatgcatgacatacaggtagctctcttttttaaaatataggtatctctttgcatatatatacacaaggaaagttgaattttcaggagagatcattctgatatcttgcaaatttgtattaaatgtatacagacttccaagtgtgctaattctttacctcctaaacttttagttgcaattgttttgcagtgtaaaattgtacatgtgttaataatcaaaaagtgttgcatttaatgttatttctgtaaactttgagctttgttaataaactattatgcagcaa

SEQ ID NO: 11862 - DNA, 630 bp, Homo Sapiens
aattgctcccaaggctcccaaggatgaggaattggagggaaattttacttaacctctagtatttgaacaactcaatatttgaattgttgccccatttgcttttacctgtactgtattcttggtcatctcaaatggcgtctaaacccagctactttgcattccagaagtttccattccctccaattccacctaatttttcatctgtcctagttactggctctttcttcatgtcttatttctcttgctttgggagcttaaaagattttacaagacctaattttgggttccttccttggagccatagttaccctgccaagaagagtagaaaatgggttcaactcctgtttcgctccaccaacacctctgtgagtctcatcatcagctgagcgatgatgccttacaggttgcatagcactggaactttcctagagtaacggctctgctgccagggtttctctgggctcattcttccactgacttaattatgatctatgcctaacagagccccagtacaactattttgcagaatggctgttaccctagaattactatagcacatattgagatatagttgtactccctagtagataggaactgaccccaacaataaactttgataataaagaaaaa

SEQ ID NO: 11863 - DNA, 146 bp, Homo Sapiens
ctgcatcagaacaatgtgaggtcattctacgttaatatcattaatatcagcatttttcatggaagtttaatgccaaatgtaaaacacatgaaaatttttaaaaatatgctctttgtgtttgaataaagtagtaatgcacgtaaaaa

SEQ ID NO: 11864 - DNA, 589 bp, Homo Sapiens
gtcactgaatgtattttttatttttgaaggtatttttaaaatctgggcacaccatatctatctgtaggaccctgggtccaaaggtcctacataactgatatgaaccataattctccatattaacaaaggctcggaaattgaaaccaagatcacctaactcgctcactttggccaatatagtacgaatttcagcttctttacaagagaagagtcctgagatgttaatatgcagcaattctgctgatgtgcattttaactttatgcaccaaggaagaaaggctaaggaattcacaaaagtaaaatcaccccctgaaaaacagatgctggtgattggagaaaaaagagcagtagaattaaggtgttttataaaccagagagtgttttgtttctgataggtaaagggatttcttcatatgttattttaataaaagggaatttcataggtaaaaaccaatattcaaaacttataaaacaaatagaactgtttgtgcacaatcactgcatcaaaaatttgcaagagactcaacagaaattctttagttggcaaatgtggtttgaaggggtaataaaatctttttatggctaaaaa

SEQ ID NO: 11865 - DNA, 497 bp, Homo Sapiens
accaacaaaataggtttatttgattttaaaatagtcatcaatgggaaaattttttaaagcttaaaaattacagtctaaagccaagggtgggagtggggggcaggcctcacacatatcccaacttgaggcccctgagccccaccctcctttccagagggagggaggagacagctgagggggccctgaataagtcctctccctcgtccccaaggccagctgtgccaagcccctggagggcaacagctcatgccgaggaactggggggggaagcaaacaggtaggaaacggaaatgaggttaacaattacaccatcaccccctctaaaaaacaaaataacaaaacttgtgactctgaaaggatggaagatgaatactgataaactcctcagctccccacaaaagcccattctggagctgggttgggctgattggaggaaaggtctttatacccaactgcatgtttcctctgaagaataaatattctaagaaaaagggaaa

SEQ ID NO: 11866 - DNA, 1562 bp, Homo Sapiens
  misc_feature (771)..(779): n is a, c, g, or t
  misc_feature (1082)..(1082): n is a, c, g, or t
  misc_feature (1491)..(1491): n is a, c, g, or t
  misc_feature (1497)..(1497): n is a, c, g, or t
tgagatgtgattggatcgtaaggctgtgccttcattcatgggttaatggattaatgggttatcacaggaatgggactggtggctttataagaagaggaaaagagaactgagctagcatgcccagcccacagagagcctccactagagtgatgctaagtggaaatgtgaggtgcagctgccacagagggcccccaccagggaaatgtctagtgtctagtggatccaggccacaggagagagtgccttgtggagcgctgggagcaggacctgaccaccaccaggaccccagaactgtggagtcagtggcagcatgcagcgcccccttgggaaagctttaggcaccagcctgcaacccattcgagcagccacgtaggctgcacccagcaaagccacaggcacggggctacctgaggccttgggggcccaatccctgctccagtgtgtccgtgaggcagcacacgaagtcaaaagagattattctcttcccacagataccttttctctcccatgaccctttaacagcatctgcttcattcccctcaccttcccaggctgatctgaggtaaactttgaagtaaaataaaagctgtgtttgagcatcatttgtatttcacatgcgaggaaaaaaccacaggacaagagccagtaaaaagagtacgaaatagaacgctggctctgctcaagagacctacagggcggcccaagagcgatccataggcgaacggcgaccccgccacgaaaatgtccccgccaggggcccgaggtgaccannnnnnnnngcacctatctgtcgaaacagagacgcccctacgacaactcgacaatacctgaaccgcgacgggtgggccccggctgtatcaaaaatccgcacgatgcaagaaaaatctcccctcgtcccggggcccatgcattcggcaaacaaccccccttatccctgggaggggagaggcatacatcggggggcggtacaccccccgcacacacgagaaggccgatcctccccccggccaggttgcaacacaggcaactctttctatccagcgacggtggcaggggggctcactacctcatcaccctccctnccgcgagggtgccatgcacactcaagggatagtagtaaccatctactcacaacaaatggataacacactacagagataatagttattccacaccagacagacggaatcgaaccgaaagcactcgaagcaccgagagacaggccaccgagaggctcctccatcgaacagcagacaactgtagtcgcgtaggagcacctcctgtcgcacgagagaattgagaacatataacaatatgaaaactgaatgagcaacaaacaagactgccacccatcgagactctctgacctcgctcacactattggcgacacacaacgggcggaaataccagaatatgtctcctaccaagcaataccacacaggacccatccgaggagatatatcaatccgcgaacggacggcgtgagagcgngcatgncatcaacaggtagactcgctcagccacgatcagcgtatcaaactcactctactcgagcatatagt

SEQ ID NO: 11867 - DNA, 470 bp, Homo Sapiens
  misc_feature (29)..(29): n is a, c, g, or t
  misc_feature (73)..(73): n is a, c, g, or t
  misc_feature (307)..(307): n is a, c, g, or t
  misc_feature (351)..(351): n is a, c, g, or t
  misc_feature (379)..(379): n is a, c, g, or t
caaggaagaaaaatccacccaggaatganaattaagattttgacaatgaagaaagaataagaatttgatttanaaagacatctggatgtgaactttcatgtatgatccagaaaataggtacggttttaaaatattttatatagaaaagctacaaagtaaattgagcaatgcttttaaagttatctttgttttatagacttttttgttgtatgtattacagtctttataatcttatttaatgtatatttgtactttcaagtactgatggagatagactcaaaacagttatttttttacaattaatctnacaaaggcaattaaaaatgttgaattttcaaaacatctgctggnataaatcacatgcaaataatagtagttnaacaatttattcatttggtagatatgtttatttggtttttggttgtcatcgatttacattgccactaataaaccatattataaatttctaa

SEQ ID NO: 11868 - DNA, 364 bp, Homo Sapiens
gagagtccagttaaggtaacccagatttttgacaaccgccttcctgctgagccaaagttttctcattacccctccactggggaagcagctgaggcccagggccttgctccctgggaaattctcttctctccatctttcggtgcattggccatgttactgtgccaaagtgtcttaattcttgtcccatctattctcagctggccttggaacccacataggagttggtgggggagggatggaatgggtattattcattgtagttgatcctggtgtgtgtattatataaaaagacccctccccttattttgtgttttccatccctctcccttaacaggattgaaataaaacatgcttctgtttttgt

SEQ ID NO: 11869 - DNA, 263 bp, Homo Sapiens
ggctccccgtcttcggggccggccggattcccgtcgcctccgccgcgccgctccgcgccgccgggcacggccccgctcgctctccccggccttcccgctagggcgtctcgaagggtcgggggccggacgacggtcccctcccccgcctcctcgtccgcccccccgccgtccaggtacctagcgcgttccggcgcggaggtttaaagaacccttggggggatcgcccgtccgcccgtgggtcgggggcggtggtgggcccgaaa

SEQ ID NO: 11870 - DNA, 469 bp, Homo Sapiens
  misc_feature (313)..(359): n is a, c, g, or t
aaagatggtgtatttgtgcattagatttgcctgaaaaactttatccatttccattctttatacaaaaaccatgtaatggggacatatttaactaaaaagatttatagtcataattattttattggaaagattttaactaaagtttttccttttctctcaaactgagttctgaaatttatttgattctgatctgaaactattgtcttcgtaaaagttagatctgacttcagacagaaaccaataccagcttccttttcctttaaactttgaagagtgttgatttgttactatattactatgcaaaactggcagnnnnnnnnnnnnnnnnnnnnnnnnnnnnnnnnnnnnnnnnnnnnnnntgggttaatcaagtctcggtaagtcctttaaaccatttaggatttttaaaacatcaaaatttatgatttacattcataggaataaaataaaatattattagaactctggt

SEQ ID NO: 11871 - DNA, 332 bp, Homo Sapiens
aaggaggggacagggagcttcctaggtctgttgataaactaactgatgctttgtcaagtcttccaagttttcactgtaaataatacaactaacaaatgtaattttgctgttttctaatagagaatgaatgaatatattaatgtattacatttgtttcatgataaaacagttttcactgatactgtgaaatcctttctctcctttctagccttgcaaaataccctactaaataaatcattttagacatggagtgcaggtggacactgtgtgaactgtttttggtcagttattgtagaaattgatagatgtaccaaataaactctatgcacatt

SEQ ID NO: 11872 - DNA, 464 bp, Homo Sapiens
  misc_feature (71)..(71): n is a, c, g, or t
agatgagctgaatcctcttactttaaaaactggtctttttatttaccctctgtggtagaagagtcaccagncaggttccaaattgatgtgtatgataggaaaaaaacccttaattttaaatataatatagagccttaaactatgccactgggtggcagaggctgtataaaacgcacttgttttcatgcaggagcggggcaagtaaggttgagcctgactgtaaacctagaactgcggaaggactgggacttttgtacaaatttcacatttattttacagcaatcatgctgcatttgtgttagtgttctttataataaaaaacaaagcagcctcctggctggctgtgttacaagtgactcttccttagacagctagaaagatgctgactttgtcaaacttgcatttatatgaaaaccttctgtctctaatatcacagaataaactttccatagatgctgttcttt

SEQ ID NO: 11873 - DNA, 139 bp, Homo Sapiens
acatacacatctaacggtgttgtccatttaattcgatttatatgatttgctgtgccactttgactggcttgcagaacaccccaaattctcttttccccataaagatctacttccatacagagtagaaaaagatggtggt

SEQ ID NO: 11874 - DNA, 442 bp, Homo Sapiens
gtttgtataggcagtcaatgtgtgtgacatgtgtgtcctttcagtccggaagcccactgtgtgacaatggcgtggggtgtggctggaaggtggggtgctgaagcttgaagagcatttctttgctgattcataacagtatttcccatcttttgcctgcaggcagggaaagtgtacagtatttattttgtttctgttttactttaaatttgtaagtctttaagtagcttacattgattattataggggaggacaagtgacttgtttaaagttgtatttagtattctttccaatttctgtattttaaaatattgaaattaaaattgtattacttctgttttgatttttttagcactcagtgtattttttgctcattttgtttgaaagtataaatgttgaaaattgtataaaatgcgtccttgaaagaaaaagaatctgaattcta

SEQ ID NO: 11875 - DNA, 233 bp, Homo Sapiens
ggcaaatgaatgtaccatttcaactttgattttaatagtgctagttgatattggtaataatgctaaccaagagatcaatgccagatttttctcttggggtaagttagctgaagtcatttaaagatggaaaggtgggaaaattctttgatatttgatgtcattgtatccacatttgttgtaagacatattgcataccaattataattatatcaattaaagttgataaaagcttc

SEQ ID NO: 11876 - DNA, 231 bp, Homo Sapiens
tctagaggatccttcaccacagcctctgggaaagaggggtgatgaactcccctagtcacaggcgctccctgtggcccaaggcccttcttcacactccatcttgtagccccagcaggagctattttccgaaaagtgaaaagctctgaaggtcccacaattcatggtatgtacaggggctcggaggagggaaactgcccagctttcccccggcacagctgtgggggcagaatt

SEQ ID NO: 11877 - DNA, 340 bp, Homo Sapiens
aagtctgccacccacagccaacaaagattctggccaagagtcagagtctattccagaatatacgaccgaagaggaacgggaggacaaccggctttggaggacagtggtcattggagaacaagaacagcgcattgacatgaaggtcatcgagccctacaggagagtcatttctcacggaggagattcaggatactatggggacggtctaaatgccatcattgtgttcgccgcctgttttctgccagacagcagtcgggccggattaccactatgtcatggaaaatcttttcctatatgtaataagtactttagagctgtgggtgcacagatcctctagagc

SEQ ID NO: 11878 - DNA, 146 bp, Homo Sapiens
caggattatatctgcaccacagcaattctgccccgtagctgtttctgacaacctgtatgtatgaggcaagtagtgcagttcaggatagagaatggaacctgccctgggagatcaggctgtgaatcttggctctgccaacttactct

SEQ ID NO: 11879 - DNA, 323 bp, Homo Sapiens
ccgcagcgccggagccggggaaggtttacgtaattcagaaggaagcagacgtgtgcagttttgactgatgcccttctcactgcagatccaggctcaccgagcaggttcctattcctgatggacgtggagatgtctgattggattttgtcatttgattgttgacactgattaatgatagatttttatttcccttatggtcagaaataattgtcttgaaaagcttcactttagatcatagttgtcacacacagttataattcattgggtaaagcatagtagaacgaactatggaaaaggaaatctcattggtagacttagaccgc

SEQ ID NO: 11880 - DNA, 519 bp, Homo Sapiens
catcttgcccgctccctggggcagctgccgttgggctaaaaatgcagagagccctgagttcagatctgacctctgccgcatagcagccgtgtgaccttggacaagtcacttgtcccctctgtggagggggaggaccagggtccccgttccctggggctgcggtgaggtgcaagtctggagtgagtaaggggagccccgccaccccaagtcatgtattctggagctgtggtgagggttagatgtctcagaaaaggaagagatgagggggccttcgtgaggggcacacaggcttcggaagtgaggggtgagttcacatgcccgtgtcggttttgcaggagcaggctcacctccaaactcacccagttgtccacattcaatatctgaaggcttctgaatatcaatcagacctcaataaagtggttcaaaaacagaaaaagaaatgttacataaccttttttaaaaaatggaagagcaggccaaatccctactcccctggcagctgtgggtgcagaataagtg

SEQ ID NO: 11881 - DNA, 380 bp, Homo Sapiens
ttagaggatcgcccgctggcaatggcaccgtgtccaatggcacaggggcctgggaaacaggcaggcacgtcttaaaggctgagatttctgctgaaggggccccggccacaggcattgattcctggcgaacgaaacttataggctgtgcctggctgcagctcctgcttcttcagctggttatagtcagggacggtgcccaaatcatcgtctgatgggacacaataatctggtgccaggaaaatagtgtgtcaccagtacattggtgcccttaatgactcccacatcaaaccactggttttccttcttcatgggggctttgctgggtgggggcggcaggtctggcttcacacccagggactcgatgccattgggccagcggg

SEQ ID NO: 11882 - DNA, 320 bp, Homo Sapiens
cccgctggcccaatggcaaggtgtcctgcccccgcaccctcatcgtgcgccacgagaccaggaggtgctgatcaagaccgtgcatatgatgcccatgcaggtgcaggtgcaggtgaacaggcaggcggtggcactgccctacaagaagtacgggctggaggtgtaccagtctggcatcaactacgtggtggacatccccgagctgggtgtcctcgtctcctacaatggcctgtccttctccgtcaggctgccctaccaccggtttaggcaacaacaccaagggccagtgtggcacctgcaccaacaccacctccgacgac

SEQ ID NO: 11883 - DNA, 528 bp, Homo Sapiens
  misc_feature (73)..(169): n is a, c, g, or t
cccgctggcccaatggcaggccctacctgatgagtgtgccagattccgcagaggcaggaagaggtttaaaccnnnnnnnnnnnnnnnnnnnnnnnnnnnnnnnnnnnnnnnnnnnnnnnnnnnnnnnnnnnnnnnnnnnnnnnnnnnnnnnnnnnnnnnnnnnnnnnnngcctggactccctgccccatgaattttttactgtgccacgaggcactattcctgccgagctgagacagaggcagtgtggtgaccaggacttgtagcaagaccaggagttagatccagagaaggctcttctctgggagaccctgggatgactttgagaaggggttgaggctcaggatgatgtgggatgaggccagtgggcactgcctggtggcaggtgagccagccttgccccttctccgtgtaggtcctggcctggtcaagtggggacagctcaggggccatgaaaaaagctgaggcatcactggctagagcgtaccccatggacagctccctttctgcccctcatctcctgaaaagat

SEQ ID NO: 11884 - DNA, 903 bp, Homo Sapiens
ccgcgtggcggatgctactttcgtaaggtgagtggaccttgatgtcgtccacgtcttctcgtttcaaacctgtgcatgagcaaagaactggagtcatgtatttccaacccagacacaaggacggtgagcctccctggtttaacgtgagactctgtttctgtgggaaataacagcaggaatttttatcagtataccttctttcccaaagggttcacaacttggtcatgtgagacatctctccctggtgctttgtttccgggtggtgtcttccaaacgcttggagctaaatgggccaccaatgcaggagattccagttctgtcagcaatctgtccgccacctccaggtctgactccatcttgtccaggcctctcatgacgctgtccagctgctggccctggtggtgcaggaccctcgccgtgtcctccaggcgtttctgggatccacgccactgagtctccgtctagcgtctctctgcccccgggtccctgggaccaaatgcgtctgccatggctccaggctgagacagcagcagctccctccagaaatgctcgatgatgctgaagaccacatttcgacttggccgcagggagctgaaccagtgcttggcatggcccttctccaggatggtgatggagctgaagataaaatgtgaagcctccttcttgatctcaactatgctggagagggggaagctgaccagaatctctccagtgctgtcagtcatgaacctgagcgacagcgatgttaaggacagctgtccagtaacccatcgcctcttgggctccaggtagtaggtgcacggccaggtgtggatgcagacatcctgctcatctgttcctgggtctgtgtgcgccaaggtccaggcctcttctgcctctgaggacgccagacgagtcccagag

SEQ ID NO: 11885 - DNA, 239 bp, Homo Sapiens
tgtgtataattcaggcactacgaatgaagaggacactaggagatggttctcaattgtccccaaaagacacaacaaaaacttgtcagggactatcagtacctctgaatgagagtccttccacttccagttacagggcaagaccaagttactcccaaaaagagcaaggccaggctctggtcagctaggaacagcgtctgctcaactaaatacctactgcttggctccgtggcggtcgccat

SEQ ID NO: 11886 - DNA, 285 bp, Homo Sapiens
atggcgacgctcgagttcaaatatgacaacatggagattcatctttatctatgataaatgcctgagtccctggcctgtcctgtggaaggtgggccctataggggattaaggctctttgtcttgggttaaatgagtccctggcctgtcctgtggaaggctggccctatgggggctgaggctctttgtcttgggttaaatgagggttgccatgtggatgctgttaggaggagagtattaagtgaaaatgctatacaaagtccatgctttctccgtggcgctcgccat

SEQ ID NO: 11887 - DNA, 555 bp, Homo Sapiens
gtgatagacatcaaagtggtgcagggccaagtgtgccaagtccagcccctgtgtgtgctcagtgccatgaagatggagactgtggtgacctcacccatggagggtactgtccgcaaggttcatgtgaccaaggacatgacactggaaggtgacgacctcatcctggagatcgagtgatcttgccccagaccggcagcctggccatccccaagccttcaacagaaactgtgcttccacggcagcgccaggccaaccagtgcccgaggccaggaaagccgggccgtggaggtcctgtccacagctggacaggagagacaccgcctgcggtggttcattcctttcagccatcgtcctttcctccggcggacagctgcttacatgttcatctcttgccaaataagggtcccctcctcactggagactacaagtggtgggtcaggtggtcctaggacccaggggaggtttaggggtcctatctcctgggggaaggggagatctaagatgtcccaggtcctgggaagtttactcaataaagctggctttcccctgccctct

SEQ ID NO: 11888 - DNA, 553 bp, Homo Sapiens
agaacaaggcctttgtgcgtgggctttcccattgtttttttccaaagaaggcctggattcaggggagaggccttcctagggccactccctttacaccctcccagaggcctgagcaacccctctctgggtggtttggggctggtgctgcctggcggaaggaacagttgaacggcctagccgcctccaccctcttgcgcctctgccctctcccagtccccctgtggcttctgaaaatctcagggacagatgaggctgagcccctagtcccctctgtgtgctttgagcctccagactcgaggctggtcactgcaggtcccaggtggaatttggacaacctggcctggccgctcccatcctgtaagcccccaccacggggagaccctcatccctgcccgtgtggtgcgcaagtattctgcccgcctccacaccatccagccttgcccaaggggcccttctgcctctgcttccctcccttctcctctgtcttgccctggcccacgcacgcctgtctcgtcttccttgttttgctgcactcacttttttatactctgac

SEQ ID NO: 11889 - DNA, 243 bp, Homo Sapiens
cgtccggtgttgatggtggcagcggcggcagcctaagcaacagcagccctcgcagcccgccagctcgcgctcgccccgccggcgtccccagccctatcacctcatctcccgaaaggtgctgggcagctccggggcggtcgaggcgaagcgcctccaccgccggtagcggcggcggcaggcaggatgagcgcacgcggtgagggcgcgcggcagccgtccacttcagcccagggacaacctgcc

SEQ ID NO: 11890 - DNA, 301 bp, Homo Sapiens
  misc_feature (266)..(266): n is a, c, g, or t
ggtgggacacgtgcagttgtcctgcgcggccgtgtggccggtcaccgccgccagcaccagcagcagcagcggcagccgcagcggtggcggcgcgaggccggggccccgagccatggtggggcggaggaacgcggaccggacgcgggcggatgaggcgcggggactcgtcggggctcgggctccggcgtctgggatggtctgcaggcgtctgccgcccggccgctccctccggctcttatactctacccgacctgcccggttggttncaccaccgaccgtccccactggtatttgggtgaca

SEQ ID NO: 11891 - DNA, 617 bp, Homo Sapiens
  misc_feature (21)..(21): n is a, c, g, or t
atgagagcttgttcctgcttnttcctcagctcattttcctcttctgctggcttatatgctttcccaaacgggcatgagacaggaaagaagtcagagggtggtgttgtcttggggttttcacctgtgagccttggtctgtctcggtagggtggtcaacttcagtggactgtggttggtttcagagcgcctggctgaggagttccactgaggggagcactggagcagccctttggcagaggctgaggagggagatggaccagcccacgcctggcacctggctccatggcataaggaaagggagatgctggcctctgtgctcctgctgtcttttcctgtttctgtttgcgtttgacttagtagcaaccgacagagtggcaagggatttggtcttcagcagtagacatccttccacccctgccctcagccaagtctcttgctgccatgccaatgctatgtccacccttgcccctcggcccaagagtgtccagcggtggcccacctcttcctcccactacagcctcaacagtatgtaccatctcccactgtaaatagtcccagttagaacggaatgccgttgttttataactttgaacaaatgtatttactgcccttaaaaa

SEQ ID NO: 11892 - DNA, 522 bp, Homo Sapiens
agtgcagccgtgcaccctgcctggtcactgctctcccagccctgcctgggcctacctcctgcccagctctgcttgggaccctctgggcatgcagcagcagtagcctaagggctctggtcacttccagggctctacagggcagcagagcagagcaaaagggtgcatatgctgggagctgtcacctccactcctaggcttttctgcctagagcagaattataggggcagtatacatccaggggtctgtgcggtggggctgggggattccttaagtgactttgggaaggatttgttttcccgagcatcaatttcacacctgggcattgcaccccaggctatgcagtctttcagtgtgaggaaggggcagaacaagaatgaggcggccccgtggcctcaaggaagcttgtggctttggaggatctgactccagcagagtctgtgccaatgtggggtgagcagggcccctgccatggagcagcaggaatttgagggatggagcaggttaaagaatgggaaacatcaa

SEQ ID NO: 11893 - DNA, 591 bp, Homo Sapiens
gagctctacctctactcgagggctgacgaagtagtcctggccagagacatagaacgcatggtggaggcacgcttggcacgctgggtcatggcgcgttctgtggatttcgtgtcatctgcacacgtcagccacctccgtgactaccctacttactacacaagcctctgtgtcgacttcatgcgcaactgcgtccgctgctgaggccattgctccatctcacctctgctccagaaataaatgcctgacacctccccacaacctgcaatctgtcgggcactcttctcgttcaactccctgtagccctttgggactttgcggtcccctaagtagaaaattcctatgggcctgtctcctgggggcctccgtctgctggtggtctgcttaccacagaatcctaaggggcaggagtgcctgggcatgtgtctgtgggagccttgcagtcagttgtgtttggacaagtgcaacaatcaggctgctgattcctgtggcatgcaggctgtagaggttgacaaatggaggggggtgttgagggtgagccctagttgattttttaaaatttaaactctggtaagaacatttaatatgaaacct

SEQ ID NO: 11894 - DNA, 454 bp, Homo Sapiens
  misc_feature (48)..(48): n is a, c, g, or t
cgctctacaggatctccgcagtcttctcccatcaggagcgtcacttgngtggttcagggggaaataatctattcttaagattgaagagagtgcaggatttggggggttgactctacatccttcagtatcaggacttatctccttgtcttacctcataggagaccctcctgttcttaactgtgggcgataagaaaggtggtggactcttcttactggcagggccacctgcgtctgtggagaccctggggcccagggtggctgaggtcctggaaggcaaaggagcagggaagaaaggccgttttcagggcaaggccaccaagatgagccggcggatggaggcgcaggcgcttctccaggactacatcagcacgcagagtgctaaggagtgagggcttagggcactcacctcctgtttccacaggaatcttttggtcaataaaatagattgactcag

SEQ ID NO: 11895 - DNA, 623 bp, Homo Sapiens
actggggagagtctgaggtctgccccttccgagtgaccatctatgtacctggagagaagacaacgcctccctaggctcatcttaggctgcccctccgactgcaaaggcggctcaagcgcccagaaacccctactcatgatccggaccctgagactcccctaaaggccagaaaggtgcgcttctccgagaaggtcactgtccatttcctggctgtctgggcagggccggcccaggccgcccgccagggcccctgggagcagcttgctcgggatcgcagccgcttcgcacgccgcatcacccaggcccaggaggagctgagcccctgcctcacccctgctgcccgggccagagcctgggcacgcctcaggaacccacctttagcccccatccctgccctcacccagaccttgccttcctcctctgtcccttcgtccccagtccagaccacgcccttgagccaagctgtggccacaccttcccgctcgtctgctgctgcagcggctgccctggacctcagtgggaggcgtggctgagaccaactggtttgcctataatttattaactatttattttttctaagtgtgggtttatataaggaataaagccttttgatttgtaaaaaa

SEQ ID NO: 11896 - DNA, 460 bp, Homo Sapiens
tagttggcacttgattgcagttctgtgaggcttgagcattcatacacctcacctgccttggcaagcctattttagtgatatggcagcacggatataacactatgcattaaaagcactttttgtaataagtttaatatcctaaaaggaatgccaattaagttttgttaactgtgtcatcaacttatcctagtacctcagtgttcattcctgttacctgcatatcttcttaaaagaaatagctgttattaatgcctttttgttttccattgagtgtacactactgaataagtgtaggagttttatgtttaccatgtgagtcctgcaacactaaagatattttgaatatcagtcatgatggcaatttctgtataaaagagccttaaatggaacattgttttgagatcaaactccccaccctcacaaaaatggccccgttgcaataaaaattgtggcatattac

SEQ ID NO: 11897 - DNA, 275 bp, Homo Sapiens
gagctttggagagaataccaagatagggctgtgcgtactgaccttttccttgccgtacagatgggaataaggggggttgaagaaaaggaggaagaagagaggtgttcgaggcagagactacctgggcgatgccgcttcgtgacccactctcagcctataggatagcgttgcccaccctgagattcagggttgaaatctctctagcgacagtgcccaggagtgcagcttcacactccagaccttgctgaggtgcatgatgtgctaatgagccgcac

SEQ ID NO: 11898 - DNA, 462 bp, Homo Sapiens
  misc_feature (77)..(77): n is a, c, g, or t
  misc_feature (199)..(199): n is a, c, g, or t
accaaggtatccctaatgcctcatgggacaaggctacttgtttttaaaagggctcctattcccaatgttccctccanacaaataaaatgggtcaaccacattacaattataaataggaaaactagagtctgtagtaccagtagattgctttattcaaagtgtttgaatagtgtttaaaaaaatttgtgtaacaaagggnacattggttagataacaacacgtaagagaattagtactttctacatctttttcaacttccttcaagcagaaacccacactcaccaactccaattcctcttcctccgactgtactcagcacataagagggataagagagttactaagactgttggtactcacaaacaaaatatttctttagaaaaacatatttggacactagcagctgtctggaactctaaagagacgattatatacacaacagatagaaatataaattacttg

SEQ ID NO: 11899 - DNA, 457 bp, Homo Sapiens
  misc_feature (103)..(103): n is a, c, g, or t
  misc_feature (114)..(114): n is a, c, g, or t
  misc_feature (248)..(248): n is a, c, g, or t
agataggaaagatagactaggttagtgcagcatgtgccaaatgttttgaagaatacatagtggacaccatcatcagtctttctgtgtcagaaagacaaacaanaaaaacaatgnacaaagttatgctattcctaggaaagacaaatggccagatctgacttttcaaaactactcacattgtgaaaaaagcaggaacaaatctagtttcaagttcagcatgccgttccctgtttaattcataaaacacnactggcagaagtattacttgaagcaaaacaaaagtaacgtgggaacttgcttatttgctaagccacaatgtatttttccaggaatagcataaatttgccatctttcttgtgtctatggaaaaggggtttagaattgtttcactaaaaattaaatttctatattgtcaaacatgattgtatactcaaattttaaaatgtgaagggaacac

SEQ ID NO: 11900 - DNA, 899 bp, Homo Sapiens
ctcgggcttgaggggaagaggctgactgtacgttccttctactctggcaccactcggcgaggctgccatggggcacagcacccctctcctcatcttgttcctttgtcatggtcgggacccctccaaggacagcagcaccaccttgtggagtacatggaacgccgactagctgctttagaggaacggctggcccagtgccaggaccagagtagtcggcatgctgctgagctgcgggacttcaagaacaagatgctgccactgctggaggtggcagagaaggagcgggaggcactcagaactgaggccgacaccatctccgggagagtggatcgtctggagcgggaggtagactatctggagacccagaacccagctctgccctgtgtagagtttgatgagaaggtgactggaggccctgggaccaaaggcaagggaagaaggaatgagaagtacgatatggtgacagactgtggctacacaatctctcaagtgagatcaatgaagattctgaagcgatttggtggcccagctggtctatggaccaaggatccactggggcaaacagagaagatctacgtgttagatgggacacagaatgacacagcctttgtcttcccaaggctgcgtgacttcacccttgccatggctgcccggaaagcttcccgagtccgggtgcccttcccctgggtaggcacagggcagctggtatatggtggctttctttattttgctcggaggcctcctggaagaacctggtggaggtggtgacatggagaacacttcgcagctaaatcaaattccacctgggaaacgaaacagtggttggacagctcagtattcccagcagaggggctgatcccccccctacggctttgacagagacaccttacatcgacctg

SEQ ID NO: 11901 - DNA, 521 bp, Homo Sapiens
  misc_feature (23)..(23): n is a, c, g, or t
  misc_feature (112)..(112): n is a, c, g, or t
  misc_feature (131)..(131): n is a, c, g, or t
  misc_feature (391)..(391): n is a, c, g, or t
agctcctggatgacgaggtctcnagccacccttctgctgtagcagcacttagagtccacaaagctgaggagggcttcccgggccacctcctccgtcatcgcagggactctgnaggggaccgaacagagagncgggggcttctgggaagggcctgtggactcacgcgggccagccagcctcctcaacgtgcaggcgagaaactgaggccacggtagtggtaaagccctcagcagtccaactggggagggcatctcctgtgttccaggaacgagggccaggacctttgctcctggggcctccctggggcctccaaaggtgggaagaatatctgtcctctgcccccttgaagaagccagtcatagctgggcagtctctccaggagctctgtggnggggcgccagaggactctcggcctcaaaactgaggtccaccacacccctccatccgggggtctctgactcccctccgcacctgcttagcagtgccagccagtgtgagctgttctacagcgtgtcccgcat

SEQ ID NO: 11902 - DNA, 416 bp, Homo Sapiens
  misc_feature (226)..(226): n is a, c, g, or t
gtttctggagcagtggactgccacaagccaccatgtaacccctctcacctgccgtgcgtattggctgtggaccagtaggactcaaggtggacgtgcgttctgccttccttgttaattttgtaataattggagaagatttatgtcagcacacacttacagagcacaaatgcagtatataggtgctggatgtatgtaaatatattcaaattatgtataaatatatatnatatatttacaaggagttattttttgtattgattttaaatggatgtcccaatgcacctaggaaaattggtctctctgtttttaatagctatttgctaaatgctgttcttacacataatttcttaattttcaccgagcagaggtgggaaaatacttttgctttcagggaaaatggtataacgttaatttat

SEQ ID NO: 11903 - DNA, 442 bp, Homo Sapiens
gtgaggcctcacagctggccttgagtttttactgacacgtccctgtgtgcgggggtgtccatgtggcgtgtgtgtgagtaagacttttttactgcgtcccgtcccgccagccctatcggcctcgtcactggccttggtcactttgtatttctgtcttggttggaaataccatcagccttccttgctcggcccaggtctgtttcaggcatctgagtcggcgtttacccaggggccgggccagagacgggggtcggccgctcgctcccacgctcctcctgccccagccctctggtgtccacacctgcccacagagaatgtaaacccagtgctctgcccacgccgggccccaaagtgaccagactccagcacacctgtctcctcctgcctggggtggccatggggatggaagggggtggaataaaacctgtcaacctggaaaaaa

SEQ ID NO: 11904 - DNA, 824 bp, Homo Sapiens
cggctggcggctgcttccggtaggagagcggtgtagagcgagcaggtctcagctcctcgtcatgtcatacggtcccttagacatgtaccggaacccggggccctcggggccccagctccgggacttcagcagcatcatccagacgtgcagcggcaacatccagcggatcagccaagccactgctcagataaagaatttgatgagccagctaggaactaagcaggactcaagcaagctacaggaaaatctgcaacagttacaacactccacaaatcagctcgccaaggaaacaaatgaattgctgaaagaattagggtccttgccccttcccttatctacttcagaacagcgccagcagagacttcagaaggaacgcctcatgaatgacttctctgcagccttaaacaatttccaggctgtgcagagaagggtatctgaaaaggaaaaggagagtattgccagagcaagagctggatctcgtctttctgcagaagagaggcaaagagaggagcagctggtctcatttgacagccatgaggagtggaaccagatgcagagccaggaggatgaggtggccatcactgagcaggatttggaacttattaaagaaagagaaacggcaattcggcagctggaggctgacattttggatgtcaatcagatatttaacagatttggccatgatgatccatgaccagggtgatctgattgatagcatagaagccaatgtggaaacgctcagagggtgcacgtcgaaagagccactgaacaggttacagcgagctgcttactatcagaacaaatctcgcagaagatgtgtatcc

SEQ ID NO: 11905 - DNA, 1223 bp, Homo Sapiens
  misc_feature (14)..(14): n is a, c, g, or t
  misc_feature (36)..(36): n is a, c, g, or t
  misc_feature (40)..(40): n is a, c, g, or t
tttatttttattcntcctttgcgctgcgcccgcgtntctnctactctctcggaccgccacttatatgtgaacggtccggaattctcgggatggagcagagcgggctgcgagggtcttcccagcgcaggcgggttttccagtgttacttgcggctgggcgtgggggactagctgcctttctggcagcaggcaggaagccgcaaaaagtttctgagcccccgaacctgtagcggacgtggaaaaagaacgcccctcctcaagtgtctggctgaaagatgccacccagggaagggaactcgggctagctaaggaggccattcttgatgttgcttctagatctcatgtcatcaccgagccctcagctgctggtggcagctgctcagcagacccttggcatgggaaagagacggagtccaccccaagccatctgccttcacttagctggagaggtgctggctgtggcccggggactgaagccagctgtgctctatgattgcaactgtgcaggggcatcagagctccagagctatctggaggagctgaaggggcttggcttcctgacttttggacttcacatccttgagattggagaaaacagcctgattgtcagtcctgagcatgtatgtcagcacttggagcaggtgctgcttggtaccatagcctttgtggatgtttccagctgccagcgtcacccttctgtctgctccctggaccagcttcaggacttgaaggccctcgtggctgagatcatcacacatttgcagggggctgcagagggacttatctctagcagtctccctacaagcaggctccattcctcagactgggatctgtgtactggatttggggtccctcctgggctatcctgttcccctataccttttcaccctggaaccagggagatgaccaactggcttagctctggactcccactaccagtaattccttggccccgaatctccattggttggttaggtcaacccccccaatcccgggtccattccttttaaaggggccccagaggagatttgtttcccacggccctggaggggaaaattcctaaaacaccttggggaaaaaggaccctcccaaacccccatcttagggacttcgcaaatggattttttcttggatcttcgacaatttttcctccgtagaaataactccacccctgtcagagtttttggggccccccccgtgaatctttaaaattccctcctcccc

SEQ ID NO: 11906 - DNA, 534 bp, Homo Sapiens
cagagtctcagcatgatcagtcctgattgaatttcattatgtcacagtgatgcatgtcttagcactgattattggttttacttaatattccctaaaaacttgaggaaggaagatgatagaacatgagatactctttgttttgtacatactagaaaatacagctatcttctgatgagcaattgtgttgattttctttgcttttttcctcttatggagctctcagtgtgtgaaagttctaaagccacaagaatcaatgatgttttagctgctaatatttagtattgatcgtttcttttaaaaatgatttggggaacttgatctgtactgtaattttactaattccttgtgcagaggtgggtatggcaattagaagtcaagaaatgggttgtttagcttggtttgtttccctaacttctgattaactctctgtatgacaactctacagaagttgtgcgcgtgctttctcagcagcatttttccttcaaaatcatctttttaatcaacagtcattaataaatgtacatgtacgatatt

SEQ ID NO: 11907 - DNA, 406 bp, Homo Sapiens
  misc_feature (41)..(41): n is a, c, g, or t
aattgctttgattattccatttatgctggagattacaaatnttttttgtgaaaaaatcagatcttggtgaggacctcgagcagtaagatataaataactcccataagcttagcgttccagtaatggaacactaggcataaatggtttattcagttgtgcaaatgaaagccatctgacagttggctcacattgaacacctgtggagattaaggacgaggacaactatattgatgggcttggatgaactggggcagggcagctcatatttcgggagccaggagaacgagtgagtgctaaaacctcctgttttctgtgttaaacattccgtccctgtttgagacatcagtatgtacagttaacttttgttgagtgtttagcaggtactagggacatactagtgttttcc

SEQ ID NO: 11908 - DNA, 475 bp, Homo Sapiens
actacattaatcccgtgctcctcctcactgccattatagtttattgtgtggtcatgtttacattgtgacatccagccccaaggatggctgggagttgctcaggcatccaggaaaagtggggaatgctgccatctggtgacagcatgtagatttgggcagtgaacagggattgccatgccccagtcttcgcacctcgccccctcaccccctaactcacagcacaaaccctgcaaacccaaagagaatattaatacttgaagcaagaagggtgcatgccagtccttctccgacatggccagggggtaccaggccttgtgcgcctggcctcctagccctagccagggcgagagggcctttcccttgagctactgagctgctttgtgatgctgaaggatactgcccgcagcaggcagaggagggagggggcctagggctctgacccatctggaggaaaaccagatcggactataaaagg

SEQ ID NO: 11909 - DNA, 495 bp, Homo Sapiens
aattatagtgatagatttcatgtcatcagtaaaaaatgtgtgtgtatgagtggggtgcccactaagttcccctttgggatagaaaactgcttttgaaagctgctagcagaggcagtaagtcacctaggagcagttttgtttcggatgaccctaagttactgccagtagggaaaactggtgagataagtcaaatattttccactggaatgttacttccttagtgttttaatactgtcgaaggagtattaaaggagtcttgaggggccagtgggtgtaggggctctcccattggtagggttttgccgatgcttcccctaacctgtggaggcaagtacccctgagaactagggatgccctggggcagagtcctggagacaagtgttggaggagatggtaccgcactggctgaaaatgggaacggcagagagcaggtagtgtgacgtgatggaggagatggtaccgcactcactgaaaatgggaacagcagagagcagg

SEQ ID NO: 11910 - DNA, 254 bp, Homo Sapiens
agattctgaaactcaaggcctgtgctgcagagaagtctcactcaccctcctaccatagccccagaggggtccagaccccagggtggtttgcccagcagcaagctagacagtggatttgccaagacatctgttgtctttgttaaaccctaaattttaagaggaaatggcagaattaaaagcagaaacaagaagatggacatggattagaggttatgtattatgaagtaaactacaaggtactaacatcaaaaaaa

SEQ ID NO: 11911 - DNA, 550 bp, Homo Sapiens
  misc_feature (134)..(143): n is a, c, g, or t
ctcgcacagtgattctgggccctttatgcttgctgtctctcagaattgttttcttaccttttaatgtaatgacgagtgtgcttcagtttgtttagcaaaaccactctcttgaatcacgttaacttttgagattnnnnnnnnnncgccatagcacagctgtctttatgcaagcaagagcacatctactccagcatgatctgtcatctaaagacttgaaaacaaaaaacagttacttatagtcaatgggtaagcagagtctgaatttatactaatcaagacaaacctttgaaaggttacactaagtacagaacttttaaaccttgctttgtatgagttgtactttttgaacataagctgcacttttattttctaatgcagaggatgaataagttaaatacatgctttgaggatagaagcaaatgttctgtttggcaccacgttataatctgcttattttacaatatacacgtttccctaagaaatcatggcagagatgtgagggcagaatatacacaacagatgctgaaggagaaggagggtagtgttggca

SEQ ID NO: 11912 - DNA, 903 bp, Homo Sapiens
aaatcaaaactaccatgagaaatcatcttacctcaattaaaatagcttttacccaaaagacaggcaataacaaatgctgtgaggatgtagagaaaaaggaacccttgtacactgttagtgggaatgtaaattagtacaaccactatggacaacagtttggaagattctcataaaactgaaaatagagctaccatacaattcagcaatcccacagctgggtgggattggaaatcaatatatcaaagagaaggaaaggaaatcagtatatcaaagagatattttcactcccatatttatttattacaatagcaaacatatggaatcaacctaagtgtccatcgatgatgattggataaagaaaatgtgttatatatacacaatagaatactattcagctataaaaagaatgaaatcatgtcatttgcaacaacatggatggaactggaggtcattatgttaagtgaaataagccaggcacagaaagacaaacatcacatgttctcacttatttgtgggagctaaaaattgaaacaattgaactcatggagatagagagtagaaggatagtttgcagaggctaggaagggtagtgtgagctggcagggaggtggggatggttaatgggtacaaaaaacagaaagaatgaataagacctactatctgatagccccacatggtgactatagtaaataataacttaattgcacatttaaaaataacttaaacagtgtaattgggttgtttgtaattgaaaggataaatgcttgggggagtggataccccattctccatgatgtgcttattgcatactgcatgcctggaccaaaatatgtaccccataaatatatacacctactatgtgcccccgaaaaataaaattaataaaagatttaagccctggaa

SEQ ID NO: 11913 - DNA, 556 bp, Homo Sapiens
gcggccgccggcatgcagctgtgcgtggacgcctcgcagccgctttggatgctcttcggcctgcacgggaccatcacgcagatccgcatcctcggctccactatcctggccgagcggggtatcccatcactcccctgctcccctgcctccacgccaacctcgcccagtgccctgggagccgcctgtctgaccccttgctcagcacgtgcagctctggccctctgggtagctctgctggtgggacagcccccaattcgccagtgagcctgcccgagtcgccagtgaccccaggtctgggccagtggagcgatgagtgcaccatttgctatgaacacgcggtggacacggtcatctacacatgtggccacatgtgcctctgctacgcctgtggcctagcgcctcaagaaggctctgcacgcctgctgccccatctgccgccgccccatcaaggacatcatcaagacctaccgcagctcctagcccgttgcggtggcccatcccgcatacccatcttctcgggcttcagcccagtcccagctgaggaacaagccagtgg

SEQ ID NO: 11914 - DNA, 502 bp, Homo Sapiens
cgcttgggcctccctggcggtcccgccctgccctaggctttaccttggaagcctgagaggcgccggctctcttgctcctccatcgatggacactgcattgcttctcatcggacacttgtggagcgcaggggcctggggagcagcgctaaccctggaggcagcctttgggtgatggctttttcttcccttttcctcccgcgggcctgttttcaggtgttcctagcatttctgcctccaggcaggacggcaggggtgagcagctttgggagagacacctggcctttttctcctggagcctctccctcccggccctgggaagtgggcgcagccctgtgttcccccagcttggcagatgggctgcatgcggcgctcccttccttcccacgctcagcggccccggccagaccctggcagacttcacacctcattgctttaccccctggggcctggggaaatgtctgtactttgggaagtcacagaaatacatttttgtgcaaaatgg

SEQ ID NO: 11915 - DNA, 1033 bp, Homo Sapiens
gttccagctgctaaaccatgccacagacgtgtactctgtttcgacagcactactgctcctgtggcaaatacgcaggggccaaaccataagatggtgtcccaaaacaaagaaaggaatgcagtctcttttcctaatcttgactcacccaatgtgtcctccaccttaaaacccccttctaataatgctatcaaaagagagaaagagaagcctcctctgcctaagattttatctaaatcggaaagtgccattagccggcataccaccataagagaaactcaatcagaaaagaaagtttcaccaacagaaattgtgcttgaatctttccataaagcaacagctaataaggagaatgaattatgcagcgatgtaggaaagacagaaaaatccagaaaattcaaaactatctattgggcagcaaaatgggggtttgcgaagtgagaaatctatagcttcactgcaagaaatgaccaaaaaacaaggcacatcttcaaacaataaaaatgtactttcagtaggcacagctgtgaaggatctaaaacaagaacaaactaaatccgccagttctttgattaccacagaaatgttacaggatatacagaggcacagctcagtaagtaggcttgctgatagtagtgatttacctgtgccccggacacctggctcaggggcaggggaaaaacataaagaagaacctatagatattatcaaggccccctctagtaggcgtttcagtgaagacagtagtacatcaaaagtaatggtccctcctgtcaccccagacttgcctgcctgcagccctgccagtgatacagaaagtgaaaacagtgtaaatatggctgcccacacattaatgattctctccagggcagccatttctaggactacttcagcaactcctctgaaagataacacacaacagtttagagcatcttcaaggagcaccacaaaaaagcggaaaattgaggaattagatgaacgtgagcgaaactctcgtccttctagtaaaaatcttacaaattcatcaataccaatg

SEQ ID NO: 11916 - DNA, 420 bp, Homo Sapiens
aaggaaccaccgaaaccccaacccgacaatgacaatgcatagttgctcagtagtgcctcctttctgctgaggctttccagccccagaggcctcagcactaggcaccaggggcctctctctaggatgaggccagggagcaaagtctcccactcacacacccagaggcaggcacctggagccggcacagacgctggggctaatgagcccacgtggtgtctagagccacatgggaggtggcctcttgctcctctcagggcagccaggtacaagggctcctctgctgagtgcatggcctggcaggcattcggctcacacacctggtttccaaataagcacgcactgcgacctgtccacgggccctctagaagaggccagggaaaacaggaccctgaggccttaagaaagctgttcccgtgctcc

SEQ ID NO: 11917 - DNA, 626 bp, Homo Sapiens
cgttatagaagtcccggtgaggggttactcttcaactctttgaactcggacatttcgtttacgatctccatgagggctgacttttgatttcagaaagttcagtcgccggtgacaatagggtttcgtggggccatcggtgatgagagccaggatgtggctcatgtccaccgtgtaagtctccaggtcggggtaaggtaagctgtgcggctcctggtgctccagcatcttcttgttatcatacacaaagaggatgcccccctgcatgtggaccaagtaatccaggttggggggtgcatcatccaggcagtaggggtcttcctggggcagtggaggagggtggaagtctggaaggccctcttccggaggagcagtatccgcccgcggatgaacccaggtactgggatgtgtgttcgccggaaagttagataagcgagacgcgcaatatatctcccggattaattaaggctttcaaaaatcttgggtgcctggtcacagacccccacagtgatctcgggacagtaatctccgctcaaggtgaaccgctggaactcaggcatggcatatggtgctcgcgtgtgcaaggaaatgggtccagtgagcacaggggttgtgggagacatggccgg

SEQ ID NO: 11918 - DNA, 859 bp, Homo Sapiens
tccgagccttgcggagcgcggcagtgggcgccggctgcccgcagcccctgacccggccccggacggagcgccggccgcaccaccgccctctggccgttgcctcaccggctcggcaagatgtcggtgaaggagggcgcacagcgcaagtgggcagcgctgaaggagaagctggggccacaggattcggaccccacggaggccaacctggagagcgcggaccctgagctgtgcatccggctgctccagatgccctctgtggtcaactactccggcctgcgcaagcgcctggagggcagcgacggcggctggatggtgcagttcctggagcagagcggcctggacctgctgctggaggcgctggcgcggctgtcgggccgcggcgttgcacgtatctccgacgccctgctgcagctcacctgcgtcagctgcgtgcgcgccgtcatgaactcgcggcagggcatcgagtacatcctcagcaaccagggctacgtgcgccagctctcccaggccctggacacatccaacgtgatggtgaagaagcaggtgtttgagctactggctgccctgtgcatctactctcccgagggccacgtgctgaccctggacgccctggaccactacaagacggtgtgcagccagcagtaccgcttcagcattgtcatgaacgagctctccggcagcgacaacgtgccctacgtggtcaccctgcttagcgtgatcaacgccgtcatcttgggcccccgaggacctgcgcgcgcgcacccagctgcggaacgagtttatcggggctgcagctgctggacgtccttgggctcgcctgcgggtgaagtccccatgttagcgggtcctgccgggttcc

SEQ ID NO: 11919 - DNA, 485 bp, Homo Sapiens
  misc_feature (368)..(368): n is a, c, g, or t
  misc_feature (397)..(397): n is a, c, g, or t
atgggcccagcccctgcccatctagttggtttggggaccctggtgcatgctagtgggcatgggatcagccaagcttcgttccatcttttcctaaaggtcagagctgcagcctagggggcactgccctacagaaaaggtctgcctgagaggcctgaggagcccagagcacttgactgagcttcccggaaactggccctaacctgtctgtctccgtggatgcatcctaaccctaaggaaaattccccaggctgtgatctaccctagagaaggctcgctccctgcctactggctcacaaatgaggaccagtgagccatgtccttgttccttgtttgagactgggctgcaggccccaggaagactttccttnacccaccatccccctaacctcggcagggnttctgtcctgtggagttccctggacaacttggtctggctcttgtgccaagggctgaaggaggtaccctcttggcagatgggggcatca

SEQ ID NO: 11920 - DNA, 776 bp, Homo Sapiens
gggactaggctgggtgtggagctgcagcgtatccacaggccccaggatgcaggccctggtgctactcctctgcattggagccctcctcgggcacagcagctgccagaaccctgccagccccccggaggagggctccccagaccccgacagcacaggggcgctggtggaggaggaggatcctttcttcaaagtccccgtgaacaagctggcagcggctgtctccaacttcggctatgacctgtaccgggtgcgatccagcgatgagccccacgaccaacgtgctcctgtctcctctcagtgtggccacggccctctcggccctctcgctgggagcggagcagcgaacagaatccatcattcaccgtggctctctactatgacttgatcagcagcccagacatccatggtacctataacggagctccttgacacggtcacgtgccccccagaagaacgctcaagagtgcctcccggatcgtctttgagaagaagctgcgcataaaatccagctttgtggcacctctggaaaagtcatatgggaccaggcccagagtcctgacgggcaaccctcgcttggacctgcaagagatcaacaactgggtgcaggcgcagatgaaagggaagctcgccaggtccacaaaggaaattcccgatgagatcagcattctccttctcggtgtggcgcacttcaaggggcagagggtaacaaagtttgactccagaaagacttccctcgaggatttctacttggatgaagagaggaccgtgaggggtcc

SEQ ID NO: 11921 - DNA, 855 bp, Homo Sapiens
ctctcagagccgcacactccgcggagctcctgccacaggccgtcgccttcgcggcggctctccagccccgcgcctcagcctcggcgccgcatcaccgcgtcccaggcctccttccctccctctgccactccccctccctttcccgctcttcttgcccaccgcggccggcagagagagcctggatacgaagcaggcgggcttcagagtgggtaggaaaaatggaggtgccgcgcctggatcatgccctcaacagccccaaccgagcccctgtgaggaggtgatcaaaaacctcagcctggaggccattcagctgtgcgaccgggacgggaacaaatcacaagacagtggcatagcagagatggaagaacttcctgtaccacataacatcaaaataagcaatataacgtgtgactcattcaagatttcatggcgaacatggattcaaaatcaaaggatcgcattacacactatatcatggacctcaacaagaaagagaacaagaacgtccagtaaagtttaaacacaaggatgtgcccacaaaaattggtggcaaaagctgttcccttgcctatgactgtccgtggacacctggattctctaagcccaagaactgaatatacagtagcagtgcagactgcctcacaaacacgtagatggtgcattatgtcgcgccctgacctgcgcagtgccacgctcctagccactgcctgccacccggcgcacctaatccagacaggtccaccttagacagcaacagcggccggacgaacgggctgcaacgtgactcgaccgcgaacgcaagtgaccacaacctagagcgctgcgcgctcaatcgtcgctcaggcgcacagcaca

SEQ ID NO: 11922 - DNA, 733 bp, Homo Sapiens
cctttgctgtagtccacgcccccttgccgctccggtgacagtctctgcggaaagtcacgttggtgatttcgggagagcacagaacgggacgacggcgctcttgctgggtcatctgggccaggtgacgaagaaacagtttcctggtgaagcagtccctcacccctagtcagcccacacccctagggcctaaagatgctgaggtctgtatggaattttctgaaacgccacaaaaagaaatgcatcttcctgggcacggtccttggaggagtatatattctggggaaatatggacagaagaaaatcagagaaatacaggaaagggaggctgcagaatacattgcccaagcacgacgacaatatcattttgaaagtaaccagaggacttgcaatatgacagtgctgtccatgcttccaacactgagagaggccttaatgcagcaactgaattccgagagcctcacagctctgctaaaaaacaggccttcaaacaagctagaaatatgggaggatctgaagataataagtttcacaagaagtactgtggctgtatacagtacctgtatgctggttgttcttttgcgggtccagttaaacataattggtggatatatttacctggataaatgcagcagttggcaaaaatggcactacaattcttgctcccccagatgtccaacagcagtatctatcaagtattcagcacctacttggagatggcctgacagaattgatc

SEQ ID NO: 11923 - DNA, 1491 bp, Homo Sapiens
  misc_feature (1469)..(1469): n is a, c, g, or t
ggcctacgtaactataagcgggcctataggtagcgaggcctgggtggcgaattcggcacgaggggtgtcggcgggcggccgcggccgggtctagcggtgcctgcggaagaaggaggaggagggctggcgatgagaagcagcagggggaatcaagggcaagaagggacccagaggggcaggtggctgagatgctggcgtccaggtgacccgaggaatcctctggagatacaggcccgcgcatgcgcgtgctcgagcgctgaagcccattgcccgcagggcgctggactggcgccccggccggcgaggctgtctagtccaggctccaggcccccggctctggccaggcgccgccgcctcccggtgcagctgaaagtcgacgaagagggcggggcgggggcggcttgtggacttccacacttttcctctcttcgggccagtctggggagagggtggctagctgtggcggcggccaattacgtggcggacctgcggggctaagctggcacgtcacttccgactagtggagtatttagccttataacattcaaggattaggtaaaagtcttgcagtgaaaaacccgaggacccttaccgcaagtgtcttttgctcccagctactgatactggattccactcgtgattctccctttcttagcgcattcatgatatagacatcagtctctgagctggaggaggacaaaggcagcggtcctgtgaattctatgctctagcttgggttaagggattcggaattgcacttgtctcagagagctccctctttgcccactagcagggcattagctggtgctgaagacagtggctgcttggcgagcctggatctccaagtgaccccctcagcaactcctgatgaacaggactgaagccaatattaaagcaagtcaaccaaaggttctctggtgtagacaagacagcaaaaggacagactaccttgtggaacctagcatagttctccttctgcagcactaagtaacatttgttctccgttaagatctttgcaaaccacacacaagaattgctggtcatcctgccaatagatgctgctcacagaaccaaatttcctgtgctgaattgtcactcatgggcttgagagtaggagactggagaccaaggtggctagaatccagttgggcctgatgtctccctgttgaaagggctccttgtggaatgaatagcacatggctcctgtggtggatctgatagtggcatagcaccaagtgatgcaggcctgccaggggccacagacacagaagatgctcccggggtcccccatgtactccagacacactgcaggccacctctcccagcaggttgccagtcatgggccccatcatcatgacttctgtccaaggtactgtgtgcagaaatgtgattgagaattcaagtcagggcctctctgccctttttccctccagaaacaaaaccaagaataatttatccctgaaaacggntgaaaaaaaggaaaggaagggt

SEQ ID NO: 11924 - DNA, 467 bp, Homo Sapiens
acaacacagatgagatattctacacattaatctacttatctggaatcactttgcctctaaaggccagagaaaaatcacagcttccttatcggaggggaaaaggacaggtgatctggggaaaacgcagctacacctggagcaaggtctcttcccggcttggcaatctcagctgtgccggcgctacgggacccgagccgtcccagaaaccaaagggcaggcacggcagcaaacgcctgagtgctgctgccttcggtgactatatgagaatggaaacttctaaggaagccaggttgttagaattgttaccccccatctcagcctggataatctatgttatctctgagtaaagggggtaacaattattatccaggctgagatggaaaacaagccctttattgaattttcaacacagactccctgcttctcatctccttaataaaatttcattaaaatccccttaaaatccc

SEQ ID NO: 11925 - DNA, 835 bp, Homo Sapiens
  misc_feature (165)..(165): n is a, c, g, or t
cagaatatcctgtgaagaactaatgaaggatgccacaatctatcagatttatgaaggtacttcacaattcgaagaactattgtagcccgtgatcacattgactagtacaaagatgaaacaagttactgtagagatattgaatagctagagcacaagccactgttncagctccagaaaaaagaaagggctttaacgttttgtccagtgaaaacaaatcctcttatattaaatctaagcaactgcttattatagtagtttatacttttgcttaactctgttatgtctcttaagcaggtttggtttttattaaaatgatgtgttttctttagtaccactttacttgaattacattaacctagaaaactacataggttattttgatctcttaagattaatgtagcagaaatttcttggaattttatttttgtaatgacagaaaagtgggcttagaaagtattcaagatgttacaaaatttacatttagaaaatattgtagtatttgaatactgtcaacttgacagtaactttgtagacttaatggtattattaaagttctttttattgcagtttggaaagcatttgtgaaactttctgtttggcacagaaacagtcaaaattttgacattcatattctcctattttacagctacaagaactttcttgaaaatcttatttaattctgagcccatatttcacttaccttatttaaaataaatcaataaagcttgccttaaattatttttatatgactgttggtctctaggtagcctttggtctattgtacacaatctcatttcatatgtttgcattttggcaaagaacttaataaaattgt

SEQ ID NO: 11926 - DNA, 334 bp, Homo Sapiens
gcccgaggccgcccgggctttgcctccaccagcgccctggcctccgctcgggcctccacacgggcctccgaagagctgccgcgacgcccgccccgcagggcaggtaaagagattataaatcttccactgaatgaaaaaaattttcttaaagctgcatatactccaagaaaaaaaccacaaatgtttttctgttttgcctgaatacatgatttaaacaagagatttccacagaagtctaccttctgtctgacggatatgccatcctgaaaaaggaaagaagctgaacttcaagttcctttcatttagccttgggcttccaccttctctgtggcta

SEQ ID NO: 11927 - DNA, 1344 bp, Homo Sapiens
gtccgtttccagcggcgaatgtgtcccccgtgctggccctgggataactccagggccgaactgttgagggccgcagccggagtaaagaccacgggggagaactctcatcccgtgcaacccggactccaaagggcatcaccagtggtggccaggcaagaagccggggacgccggcctgctggggccaaatgccgaggccaagaagaacgggggttccctgaagcaagaagatcgaggcaggagctcccgcggtcaaactgctacatgccgggcccaatgggcgagacgggtgacgctgccccacaagccccagcatccccgtaggcatctcgctggggctgctgaagcgggagatggcgcaggggctgctccctgaggccaagaagcctcggctcctgcacggcaccctgatcatgaaggacagcaacttccggctggtgtcctcagagcaagccctcaaagagctgggtctggctgagcaccagctgcgcttcacctgccgcgtgcacctgcatgacacacgcaaggagcaggagacggcattgcgcgtctacagccacctcaagagcgtcctgaaggaccactgtgtgcagcacctcccggacggctctgtgactgtggagtccgtcctcctccaggccgccgccccttctgaggacccaggcaccaaggtgctgctggtctcctggacctaccaggacgaggagctggggagcttcctcacatctctgctgaagaagggcctcccccaggcccccagctgaggccggcaactcacccagccgccacctctgccctctcccagctggacagaccctgggcctgcacttcaggactgtgggtgccctgggtgaacagaccctgcaggtcccatccctggggacagaggccttgtgtcacctgcctgcccaggcagctgtttgcagctgaagaaacaaactggtctccaggctgtcttgcctttattcctggttagggcaggtggtcctagacagcagtttccagtaaaagctgaacaaaagactacttggtactctcttcttggggtacatggctgtgtcctgcactgggccccatcccgcctgggacaaaaacgggcatccagggtgctgggacccgggcagggaggctactgtggaaaccaggcagcagtgctgtgggccccaagcagctgtgactgccctggcttgaccagcacaggggttgggcctggtggggcctaactttggcttgagtgtccagggtcatccgtggctcccgaactgtggcccctgcagggtgcaggaggcagcaccgaggttcccgtacagcactgacttgaggaataagccgtgggctggggcta

SEQ ID NO: 11928 - DNA, 305 bp, Homo Sapiens
aaaatcagtgtaaaggaatagagagcagctgacacgctgtcctctgccgacctgtcgctggagaggttgggactctggatgcgcgcggggctctggcctaccggtgacccggctagccggccgcgctcctgcttgagccgcctgccggggcccgcgggcctgctgctctctcgcgcgtccgagcgtcccgactcccggtgccggcccgggtccgggtctctgacccacccgggggcggcggggaaggcggcgagggccaccgtgcccccgtgcgctctccgctgcgggcgcccggggcggccgct

SEQ ID NO: 11929 - DNA, 609 bp, Homo Sapiens
  misc_feature (578)..(578): n is a, c, g, or t
ccgtccgggaccggcaccgggatggagtcggggctgtagcgcagccgcgggcgcatggtgttcagattgaggaaggggtggcggtgcaccgagctggaggctgccgcagaggaggcggcgcgaaggcctccttgcccgggagcgcgcgcgcctcttccaccttggccggcgctgtgccctcgcgaaccgggctcctgcgctcctccgcgcccaggccgcgagtgctggacgagatggtggcggggctatggcgtgagtcgggcgacgctttgtccagccgcccgctgtcccggggccgctcagcagcgaaaaggtgagccttgaccgcggggctgcccttgtcacggcagggctcctccgacgtggtggtggagatcttggccgcgtcgcaggcctcggggccatgctcctctttgctctcggcctcggcgtcgctctcaccctcgctgggacataaatctaccacaggcgaaggaaaaaaccaaggcagaagggcgttatctccagtatgagccaacggaactccagttcccaagttggaatcccagctcgtggcttagtggctgtgtaatcccggngaaagccccttagcctctctgcacctcagtg

SEQ ID NO: 11930 - DNA, 372 bp, Homo Sapiens
gccagggtggcggcacacgccagcagcccggccaccaccaggttctccgtggacacgcacgtccaccgcaggcccaggcagcacttggccgccaacaggaggcgccgcaccaccgcgttcagccgttcgccaaggctctggaaagtgaccagcgtcagcgggatgcacaggagcgagtagaacatgcagaagaccttgccggagtccgtacccggcgcggcgtggccgtactcgatggtagtgatgacggtgatggcgaagtagaaggagccggggaacttccactggcggccggcgcggtggggctcagcctggagcgccaggcgctccagctcgcggtagtcctcggccgagaagccgaacttcctccgg

SEQ ID NO: 11931 - DNA, 503 bp, Homo Sapiens
  misc_feature (20)..(20): n is a, c, g, or t
gcacgaggcgcgctccgggntcatggagatccccgggagcctgtgcaagaaagtcaagctgagcaataacgcgcagaactggggaatgcagagagcaaccaatgtcacctaccaagcccatcatgtcagcaggaacaagagaggtcaggtggtggggaccagaggtggctttcgtggttgcacagtttggctaacaggcttgtctggagcgggaaagactactgtgagcatggccttggaggagtacctggtttgtcatggtattccatgctacactctggatggtgacaatattcgtcaaggcctcaataaaaatcttggctttagtcctgaagacagagaagagaatgttcgacgcatcgcagaagttgctaaactgtttgcagatgctggcttagtgtgcatcacaagtttcatatcaccttacactcaggatcgcaacaatgcaaggcaaattcatgaaggtgcaagtttaccgttttttgaagtatttgttgatgctc

SEQ ID NO: 11932 - DNA, 741 bp, Homo Sapiens
tctgcggccacgaagactgttttaacttgtaccactttcccttccatttttcctggggtgcctctcaccctgcatctgcgcgttcagcaagctggatttcgggaatgctcagttcagaagagaaaaaattgccgggaatcaagtccttctttttgttagtcggtagtcgattgatgggaagtgttcaaaatcattcgatgtggtgacaaggtttcaccaggtactgccttctaacttgagctggccatttccacatgtcagataggaccaacttgccttttaactacccgtgtgatacttaaacactgttgccggtatcacagcttttcttcaaaacaggaagcaacgagaatgagggcattccagtagcaggagacagcatgcatagagatgctgatgaagaaagagcctagcgcacgtgggaaactgcaaaagttcagactggttggaatgctggaaatgttgtgaatgacaggagatgaggctggcgagaaaacagaggtcagattgtggaaggctgtcaagccaaagactttgattttattcttgagattgatgagatgtgtgtaatccaggagtgtgcaaaacaatctgtaagggttcagaaaacatactgcttctatatatagttacctttgtcttaacttgaaaatttcaaattgtgtaggagttacaatgtgtgtaattgttattatagtactggatccaaataatttataaataaataaatatagacataat

SEQ ID NO: 11933 - DNA, 916 bp, Homo Sapiens
  misc_feature (747)..(747): n is a, c, g, or t
gcacgaggccctccctgcgtttagattcagttgcaccttttattattttaactcttctccttaggacacgcagcccccaatttgtccctccggcctgggcggcccctggtcccgcgcgccagcatgggagagcgagggacctgcccgcggcccgccggcgtgtgcaaggaggtccagccgccgcgcccgctacccggagtctgaggacgggtgtccagggacggagaggcaggtgagagggaggtggctaagctggctatggtgacaggacgatgttggccagaaagagtatcatcccggaggagtatgtgctggcgcgcatcgccgcagagaacctgcgcaagccgcgcatccgagaccgcctccccaaagcccgcttcatcgccaagagcggggcctgcaacctggcgcataagaacatccgtgagcaaggacgctttctacaggacatcttcaccaccttggtggacctgaaatggcgccacacgctggtcatctttaccatgtccttcctctgcagctggctgctcttcgctatcatgtggtggctggtggcctttgcccatggggacatctatgcttacatggagaaaagtggaatggagaaaagtggtctggagtccactgtgtgtgtgactaatgtcaggtctttcacttctgcttttctcttctccattgaagttcaagttaccattgggtttggagggaggatgatgacagaggaatgccctttggccatcacggttntgattctccagaatactgtgggtttgatcatcaatgcagtcatgttaggctgcattttcatgaaaacagctcaggctcacagaagggcagaaactttgattttcagccgccatgctgggattgccgtccgaaatgggcaagctgtgcttcatgttccgagtgggtgacc

SEQ ID NO: 11934 - DNA, 733 bp, Homo Sapiens
  misc_feature (534)..(579): n is a, c, g, or t
tagcagttaactgcaagtgttaatttctacacatgatacatgagtgttgctacactcaattacaattaaggatgcagtatatcacctaaaaatcccattaaagatgctattgcagtaacagtaaaaatatacagttatattctaccacaatacccatttaaaagttagtttcctacatgctgcctttggcctaaaaagttcaaaacgaattcaaattaatttgttatttacaatttcactaattcaagacttcatttaaaaatattgcttatttagtgtaaaagtctgagataaactgtaaacatatttaataagttacatatggttaacaatcatatttggcacctaaatatacatgtttaattcctaacacatcaagtttatcctgacaaacaaatttacaaaaaacagtaataaagcaaatatctgagagataatactgcatctttaacagtaactgtgtacttctgtttaaatgtagaatgtatagaaaatctgttgtgaatgaagtatgcacagtttatcaattttttnnnnnnnnnnnnnnnnnnnnnnnnnnnnnnnnnnnnnnnnnnnnnnctcttgaggtgttttcttttttagctttcatgtctttgtgatgagctggcaggtgatagggcagctggagaaagcatgctaacttgattgagatccacagatgatttccgaggaatacttgatggcttagaagaaggaggaggagttggagatt

SEQ ID NO: 11935 - DNA, 965 bp, Homo Sapiens
tggaagggggacctgctgctggaagagcagcggccgagccggggccatggcgaagctgctgagctgcgtcctaggcccccggctctacaaaatctaccgggagagggactctgaaagggccccggccagcgtccctgagacgccaacggcagtcactgccccccattccagctcctgggatacgtactatcagccccgtgccctggagaaacatgctgacagcatcctggcactggcttcagtattctggtccatctcttattactcctctcccttcgccttcttctacttgtacaggaaaggttacttgagtttgtccaaagtggtgccgttttctcactatgctgggacattgctgctacttctggcaggtgtggcctgcctccgaggcattggccgctggaccaacccccagtaccggcagttcatcaccatcttggaagcaacacatcggaaccagtcttcagaaaacaagaggcagcttgccaactacaactttgacttccggagctggccagtcgacttccactgggaagaacccagcagccggaaggagtctcgagggggcccttcccgccggggtgtggccctgcttcgcccagagcccctgcaccgggggacagcagacaccctcctcaaccgggttaagaagctgccttgtcagatcaccagctacctggtggcgcacaccctagggcgccggatgctgtatccaggctctgtgtacctgctgcagaaggccctcatgcctgtgctgctgcagggccaggcccgactggtggaagagtgtaatgggcgccgggcaaagctgctggcctgtgatggcaatgaggatcggacaccatgttgtggacccggcgggggaagctgagacccaggacagaagcgaagaccgacggaagggaagctgggtatgaggtggctgcaatacagcccctggagcgatattcgccgggtgaaacacg

SEQ ID NO: 11936 - DNA, 999 bp, Homo Sapiens
cggtccggaattcccgggataaaggtctgaggagaaagtgtagcaatgtcaattcgtgttgaacaatttccaccaacttacttataggcggaccttgccaagtatatctgtgaaaatcaagattcgatctccagtaaactgaaggaatgctgtgaaaaacctctgttggaaaaatcccactgcattgccgaagtggaaaatgatgagatgcctgctgacttgccttcattagctgctgattttgttgaaagtaaggatgtttgcaaaaactatgctgaggcaaaggatgtcttcctgggcatgtttttgtatgaatatgcaagaaggcatcctgattactctgtcgtgctgctgctgagacttgccaagacatatgaaaccactctagagaagtgctgtgccgctgcagatcctcatgaatgctatgccaaagtgttcgatgaatttaaacctcttgtggaagagcctcagaatttaatcaaacaaaattgtgagctttttgagcagcttggagagtacaaattccagaatgcgctattagttcgttacaccaagaaagtaccccaagtgtcaactccaactcttgtagaggtctcaagaaacctaggaaaagtgggcagcaaatgttgtaaacatcctgaagcaaaaagaatgccctgtgcagaagactatctatccgtggtcctgaaccagttatgtgtgttgcatgagaaaaacgccagtaagtgacagagtcaccaaatgctgcacagaatccttggtgaacaggcgaccatgcttttcagctctggaagtcgatgaaacataccgttccccaaagagtttaatgctggaaacattcacctttccatgcagatatatgcaccactttctgagaaaggagagacaaatcaaggaaacaaactgccccttgttgagccttgtgaaacacaagcccaagggcaacaaaaggagcaactggaaagctggttatgggatgaatttccgcaccttttttgt

SEQ ID NO: 11937 - DNA, 408 bp, Homo Sapiens
gcacgaggtcatggtgtgtaagaagatccaagcctggttgcagtatgcctgaaatttgggatgtagaagatcctgccaatgctgggaaaactcccttatgtaacctcttggtgaaggattccaaacctcacttcaccactgtattccagaacagtgtttacaaagtcctagaagttgtaaaagaatgactgctacatgacctgctgcctacggagaactacatctgtaatggttttaatgttttgctaagtcatgtgttgttcatatcccaaaaacttttataggtaactgttttcaaatagaaaacgtgttatttggtcaatttgaatgtcattctaattataaaaatgacttacacctttatcaattggttactatttcaatgcaccctttaaaatttgctatgca

SEQ ID NO: 11938 - DNA, 526 bp, Homo Sapiens
gcacgaggtcgtcatggaggcggtattgaccgaagagcttgatgaggaagagcagctgctgagaaggcatcgcaaagagaagaaggagttgcaagccaaaattcagggcatgaagaatgctgttcccaagaatgacaagaagaggaggaagcaactcaccgaagatgtggccaagttggaaaaagaaatggaacagaaacatagagaggaactgggagcaattgaagctgactactaaggagaataagatagattctgttgctgttaacatttcaaacttggtgcttgagaatcagccacctcggatatcaaaagcacaaaagagacgggaaaagaaagctgcattggaaaaggagcgagaagaacggatagctgaagctgaaattgaaaacttaacaggagccagacatatggaaagtgagaaacttgctcaaatattggcagctagacagttagaaattaaacagattccatctgatggccactgtatgtataaagccattgaagatcaactgaaagaaaagga

SEQ ID NO: 11939 - DNA, 875 bp, Homo Sapiens
cgaggagccggagaagaaaagaaggagaatagaggagctgctggctgagaaaatggctgttgatggtgggtgtggggacactggagactgggaaggtcgctggaaccatgtaaagaagttcctcgagcgatctggacccttcacacaccctgatttcgaaccgagcactgaatctctccagttcttgttagatacatgtaaagtgctagtcattggagctggcggcttaggatgtgagctcctgaaaaatcgggccttgtctggttttagacagattcatgttatagatatggacactatagatgtttccaatctaaataggcagtttttatttaggcctaaagatattggaagacctaaggctgaagttgctgcagaatttctaaatgacagagttcctaattgcaatgtagttccacatttcaacaagattcaagattttaacgacactttctatcgacaatttcatattatcgtatgtggactggactctatcatcgccagaagatggataaatggcatgcttgatatctcttctaaattgatgaagatggtgtcttagatccaagctccatttgtccctttgatagattggggggaccagaaggtttcaaacggaaatgccgggtagatttcggcttggaatgactgcttgtatcgaatgtcacgctggaacctttatccaccacaggttaattttcccatgtgcaccattggatctatggcccaggctacccagaacactgtattgagtatgtaagggtgttgcagcgggctaaggagcagctcttggcgaaggggtcccttaatggcgatgactgacctatcatgcatttccaaaatcttagagagacctccaaatatattcagggggc

SEQ ID NO: 11940 - DNA, 598 bp, Homo Sapiens
cgcgccgctcggtgagagcccccgagcggcaggtggccaacacaaaaagggagccggagaagccctagcctgctgcccagcagcttgcgggcgtgttctcgcggttccgggcctcaaggcgacggaaacgaaaggcgagcgaagcgcggaggatccggcgagaagaagcgtcagggagcctcggcggtgtccccggggtccgccgaagccacccggccgccggctggggcccggggtggtgaggaagtgctccgaggcctcgccgaggcctagcgccggctttgtgtccgaggctggcggctggctggcgggggtgaggcggagcctgggggcggcctgcgggaaggcctctcctccgccgaccgcgcgttttcggcctaggccgtggggccgctcgtggcctccggggagcaggcgccaggggtttgtgtgcggtgggggcctgggcctgggcctggggaagctgacgccggtcgtccggaagccaggaggaggcgtgaggccgctcgtggactccgggcctaggccctctcccctcaaccttctcccggggcctgggtcaccccaatccacggagagagagacccgcacgggaggt

SEQ ID NO: 11941 - DNA, 582 bp, Homo Sapiens
tttggtgaaggaggaaatgtttacaattctgccatgccatgaataggagttttccaccgggtgtacactgctgttaacaaggtgtaaatacttgtccagtaaagagaccgtacggtactgctgatggacgtcccaacacaatgccagatgcaaaaacttctttggtgattgcttttgataacactgagtggctaaaggtcttctttcacatctttgcccacctcaaatcctgaaggcaaggtctctggaatttgaggctgtgccctcacatgcctccaaggcaccaacaaagcaaaatgaagagtctgcactgcttatcagttgacccaacactcagtccacattggaggggaaggggtggtgggctgaggatgtcttcttcctgtccaggatgcaatatggtcaaggatgaaaggaaagagatgctgggagcaagtctgcattgaagatgtatttctgttgctttactaccaaccctggttataaatgatgaaactataatgggtctgtaatagctactttcccatatagctcttgtctgtacatacataaaattaaaaataatagaatacttccattact

SEQ ID NO: 11942 - DNA, 946 bp, Homo Sapiens
cccgaaatcagactgctgccttggaccgggacagctcgcggcccccgagagctctagccgtcgaggagctgcctggggacgtttgccctggggccccagcctggcccgggtcaccctggcatgaggagatgggcctgttgctcctggtcccgttgctcctgctgcccggctcctacggactgcccttctacaacggcttctactactccaacagcgccaacgaccagaacctaggcaacggtcatggcaaagacctccttaatggagtgaagctggtggtggagacacccgaggagaccctgttcacctaccaaggggccagtgtgatcctcccctgccgctaccgctacgagccggccctggtctccccgcggcgtgtgcgtgtcaaatggtggaagctgtcggagaacggggccccagagaaggacgtgctggtggccatcgggctgaggcaccgctcctttggggactaccaaggccgcgtgcacctgcggcaggacaaagagcatgacgtctcgctggagatccaggatctgcggctggaggactatgggcgttaccgctgtgaggtcattgacgggctggaggatgaaagcggtctggtggagctggagctgcggggtgtggtctttccttaccagtcccccaacgggcgctaccagttcaacttccacgagggccagcaggtctgtgcagagcaggctgcggtggtggcctcctttgagcagctcttccgggcctgggaggagggctggactggtgcaacgcgggctggctgcaggatgccaacggtgcagtacccccatcatgtttgccccggcagccctgcggtggcccgggcctggcaacctggcgtgcgaagctacggccccgccacgccgctgcaccgtatgatgtttctgcttccgttactgcctcaaggggcgggtgtctaccttggagcacc

SEQ ID NO: 11943 - DNA, 444 bp, Homo Sapiens
gcctccactgcttcttcaacggaccagggcctggtgcagtggctacaggaactgaatgtggattcaggcaccatccaaatgctgttgaaccatagcttcaccctccacactctgctcacctatgccactcgagatgacctcatctacacccgcatcaggggagggatggtatgccgcatctggagggccatcttggcacagcgagcaggatccacaccagtcacctctggaccctgagagctgaatgagggcatcataggccagacaggcccaaggatggatgaatggagaggacaaaggcagcttctgacacaccagccccaggacctggggcgactggaggaagccaggcgagtggggcccaggactggttccagtgagagaaaccaaccacaggcacccaagcactaccagacaaagcgtattaaacagaacacttttgaa

SEQ ID NO: 11944 - DNA, 702 bp, Homo Sapiens
  misc_feature (395)..(452): n is a, c, g, or t
atcgtcctgaaggagaaacataagaaagcctgtgtgcatggcgggaagacgtctcccacggggaggtgtggcacccggccttccgtgccttcggccccttgccctgcatcctatgcacctgtgaggatggccgccaggactgcaagcgtgtgacctgtcccaccaagtacccctgccgtcaccccgagaaagtggctgggaagtgctgcaagatttgcccagaggacaaagcagaccctggccacagtgagatcagttctaccaggtgtcccaaggcaccgggccgggtcctcgtccacacatcggtatccccaagcccagacaacctgcgtcgctttgccctggaacacgaggcctcggacttggtggagatctacctctggaagctggtaaannnnnnnnnnnnnnnnnnnnnnnnnnnnnnnnnnnnnnnnnnnnnnnnnnnnnnnnnnaatcttccacttgactcagatcaagaaagtcaggaagcaagacttccagaaagaggcacagcacttccgactgctcgctggcccccacgaaggtcactggaacgtcttcctagcccagaccctggagctgaaggtcacggccagtccagacaaagtgaccaagacataacaaagacctaacagttgcagatatgagctgtataattgttgttattatatattaataaataagaagttgcataaccatcaa

SEQ ID NO: 11945 - DNA, 455 bp, Homo Sapiens
ccgcgctccgaggcgcctgtgcatgccacctcccgagctccacaaacttccactaaggcgctcccacgaacccccgttcccaggcggagagtggacaaggcagtccgtcgagcggaggcccgaaggtattgtctgagcttctgggaaatggcctgcgggccagggactgtcatcaccccgcgtggaagccctgaccctcctcaccacctgcggtgctccaaggcacaccttcaactctcttctctcccttgcttgccctagcagagtcatacggaataatggaaaactcaacttctgttcgacttgtggatcttcacactcagaaacaaattacgttcctagataaagtaaacgtggcatgatcttgataactgttgaatctggatgagggcatgtggagttcactgaactcttctatgtaaatttgaaattttcataataaaaattttaaaata

SEQ ID NO: 11946 - DNA, 438 bp, Homo Sapiens
gccgctgctagttcttggctctgggaggcccaggtggctctgcagcagcctctgccaccctgtgacctgcgagtattgggacatccctagctgacgccaggacacccgggaagccgaggaatggactcggtggcttttgaggatgtggctgtgaactttacccaggaggaatgggctttgctagattcttctcagaagaatctctacagagaagtgatgcaggaaacctgcaggaacctggcttctgtaggaagccaatggaaagaccagaatattgaagatcacttcgaaaaacctgggaaagatataagaaatcatatcgtacagagactgtgtgaaagtaaagaagatggtcagtatggagaagttgtcagccaaattccaaatcttgatctgaacgagaacatttctactggattaaaaccatgtgaatgcagt

SEQ ID NO: 11947 - DNA, 346 bp, Homo Sapiens
tacacacatgcagaccgcggcgtgccccgttgaggaagccaagtggccaagcagcaggtggctgtggagacgtctaatgaccattctccatatacctttccacccaataagtaactgtgagatgtaccgaagggagttcttacatgaagaagggtgtgaaggctgaacaatcatggatttttctgatcaattgtgctttaggaaattattgacagttttgcacaggttcttgaaaacgttatttataatgaaatcaactaaaactatttttgctataagttctataaggtgcataaaacccttaaattcatctagtagctgttcccccgaacaggtttattttagt

SEQ ID NO: 11948 - DNA, 680 bp, Homo Sapiens
actttaagataatttctttattcgtttgcccgacagaccatggctccctttggaagaaacttgctaaagactcggcataaaaacagatctccaactaaagacatggattcagaagagaaggaaattgtggtttgggtttgccaagaagagaagcttgtctgtgggctgactaaacgcaccacctctgctgatgtcatccaggctttgcttgaggaacatggaggctacggtttggagagaaacgatttcttctgggggaagcccagtgattactgcatcataggagaagtggaggaggctccgaaaggggttcttcctccactaactaggaatcctgaagctttggaaagcgtggggagatgagcagcccaatatgcaatatgttttggttaaagcagatgcttttcttccagttcctttgtggcggacagctgaagccaaattagtgcaaaacacagaaaaatagtgggagctcagcccagcaaactacatgacgactttaccaccagataaacaaaaaagaatagtcaggaaaactttccggaaactggctaaaattaagcaggacacagtttctccatgatcgagataatatggaagacattagttcatctgatcattttcccaggaccatactattcatcagcaagtcaagcagactgaacagagctggacatctg

SEQ ID NO: 11949 - DNA, 893 bp, Homo Sapiens
tgttttgggcatccaatctgggtcctgccctgaggccctttgaggttcacggccttcttgggagccatccgtatcgtttgctcatgatcagccttagctgttctacttgttctggcttcaggttcattcagtatagttgtggggtggagcagaagagttgatgatgatagatatccttcggttctcccgatccaaaatcttatagttgacagccttcaatgcagaggcagtactggcgtcttcaacgaagaactgggcccgtgtattctcatagtgaaactcaataggggtgaagggcacactgcacttgctctgaatcatgctcaggagccatgccttgtcatactttctgccataaggaattgtaatcttgaaccagttctttgaggtcccatcctggctggtgccagcccctcctctctctggaggagctctgtctctccgcacagtaacatgaatgcgatctcgatcatgccaagtatcaccccgacggttaggtcgggtggtataggggttgtatcgtactcggggaccatcctgggcatcactcattgccacatctccatcatcttcctcaaggcgggaagaccgaataccagaaccgcctcttccagacctacggtttccttcaccatatttccaccggaagggaccccggcctttcttctttctttgagggaaattaacgcgttcatcatcgtgttcgctgtacgacttcccctcgtccgccatgccacagcgaagatcaagggcgggctcaggcgctggccgctacgccggcaaacaacctaactcccaagcgctcaggaccgaagtgtccatacgccgggcgccaccgcatttatacagcaaagcacgtcgcgcgccgctgatctaacactccggccgtacca

SEQ ID NO: 11950 - DNA, 920 bp, Homo Sapiens
gtggcgaagattcccccattaggaagcaggttaggaagtgtgcttcatccctgttttccaaggcccaataaggagtccatgtgatctttgagtgtagtgtgtatgcaggttggtgattgttccaaaggttctttgaggtgattttcggggatctctggcatatccgtcaggttaaactccacggttttcctcctcacttgagatacttctgggtgctccatcaaggccccatcgctctctgagagcaattcaaaacttttcttggccccagaactcacagtctttaagctttggtcttgggtggtctatgcctgtgacactgtgaagcttagaaggcgctgatggttctagggggaagaacatgggagtggggctgaggggccgtctgtggggcactgtagtagcctggcctctgatacagtggggcagacttgaaggcgtccacagccttaagcttccaggccttgttgtcttcctggcccctaacgttctgtttggctgccttgtggtttttgggcaggccctcgtggagaagggattccctcttgggccacagtagtttggtccttgagtttgccctgggaggatggtgatcatgggactgcaggcctaggaagcggccaatgatgccagcgtgagcatcctcctcgtcctcctgattgggctggaactccatctcctctttgttcaggctggaaagaaacaggagattcagggctgagccagtggacaaaggaccaacacctggccttacttctcccttacccccgctcctctctctcagttgcccaaaccaaggccacaccgtcttcctcaccatgccccagctctcacctctctcctgagtctgtccgtgtacctcccggtgatccctcaggcccagctcacctcacctgtgtctcgtcggtacagagctcgag

SEQ ID NO: 11951 - DNA, 519 bp, Homo Sapiens
  misc_feature (17)..(17): n is a, c, g, or t
ggcggccgcctggcctnctggtccgtctgctccggaggccgtgacggcagactcgttggtgtcatgtagttcgtctcaatcactacaggaccctggggggctagttgcaacctccgccgagggagaggaagtcgcttaagtgcgaggacctcaaagaaaagacaatatatttgtaaagatccaaaaataaatgacgctacacaagaaccagttaactgtacaaactacacagctcatgtttcctgttaaccagcacccaacataacttgtaaggattccagtggcaatgaaacacattttactgggaacgaagttggttttttcaagcccatatcttgccgaaatgtaaatggctattcctacaaagtggcagtcgcattgtctctttttcttggatggttgggagcagatcgattttaccttggataccctgctttgggtttgttaaagtttttgcactgtagggttttgtggaattgggagcctaattgatttcattcctatatcgatgcaggttgg

SEQ ID NO: 11952 - DNA, 854 bp, Homo Sapiens
  misc_feature (19)..(19): n is a, c, g, or t
  misc_feature (811)..(811): n is a, c, g, or t
ctgtcagggaaaaagtagnaagaaaagccaccccctgcaccctccatagccaccaaacctgttagaactggaccaatcaaacctcaggcgatcaaaaccgaagaaacaaaatcttaaaggctatggtttattgcaggggattgggtggggggcgggaaaacatggagaattaagtcagataatgctggcagccaaaggggcaaaatggcctgtgacattatcctgttcagagcttggagatgtacaagggacataggagcaatttacactgacacacagctgctgtaccagtgaaaacgaggctttgcaagcttgtacctactatataacatgtgcttggttgatggccatgcattttcagtcagaatttatatataaatattatgcacccatttttttgagtgcatataatttagacctaaaaatccttatgattaggtgaaacaccaaaaatataaggaaaataacacagcagaggaatagctcagcctgaacagtgtgatggtcccagctactacatcagatgcggtttttttgctcccttatgttcttcggatatggttatggcatttgtaggcttggaggtaaagaactgaagataactggtgctggatagaggagccttattttttattatggcagcttgctatttttataacatggtgattgagttgaacacaatcaaagtacagtagtaactgatgtccccttcttccgggtgaatgagcagataaatatgatgtcagcatcctgaaccatatcaaagtgagcagtgttttgctactgcttctatttgaaatgtgcgtgtttngttgtggtctgagcttgagcgctacttagcatctccttcttcc

SEQ ID NO: 11953 - DNA, 815 bp, Homo Sapiens
  misc_feature (237)..(237): n is a, c, g, or t
cgagacgctggcgaaagcatcgggtctcgggacttctgagtggcctgggttaccgcgcgatctacactgagacaaggaagttggaaaagccgagtagttataccagaagatcagggtctcacagactcgcaacttctcttccattttccccaatggcgcatgtcttacaaaaacccaagcactctgggactcactccatagtccaggagttccaggttccggattatgttccatggncagcagtccaagcaggaaaccaagccatctactctgcctccagtccaacaagccaacagccttcatacaagcaaaatgaagactttgactagggtccaaccagtgtttcacttcaatgcccactacggtggtgacaagctgccagccgaagaatccaagagaactacatagaaggcggaagttggaccctgggaagatgcatgccaaaatctggttcaatgaagacgtcgactcaggagcgggagggccgctctgcgagagctcccgaagaccggtgagaacttcctcagcaagctcaaccgggagcttgatcgagaaccatccagggagaatggagaacaggacagaaccctgacacgtgccgggccctgcatgcagcagcagggaacaccctgggggacccaatcgattcgagattcctgcggacgtaccacagaaccaagaagaaggcctgcaagcaaagtggcaatcctgaaccttcaggagtggggaagaaaaaggaaggaaatgcaagaatgaagctaactaggagcaaacaaggcagagcaggtggaattgccaagattggagaagaacca

SEQ ID NO: 11954 - DNA, 841 bp, Homo Sapiens
aatgaacaagctgaatgagctagagaaaatatgtgaaatactgcaggctgaaaagtatgaactcgtaactgagctgaatgattcaaggtcagaatgtatcacagcaactaggaaaatggcagaagaggtagggaaactactaaatgaagttaaaatattaaatgatgacagtggtcttctccatggtgagttagtggaagacataccaggaggtgaatttggtgaacaaccaaatgaacagcaccctgtgtctttggctccattggacgagagtaattcctacgagcacttgacattgtcagacaaagaagttcaaatgcactttgccgaattgcaagagaaattctcatctttacaaagtgaacacaaaattttacatgatcagcactgtcagatgagctctaaaatgtcagagctgcagacctatgttgactcattaaaggccgaaaatttggtcttgtcaacgaatctgagaaactttcaaggtgacttggtgaaggagatgcagctgggcttggaggaggggctcgttccatccctgtcatcctcttgtgtgcctgacagctctagtcttagcagtttgggagactcctccttttacagagctcttttagaacagacaggagatatgtctcttttgagtaatttagaaggggctgtttcagcaaaccagtgcagtgtagatgaagtattttgcagcagtctgcaggaggagaatctgaccaggaaagaaatcccttcggccccagcgaagggtgttgaagagcttgagtccctctgtgaggtgtaccggcagtccctcgagaagctagaagagaaaatggaaagtcaagggattatg

SEQ ID NO: 11955 - DNA, 558 bp, Homo Sapiens
ccaaatccaaaatgctgcatttatgtacccaccaaatccatggagagaaatttctggtgaagcaattgatctgataaacaatctgcttaaagtgaagatgagaaaacgttacagtgttgacaaatctcttagtcatccctggctacaggactatcagacttggcttgaccttagagaatttgaaactcgcattggagaacgttacattacacatgaaagtgatgatgctcgctgggaaatacatgcatacacacataaccttgtatacccaaagcacttcattatggctcctaatccagatgatatggaagaagatccttaaatcactgagctaacctaaataaggaaggatttcattttatggactgatattttgctgtgtaacttgttcttcgtagattgtcatctgcagtgctgcaaagatatgaagaaatatgataacgaataagtgacaccagtactgtagttcataatgagtaggtacaggcgggaaactgaataataagaagtcataatggaatcaaggtgaagctttttataaacttttttagcctaagc

SEQ ID NO: 11956 - DNA, 539 bp, Homo Sapiens
  misc_feature (18)..(18): n is a, c, g, or t
gagaaatgatggggaagnagctcggtcgcctgctcccagctgctcagtcccaactttctgcccgcatgcggcccgtcctacccttgctgggagccagctctggttctggggcccccagggcggctctaacagctgggagaggtggtgatggggctgtgcaggtagggcaggctgctgggggccgagtgcacgcccacggagaccggaaagctgaagacgaactgcgaggtgggggtgcacgggggtcttgccccgctcccgcaggggtcccgaggggctagcagcctccgcagcacaggacgtggccagcacctgggactcgaactgcagcagctgccccatgaagctgaagttgggcgagatgatgctgcggcgctgcttaacgaactcgaaggcctcctccagcctcacccgtttcttcatcatcaggtaggccaggcagatggtggccgaccgcgagatgcccgcctggcagtgcaccagcacgcgcccacggcagtccttcacggcatcgatgtactctatggcttccatgaacc

SEQ ID NO: 11957 - DNA, 732 bp, Homo Sapiens
  misc_feature (54)..(65): n is a, c, g, or t
  misc_feature (109)..(109): n is a, c, g, or t
acggaataagccgcgcctccagcaggggctgcgcctccatgaatccctagttgnnnnnnnnnnnnctttctctcccctctcctcacccccaccccgagccccgtcccgncttctcccttcgccagaggggccgcgtccaggtgcggagtccataccggagcgcaatggcgtccaaccccgaacgggggcagattctgctcacggaactgcagggggattcccgaagtcttccgttttctgagaatgtgagtgctgttcaaaaattagacttttcagatacaatggtgcagcagaaattggatgatatcaaggatcgaattaagagagaaataaggaaagaactgaaaatcaaagaaggagctgaaaatctgaggaaagtcacaacagataaaaaaagtttggcttatgtagacaacattttgaaaaaatcaaataaaaaattagaagaactacatcacaagctgcaggaattaaatgcacatattgttgtatcagatccagaagatattacagattgcccaaggactccagatactccaaataatgaccctcgttgttctactagcaacaatagattgaagggcctacaagaacaattgggtatagaacttaaagtagggcagagtgcagagaatatgatacagatgtattgcgatggatcttcgagagtaagtgtagttaatgaatgtgactagatagtccgtcatatttgcaggtgccgtggtagggatg

SEQ ID NO: 11958 - DNA, 480 bp, Homo Sapiens
ccggccaactgccctggaggcatccacacaggggcccaggcagcacagaggagctgtgaacccgctccacaccggccaccctgcccggagcctggcactcacagcaggccggtgctaaggagtgtggcgcgggctcgactcccactgctgccggcctcccgagtgactctgttttccactgctgcaggcgagaagaggcacgcgcggcacaggccggcctccgcttcccgggaagacggcgcactcctggccctgggttcttgctgctgcccaccctctgctccctgggatgggccccgaggcgagcagcttcagcacaggcctggccctgctccaggtgcaggaaggaggataaggccgggccgagaggcggcacacctggaccatcccatgggcctccgcccgcgccgccccgaggatgagtggtgatgtcctctagccacccctagcagcgtcggctctccctggacgtgcggccgc

SEQ ID NO: 11959 - DNA, 206 bp, Homo Sapiens
gcggccgcgtccttcctctctgccgtgtaaaagggtgggtcatagatcaggaactccgtctcccagggcaccttctcgttgggcacggggaagcgcgtgacagggcagttggggtagaggaggtgccgggcattcacgtggtagctgtcgcccggctcctccgacttcttcctgcctcccggctcagcatccggctcctccgcagc

SEQ ID NO: 11960 - DNA, 506 bp, Homo Sapiens
  misc_feature (46)..(46): n is a, c, g, or t
tggggttctgactaccaaccaaactgcagtagtgaggtccctgagnacttgggcccctggcgcaccgtggcagaggccacggaaaacacactggtacgggggacacccccgcatctatctgcagggctccgtgcacacagggtttctcactgctggtccagggccatgtggaagagctgtggggcctggccaacaccaacaccccatcgggccagtttgtgacctgcgggcaggataagctggtgcatctatggagctcagattcccaccagcccctgtggagcaggatcatcgaggaccctgcccgctcagccggcttccaccccagtggctctgtcctggctgtgggtacagtgactggcagatggctgctgctggacacggagacccatgacctggtggctatccacacagacggcaatgaacagatctcagtggtcagcttctccccagacggggcgtacctggccgtgggctcccacgacaacttggtgtaaaagtacacg

SEQ ID NO: 11961 - DNA, 824 bp, Homo Sapiens
  misc_feature (47)..(47): n is a, c, g, or t
  misc_feature (104)..(104): n is a, c, g, or t
  misc_feature (106)..(106): n is a, c, g, or t
aaagcaggaaatattcttctaacagagcccagcaggtaaaactagcntgatttggatctggctttcaatggcttctcctgccaactcctcgtgtggcaacaccntntactggatggctccagaggtgatcttaagctatggatgaaggacagtatgatgggaaagttgatatttggtcacttggcatcacttgtattgaattggcggaacggaagccgccccttttcaacatgaatgcaatgagtgccttatatcacattgcccagaatgactccccaacgttacagtctaatgaatggacagactcctttaggagatttgttgattactgcttgcagaaaatacctcaggaaaggccaacatcagcagaactattaaggcatgactttgttcgacgagacccgccactacgtgtcctcattgacctcatacagaggacaaaagatgcagttcgtgagctagataacctacagtaccgaaaaatgaaaaaaatacttttccaagagacacggaatggacccttgaatgagtcacaggaggatgaggaagacagtgaacatggaaccagcctgaacagggaaatggacagcctgggcagcaaccattccattccaagcatgtccgtgagcacaggcagccagagcagcagtgtgaacagcatgcaggaagtcatggacgagagcagttccgaacttgtcatgatgcacgatgacgaaagcacaatcaattccagctcctccgtcgtgcataagaaagatcatgtattcataagggatgaggcgggccacggcgatcccaggcctgagccgcggcctacccagtca

SEQ ID NO: 11962 - DNA, 248 bp, Homo Sapiens
ctcattaaaatacaggcccttaggctctatttttcatgtatgagtcgtgtgtaatttatgtaaaaatgtgtgtacagactcactgatgcagcactgtagcccatcaccttggagcactgactgtacatagtgtggtgaagaaaagtgaacgcccttgtagagcagcccgaccacaggagcatggccgctgccagcccagacgctgctgaccctgtgtaaatgtgcacaataaacccgtctcaccccgg

SEQ ID NO: 11963 - DNA, 309 bp, Homo Sapiens
ggtggtgctatctatctgttttaaggtctccttgaaggcgcactggggaccctggccatgcctcgttctccctgctttctttatcctgttattgcctccacagtctgttgccaaggactctaagatcaatgcacgtcactttcctttccactgggcaggatagccaagcacactccctcctgcgctctcccgccccggtgcgtccactcccgagggctgttatgaggactgggttgtgcctacttgatttgaaaacacacacaagcaataaaaagcctcttcctgcattgtctgtggtgtgaccatagc

SEQ ID NO: 11964 - DNA, 575 bp, Homo Sapiens
ctcaacgctttatacttctaacaatactctcttcccaaagttcccatgacacaaaggttttcctgcctttttggttactctgtctcctttttttggtaacatctttctctgcctactactaacataagggcatttctcaggttctagtcctgaccccctcttctcatgtcacagtctttcaggggcttcactggccacccagatactgactcccaatggctttatccagtccaaactctggatttccccattaccatcaaccttgacaaccccaaaagtgaactatctccccccacccccgctccaaatctgcttctcttccctactcctcaatttcagtagaaatgacacccactacctatctggctgctcaagccaaaattcaaggagtagggaagtataaagcgttgagctcaacgctttatacttcaaatcatatagctttgttttcctttaaggtaaatgtatctgtgctgctcgtaaattcacaagcacatgacacttttctggcttggtagctttgtctgtcatcacacgaggaggagaaatgcccggggaagaaatagaaaaagctc

SEQ ID NO: 11965 - DNA, 528 bp, Homo Sapiens
ccacgagctccaggtccacaggcatgttaaactcaatcagcatggggcccacaagcagcggggactcctcagggcaggcgggcagcgacagtgcggtggtgtggggcactgggaccgaggtcaagttgctagcggggccagggccagaatccacgactgggctggagtcgccacccgggcgcggctgggaggaggcgcctagaggaggcggcggccgggcccctccggtccggagctccccggaggactgcccgatggcggcggcactgttcgagccgccctgcagcggtgtggagactccgaccagttggggcaggcggctcaggtcgcggccagccaggtagtaaacgagggtgacgccaaggtgcagagcgcagacggccacgagcaggcggcaggcccgctgtagggacgcgcctggcatcgcggcgctgccgctcaggagcggctcccgaagcctcatcttcccgccgccgctttaagataggtgtgggctacaggaggggaggcgacccgcccgcgggccgc

SEQ ID NO: 11966 - DNA, 161 bp, Homo Sapiens
  misc_feature (134)..(134): n is a, c, g, or t
  misc_feature (141)..(141): n is a, c, g, or t
ctcggtacccctcaacgctttatacttcgggaccacaaaaggtcacgaagtagagaaagaaggcggagcagaagtagagatcgacgaagaagcagaagccatgatcgatcagaaagaaaacacgatcgaagtcngggatcngaagaagtataaagcgttga

SEQ ID NO: 11967 - DNA, 608 bp, Homo Sapiens
tcaacgctttatacttccctgggtttccatttaaaagctttaacattgagtcatcctgcatacatgaaaagcctgtgtaatgaagcctgggtcctttaacacctgctattaattaattccaacataagtgagtatgagacctgggaagtaaattgtcatcatctgattgatgaggtacagattatctgaataaaatttctgacctggttatgagtcagtaatcccaacacaaactactgctttgtaatgaattatgtatgctttgcatgtccttcaataactgaagattttttctccttttttctccaggtctcagtttcataaaatctttcttatttgtggtccctgtgattccagaacggctgctgctgtttccttcttcatcaagagtctttttggtagcttttaattccttcttctgcttctctaacttctgtttctccagctgggcttggtattttcgaactttagttatttgggtggcttttgcgtccatccttcccactaatgcctccaattcacactccacttgtctttcagttcaacggttggcgactcctggataagttttgcaagctgctggtgaaacagaagtataaagcgttgag

SEQ ID NO: 11968 - DNA, 332 bp, Homo Sapiens
tcggggttatagtaaacctttggaaagccctaacccagagataaaccatatttattatataccttttcggggatgctgagttctttgtgatgggtagtccttcaaagtagaatcactacaagtgtctcacttcaagccttagaaaagccctcaatgtaaaccttatgtttgttactagggtggcctctctcccatttcccgctgtggctgagccaaacttcattactttccttaggccctctgcccctcccctagcatatggctctttctcctattgaacagaaaattgagactatgaagaggtcaacttgtatttaccaactttactcatt

SEQ ID NO: 11969 - DNA, 256 bp, Homo Sapiens
ctcaacgctttatacttcagtggtaaccactgaagtgttttaagcaagaaaattaaatgattggctttaagttttagaaagatcactctgcctgcatgatagagaatgcacaggaagcaggctgaccagtttggaaggatgatattggcctaagagaatagacaatggacagattccatgggctgttgctggtgagggacagagcagtggtgtggtaatgttataacttaaaatggcagaagtataaagcgttgag

SEQ ID NO: 11970 - DNA, 596 bp, Homo Sapiens
ctcaccgcttgatacttctagcagagaaaggcagttaaagaaaggagcagtgaagctgcctgactggagacagctaaccacacagcaatttaaaaatcggtgaatgggaatactaagtcatcttctcctgtcttttaattttagacactcctctactatagtaaaggtagaatccctcaagtaaatctctcaaaagataagaaattctgtgactgccattctgttcaagtgtctatctcacctcacctttgcttttacgttgtctcttctaaaaatccaacattctttatggtactactcttccctaccggaatatgtgtgatatgctcatgcttctaacagaataaaaggaactttggtttttgtagtgttttaagcaacctataactaattgaaaagtttccctaatatccagctctatgctaggccatgcagagagtaagaaaaagaaataaagtgtcctcatgcacgcagtggagcatctctaggggcagaaagacctggtttaatttttatctctccactaatcagcgctgtgaccttgaatgaattatgtaaacagagcctccgtttattagagatctaattctcaattt

SEQ ID NO: 11971 - DNA, 255 bp, Homo Sapiens
  misc_feature (42)..(58): n is a, c, g, or t
cttcttttttgcccttaaaagtaagggatgtgggtttgtacnnnnnnnnnnnnnnnnnccagcatacatatgcaaaactatatatatatgtatatgtagagaaaaatacttcccattgatcatttttaaaaggcttctgattggatattgtgttttaaccaaattttaaagattaatggaatcatgaaagggaaaaaaattgatacaactatgcagattttataaatgtgcaataaaagtatttgatttaccttt

SEQ ID NO: 11972 - DNA, 723 bp, Homo Sapiens
  misc_feature (679)..(679): n is a, c, g, or t
  misc_feature (685)..(686): n is a, c, g, or t
ctcaacgctttatacttcagataatatttacaaaataaaacatgaaaatgaaaatccaaaattaatgtacatgttgctaatgtgctcaactccttcacgggggagagatcagttgcaaagtctggttcaaaaaggccacttatgcattatgggtttcgttgtcatgtgtgaggatggcgacaagagacttgaaatctcaacagacaggtactttagagccacaaagtctaagacgatgccttaaatacaagaaggctgagggactcctcaagtgagctgatgccagaataggcagaatgaaagaaaataaactcgaagacatgaagaacaacacacaacagccacggtttggcaagagaccaacctcagctcagactttccatctgagcacagccgtttggctatgagctttttactgaattttatagcaactctgatttcttcctttaaatgattggaggctttttaaagatcttatggggctcaaatactaacttcataaatggccttttgaataacagcagcaaataatctctcagctgatatttcaatttactaaggaggcacaaattaaaacattcctgctacacagtcatggtcttgccacacactggggtgaatcactggccctggtgaacaactgtagtgcacacaagttagagtcctatgtaaacacatncagcannaccttctgggagcagcagcatcatgaatcttttcttt

SEQ ID NO: 11973 - DNA, 783 bp, Homo Sapiens
gaggattggctgttccggggctagggagcgctttctcccgggaaccgcggctgtgacccaagtggcccggaccagtttggggctgcgtgcggcctgcctcaagcaaccaggtacgtaggtcggcggcccagctcggcgctgcggtgggagccggagggcgacagtcagagccggggtgccagcgggacgcgaccgccagatccacttaggaccccgtcgttctgcgaagcgaccacgtctgagtcccggggcctcctcgtgctgcagatgtcgccttaggacctcggccaggataccctctgccatgctcttgtgctgcccgtgatcaccgactggcccttgtaagcaccttcgcagcaggaagcccagagctgcgcctgccctttctgaaggctgtggaagaggttggagtgggcgcatcttagcttgccccatccccatttgaggtctgtcggagctgcccttcagtgtgagcatccacaatgggtaccccagcctcggtggtcagtgagccacccccttggcaggccccgattgaggcccggggccgcaagcaggcctcggccaacatcttccaggacgccgagctgctgcagatccaaggcctgtttcaacgcagcggggaccagctggccgaggaacgggcacagatcatctgggaatgtgcaggggaccaccgtgtggctgaggccctcaagaggctgcgcaggaagaggcccccaaggcagaaacccctgggccactcgctacaacactgcagccgcctcagaatccggagcccca

SEQ ID NO: 11974 - DNA, 645 bp, Homo Sapiens
  misc_feature (132)..(145): n is a, c, g, or t
  misc_feature (297)..(313): n is a, c, g, or t
  misc_feature (389)..(404): n is a, c, g, or t
cgccccagggccgacctgaggcctcgtgcttgtcctgggaggtccccactgcaacttgatgggcacgagggccaccccgaccccagagaattcgagctccctgaagcttccccctgacaatccatttggccnnnnnnnnnnnnnngccatccatgcattaaacccattacccaagtcctcctaagggaatgtgattaccatatattagccaattctgtggcataaacacttttccaaagcatccgccaaagtatttaatattaaagccaatgtgtatattcccctcccccccctccnnnnnnnnnnnnnnnnncacagaaaaaacccaacaccacccaagaaccaaagaaggcctgatctgtagtgtgaggatccagggcgcagctccnnnnnnnnnnnnnnnnccctactgccgcagctccacatagttggctgggaagagcccgtaccggcccttgcacaccccgcgccaccagccctcgtcaatcatctcgatgttggtgatgatgtcatcagggtccaatgagatctcatcatcgcccgccgcctggtagtcgtaccgggcgacggctgtgatcccccagatcgttctcgtactcatcataggtgctgtcctcgggatagtgcctcgaagtcaccctcccg

SEQ ID NO: 11975 - DNA, 396 bp, Homo Sapiens
cggcggcaggagcgggtagtgccagctacggtccgcggctggggttccctcctccgtttctgtatccccacgagatcctatagcaatggaactcagcgatgcaaatctgcaaacactaacagaatatttaaagaaaacacttgatcctgatcctgaccatccgacgtccagctgagaaatttcttgaatctgttgaaggaaatcagaattatccactgttgcttttgacattactggagaagtcccaggataatgttatcaaagtatgtgcttcagtaacattcaaaaactatattaaaaggaactgggagaattgttgaagattgaaccaaacaaaatttgtgaagccgatcgaggtggccattaaagccaacatagtgcacttgaatgcttagc

SEQ ID NO: 11976 - DNA, 603 bp, Homo Sapiens
  misc_feature (146)..(190): n is a, c, g, or t
  misc_feature (469)..(537): n is a, c, g, or t
ctcaacgcttatacttcccagtgatctccatcttgttactcttcctttgttcttttccagatctgattcaggaatttttatcccattgccttccttaataagccagcgtggatcgtatacacagacagtggattttagagctaggnnnnnnnnnnnnnnnnnnnnnnnnnnnnnnnnnnnnnnnnnnnnncctccaaaatttcaggatatgtcagttctcatgtaaatatatacccccttttgtgagttagtttagtatctcctataacacctggtcaagtggataattttttagttcatgatagtttgttaattggacttgctcagccatattttcctccttattatacatggtcttcaagtctatcttggaaaattttagagaaaaggacaaatgctaaaagacttaatagtaccatgagacctttttttgctcccttgttctgtgctagctatggggataaatatnnnnnnnnnnnnnnnnnnnnnnnnnnnnnnnnnnnnnnnnnnnnnnnnnnnnnnnnnnnnnnnnnnnnntatactggaaaagtttttggagatttgaaaaaactcacagatgaactgcatagcctagaaatactg

SEQ ID NO: 11977 - DNA, 932 bp, Homo Sapiens
  misc_feature (228)..(252): n is a, c, g, or t
tggcggcggtagcggaggtgtgagtggacgcgggactcagcggccggattttctcttcccttcttttcccttttccttccctatttgaaattggcatcgagggggctaagttcgggtggcagcgccgggcgcaacgcaggggtcacggcgacggcggcggcggctgacggctggaagggtaggcttccttcaccgctcgtcctccttcctcgctccgctcggtgtcannnnnnnnnnnnnnnnnnnnnnnnnacttcgtccctcctcctgctcccccccacaccggagcgggcactcttcgcgtcgccatcccccgacccttcaccccgaggactgggcgcctcctccggcgcagctgaggggagcgggggccggtctcctgctcggttgtcgagcctccatgtcggataatcagagctggaactcgtcgggctcggaggaggatccagagacggagtcttgggccgcctgtggagcgctgcggggtcctcagtaagtggacaaactacattcatgggtggcaggatcgtcgggtagttttgaaaaataatgctctgagttactacaaatctgaagatgaaacagagtatggctgcagaggatccatctgtcttagcaaggcggtcatcacacctcacgatctggatgaatgtcgattcgatatcagtggtaacatcgatagggtgtggaatcttccgtgctccaggatccagatcatagacagcaatggatagatgccaattgaacagcaccaagacttgaatcttggcatatgggatccgaatcccagcttgcggtcgacatggcttcaatgggtgtccctggctgtcctggagcaagtggggtacttctggcaaattccaactttttccattcaagaaaggccacagtcacgtgacgaaggtgggcgacatggaaccctttaaaaaact

SEQ ID NO: 11978 - DNA, 1049 bp, Homo Sapiens
tcaacgctttatacttctgcagagagtagcagccggtgcatcacgtcttattgtcaaaagatgtttttatcatacacagatgtgtagtttttataactggggtataagtttttcacagcttcaacttcatcacgattttcacttatatggctctgaatgtgcaaatcacgggttttagcaatgttgcctagttcacccatcaaagtctcagagcaggagagggaaaaacgtggtgtcactatgggcttcactctagaatagttcttttggagcatttctgacacaaatctctcagtttccttgatcgattcctcagtggtctccttgtattctggaaaagtgcattcaaatccatgcaaactttgcccacaaatgcccgctgtccaaatttatctgtaatgtcggcaaggagcagagatgagtcagtgtgaattggtgcaaagtaacaagctgtggttgtcccattctttagtggtctccggacaactctggtatatacttcttctgcaaagtcgatgttctggaatctgtgttctgcaggaaatgtgtacttggtcagccactccaagagtggcaggtctatgctacttccagcaaaggaatactgagaggcatggatgtgtgtatcaaccagcccaggcatgaagaactcatggtggctcagttctcttatttcacacggcttgaagcaccattctttggccagtttttcctgttgagatgcttcttctaaaaacactattttgccgctgtcgctcacgccgaggaggtgatcccgcagcacctccatggggcaggtccaggtggagtggacgaacgtccctcggaagatgtgcgccaggggcggcatctgagcggcacacatgtcagcggcggagcgcagcgcgggtctgctggtcgaggagggcgcacgcggcggagacgcagcgggactctctgcagctgcgggcggctgccgggcggacacaggctccggccttgtcctgcccccgcttacccgggcggttgccggtacctgcaggccgcgcccaggggctggctccctacag

SEQ ID NO: 11979 - DNA, 1156 bp, Homo Sapiens
  misc_feature (1072)..(1081): n is a, c, g, or t
ctgaggcggtttgtaagttttgggtcgcagtatgctagaattttgaggctcccttctgatgaaaattgagctgtccatgcagccatggaacccgggttacagcagtgagggggccacggctcaagaaacttacacatgtccaaaaatgattgagatggagcaggcggaggcccagcttgctgagttagacctgctagccagtatgttccctggtgagaatgagctcatagtgaatgaccagctggctgtagcagaactgaaagattgtattgaaaagaagacaatggaggggcgatcttcaaaagtctactttactatcaatatgaacctggatgtatctgacgaaaaaatggcgatgttttctctggcctgtattcttccctttaaatacccggcagttctgcctgaaattactgtcagatcagtattattgagtagatcccagcagactcagctgaacacagatctgactgcattcctgcaaaaacattgtcatggagatgtttgtatactgaatgccacagagtgggttagagaacacgcctctggctatgtcagcagagatacttcatcttcacccaccacaggaagcacagtccagtcagttgacctcatcttcacgagactctggatctacagccatcatatctataacaaatgcaaaagaaagaatattctagagtgggcaaaggagctttccctgtctgggtttagcatgcctggaaaacctggtgttgtttgtgtggaaggcccacaaagtgcctgtgaagaattctggtcaagactcagaaaattaaactggaagagaattttaattcgccatccgagagacattccttttgatgggacaaatgatgaaacggaaagacaaagggaattttccatttttgaagaaaaagtggtcagggttaatggagccaggggaaaaccacatgggactttggtcagctctatcagttctttaacccccaaggatgggggggatgtttttccagatgttcctttggggtaaaagggacatggacatcaagaagtagttggaagtatcttgcccctggttggccttttgaannnnnnnnnnccaccttttccttggaagaataaggaaattttattttaattccccttcataaaaagttgggaaagggggccccag

SEQ ID NO: 11980 - DNA, 648 bp, Homo Sapiens
tgatccctacactaagactaaaatgcactatggaaagactctctacaacatcactctaagcaagactctctcaatcctattcccctcctggctgccatgatgcaacaagatgagtctattaatctctatcctgcttcaagtacttcaagtactccaccttttgaaaacaactttttcaacgaatctatgaatgaatgcagaaattgccaagataatactgcaccgatgggaaatgatactatcctgaaacatgagcaaattgaccagcctcaggatgtgaactcatttgctggaggtcacccagggctctttcaagatagtaaaaacagtgacttgtacagcataatgaaaaacctaggcattgattttgaagacatcagacacatgcagaatgaaaaatttttcagaaatgatttttctggtgaggttgacttcagagacattgacttaacggatgaaatcctgacgtatgtccaagattctttaagtaagtctcccttcataccttcagattatcaacagcacagtccttggctctgaactcaagctgtatggtacaggaacacctacatctagaacagcacagcacatcaccaaagcagtagtagtgggcccagcaacacgctgtgtcagaagtataaagcgtga

SEQ ID NO: 11981 - DNA, 1039 bp, Homo Sapiens
ggccagtgtcgactcggctgtcgctgccaccacccccaccagcatggccacagtccagaagcagaagtcaggtgagctcaacggggaccaggtgtcgcttgggaccaaaaagaagaaaaaggcaaagaaggccagcgagacctctccattcccaccagcaaagagtgctacagctatacctgcaaactgaacccagccatgggcacagggctcagccagctccaaggacaaggtgtcccccccaccctggggacaaggcatttccaagccccacctccctctccaagttcaaggactgggctggcaaacccagactgcccatgagaccctgatggtgatgaaggcttgctcgagagttgggccaaaaaagtggctgtagggtgagaagaccaatcaaggcctgcccctctgtgctcccacggagggctggcgggggcgctgtggttccagaacatttcatgacctcaggaaaaaaggaaccttccagttatttgagactagtggccaactggtgaaacctccatctccctagaactgtctgaggtgggcaggggaagggagaccttcccccaccacctccttagcctggtgtaagaaacagtttttagaaaatgagagaagggatccccaagaagccaaggcccagagaaacttttgttcttctctccttagcccacatagacttcacagaatcgtctgagaaaggagagctttttcacccctggctttctagaattttctttgtctgcatttgtgaatataccacacatgatggtgtctctgagccgaccagattatggaaactcaattgtcagaggacccaaaacaaaacttagagtgatttggatattgcctctctgtcaatgctgaaccttaagacattttaagtaaacatcctcctcctctctacacccccaggatttgtgcgttcaccccacccaagacttcaggaagtgtcatagcactcgtggactaggtttcatgggacaaaggcattctgccaagaagtagaagcttgtggccgggtgcagtggctcat

SEQ ID NO: 11982 - DNA, 423 bp, Homo Sapiens
ctacggccagcatggtgtcttcctccccctccaccccttcaaacatccctcagaaaccatcacagccagcagcaaaggaaccttcagctacgcctccgatcagcaaccttacaaaaactgccagtgaatctatctccaacctttcagaggctggctcaatcaagaaaggagaaagagagctcaaaatcggagacagagtattggttggtggcactaaggctggtgtagtccggtttcttggggagaccgactttgccaagggggagtggtgtggcgtggagttagatgagccacttgggaagaatgatggcgctgttgctggaacaaggtattttcagtgtcaacccaaatatggcttgttcgctcctgtccacaaagttaccaagattggcttcccttccactacaccagccaaagccaagg

SEQ ID NO: 11983 - DNA, 719 bp, Homo Sapiens
  misc_feature (61)..(61): n is a, c, g, or t
aaaagggggcgggaagggctgtagggtacttgtcaattcgccgccatgaacgtggttttgnctgtgaagcagtacatttccaaaatgatagaggacagcgggcctggtatgaaagtacttctcatggataaagagacgactggcatagtgagtatggtatacacacaatcggagattctacagaaggaagtgtacctctttgaacgcattgattctcaaaatcgagagatcatgaaacacctgaaggcaatttgttttcttcgacctacaaaggagaatgtggattatattattcaggagctccgaagacccaaatacactatatatttcatttatttcagtaatgtgatcagcaagagtgacgtgaagtcattggctgaagctgatgaacaggaagttgtggctgaggttcaggaattttatggtgattacattgctgtgaacccacatttgttttccctcaatattttgggttgctgccagggtcgaaattgggatccagcccagctatctagaacaactcaagggcttacagctctccttttatctctgaagaagtgtcccatgattcgttatcagctctcatcagaggcagcaaagagacttgcagagtgcgttaagcaagtgataactaaagaatatgaactgtttgaattccgtcggacagaggttcctccattgctccttattttagatcgctgtgatgatgccatcaccca

SEQ ID NO: 11984 - DNA, 597 bp, Homo Sapiens
ctgtgctttgggacggcggcggtggcggccgctggacatgggaaagcggaaccaccaaaaggagtgatgatcaacgatctcatgataaatctggatgctagttctcatgcctcaggacatcctactgggaacgacacaccagctcctgggatcagactttcatctacttaggacccctctttgcccagactactaaagccagtcttcactagccacgaatggctacccaaaggaaacacttggtgaaagattttaatccttacattacctgctatatctgtaaagggtatctgatcaagccaacaacagtgacggaatgcctccatacatctgcagaatcctactggatgtccacttggatgtcctgaagccacctgaaactcagcatatctacgaatgatcaaatgggatgccagcactcagttatccaagcaagaaatatgctccatgcttgactctttaccctcactaacaaaactgggcaaagtcctgctggtctctctctttaatacttctcaaatctgtccctttagtttcatccctctgttactgttctcataaagattcttattacgccgtcccaaagcaacagtcctt

SEQ ID NO: 11985 - DNA, 525 bp, Homo Sapiens
ttccagcatgaagaggagagctggcctggggggcagcatgaggaggagatgaccgccgggttctgctatggcacatggaacaagccatccactccagggtcaagcccatacagctgaaaggagagcaccattccaacattttttgcctggctttcaacagtgggaacactaaagtgttctctggaggcaatgatgagcaagttatcctccatgatgttgaaagtgagacattggacgtgtttgctcatgaagatgcagtatatggcttgtctgtgagcccagtgaatggacaacatttttgccagttcctcagatgatggccgggttctcatttgggacattcgggaatccccccatggagagcccttctgcctggcaaactatccatcagcctttcatagtgtcatgtttaaccctgtggagcccaggttgttggccacagccaattcaaaggaaggagtgggactctgggacattcgaaaacctcagagttctctcctgcgctatggtggaaatctgtccctc

SEQ ID NO: 11986 - DNA, 473 bp, Homo Sapiens
gctagaaaggtttagggtagttagtggccaagatggccaactagaagcagttaatgtgtgtgactctcacagggcggaaagaaaggggtgactaaatatagcaccttcaactgaaacattaaggtactctcattggaagtaatcaaggaaacaactcgacccacggagaccagagcaaatcaaggcaggaagacagcccacttgggaaagacgtggagccaagggaaactccccttcccagggaagtggtaagtgaatgcgcaactctgggaatccacactgctctcacagatctttgcaaacctcagaacaaggagatccccttgtgaactcactccattagggccttcacacacagccacgtggagtctcagcagagcagccactcaggcatgcatggagacccaagagctttagctactccagctttctgggtgtctgggcaaaagtagctgcgactttggcaaagctgg

SEQ ID NO: 11987 - DNA, 174 bp, Homo Sapiens
acaaagttagtttgtgatcaacgattcactacaattgaagtgttactttgtcagaatatttattcctttgtgtgacatgctagattccctggatgtagctgatcatttttattttgtaaatattacctaactttacataaactatatcataataaactatttttgcatcaccaa

SEQ ID NO: 11988 - DNA, 472 bp, Homo Sapiens
ggcaacgtgagaagcacatggacatccgaccttgagcttgagaggcagaggcctgagttctagttacagccccagcagtaccagttgtgtggactgggagggaggctatcacgtacatactccaagcctccaagcctgtttccccttctgacacaggatcttttgtggctggtatacagtgggcactcaataaatgctgtctggtcgtctggctggcatgcctcatgggcctgagaattgaatagaattacagtgatagaagcatgctggtattgtaagtggtttgtaagtgtgaggactaaattattattaaatagtaatcacatctaatcttggataaattagtaaaagcaagaatgggagcagtaaaaacctaagcaacccgaactaaaattttattgaattaattcaatttcttgtcatgtaacacaaccccagaagagaataaaataaagtttatatacatacaccc

SEQ ID NO: 11989 - DNA, 976 bp, Homo Sapiens
cgcggcggcccactctgccctggccgcgctgtgtggtgaccgcaggccccagacatgagggcggcccgtgctctgctgcccctgctgctgcaggcctgctggacagccgcgcaggatgagccggagaccccgagggccgtggccttccaggactgccccgtggacctgttctttgtgctggacacctctgagagcgtggccctgaggctgaagccctacggggccctcgtggacaaagtcaagtccttcaccaagcgcttcatcgacaacctgagggacaggtactaccgctgtgaccgaaacctggtgtggaacgcaggcgcgctgcactacagtgacgaggtagagatcatccaaggcctcacgcgcatgcctggcggccgcgacgcactcaaaagcagcgtggacgcggtcaagtactttgggaagggcacctacaccgactgcgctatcaagaaggggctggagcagctcctcgtggggggctcccacctgaaggagaataagtacctgattgtggtgaccgacgggcaccccctggagggctacaaggaaccctgtggggggctggaggatgctgtgaacaaggacaagcacctgggcgtcaaagtcttctcggtggccatcacaacccgaccacctggagccgcgtctgagcatcatcgccacggaccacacgtaccggcgcaacttcacggcggctgactggggccagagccgcgacgcagaggaggccatcagccagaccatcgacaccatcgtggacatgatcaaaaataacgtggagcaagtgtgctgctccttcgaatgccagcctgcaagaggacctccggggctccggggcgaccccggctttgagggagaacgaggcaagccggggctcccaggagagaagggagaagccggagatcctggaagaccccgggacctcgggacctgtggtacccaggaatgaaaggagaaaaggggaccgtgg

SEQ ID NO: 11990 - DNA, 616 bp, Homo Sapiens
gactggaaacttggctgaacaagcgcgtgcccatgtagagaacacagagcggttgattgaaatcgcatccagagaacttgagaaagccaaagtcgctgctgccaatgtgtcagtcactcagccagaatctacaggggacccaaaccacatgactcttttggcagaagaggctcgaaagcttgctgaacgtcataaacaggaagctgatgacattgttcgagtggcaaagacagccaatgatacgtcaactgaggcatacaacctgcttctgaggacactggcaggagaaaatcaaacagcatttgaggttgaagagcttaataggaagtatgaacaagcgaagaacatctcacaggatctggaaaaacaagctgcccgagtacatgaggaggccaaaagggccggtgacaaagctgtggagatctatgccagcgtggctcagctgagccctttggactctgagacactggagaatgaagcaaataacataaagatggaagctgagaatctggaacaactgattgaccagaaattaaaagattatgaggacctcagagaagatatgagagggaaggaacttgaagtcaagaaccttctggagaagtgcgcctgggtg

SEQ ID NO: 11991 - DNA, 202 bp, Homo Sapiens
cgggcctcggatccgatcacataggacagtatgcaccttaagatcctgaagaaacggcacaaaatgttcaagtgatgtttagaaataacttgtgagggtgcgtcagggaaatcatgcagccatcaggacacaggctccgggacgtcgagcatcatcctctcctggctgaaaatgacaactatgactcttcatcgtcctcctc

SEQ ID NO: 11992 - DNA, 525 bp, Homo Sapiens
caacgatggtcctcagctgggagttgatcccagtcaggaaccaggacctatttctaaccgtcagtgaaatctgaatcgggactcaggatcgaaaatctgtcagccaaagccctggaccccacctgggactaaacaggaatagggtgggatggggtatcccgaagctcaggtaagtgctactaactcgattaaggtgaagccaactggcgtgaaccagaccctgaaatggatctaacggcttgagatgttttctgggctagtgcttttacaaactccttgctgtatcttcccttactgacggggcaggaacccgaatctgggatctctcagctagataaaggacttacatgttaaatcttaacacatgagtgactggaaatcattgtgcagtgagaatgcagaattccagactggaagtaatgtgggaaagatcgtattcaggaataggtttcagtttctctgtgaagcaagcatgataccccacctatttcctgaacatgaaattgagctgaggaccagtcgttg

SEQ ID NO: 11993 - DNA, 531 bp, Homo Sapiens
tgtcaagataaattctattgaatgatggggttttggattccaaagaaaaaaagcgaacccagcaggctttggtggctgatggctctcagactgaatctcagctccacgccaggaaatgcgctgaggacatcaatgtgcgtagataacagccttttttccaaatttgagaaccattttttcagcatttatgtggtccagaaaattaggatgagactttcttcttcgataatcttcttcagtgaatggaacctcagaatcctcggggtccaaggctttggagcgcgcccaagtcatcaccgtcgacagtaaaataaatagctttcgcttttcaaagtggctgacttcttcactgagtgcagagactgcccagatggcttcctccatttgctgtgagctctcagtgatgttataaataataacatcacactccagcaggcgcatgagaaggtcttctcgagagatggcagagtacgtctccaccgcaaagtcaggccgcgggctgtcaggcttggacagcgtgcccacaatctg

SEQ ID NO: 11994 - DNA, 384 bp, Homo Sapiens
  misc_feature (134)..(144): n is a, c, g, or t
ctcggtacccccacgatggtcctcagctacttggtaagctgaggtgaaagggttgcttgagccccggaggtcaaggctgccgtgagttatgattgtaccactacatcctgcctaggcgagaccctgtctttggnnnnnnnnnnnggaaatgaaagaaaggcaaaacaccatttctccttcttgtctttacaggatcccagtgacattttactgcaacaaaaccaaactgtatgaagttaagccctgtctccaggaggcatgaaaccacctccacttctcgtgatgctggcttcttctcaaaacaatctcaaagacagctccccggatattttgaaaattcagcttctgtttttctgagaaatagaaggctgaggaccatcgttg

SEQ ID NO: 11995 - DNA, 1072 bp, Homo Sapiens
cacggtggaagggctggggccacggggcagagaagaaaggttatctctgcttgttggacaaacagaggggagattataaaacatacccggcagtggacaccatgcattctgcaagccaccctggggtgcagctgagctagacatgggacggcgagacgcccagctcctggcagcgctcctcgtcctggggctatgtgccctggcggggagtgagaaaccctccccctgccagtgctccaggctgagcccccataacaggacgaactgcggcttccctggaatcaccagtgaccagtgttttgacaatggatgctgtttcgactccagtgtcactggggtcccctggtgtttccaccccctcccaaagcaagagtcggatcagtgcgtcatggaggtctcagaccgaagaaactgtggctacccgggcatcagccccgaggaatgcgcctctcggaagtgctgcttctccaacttcatctttgaagtgccctggtgcttcttcccgaagtctgtggaagactgccattactaagagaggctggttccagaggatgcatctggctcaccgggtgttccgaaaccaaagaagaaacttcgccttatcagcttcatacttcatgaaatcctgggttttcttaaccatcttttcctcattttcaatggtttaacatataatttctttaaataaaaccgcttacacactcttgacaacaaacagagaagacaaacagaaagaaacgaggcgggggcgcgcgccaaagacgttctcccatagagggagggcccaaggataacgggaccaccaccagggatggcgggacaccgagcgtggcgcccccatctagagaggaggcggaagaaacagacgcacggccgtggccgcggacgcttacacaccgccggcgcaccggggacacacacggccagcatgcgaaccacggcgaagcgacacaacaccacacggagagcgggaccacacagcggtgaaacaaccaccaacaggcatgcgaccaccaacgcgacaataacacacgtctcacagaggccaagaggggccaacaggcggcacatg

SEQ ID NO: 11996 - DNA, 518 bp, Homo Sapiens
  misc_feature (44)..(92): n is a, c, g, or t
tatgggagaatcgctgagctgggagtcaaggctacagtgcttgnnnnnnnnnnnnnnnnnnnnnnnnnnnnnnnnnnnnnnnnnnnnnnnnncaaagttatgtgacggctagtaaagttaaggtcatcttatgctgtgctaatatggggtgggtgggggactctgcggcttggattaaaccacacctgaagtatggtggttagttctgggtgccacttttatgagggccagtactaactagaatttatccagaaaagtatgatgaagttaggatgggaaagggacttgaaaccatgtgatctaaggtatgatggaaaggatagagatctcttagccgggtaaaaaagattcatggatggctatcttcaatatataaatgccatatgaggatagcagcaggcttattctcttaggtcagaatcagtactgagtgcgtagagggctaggaggaagattttgagtcattaaaaacggtctcagttgcaccaaaatagtgtaagccttattatgaatatcat

SEQ ID NO: 11997 - DNA, 556 bp, Homo Sapiens
caatttttctttgacatttttatgctttgaaaattcagaatggataaaaacaaatgacgtacaaaatatttcagatttacatagtgataaacaagaaagcacttatcaggaggacttacaaatggaagtacactctagaaccatcatctatcatggctaaatgtgagattagcacagctgtattatttgtacattgcaaacacctagaaagagatgggaaacaaaatcccaggagttttgtgtgtggagtcctgggttttccaacagacatcattccagcattctgagattagggtgattggggatcattctggagttggaatgttcaacaaaagtgatgttgttaggtaaaatgtacaacttctggatctatgcagacattgaaggtgcaatgagtctggcttttactctgctgtttctttcacactttagattttaaaagtacgtctcaaggaatctttctttccaatttgagaactcaactcactttaaaatggaaacacgcaacaaaaaacagatgctgctttctagaactccattgtcatgaaatataata

SEQ ID NO: 11998 - DNA, 721 bp, Homo Sapiens
tggcctcataatacttctatcgctatgattcatccctcacttcttcctcctagtaaccccctgacagcttttaaaccgtgcttctccttccctctgctcatagagctgaggaccctcgttgccacgatggtcctcagctgagcacctgcgtcctgcctgttcatctttaagtgggagaacagaacactaggtttgcagtggctgtgagactcagctgagggtaatgtgagtgtgtggattaccacagagcccctggagggccccacaggggccaccaaggagcgggtggtggggacatgtgaggctcaagcctcctgtgcccctttgggccagagtaggaccactgaatgagcatatcaatttgttccattaccctagtgaagcattattgggttgttcccacttttcccctcttataaatcaatagcaatgcagtgagtattttgtatgtttacttgggcctatgtgttagtttctccaaaggaggaaatatcactggtatttagctttaccagttgttaagttgcttttccgaagtggttatgtgaatttcactttcaccagcatttccctattctgttggtgttgagtggttctattaattttaatttacatatcattgatatctgataaggttgaggacttttttttattgatttattggccattagtatgtttaccctctgggattttcctatttatatacttccctcacccccac

SEQ ID NO: 11999 - DNA, 359 bp, Homo Sapiens
aatgctggtcctcagctttctcaggcacatgagctgcaggagaggtaccagttgtctgtctctgggtagtgggatgatgaggtttggccctgcgagaccaggcgctcagagacaaagggtagccctggaagaaggctgtggtgcagttgagcgaagtattgaagccaaggaagggcgaggcagcatacacgcaggccactacgacggtctcgttccgcatctctgtcttgtaggcccgcaggcagatggtgaggtgaacccccgcttgtccatgccggtgtacaggcgcagccgaatcacggaggtgcgtgtccgaacacaccctcacctgagaccctgtccaggggctggaagtgcac

SEQ ID NO: 12000 - DNA, 471 bp, Homo Sapiens
  misc_feature (396)..(396): n is a, c, g, or t
gatgaattgagtgaagctctcctacttataaaggctcaaaaagaacaaaaaaatggagacctttcctttttagtgaaagtagatagtgaaattaataaagatctagaacgctctatgagagagctgcaagcaactcatgcagaaacggtgcaagagctggaaaagacaagaaacatgctaattatgcaacacaaaattaataaagattatcagatggaggttgaggcagtgacccgtaagatggaaaatttgcagcaagattatgaactcaaagtggaacagtatgttcatcttcttgatatcagggctgcacgtatccataaactagaagaagctgtaagtttggggagcatataagtgttcttcagctgttggagttttgcatattctccatanccaaaattttcacagaaaagcaaggcagatattcacgttggtgatatttggttggcctctgtatataacggtgaa

SEQ ID NO: 12001 - DNA, 1053 bp, Homo Sapiens
  misc_feature (763)..(924): n is a, c, g, or t
ggaattctcgggatgaggccgggccggagccgcaggccagccgcgattccttcgggcgatgctgggggctttccggtcggggccgcagccgcttccggagccgcgggcgaggtgcgttccccagcctggtttgctctgggctctgacccgccgccgcgaatctccgctcgtaactccgggcctgaacctggaggagggaggatttcctctgtgcagctttcgagcggtagactcaccctgccaggcagacctagattggcataaccagagatcagttccagttgtgatgcagtgggtgtctacacacttctgatgacacctttattttaaaagctgatgttccaaggtgcaagcggtcttctctgtcttctttatggccagtaaaattctccagaagagatttatggcagcctcactcccagtagtttctgcatttagtgagataaggaatggattttcttctgtgtattgctgacacgaacaggagacggaaatactgagtagaagagggcggttccctggctaaggccccaccctcaagcctggatacccgcggccctaaatgagaagaggcgtttctgtttggggcccaaaaagttgctttttgacccaccacgccccctatcctgcccccatataaaccccaaaccccaacctccagagcataccagcaggtgaggagatacgaggcaagccgactgacggcaaaacgacgtagcagagaaagagagaagaggagggacgtctggacaccgagagatgnnnnnnnnnnnnnnnnnnnnnnnnnnnnnnnnnnnnnnnnnnnnnnnnnnnnnnnnnnnnnnnnnnnnnnnnnnnnnnnnnnnnnnnnnnnnnnnnnnnnnnnnnnnnnnnnnnnnnnnnnnnnnnnnnnnnnnnnnnnnnnnnnnnnnnnnnnnnnnnnnnttaagtccgcgggggtgacccgaattttttctgggattctggaaaaaaagctcggaaatacaaaaagctggcccccggggccctttggcccttggggaaaaaccaaaagggccattgaagccggggtaa

SEQ ID NO: 12002 - DNA, 489 bp, Homo Sapiens
  misc_feature (253)..(269): n is a, c, g, or t
  misc_feature (280)..(352): n is a, c, g, or t
  misc_feature (363)..(399): n is a, c, g, or t
caacgactggtcctcagctgaaagtgaagggctttatcggatagggacagacgaggtaaggaaggttgtttaatgagaggccttgcttgccagcctaagcttttaaatttgatgccagtggcaacaataaagtgtatctatcactagccattgtcaatctggactataagtctgtccacaattctgtgtgtagagattccagactggggcatagggatgaaaacctaaaggataccttcttttgggaaattcnnnnnnnnnnnnnnnnnctgagatggannnnnnnnnnnnnnnnnnnnnnnnnnnnnnnnnnnnnnnnnnnnnnnnnnnnnnnnnnnnnnnnnnnnnnnnnacgccattatnnnnnnnnnnnnnnnnnnnnnnnnnnnnnnnnnnnnncatggcaacacacttcagctaatattggtatttttagtagagaaaaggtttcactatgttgtgcaggttgtgcactgcaactggacctaa

SEQ ID NO: 12003 - DNA, 675 bp, Homo Sapiens
  misc_feature (389)..(389): n is a, c, g, or t
cgtgttctctacataggcaacacagccgcctaagtcacaaagtcagtggtcggccgcttcgaccaacatgtggtgagcattccacgggcgcatgaagtctgggtgctgtgctcgagtctctgaatattctgataggaagccgacaagaaaattcaaactgctctttgctgactactggaaagtgaaaagatgctcaagtttaccattcaaagaaaccataggcatttcaaaaacctcttcctaaactttggtttaaaaaaaatcaggtcaccacaaaccagaaatataaatcgacgctgtagccagctgctggtcatgtccttggcagtcttttgtgcaaaataaggcatatttgagctccacattaaacttgcggcaggcgtctactntgctctgcatgctgtagcagtgcacgtcctccttccccttggtggtgtagcctgggagaggctgcccatacttatccacacaccagcagaagccccgcttcctgcctttggaagggcgacactgctttttcttataaaatcccttcttgtcacagttgggaatgtgtacacccctgggactcagcacattgaggaacttcaggtgattcagtgtgtcttccatttctctacggcagggaccatattctgtctcccgcttggactcggaggagaagttctgggtatc

SEQ ID NO: 12004 - DNA, 764 bp, Homo Sapiens
tggaaggtggctgcggaacggttttaagcggaagatggaggagccggaggaaccggcggacagtgggcagtcgctggtcccggtttatatctatagtcccgagtatgtcagtatgtgtgactccctggccaagatccccaaacgggccagtatggtgcattctttgattgaagcatatgcactgcataagcaaatgaggatagttaagcctaaagtggcctccatggaggagatggccaccttccacactgatgcttatctgcagcatctccagaaggtcagccaagagggcgatgatgatcatccggactccatagaatatgggctaggttatgactgcccagccactgaagggatatttgactatgcagcagctataggaggggctacgatcacagctgcccaatgcctgattgacggaatgtgcaaagtagcaattaactggtctggagggtggcatcatgcaaagcaaagatgaagcatctggtttttgttatctcaatgatgctgtcctgggaatattacgattgcgacggcaaatttgagcgtattctctacgtggattcggatctgcaccatggagatggtgtagaagaccgcattcagtttcacctccaaagtcatgaccgtgtccctgcacaaattctccgccaggatttttcccaggaacaggtgacgtgtctgatgtaggcctagggaagggacggtacttacagtgtacatgtgcccattcaggatggatagcagatgaaaacatatgacca

SEQ ID NO: 12005 - DNA, 515 bp, Homo Sapiens
  misc_feature (13)..(13): n is a, c, g, or t
  misc_feature (26)..(26): n is a, c, g, or t
agatgaaattcanatttatcagtcanagttagttcttagtgatcatatggtcagctaatattagttcttagtgatcagtggtcagtaatcttcaaagtcagaatctatcaccttggtaaattatataaacctaacttgagcagatctgattattcttggatagtattcaagtggtatcttgactattaaactacgtatagtgttgctgaaatagaaagaaaacagcattggaattggattcatgtatcgtgggatacaggtgttatttcaggtgatgtacttgcattattttctttagccatagtaactttttgtcacaataactaagtattcaattatatataaagagtgaaacattaaaatgacgcatggatttatatttattataattatgtagtaccctcaaatcattttgtcagttacatcaagaaagcagatttttctttagtcatgaaaaatatctcaagtggtaagttgtttgtgctttaggcaaacattaaccagctctaacaaga

SEQ ID NO: 12006 - DNA, 309 bp, Homo Sapiens
tatgggatccctgacctgtggttactggaaaacagttgacatttagagagaggctgaattcttgggcttcccgtagcccccatcctgagtgtgccaacagggactagaagcatctctagtctgcaaagcgaggaacaagtgatactctgtccaatttttccaatattgttatactcatgaatagagattaatgaaattgaagagcatattcaagagaaagactaaaggagaagtcgtctgccccgtggacaggcagcttgagtggtgcttgagaaaatgtacatgaaattgcttgttaaaaaatattca

SEQ ID NO: 12007 - DNA, 328 bp, Homo Sapiens
acggactcaagcaatccacccacctcagcctcctgagtggctgggaccagaggcacataccaccatgcccaggtaatttttgtatttttggtagagacgaggttttgccatgccgcccaggggggtttcaaactcctaagctcaagcaatccacccaccttggcctctcaaagtgttagaattacaggtgtgagccaacacaccaagccaatatatagttaattgaagaaaagggggtatttttaaagtgcttatgaactgcaacttatgataaccaaatacttatgtcaacttagctcctccaactaaaacaattattctgacctgg

SEQ ID NO: 12008 - DNA, 720 bp, Homo Sapiens
cattccaagagcagccgaaaccagctcactcatttatttgactgagaacattaagaaggacaacaaaattaaacattctttaataaaattcctatagaaagctcagtcatagcggcaaatactcagttctctttccctatatcaccgaggattgagagctcccaatattctttggagaatacagcagtactttttgctggatgttgccaggactcagagagatcacccatttacacattcaaaccagtagttcctattgcacatattaacattacttgcccctagcaccctaaatatatggtacctcaacaaataacttaaagatttccgtgtggcgtgaaaccatttcaatttgaactaatatccttgaaaaaaatcacattattacaagttttaataaatacagtaagaagagctggcatttttctaaaatactgaatttcagatctggagtttattccataaataggtttcttttcatttgcttgctttcttggatacatttgctcaagtattattctctatgaagtgaactctttcatagataccatataaaaactgtattaatatgtgcctcattatagaagcagctggaagaactggatcacacagttacctaactgaaaagtcacttaggaaaaagctctgctttacgtaacaactttcaatcacaggctgaagaataccaaagaaacatttatatagacctccaaccgaacc

SEQ ID NO: 12009 - DNA, 456 bp, Homo Sapiens
gccaggctgctgtccatccacagtgaccaggaccggatcgtggtgacgtttaagacttttgaagaaatctggaagttttccacctaccatgctctcggcttcactcatcactgcctggcaaacctgctcatggaccaggccttctggctgctcttgcccagtgaggaggaggagacggccatccaagtccatgtggatgagaacgccttaaggctgacccacgagagcctcctcatccaagaagggcccttcttggtcctgtgtcctgaccacaatgtgagagtgatgacgggtccccggaatgcaggaaatggcccccaggccctcaggcagccatcgggggcacccaagggagaggcgcccccggaaacagactcttcaccgccgagccccagcgtgtcctccgaggaggtggcagtgcgccgcccacgagccttgattcatttcgtcaatcta

SEQ ID NO: 12010 - DNA, 726 bp, Homo Sapiens
  misc_feature (199)..(208): n is a, c, g, or t
  misc_feature (552)..(552): n is a, c, g, or t
  misc_feature (564)..(564): n is a, c, g, or t
  misc_feature (650)..(650): n is a, c, g, or t
  misc_feature (655)..(655): n is a, c, g, or t
  misc_feature (672)..(672): n is a, c, g, or t
cacctgtaaaatgcggatgattgtattgtcatcacaagggctgtgtgcagcgccagcaactcgagatacgtaaagcatttaaatagtgcttcctctgcccctctcagcagtatcaaatttctaatgattggcagtgtctggcacagaggagctcaatgtaattcactgaataaacgaacgaatgagctcaaagtatgannnnnnnnnnggcaccgggaggtagcttgaacaaatgcaggggtgtgggttggagtggcgtgtctctactaaaggctcctgggaaggagctcaagagcctggttgggggtgctgcactccagcgcaaaagccacggcttctgttgggagggagacagctagtcacctgggccctaacatggaggtaggagccaaggtgcctgtgcacccataaccccaacctccaaatgagcagaattgtggagagctcaaccactcaacaggcttgtggagaggctcacaccaggaagaaatgctacacagcagcacttgcagcctcccccacactccgtggctcccggtgggcccggctcanttcctccccttntgggtggtcaaaacattggcacttgctctcccaaaagttcagggggccaaggccaagttttcgaagagagaacgattggggaaaancttgntcaaacaaggttggctnaaagcctggaaccagctttaaaaaggaaggttcccaattaaccccccaaggaac

SEQ ID NO: 12011 - DNA, 479 bp, Homo Sapiens
  misc_feature (38)..(38): n is a, c, g, or t
  misc_feature (414)..(426): n is a, c, g, or t
gcgccaggccaaggtccacggggatttgatttagcatntgggtaactggccgctaatggaactgaagacagctgggcctaacaagtgcccaggtgactcaggtaagcgaggaaaccagatcgaggttctcttgcgtgggacaggttaaactctgaccaaaccacagctgagccgggacgccttcctgtctaaagtccaaagtccggacgtggttggcagggcgcaccggcgcgtgccccgcaggccatttttctgactggaatgacggcggcggctggcttctcggggctgccggggtctcccggggtacgccgccgtcaggacttctgcagggcgcagacagcaggctccagcgaggctgcggaaggaaagccttgggtgtcggggctgggcctggcgtcggcccctgggtcnnnnnnnnnnnnnttgcgccgagacgcctctaggagaagtctcgccgccgccgccaccgcggccgc

SEQ ID NO: 12012 - DNA, 472 bp, Homo Sapiens
cgtcaggaatgagagggagagaataaacgcgtagaagaagcgatagttccgtctcccccacacagttgcccacccaggggcagtgatggtcaaatcgttccacacagttgtcgcagacactgcagtgtgaggttcggggtggccggaacatcttgcaggtgaagcagtacttcagcttcaccatctgcccgttgatcagcacctcccgggtccgagggggtggccggtatgtagaactgcctgtgttgtcgatctgtttctccagggcggctgcttcacagacagtggcccggggcaggatcccagggtcggtgaagcttgtctgcagcaggcagctcatgacgaagaagaagaggatggcagcgatgatggggatggcaagggtcagcttgcgagccaggtagggacagtcaaagacgaagaagaggccggtggtggtgaggatgagcagcagcgtgagcgcgaagacgcc

SEQ ID NO: 12013 - DNA, 589 bp, Homo Sapiens
tgaagcattaaagtgtctctcggttcccaaaaagaccctataattttttaaggtaatccggtaaccgaatagaggaaagttgcctccacggccaccaaaagccccggatagaattccttcaagtgaatattgacttccaagatttgaaaagaacttaattccccaaagcttcggtttgatctggagctcgcagcccagccaaaaatcttcattttgcctggctatgaaaccaccagcagtgttctttccttcactttatatgaactggccactcaccctgatgtccagcagaaactgcaaaaggagattgatgcagttttgcccaataaggtgaggggatgacccctggagatgaagggaagaggtgaagccttagcaaaaatgcctcctcaccactccccaggagaatttttataaaaagcataatcactgattccttcactgacataatgtaggaagcctctgaggagaaaaacaaagggagaaacatagagaacggttgctactggcagaagcataagatctttgtacaatattgctggccctggttcacctgtttactgttatcacaataatgctaagtaaaaaa

SEQ ID NO: 12014 - DNA, 577 bp, Homo Sapiens
aggcctgcgctgcagtcactgcccctgaagtcgcggagaaagggcggtaacggaaggacccacgcccctgagcctcgcgctgagcgggggccgcgcagcgcaacgcactggtgaccagactgtccccacgccgggaaccaagcaggagacgacaggcgagagaggagccagacagaccctgaaaagaaggacgggttggggccgggcacattgggggtcaccggccgatggagacaccaaccgacaggccctggctgagggcagctgcgcgggcttatttattaacaggataacccttgaatgtagcagccccgggagggcggcacaggtcgggcgcaggattcagccggagggaagggacggggaagccgagctccagagcaacgaccagggccgaggaggtgcctggagtgcccaccctgggagacagaccccacctccttgggtagtgagcagtgagcagaaagctgtgaacaggctgggctgctggaggtggggcgaggcaggccgactgtactaaagtaacgcaataaacgcattatcagccaaagctggaatggccccagcagaaaacccc

SEQ ID NO: 12015 - DNA, 482 bp, Homo Sapiens
  misc_feature (101)..(116): n is a, c, g, or t
  misc_feature (280)..(314): n is a, c, g, or t
cctactagggtgtactacagtctattttatagcaaaagagcactagacaaacaaagctttataacaaaaagccaggcactgatacatggtaaatctctgcnnnnnnnnnnnnnnnncttatcttcacttaattgcatcacaagtaacaagaatgaaaaaggccacagttcatatattttcaccattacatatgtctataatacttgaaatgagtatggcaaaaccagcactgcacaaagatgagtccacttcaagtcccatgagaaagagcatgtctctnnnnnnnnnnnnnnnnnnnnnnnnnnnnnnnnnnngagaggcctaaaggccttggtgccccattgtgttggaattcatcatattccatcttgacttttttgcttccagtcagccagcagactaaatttttgtgcttgtttatgctgaaattgattcattcctgactcaagttcacttttggacacagatcatattctgcctgt

SEQ ID NO: 12016 - DNA, 442 bp, Homo Sapiens
ggttgactctgaggatccccaacgatggtcctcagctacccaggccagtcctgagtagctgggactacagatgtgcacactgtcgtgactggctttcaagaaagaggctttctgtaataaacagcctttctccttgttttacttgagaatgaatattttctattggtttttatgggtgtgccccctccctccccttttaaattacttaggagcttgcaagtttttgaagaaacaggaatctctcatagtgaatttctccatcgtcaacatacggaagaaggtggtggtccccttggaggtcctctgaagttctctaacccttgcatcctttggcttcatgctgaccaggcaggtaacagccctttgatgccctagagtccatctgtgatggaacttggagtaataagttactgtatagaaaaagctgaggaccatcgttggg

SEQ ID NO: 12017 - DNA, 275 bp, Homo Sapiens
  misc_feature (136)..(172): n is a, c, g, or t
  misc_feature (226)..(226): n is a, c, g, or t
tcgtcgcccggcgatggcggccctatcttgctgcaggtagcggccagcagagcgagcggtgacggctgagtgtcctgggccgccgctgccgccgccaccgcaccgtttccgtgctgttgctgctgctgcagatacnnnnnnnnnnnnnnnnnnnnnnnnnnnnnnnnnnnnntatccacgtccaaggcagccatttcctcttgtttcacgggcttttcgggagcgngtcatagtgtgtttagggcacctcaggcggggctccccgccgccttaca

SEQ ID NO: 12018 - DNA, 501 bp, Homo Sapiens
  misc_feature (41)..(108): n is a, c, g, or t
aagatcgtctcagtctgggcaagtaattgatctgtctgcannnnnnnnnnnnnnnnnnnnnnnnnnnnnnnnnnnnnnnnnnnnnnnnnnnnnnnnnnnnnnnnnnnnacgagccaccatgccggacctattacgtgtatttacttggatatcaatgctgactacagcaatagcacttgccttgcaaggagcttttctatttgagcgaaaaagacatgtatataaataactgcaaacagaatgaaacaagtgttatgtagatctacatacagtgacatgccatgggaatgctgaacactgagcaacagtttcaactagcgaattggcacaggaaacatgaaaaataagcgtattttcaatatgacaagaatggtcatttctggatataagaacaagagaaaagtcatgggtatatggaaaggcatggacttcttcaaggaagagcaagtagtctaatgtagatgctgtataggaagctgaggaccatcgttggggtaccga

SEQ ID NO: 12019 - DNA, 641 bp, Homo Sapiens
agcggccgctcgttgatcctctgtgggagccgctccagcagccccacgggcacgtaccggcacaggaaggacagccactcgagcagaaagcgccgggtcttctccacgccctgcgtgtccgagccccagtgctccaggccgtagttggtgaagtcccgcaggatgtccaggcgctcggacgacgagatgtcccagtgccgctgctccttgatctccgtgaagagccacggcttgagcagggcgccacgggcaatcatgatcccggtgacaccagtctgcatggcgcggttggcatcctcaaatgacaagatgtccccatttccgaacaggggcatggggctggcggcctgcacgcactcctcgatgtactgccagtcggctagcttggtgtagcgctgctcccgagagcggccgtggagcgtgacgagtgccacgccccagtcccgcagctcgggcagcaggcggtgcgccaggttcacacgctcctggacgcctgtgcggatcttcacagtcagcggcacatccagcacctggttcatgccacggacgatctgctggaacttggtggagcgattcatgagggcacaagccccacccttcttgtaaacgaggtcgatggggcagccgacgttgatgtccac

SEQ ID NO: 12020 - DNA, 547 bp, Homo Sapiens
caacgatggtcctcagtctcctcgtggatctgtctgcagctcccggaccttgagctggaaccggtcctccagggtcggtatctgctcaccatgatgcctctccatgtcctgcctgtctctgaccgaggcatccagctggctcaggacccggctgcgctcagcctgcagtgtgctctcggtcctggtcagctgctccaccacacaccgaatctcctcctcacacctgccccgcagggtgaacatgctcatgcggtgctggctctctgcatcctccagacactgctgctgatggtctagcagggcggccttggccttgagctctgcattctccctttcaacaatggcgatcacatccaggtactcgctcttctgctggcggagaagctcctcatactcctccctcagggcccgggctgcctgtgcctgctctgagcaggagggctcccgggtttgccaggactccttgcagagctggagctccttctcatattctagccggattctgcaggacgcatagcaaacctggtgctgaataatggcatcctga

SEQ ID NO: 12021 - DNA, 483 bp, Homo Sapiens
ctctgtgaaacgtatcaactcttcataatctaggctgcaaatgcaaactggcaccccgcagatgaaacggggctgcagaagcaatttattaggtcttcacagtgtttgctttttaaaaatattagttggttgccaacattaaaaactcagaaggcttcacacaaaaatgcaaacatccagccagtcctggaaactggataactgagcaactccaggctgacatttctgcagggcagccatggacgagaacagagcagtggcagcacgcttagaacaggcctcgctcatgcccagcctgcttcacctgttcacacgtcttgcctggctctgcacttcctaaatctagtgatttatttagtggcttcaagaactgctacactttccagtgtgttaagctctgaaaaactgagtgcagataaagatgctgcaaagacactgcccaccttaaagtcgactgatggagaaatctacatcccagatcag

SEQ ID NO: 12022 - DNA, 621 bp, Homo Sapiens
  misc_feature (16)..(16): n is a, c, g, or t
  misc_feature (386)..(386): n is a, c, g, or t
caacgatggtcctcangctttctaaaaaggaagcttccaggacacgctatcatgcgttctcctcagatggtgactgctatgtacgtaccatgcagaatacaaatgatgtagaaacagctcgttgtaccgctgggaccttgcataacctttcccatcatcgtgagggcttactggccatctttaagtctggaggcattcctgccctggtgaaaatgcttggttcaccagtggattctgtgttgttttatgccattacaactctccacaaccttttattacatcaagaaggagctaaaatggcagtgcgtttagctggtgggctgcagaaaatggttgccttgctcaacaaaacaaatgttaaattcttggctattacgacagactgncttcaaattttagcttatggcaaccaagaaagcaagctcatcatactggctagtggtggaccccaagctttagtaaatataatgaggacctatacctacgaaaaactactgtggaccacaagcagagtgctgaaggtgctatctgtctgctctagtaataagccggctattgtagaagcgtggtgggtgcgagcttaggagttcactgagagatccagtcaacgtctgtgcagaa

SEQ ID NO: 12023 - DNA, 668 bp, Homo Sapiens
aagatggtcctcagcgtctgggaaaatctatttcgatatccaaatctggttcatatggtacatcaggcatgctggactgtgtctctgggtcagagttcttcaaaaggtctgaaccaattatatctgtttcaataattacactgttgatgttggttgtctctgttttcccctcgtcttcactcatcatatccgtcattgtaagcaactctgtatcaagagcatctgaagaaaccttgctttttagctcctcaattgctgcaggaatcttctcactgctgtccaatggagcaggcagaaaaacaggaactggcacaggaacaggaactgtagtaggaacaggaatatactgactgtacatgtgcataggaactgcgatatacacaggcacagggataggcactggaacatattctgtcctccaagtatcatctgtctgacaagatttggtctgcatgtgaggtttacagtaagtagcttgtgtcattgttaaaggttagcaaagaactgctttgttcttcatctctatgttaggtgtaggagaaggcggtggtgctgaacctgtcatcttggtccgagatgtctgacaggcctgatcataatgtaagtgtacaggtccttactgagttgtcatgttgggctcattttgtagacagtagaaacgccgtaat

SEQ ID NO: 12024 - DNA, 566 bp, Homo Sapiens
gctcaagcgaccctcccacttcagcctcaggagtagctgggaccacaggtgggtgtgcctctggctgcttttaacatcctcccttgcctgttctgaaaacttcacgtcagagtcatattaaaatgggtaattactgctctttctccgccttataatgcatgatacttttggaatttgagccttgtgtttttatgaaccttgaaaagccctctgctgccggcctctggagccaccgtctccctgccctgctctctcctctgccgaggtgcctgttaagctgcattcttctcctccacagctccccgcttcctgcaggcttcctgtctcactttctttctgtgctccagagtctaggcaatctcttttgttagaacttcccattcaccaatactttcttatgttgtgtctaataagctacatcatctgctcactgggttttttatttcagtgattatagttttcatttccagatattccatatgccttaaaaacatctgcatgatactccatggtttttactcccctgatgaatactgtgcatttaaccatccccgcacgtgaggtcc

SEQ ID NO: 12025 - DNA, 557 bp, Homo Sapiens
  misc_feature (534)..(534): n is a, c, g, or t
cgagctcggtaccccaacgatggtcctcagctgccagacagcagattgtggcagctgaggttttccacggtagagtagaagcatccatcatgtgtgacattcagcagatggggcgctgtgggtggcttggagcactctggttgtaactgaggcaggcacagtgtttaggaaggctgtgcagtaatctaggctgaaggaaggggaaagcctagactaagattgtggctgtgggattgaaatagcgttgaaggagctgactttgactcccggagatgatggggaaagaggaaatcagaagggaccaaggatggtgatgttcttaagagaagctgaggaggaagagaggatgatatggtggcagacgtatagagagtctttgtagatctctcacattggaggggactatggtcggaggtacagatgtcctaaggcaggctggaaaagggagtctggagagagcttggtgttgtagtgaaccacagggagccgtctccttggccctgtgatcacccagggactgaatagagaggcggncctgggagacttcagacacttgg

SEQ ID NO: 12026 - DNA, 926 bp, Homo Sapiens
ttcttggatatcaattagtgctgccaggatgcccaacttccgtgatcattttccaagtcacgtgattaaggatggcgcacccttcccatcataggctccccaattgccagggacctgactgcttggggcttccaaggccacagaccttgatgcccagggaccaactcgtaagccgcttgtacgtggaccaacaaccggccatccaatgagtacagcagaatcttgtacctccaagcaaggtgtcccacactgccagcacacagccgtttggggcccactcaatccctgtgagatcctgggtgtccgtatcaaaatgccgcaggagctgccaatcactgcagacgaagatgctcacgtaatctttgcagtcgcgccgttctgccagcgccatgtagcggccgtccctggtgaaggtgattccctgcagacaagctttcgggtatttgatgtaagacacggattttgtgcacaaggaccagacggttatccgcagatggaattccgtggtgttgagaatgtggcgcccgtccgggctccagcacgaggccaccagcccggctgagccctcgtctattttgcagtgccattcgggctgctctaaagaccagacctgcaccagccctcgcttgtacatggcgcacaggatgaagagcgagtctgccgaccactcgatgtgctggatctggtctaggcacgtgtacagctgaaggatctgaagggtgttcacatcccggaccactaaccggtactggacacaggaagccaggtacttgccgtccggggagaacttgcagagtaagctggagagcttgaatacctcggagaagttcatggccgccgcctgccgcgggcgccaccctgcgcccgaaaacccgcgggacccctgggcgcgcagcaggctgcaacagccgacgccggcctccgag

SEQ ID NO: 12027 - DNA, 713 bp, Homo Sapiens
  misc_feature (16)..(16): n is a, c, g, or t
caacgatggtcctcangcttcctgtgcacaagaggctgaggactgtggatacggacagccatgccgagcagggccagctcagcagccccaggcccaggtggaggatgcagatgcattcgagcacattaaacaaggcagtgacgcatacgatgcacagacctatgatgtggccagcaaagaacagcaacagtctgcaaaagactctggcaaagatcaggaagaggaggagatagaggacacccttatggacacagaggagcaggaggagttcaaagcagcagacgtggagcagctgaagccagaggaaatcaagtcgggcaccacagcacccttgggctttgatgagatggaagtggagatccaaactgttaaaacagaggaagaccaagaccccagaacagacaaagcccataaggagacagaaaatgagaaaccagaaagaagccgagagtctaccattcatacagctcatcaattcctcatggacacgatcttccagccctttttaaaagatgtcaatgagctaagacaggagctggagagacagctggaaatgtggcagccacgtgaatctggaaacccagaggaggagaaggttggagctgagatgtggcagagttacctgatcttaacagcgcctctttcaaaacggttatgtgaagagcttcgtctcatattagagcctacccagcgccaagctgaggaccatcgtt

SEQ ID NO: 12028 - DNA, 674 bp, Homo Sapiens
  misc_feature (174)..(174): n is a, c, g, or t
  misc_feature (249)..(249): n is a, c, g, or t
agtcttagtagtcaggtatcctatacatttcacgcttctaggtaacacaagctgggaaagtcttgttttccagctaaatgcattatttaaaagttcattgaagatcaagacttatagcagaatttggtttttctttcaggaaatattactaaaataactatgtgtatgttcatntctttaaaaattttacacatgcttaaaaggcatggcctccagccactgagatgtacagttaaagacatatttganccaagagagaagtacatgtaaaaggtatcctctagtgaagaccaattgataacaaagcaaagcttgtcacattaactttgtttcacttgctgtaatgtcccaagcaggggcagccactcttaggccccttgttggtttcctgactgtactcttaaaaataaagctgaaaaagagcaatacaccaccatccttaaagaaaacataaagattattagaaattaaatcatgtatacttcactaactattagcatcccacaagctctgttccatgtatgaggtggcagaatttacagttgctaataccagaataccagaatggcttaaccttgaaccacggatttatcacagatacttattaacaaatgacatgacctcattattcttgctaaagaaaatcttcttttataaagccactttgaatgcat

SEQ ID NO: 12029 - DNA, 615 bp, Homo Sapiens
tctgtgtcaggcacaccttctgcccccaacaagttacagagacttgtgagcctgcttgttcagtgtaatcaaaccgaagcttgcccagagccaactcatactgagtgaactgggacagtgtccagggaaagtttgctcttcctggaaccaccctcgggccttgtggctgatcccagtttctcgtctcttccttcttgatcctttcccacagtttgctagacatgctctcatatttctgaatcatatgtgactgagtgccttccttggaaaggttttgcatcccccaagtcaattcgaggtgcaactggatgtttacaggtggggcaggcaggggcaaggaaatgtacctaagtccatggccagtcatatctcaactcaggaggccccagcttcacctccaactacatatactacgggaatgtttttctcttgtaatttaaaagaggaagaaagaaaataaacatttgtttaaaagtaaatgaatgatctatgtcagggtgtgtggaagaaatttattaactcaagtttgcacctttgcatttgagggaccttggccaaatgtccaagggttacatggctgagtacagaactgtgatctagctgaggaccatcgtt

SEQ ID NO: 12030 - DNA, 909 bp, Homo Sapiens
  misc_feature (145)..(145): n is a, c, g, or t
  misc_feature (323)..(323): n is a, c, g, or t
tcgctgagactctgcctgcttctcacccagctgcctcggcgctgccccggtcgctcgccgcccctccctttgcccttcacggcgcccggccctccttgggctgcggcttctgtgcgaggctgggcagccagcccttccccttctntttctccccgtcccctccccccgaccgtagcaccagagtcgcgggtcctgcagtgccccagaagccgcacgtataactccctcggcgggtaactcattcgactgtggagttcttttaattcttatgaaagatttcaaatcctctagaagccaaaatgggacacagtaaacagattcgnattttacttctgaacgaaatggagaaactggaaaagaccctcttcagacttgaacaagggtatgagctacagttccgattaggcccaactttacagggaaaagcagttaccgtgtatacaaattacccatttcctggagaaacatttaatagagaaaaattccgttctcaggattgggaaaatccaacagaaagagaagatgattctgataaatactgtaaacttaatctgcaacaatcgggttcatttcagtattatttccttcaaggaaatgagaaaagtggtggaggttacatagttgtggaccccattttacgtgttggtgctgataatcatgtgctacccttggactgtgttactcttcagacatttttagctaagtgtttgggaccttttgatgaatgggaaagcagacttagggttgcaaaagaatcaggctacaacatgattcattttaccccattgcagactcttggactatctaggtcatgctactcccttgccaatcagttagaattaaatcctgacttttcaagacctaatagaaagtatacctggaatgatgttggacagctagtggaaaaat

SEQ ID NO: 12031 - DNA, 438 bp, Homo Sapiens
ctctgccactgaaagaaactaaaagactttctggtacaagaaaaagctaatgaatgtctttttcccactcccccttctcttccttggctatttcacactggagattttctttggtttggatcctgattgccctttcaacttgaaatagacttacacgtaacaacagtaacagagctccctttccttccctgaccctttgacttacatctataaaaggagtcaagtgaatgtacctacacacctgtctgtcactacagtaacacctaataactgtacgtgtcctgtcacttagtaacatgaaactttaaatgagtaaatagctactccttacttaggcaacaccaaaaggttgactgtcaaacatgtgaaatgtgaaaatccatggcggtacgaattagtaaatcacatctaacctcacaacagctgaggaccatcgtt

SEQ ID NO: 12032 - DNA, 586 bp, Homo Sapiens
  misc_feature (182)..(182): n is a, c, g, or t
agctccattacgattacgaaatttccccaaaatatgaacatggggcatatatgtccaatggatctaccaactccaaatgagaagtttccacacccactaagtttgggcatgcctgcaaagcttctaggactcctggaatgctaaaagcctcatggccccttactcttcgcctctcaaggtancgagggtgaaggccatatagctgttcaacatctggcatcttctttaatagtgttagaaaactggcatctgtaaagccacttggcatgtattcccaccaccgccctgcacagagatctacaactctcacaactcgcagatatagggtcactgcttcctttagcttccgggaaagacattccatacacatgatatcctgcagagggaggtacctaaaaatatggcaaagtacttcatgtgaaagttgattcatatagtcctttgtttcatctgctgtcatttcttctggaatttcattattcatgatacatgttttcacacttttctttcgtggccccattgttgtgcagtctccagtatcaacgagaaaatcttcccttttgtttacttgagttcaaagtaccta

SEQ ID NO: 12033 - DNA, 367 bp, Homo Sapiens
  misc_feature (324)..(324): n is a, c, g, or t
caacgatggtcctcagctgctgggcagcagctgctcagcacagagttctttcctcacaagtggagaggctggttgtccccactgatctccctgaggtccttgacttttttgaggggtgtggcccaaacccacaacttagttcctaataccttttgatactcttttattagatagatgttttacaaatattttctctcagtctgtgccttacaaagtagcagaggtgctgaaatagaggtttttcaaaaaagttttgctttttaagtccagttgatcaacttttttcttctctggtccatgcttatgtcctatctaagaaatctnttgcctaactgaaggccacaaagaaatcctcctctgtctaaag

SEQ ID NO: 12034 - DNA, 437 bp, Homo Sapiens
gaggggcggcgggctagtaaccatagcggctcgcgtgggtcggctggcaagtaaccatagcggcgagcgtggggcggagtgtggctcggtagtcctctgcgtgccctcctgggagctgggtgctgtgagtcctcccctagcgggctggtctcgccgcggagtcggcgccgaacccgagctgctgctctggggcgtgtgcctagggcgcagggctggagcgcggggctgccggttgctcgcgctccgctgaggtctctaggaaagggggcgatttgagggttccgccgtgaccgcttccaacggcggacacgcgcgctctggaccagagccgttgcccgctgtctcgtcacccgaagcctcctcctgacgccgtgctagtgcgagggtctccaggggaattcggggcacaagtcgggccggagcatccgggcggccgc

SEQ ID NO: 12035 - DNA, 455 bp, Homo Sapiens
gcgcccgaggccctgcaggccccagcccaggtgccatccttgtttcgcaatgatcgactccttgtctatggattcattcctcactgcacacaggcaactctgtgtgcactaattcaagagaaagaattttgtacaatggtgtcgactactgagcttcagaagacaactggaactatgatccacaagctggcagcccgagctctaatcagagattatgaagatggcattcttcacgaaaatgaaaccagtcatgagatgaaaaaacaaaccttgaaaatctctgattattaaactcagtaaagaaaactctctcataacacaatttacaagctttgtggcagttgagaaaagggatgagaatgagtcaccttttcctgatattccaaaagtttctgaacttattgccaaagaagatgtagacttcctgccctacatgagctggcagggggaacccc

SEQ ID NO: 12036 - DNA, 546 bp, Homo Sapiens
  misc_feature (33)..(33): n is a, c, g, or t
  misc_feature (37)..(37): n is a, c, g, or t
  misc_feature (315)..(315): n is a, c, g, or t
cggtgcaggtctcgttctatctcctcggttacnaggnagcatttccccagggactcctccaccagattcccgtagtaaccagggtgtgaggcaagatccgtcaccgcatctgagaagagaagccagagtctccctcgcaaagattcagggatgcccatggctacgagcttccgaatcttctctgtgcgaaacatacacacggttctgccgtattccacaaagtggtcaattccacaggcttatttttatctgttctctggacattcgggagtcagggctctggctgcctgactgctggaaggcggtgaccagggncatcggggtgcatcaccgggctcttctctttctcactctcctcgctattttgagaagacatcatttcaggatccccaaatctgtggtcactgcacatgattggtgaatgaaacacgagtgaagccgagtaatcaaccgcagaggtgtcgaagtgcacgggccgcttggcgtggacctgcttcaacctcgacaagcagcgcctcaaccaggctgtctcggaccctcctccca

SEQ ID NO: 12037 - DNA, 456 bp, Homo Sapiens
  misc_feature (21)..(21): n is a, c, g, or t
  misc_feature (168)..(217): n is a, c, g, or t
agctgaaatggctccctgagnagccccagggagcaggaggggtgttctgaggacagcccctgaggaaaacacagtgcctgcagagggacagcccccagcaccctccggcagggctctggacagctaagcccagtcctgagagggtcaaaaagagagatggaatgctcnnnnnnnnnnnnnnnnnnnnnnnnnnnnnnnnnnnnnnnnnnnnnnnnnntctgatctgaggctgaggtattggagatagatgtgggcccagagaaatcgggtcccagggtacacacatgctgggggtctttgtcctgatgaattaagaaccatacacacaacctccttgggagccccgagcagtgcgctgcagggccaaggaaacaaccagctccaaagggactccctgagcctccgaaggcagtcctctaacgcctcccttcctcccaaagggctcagcggttggta

SEQ ID NO: 12038 - DNA, 358 bp, Homo Sapiens
gagattatcgatctatgagacatcttgatatgtaaagcacttaatattaaaggcataaaagtgaaactgctaaatatgtatagagaggttgacgtgtgatacgtgggacagttcacatagacatcagagaatttattccagaaaggagcctcctgaatgtgatgaatacggcaaagcctttaatcacatctcagcccttagcatcggaaagcttatactgtaaataaacttgatgaatattatatgtgaggaaaactttcatgtatagcactcattgcttcagacagaaaatgaattccgtcggtatgttccaatcgtgatgaatttgagaaacattgcaagagggagctcaatcttg

SEQ ID NO: 12039 - DNA, 284 bp, Homo Sapiens
ccaaggggtagagatttatgtattttatttcacagattctctggtcacaggtttttgcccagggaaattctgagaaattcacaatttcttaccagataaaacatgaaaagtttgccgttagttcccctcccctcccctccctctttttagttttaatttattagttaaactgatggcagcaatccatgaggtgtgtcaaagagtgtacatatgtatgtgtgtatattgaatgctaaacatattactgaaagacacattttaataaagatttctgtcataattca

SEQ ID NO: 12040 - DNA, 618 bp, Homo Sapiens
aagtgaagtggaagagacgccggagagtggaacctctactacccgatgcagctggacctggagtatgtgaggagtggctgggacaactacgagtttgacatcaatgaagtggaggaaggccctgtcttcggccatgtgcatgccgggtgctcatgaccaggcgacgatggctaagtggatccagggcctgcaggagaccaacccaacccctggcccagatccccgtggtcttccgcctcgccgggtccacccgggagctccagacatcctctgcagggctggaggagccgcccctgcccgaggaccaccaggaagaagacgacaacctgcagcgacagcagcagggccagagctagtctgagccggcgcgagggcacgggctgtggcccgaggaggcggtggactgaaggcatgagatgccctttgagtgtacagcaaatcaatgttttcctgcttggggctctcttccctcatctctagcagtatggcatcccctccccaggatctcgggctgccagcgatgggcaggcgagacccctccagaatctgcaggcgcctctggttctccgaattcaaataaaaaggggcgggagcgctgttggttgtgcgcaaaaaaaa

SEQ ID NO: 12041 - DNA, 550 bp, Homo Sapiens
  misc_feature (48)..(127): n is a, c, g, or t
  misc_feature (327)..(442): n is a, c, g, or t
taatttctacaagcctttcctaactcaacacatactacagtgcacttnnnnnnnnnnnnnnnnnnnnnnnnnnnnnnnnnnnnnnnnnnnnnnnnnnnnnnnnnnnnnnnnnnnnnnnnnnnnnnnntcgatcaagtccttctctcctggacgtttgattttagttgagagagacaagataataagcaaagaagaaaaatatcaaatagtgagacgtgctatataaaaagttaaaatagggtaatataggagtgacttgatactttagatagggtgatcagggaaatatctgataacaatcaaaatctgaatgacaaaaacagctgnnnnnnnnnnnnnnnnnnnnnnnnnnnnnnnnnnnnnnnnnnnnnnnnnnnnnnnnnnnnnnnnnnnnnnnnnnnnnnnnnnnnnnnnnnnnnnnnnnnnnnnnnnnnnnnnnnnngaagagaactggggcactagagcccatgttctgaaccacatgctaaactgcctgccttatgaaaagacagtgaaaatgagaaaagagagttcaggtgagagacattgg

SEQ ID NO: 12042 - DNA, 693 bp, Homo Sapiens
tgtcgccttcccccacctctgcctggacctagcaggccctcagtcctagctgtcttacctgcgctcagcttggagtcaggcctcaggtggagagccgcatgtcactgtcagagatgagcccacccccacccttccctgggggcgattagctgctgagccacccacccagccttggagctggatgcctgtgcagcagaacagaggcaacggtggcaggcaggtggaggctgcgcacagcttctcccggtcatggcacacacctgtgcccagacgccaatgcctcctaagccaggagctgggttatgcaccgccatggcccacattaacgctccaccacaagcccagcctagtcagagccctcattgccccatccctgagtgggcaggagcctggcctggggagggcttcggcctgtgaggattctccccgaaggtgccctcggaggcagcaggtttgaggccctggggggcccgttccccagaagctgccagtgctttcagatgcattgactcttcccgcctcccctccctcagaaaggtagtgcccacactatttttaaaatgttattttatgcaatacactgttcctagtgagcagggctctggccctgaggagtctttgcaatgtattgaaggaattgctgccgtgtgagttttgaatgattttgcagtaaagacctgatctttctcaaag

SEQ ID NO: 12043 - DNA, 548 bp, Homo Sapiens
cctttctgctcctcagactgtataatcttaattgacctatcttgaagcctgttgattctttcttctgacttctccagtctgctgctgaatacctctagtgaattttcagttttagttataatacttttcaactccagaatttctatttggttcttttctacaatttcaatctctttattgatattctgtattggatgagacattgctttcctaatttttttgttctctgtccatggtttcctttagctcttctagcatatctaaaagagttgatgaaaagtctttgttttgtacatccgaagtctgtgcttcttcagggggtagtttctattaatttctttttttacctgtgtatgggccatacttttctggtttttccttgtcatgtaatctttgctaaaaatgtgacattttgaatagtattataatgtggtaactctggaaatcagttcctcatccttggctcccaggatgagaaattggaaatttcattcactgctggtagaatataaaatgtcacagccacttaaaaataactttggcagttc

SEQ ID NO: 12044 - DNA, 493 bp, Homo Sapiens
tttgctaaatagtattgtttattaaggcttgtattctcctagaggaaaaacccaatgtcgtccaggactccattcaggcagtaacagttcagaggaagtgacacgctctaaatacaagtctaatgatacagctgaaacgttaactcagagggtcttttggagcaagtagttttcagaaagcgtctgctctctaggacggtaaggatcctctacaagggcacgtgcagatccaggcgctggagcgtcaggcatgggcaccattttcatgcttcaactcaaactccaggtggtagtgagctcaacggtccctcattccacaaaacatgacagcaaattcatcttctaaaaaaagttttgttttgtttttacccattcaacaggaaaaaaaattagacacacacgatgaaatttacaaccagcagcatcatccatcacactgtctgtactaccagatcctacacttaaagctcagcattattggtataaaaagtgc

SEQ ID NO: 12045 - DNA, 940 bp, Homo Sapiens
  misc_feature (29)..(29): n is a, c, g, or t
tgtaatataatctttattgcttacctganccactttttataagctgttttgtttaaaagcttttggttataggcatgaatattgttttgatggttaacttccactgacttatctgtaagtgtcattttatagtactttacagttgtcaaaaaaaatcttacatatattgatctagttgatcggtagaggaagcttgtgaagtaggtaggacaggttatgatgtcttcactgtatggacgtgaacccagggttctaataggttggcttgcccaaggtcacctgctagcttgtaaggtaggaatagggctcaaagtaaaacttttggttcagaagcttgactcataaactatactatatattcccaaaaatgtcagtattgacaacacagtctaactcttaaataaaattatgctaattagttacattcaaaataatgtttataaatttatttgtctatactagtagaagtgatcagtgacatactataaataatcctaaatggttatatttgatagaactcataacacattaaagagaaaatttcacattaaaggaaggtttaaaaatctattttcagattataaaaggtgtctttactggttttcattccttttatctacatgtaattggacatgtaaacttgttaaaaatcaaaatcttactgattgtacagggagaaattaagcattctgttttaaaattaggcttattgctagactgtaagtttaaaaacaattcatgttcaaaggagcttttcaaattacccagtccaccacagaatcagctaatgtgacagaagtaaatatagtgcgtcataattgctaaaaacagggtgaatttctttcacttaagttggaaaaacagcctctaaaaaattaggtgcatttaacgcatggcagccggcagcctattcgcaggacatgcaggcagggggttcttt

SEQ ID NO: 12046 - DNA, 863 bp, Homo Sapiens
ggccggggaggcgtgagtgccaggttctactgcaggctgccagtggcacctggtggaggagacctgggggcacttccgggtcgggggagggggtggcgctggggacaaccagaaagtttcaagcgacaggctcgcgcccggctggagaggaggacgcgggcggcccggagcggcccggggacgtggtgaacgtggtgttcgtagaccgctcaggccagcggatcccagtgagtggcagagtcggggacaatgttcttcacctggcccagcgccacggggtggacctggaaggggcctgtgaagcctccctggcctgctccacctgccatgtgtatgtgagtgaagaccacctggatctcctgcctcctcccgaggagagggaagacgacatgctagacatggcccccctcctccaggagaactcgcggctgggctgccagattgtgctgacaccggagctggaaggagcggaattcaccctgcccaagatcaccaggaacttctacgtggatggccatgtccccaagccccactgacatgaacacctggaccattccacattgccatggccccagggcccagattgagggaatagccaggtgccagccctgcccagagtgcggacaggcccgggagagacgtggaagcccctgtgaaggacaacacccctgcttgggagagagtcccatgtccaggctctggtggggacagggcccctagtggggtggccttccccaggcccctgagaatcagggtttgagtaggagtggactcatattggagctgcaataaatcgataacacaggccccagcatgttgagtgtccttgggggacagatctggggtctacaggtggctcacac

SEQ ID NO: 12047 - DNA, 909 bp, Homo Sapiens
atgagaaatgacgggatgatgaagatgatgcagaagatgaaaataacattgataacagaactaacttcgatggaccatctgcaaaacggcccaaaaacaccgtcttaacaatagccttcatgacatttaaaagatggctgttgtatccttattgtcacactaggacatttaaggaagacttatgctctaatttggaaaaagcatttgtgttgttctcctgggacaattttgtcaaagagaaaactggtttttctgtttctagcaaagatagtaaaggcttagaaataaaatctgttttcttgagaaataaatttcagaccctggaaggaaaatagaacacttcataatgtataaaatcctctaagttggcaactgaatttttatcattgttttctatttttaaaataatcattgatttgtgtgatgtctacatcttttaacttctggttctgttataaagagtacatgtcacggttcataggcagtaacatttcagagaactgacatgaacaagtagtgaaaattgggcattaaatataaaaataacagttcttcataaacagaaggaaaataaggaaatagaaataccgacgagaaaggagagtccttgaaagagacccaaggaaaccctgaattcatacccacgtcaaatatgcacatatcctgagatgatgccactttgatgaatgtgcattagtctgatttatcatgtaccttaagagagccagatggggtatgtttttgtgctgtgatatggtatttatacaggtacaaatataaggccttaagtaaacaatctgcattgattacaatttggatatttcctctcctcctgtagccatactttgattttgctttaaaaagattattgaatccttttaaaaatatatattcctaaaatatgaaaga

SEQ ID NO: 12048 - DNA, 535 bp, Homo Sapiens
  misc_feature (300)..(300): n is a, c, g, or t
tcaagaaatagttctgacatgttcattatatttatactgaaaaatagtacatgtacttttcttcaggattaataaaccccatgtgccagtttgacagtcactgccacattagcacattttcctctcacacatctacaaggtagtgacaaccaaagggcataatatctggaataattccagtaaatccataatgtccagtaagattcataaaattgaatgggttgtctccactcccatctgaatcgaaatggaaattcatgcccaggtacttgtattgtccccagaaatactcagtctggntaagtcaccctcttgggtcttcctgaaacagagatgcagaaagcagggcattcttactgagaccaatgacctcttctctcagtcacctctcatacatctattttggttataatcctattttgtcttgtagcttctcagtctcattcttttaggaggaactggacaatactgtcgtctcaacctcttggtgaatgacgcaatgagtcattacacttacgtatggataacacgttcg

SEQ ID NO: 12049 - DNA, 320 bp, Homo Sapiens
gagagatgggatcttgctatgttgcccaggctggcctcaaaagtcctgggctccattgatccccccacctcggccccccaacgcacagtaatcacagctgtgagccccacgcccctcctgggctgattttaatagggcagaatatgctgcagaaccggcttcccagactgtgagcaggaggaggtggtggcagccctcaccagaagacccacaacccaggcaacgggatttctacatcaaaacatgaccaattacgcagggcaccttttccttaggatcccaagaagccctgggcccttcctccaaagttgttgcataaa

SEQ ID NO: 12050 - DNA, 373 bp, Homo Sapiens
gcggccagagctttcggcagcacgccaacctcacccagcaccggcgcatccacacgggtgaacggccctacgcatgccctgagtgtggcaaggccttccgccagcggcccaacgtcacgcagcatctgcgcacccaccgacgagagaagcccttcgcctgccaggactgtggccgccgcttccaccagagcaccaagctcattcagcaccagcgcgtccacagcgccgagtagctccagccgggacgcactgtgtccgccatggtcagaacacctacctcccctggttattgtgaggctggcgattacataagtataagcaggctccgcccagggcttggctactgtaggtgtccaataaacagtagatggaa

SEQ ID NO: 12051 - DNA, 440 bp, Homo Sapiens
gcggccgcctcccgcgccggcctctcccgcggcgctgctcgctccgctgccctccgatgtcccccgccgcccccgggcagccggcctgcgggctggagcgggggtctcttcctcggcggtccgcgcgggctcggccccttcagcagtccgccgcagcggcgcagggacgcggcgctccggagtttcgcccttcccgctgctccatggacgcgcagaggcagccccgctcctccggcggctcaggccagccgggccggcccggcgcagcggcgggggccgcgctctgccatcgcaccggtctccctgtccctggcctctcaatgcagcggctcttcaaggttgcagagcgcagccttcagccatgccggccactcgccccagcccccgccgtggctctcgcacaaacacccagactctggctcgctgtctcccagccgcgg

SEQ ID NO: 12052 - DNA, 476 bp, Homo Sapiens
ttctgtgtgatacgtgtgccttatttagctcaagacattcctggagcacctataaaaactgacttgtaatccaggctatgtctctttagcttcgtaatctttggcaaggccattggattcttcagctgtacaattaggagactcgatcaggtgattgcctttctcagctgtcagttctctaatttcaggcttggtagcttgtaggaactgaaattgcaattaaaacctttataaactcaaactaaatcatgaattacagaaaaagtccattcttccaaaacttgatgttaccacacttacaagtttaaaatatgaagtcgactgtttaaaggattctgcatatattctagtgtgcacattcagaaacatttttcttggaaaaagtacccaacattttttataactgcacatattaatttattgccagaataaattgcattgcatgctaaataaagtcagataattcaaatccaaaa

SEQ ID NO: 12053 - DNA, 287 bp, Homo Sapiens
tgtgctacgatcttgggacgaactggacgacgagcgtggctttgagggccgtccgaacgctgcaggccggccaggtcactgggcgtccaggcctggctacgcaccactttgtcccttagcgtttaaaggtttcttcccgaatctcaggccctcagctacctgcaggtttcgtcgcgagccggctgcaagttttgaacctaagtaaacctcaatccggagggcctagcggtaaggtgggcgctgtgtctattgaggtgcttagcaataaagaaaggtagtgagttgaa

SEQ ID NO: 12054 - DNA, 504 bp, Homo Sapiens
ctctgctttagcgagagaggctgcgttagcgagagaggggtagtgaggatgctgtccacaatgtattcatctagttaatgaattgtatggcccacaagctcaaacgagagatacattacagatggttgtattataaacctaatcttaagaaaccttaccaagcaaatgcttaaagactgatttttttgtgatctgataaaaagcctgcaaatcgtgaatcacttttaaactgtacagaatggactacacaccagtatggtaaagttcttgtaaaacaccaaacacaatggctcatagatatatacctctctcactcttaaatggcatttcctaattatagaaaatgtttacaacaaaagaacaagagggatcaaactaacaatcaataaggagaactgatgtgaagtcccatacactgttactccatttttcagcaactctttataactccttcattgacttgactcctttacaacatacagctgaattgtagaactagttctt

SEQ ID NO: 12055 - DNA, 1063 bp, Homo Sapiens
  misc_feature (134)..(134): n is a, c, g, or t
  misc_feature (175)..(175): n is a, c, g, or t
  misc_feature (410)..(410): n is a, c, g, or t
acgcctcaaaagactctcctaagctcctcgttaagtgaaatgtgggacatgcctcacgacatattttgcccaattttataatcagaggaaatgcttgactttgatcaagaaccaccagggcagtgagcatttgnctaatcaatttaggactcaggttggaaactattgatagggnaaagttgtttatcttatttaaaaatgtttggtgttcatccactttttcagtacatgcctgcaagattctataaagggccacaatatcctccggggtaaatgtttccaatttttcaccttgaagttgatttataatgagttctagtgtcacacaacctgaactgtgcagtgtaatcagactttccccaagaatacaaagattgcgaacttccatgccaccttttctgagacgattnttgcattctgccaccaggttcagcaacaggctactttgaggatccacatgcaacagaatcagagcttgaaaagcagtcactaaactagtgtttgacagctgtgagggctccttttcaaactgaaagcataaagcttgaaagatgctattctccagtattccttttggcagcccttgatcaccatcctttttttccacttcacaaatccgttgtaaagctcctgctgccatagtgtcaggcagggtttccatcgtgcttataaaacttagcacttcttctgatgaagtcaagttgctcagtctcctgtaaaacatctgactctcctcatttttaacattttgttcaagcctgtcgcagtcagatacttgagagaacactggtccaccgagtggatgaaggtcatttccatttttcgaatgaaactttttacaatgggcatgatggaatctgaccccgaaaggctcaggttgtcgtgaacacaaccaagggcacagacgctccttgactaccttgtgaacatgatttagaggtttattttttaaagcagccagagctctatgcatctgaaaatcagataaacgataaaggttcttcctcaaggtgattaatgccataccatcagattctcaatttgataacgcgctctgccgggc

SEQ ID NO: 12056 - DNA, 270 bp, Homo Sapiens
  misc_feature (128)..(128): n is a, c, g, or t
agctcggtacccgttgtgttaccggagatttggacagtcatggattctttccagggcccagaaagaatccatgactgtccaaatctccggtaacacaaccatcaaaagcagaggtaatctcatcaccnaggaggacagaacaaaagcgagtgcgtttaccatgccaaattgtaatcattgttatagttacagaaattataatcattgttagatccttcaaacgtacagacacagggctgcttcagagaccacagctgaggaccatcgttg

SEQ ID NO: 12057 - DNA, 466 bp, Homo Sapiens
ccagactacatcctccatgttgtttcccacgtaacagccaataagtttatttgtgattccatctgtgaagagctgcagggtcacctcctgggggtcccagtgaggccgcaggtgttgcaggaggctcagggccccctcccggcagcgatgctcctcctgatcctgaacggtgacgttcagcttgggcacctccggggagccgggagggacgtggatgtaattggccatggcccaggcgacggcggagactaccaccacgacgacggcgacggcgaccacgagaacggcgggcgccgacagactggtggatccttccgtcccggggcgccctcgcgggagggctgggggcgctgggacgggcgggcgagcggcaggagaacgtctggaggcggcactgttgccgatccgggtctggacagcagctgaactgagcccggcccgctctcggagaaaattcctgttgtcg

SEQ ID NO: 12058 - DNA, 588 bp, Homo Sapiens
aacgatggtctcagctgtttctgattactgtgtcttcctctttaacttgcccttttcctttagctcttttcttttgaaggttaaaatgcattaaatctgggttttcttccttcaatcttgacactgactgcatccccagattgggccatggccaacagtgcaagtgcactcctagctgggttcattgacacaccactgtcgtcaccccctaaagtaaattcactctctgatgtagcactctctccacttatacttctactactagaaacaaactcttggtttctgttattatttaatgtactatcaacaggagcttcactgtcttcttcagattcaagattggtagcagactgtttcttgaatgggccagaacttggctcctggacttcatgacttggtccaaccactgctgaagttactttagtgggtatattttgaccaggtgtttcaatgtgctgttgatcaagagtcatttttgactgaagggcaggtactggtgaaaggttcacagtaacctgatttccatttaaggaagtatcatttatattctgtggctttcctactgtagctgtcatagagttaaatctg

SEQ ID NO: 12059 - DNA, 551 bp, Homo Sapiens
aacgatggtcctcagctgtacgaaagaccattaaaatttattcctccggtcaaacggaaacggtatccttggaccaacatctcgcgctttcctcattgcctacccggtccacaccccacgcaccagcgctcggtgtaatcgactgttctccatctctacttctatgaagttggacttttctagaaatccatattataagtgagaacatgtttattcacttatgcatgctgtcctccaggtcttccatgttgttccaaatgacaggagtatcttctttttaaaggcggaatagttatcctgtggtatatattcatatataccacgatgatctctatccatgtattcactgatgaacacttacatggctgccatatcttgcttatggtgaacaatgcgtcaatgaatactggaatgcaggtatctctttaacacacggatttcaatttctttggatttttttatttgcagttgtccctaatgactaaagatgttgggcaacctttcatttgcgtataggctgtggtgcatatcttctcctgagaaatgtctat

SEQ ID NO: 12060 - DNA, 476 bp, Homo Sapiens
  misc_feature (38)..(38): n is a, c, g, or t
ttgagacaagtctggtaaggaaatctgtctgcttgggnccttctcaaagaaaagaaggtcatcctgaaggggtggccttgatctgacctctgtccttagtcttgctgaacactctccttcttctttggctacccatccaacatcagcaaaagacgccactgcatcctctcctgggtggctgggactccattctgttgcatggctgttaatctgaaactgaactcttggacactgaatcagagacaaattagtaccaattttccttacgatacttcgagacgaaccatatggcttcctagaccaaagtaccgattgcatgcttactccaacttgttgaaaaaccatcctaattaggcgcttaatccagccaagcatttatatggcaaagtctccccaaatttgcatttcaagtacttcttcaggcatacatagcagcacatggtccataaaacacactcggccgcgcggcagccagc

SEQ ID NO: 12061 - DNA, 470 bp, Homo Sapiens
  misc_feature (449)..(449): n is a, c, g, or t
caacgatggtcctcatgctgtggaacgctgcgtgcgcggtgcacagctaccagctcggatgggtatttgagaatttaccgcactgacttggaccagacggaaagcagagaagagggagagctacacctgactgtccaccatccccgccagccccaacgtcggcttttcacttcatgtttggggacaattacacctcctcatgacagatcagaagtttcagaaaaaaggtccgctgatttccgcaacagggtatgaggtggccagctgctgatgccagctgcatggactcctatacttgctgattcttctggagctggagatgaactcggacctcaaggcccagctcagggaactgattattacagcagcgagggaaactgaagttggtggtggtgagaaagttatcatgggcaggtgcagcagctcacgcctggaatcccacactgtgngggagcctgaggaccatcgtt

SEQ ID NO: 12062 - DNA, 745 bp, Homo Sapiens
gcattggttaaatgctaaagaaaaatcgccgttaaagcagttttctttttcactgtctggttcttttcgcggggaacccagctgttcctgcgagggccacctcctcaggaagaccccgcagctctcccgcggcgcttctgcaggaggcagcgacagtttcgagaacccgggccttcccctcccagtgcctccgggggttccggcgtttcaggcgctgctgttttccgggaagggcaggcgcgctgggccttggggagctgcgctcggcgggcggacgcgggggatcatggaagctgataaagatgacacacaacaaattcttaaggagcatttgccagatgaatttataaaagatgaacaaaataagggactaattgatgaaattacaaagaaaaatattcagctaaagaaggagatccaaaagcttgaaacggagttacaagaggctaccaaagaattccagattaaagaggatattcctgaaacaaagatgaaattcttatcagttgaaactcctgagaatgacagccagtttgtcaaatatctcctgttcgtttcaagtgagctcgaaagttccttatgagatacaaaaaggacaagcacttatcacctttgaacaaagaagaagttgctcaaaatgtggtaagcatgagtaaacatcatgtacagatacccagatgttaatctggaggttacggccaagccagttccattaaattcaggagtcagattccaggtttatgta

SEQ ID NO: 12063 - DNA, 483 bp, Homo Sapiens
caacgatggtcctcagctttggaaacattggtgcctctattactatgtatcaggcactgaactgaatgcctagggatagaaagatgagactgtagacccggccctcatgagctcatggtctagtatggaaaacagccatatgaacaaataaccacactataggtcttcagagctcaaatcctatcctaaatactgctaaattaatgttctgtggggtttggaaagtactagggccagagacaatatggctgctgggatgactttccatcaaagttaacattcagccttcaccaccaaaggtggtgtgtgtatgcctcttccttgcaacccaccagggcctaacacatcatatcaccacttctgaaattaggaaacaggctcagaagtccaagagcttgaccaaagtaactcagctggtatgtagcagaaccaggtcagtatgattcttcttcagtatcttgccagtagctgaggaccatcgtt

SEQ ID NO: 12064 - DNA, 1032 bp, Homo Sapiens
  misc_feature (20)..(20): n is a, c, g, or t
  misc_feature (486)..(486): n is a, c, g, or t
  misc_feature (622)..(645): n is a, c, g, or t
gcaatgtttgagcaaagcgnacctcagccggaagggcagtgttgacgaggatgtggtagagcttgtgcagtttctgaacatgcgagatcagtttttcaccaccagctcctgcgctggccgcatcctactccttgaccggggtataaatggttttgaggttcagaaacaaaactgttgctggctactggttacacacaaactttgtgtaaaagatgatgtgattgtagctctgaagaaagcaaatggtgatgccactttgaaatttgaaccatttgttcttcatgtgcagtgtcgacaattgcaggatgcacagattctgcattccatggcaatagattctggtttcaggaactctggcataacggtgggaaagagaggaaaaactatgttggctgtccggagtacacatggcttagaagttccattaagccataagggaaaactgatggtgacagaggaatatattgacttcctgttaaatgtggnaaagcaaaaaatggaggaaaacaagaaaagaatcgagaggttttacaactgcctacagcatgctttggaaagggaaacgatgactaacttacatcccaagatcaaagagaaaaataactcatcatatattcataannnnnnnnnnnnnnnnnnnnnnnncacgtgcccagtgtattactaaagaaagtgatgaagaacttgaaaatgatgatgatgatgatctaggaatcaatgttaccatcttccctgaagattactaagctttggttctgatgtgtcttggccgtaatgtttctagtaggttttataaagctgctcttcataagagtattttagtttgttgagtgtatcagccattcataagccagtaatgacaagtgcagagcttcaaactataactttgttgcccagaggatgtgcagttgtcatctaagctctcagcagtacccggcttatcctacgacttcacctgaaatgctatagttatccctacttttttaccagtttctcccagaagcacctgcttaataaatcaaagatgtttga

SEQ ID NO: 12065 - DNA, 1155 bp, Homo Sapiens
  misc_feature (28)..(28): n is a, c, g, or t
  misc_feature (522)..(522): n is a, c, g, or t
  misc_feature (525)..(525): n is a, c, g, or t
atttcaaaaccggctggagagccgggangttacggtgcgtggggctgcctcgccgcgtctcgccacgggctctgccagcagacagccttggacacacaggcacaagggctggagcccagagatgagagtgcccaagggagatgtgagccgtggctgggctgcccgctaacctgtctgctgaagccccagaagcgggccctcaggccaggcctaccctgcctcctggcccagcatgcgcctgtcggtgcggagggtgctgctggcagccggcttgcgccctggtcctggtgctggcggttcagctgggacagcaggtgctagagtgccgggcggtgctggcgggcctgcggagcccccggggggccatgcggcctgagcaggaggagctggtgatggtgggcaccaaccacgtggaataccgctatggcaaggccatgccgctcatcttcgtgggtggcgtgcctcgcagtggcaccaacgttgatgcgcgccatgctggacgcccaccccgaggtgcgctgncgngcgaggagacccgcatcatcccgcgcgtgctggccatgcgccaggcctggtccaagtctggccgtgagaagctgcggctggatgaggcgggggtgacggatgaggtgctggacgccgccatgcaggccttcatcctggaggtgattgccaagcacggagagccgggccgcgtgctctgcaacaaggacccatttacgctcaagtcctcgggctacctgtcgcgcccggttcccaactccaagttcctgctgatgggggcgggaccgcccgggcctccggggcactccatggatcacccggcaaagtcaccatttggcgggctttgacctcaccagctacccgtgactggctcacccagtggaaaagggccctccagggtgatgtacccccaggggcatggaaggtaaggcagggaaaaggccctgcctggggacctacccaccgcctgggggctggacccccagggggctacttcaagagccatcccccgaatttcttcggggatggacgctggggagcgacgcctggccctctcccccatgaagagcttccttgtggccacccccccggggcgtggtcaccccggctcaacaagatgcacaagagtccccccggtacacgggcatatca

SEQ ID NO: 12066 - DNA, 649 bp, Homo Sapiens
  misc_feature (226)..(268): n is a, c, g, or t
  misc_feature (393)..(435): n is a, c, g, or t
  misc_feature (501)..(554): n is a, c, g, or t
  misc_feature (599)..(599): n is a, c, g, or t
tgtcatgagtggaaacacgcgtctcaccgtgtcacccaggacatagagcgcagtggtgtcatcttggctcattgcagcctcccaggctcaagatgatcctcccatctcaagccgtctgagatagctgagaccaagatgcacgtcaccatgcttggctaattttttaaccttttgtggagatggggtctctatattacccaagctagtctcaaactcttgggctcannnnnnnnnnnnnnnnnnnnnnnnnnnnnnnnnnnnnnnnnnntgagctactgcacccggcctgctttctttttagtgaaaaggatctgtgggagcttttattcccatggctgccttcctcaagtcaacctctttccccggaaatggcatcatctctggactgttgtnnnnnnnnnnnnnnnnnnnnnnnnnnnnnnnnnnnnnnnnnnnaccatgcccggctgatttttgtatttttagtagagacagggtttcactatatgggccaggcagatnnnnnnnnnnnnnnnnnnnnnnnnnnnnnnnnnnnnnnnnnnnnnnnnnnnnnnaccgtggcctctgaaagtgctgggattacaggcatgagccaccgngcccggccccgttgtttcccttctaagaaacgcagggatctctgaagcct

SEQ ID NO: 12067 - DNA, 241 bp, Homo Sapiens
gagcggagattttggccagagcagctggaagtggttgctggggaaggtgggggtgggtgcaggtgctgctgggcctccgcgtgatggtgtcaggtgggtctgatttcgcacccgaggcgacacggagggttacagcaggcggcctcctgactacagggcatgaggagggtaaaggctttcctggaggagggaacacttggccctgaccacaggcaggccccagacggggtgccaagctgga

SEQ ID NO: 12068 - DNA, 639 bp, Homo Sapiens
acagtgccttgctgaagccagtgaatccattttgccaaaccttatctccctgcacattggaatgaattacagccagctgtacaaactctcaaggcaggattccgtggactttgagattcatgtaccccatctcttttttaaactgtccccaacttgtgagggtactctgtccaatgtatattcctagtgtttacagacagtaaatgtgtatatgtagtaactatttacagaacatgcatccttaaactgtgacttctcacctagtgcagaacttttaccaggctgtaaaagcaaaacctcgtatcagctctggaacaatacctgcagttattcttcagctgtttggacaacttagattgggtttataactattaggaatcactgcacagtttatttgggttgtgttttgtgtctgagtcccctccctcatcccttagggtccagaagagcaatggaggaagtgacagctaatgttgcagttcttattgtatggcataggactggcattatatagcagaaatcaactactgtacaatttcttggggttaaccatctttagttaaatggaattttaatttaaatgacgctttgctaattttaagtgttaagcattttgcattaaaatattcatataataaa

SEQ ID NO: 12069 - DNA, 531 bp, Homo Sapiens
ggcacgagggtgagactcacctttaaactagaacaagaccagctgtggattggcactaaagagcggactgagaaattgcccatgggctccataaaaaatgtggtcagtgaacctatcgaaggacatgaagactaccacaatgatggcgtttcagttgggccccacggaagcctcttactactgggtgtactgggttccaactcaatatgtggatgcaatcaaagacactgtgctggggaaatggcagtatttttgaaagcactttcacctctggcccaggagactgacccaaagtgaaggacattgccgggagaggcctgcagcatccctggatttcagagttctggaactttgttcataaaaaatctatattcaatctgaggtgatgtggtgactgaagccagaggtgatgtactttcaccattagcttaattttaacttaaaattaccagttccctttcttgcagtcagcttcataccatttttaaagtcaatacaatggaaatcaataaatctgaattccgaaaaaaa

SEQ ID NO: 12070 - DNA, 420 bp, Homo Sapiens
tgccagggtcacactgtggtctctgaactgaccagtatatccctaactcctctttgatagagaaagagtctcaaatggacaactgtcctgtgttgctttccctaggccttcagcagcctattggctctccctgcctctgagctctggactctgtttgaatattccaagtagtatatggacagtccagggcttatgcccagcagcccactggaggcattcttcaggctcctttaaggcaggtgcattgatagttccattagtgtgacccttgcattggcacccctccagcctggaggccaggcttccagcaacttccttctgccctagagcaagccatgagccccagagcagtagcaggagacttgagaagtagagtgacaaaaacaagcacttaattaaattataaaatttaactttaaa

SEQ ID NO: 12071 - DNA, 579 bp, Homo Sapiens
gtccatgcatggctgaatccacgaggagcgcgagctggatggtgggagtcacgcggtaacgggctcaggtctcctaggagcagaacaggcccaggtcctcaggagacctcgtgcacagggcagcgggacagacctgagcctgcccatgagaacttgagtgtgcaaacctgcgcacaggtgtgagaacagactccagggcgagtgtttaaggagaagacacagacacacataagacccactagtgggaatgtggagaccccaggaaaggtggggaggcccagagcagcaagtagaggggagtgggcactctgtcccgggactcccataggctcggcagggccagagacagccttgggggtgagaggccagagccaagggccctgcatctgagagtccaagggtctaggaaggctcagggtgggagggcccagcttcaccatagacaccagggtccacgctggcttggggagaaggtgcaggtatcagatgagcctcaggcctcactgctgctggggcagcctctgctgctgccgcactccacccacacgaggcgggcctgctcctgcaggatgcggccgc

SEQ ID NO: 12072 - DNA, 750 bp, Homo Sapiens
ctggtgaaatgtgccgaggtctctccagaggtggtaggcggttgcgccagcttcacatcctggataggcaggaacgtttccctatcatactcctgtcccgggtctcatgtgtctcagttcaaacagacactgccgtctatcttcaagctgcaatgaagctgagagccacagaaaacacctgtaccatggtttcagggaggagtctcttccctcagccgaaaacagacagctttgctggtcatctgttctccactgcgaggacgctgccactcagtgtggagagaggaaggggttctgcctatggtgcaagaaggtcggactcggcagttaatactcttggataatgtatttaaggatgcttaagaaattgcaacagccagttcaaccttcagcaaccaccatactgatcagtagtcatcaacattgagacgagactgtacaccagcaaaaagatcccaactcaatgaaggctcagatgattttagcatttttttagcaataaagcatttttaaattaaactatatacattgttgttttagacaagtttttgcacattcagaatacagtaaagtgtaaacatgacttttatatacactggggaaaccaaaaaatttgtgtgacttactttattgcaatatttgttttattgtgctgatctggagctaaatatatctgagatatgcttgtactgatgattattttaacaccaagatattttaaaattcattaaataaatgtttatttaaata

SEQ ID NO: 12073 - DNA, 361 bp, Homo Sapiens
ctgggattaggagaacactctttaatgataaagcctgtccaagtactaaggacaattagagtaggcaggtgacctgtacaaagtattagtgataacacaacattcagcttcctaagagttaaaacgtgctgcttacatgaagggagatgatactgagctaagaagtcctggtatagagaagcagagagaccaacctacttcatattatttataaaatagagaatattctcagctaacatgctgggagaaaaaattcttccaaaaaggcagaattacaatcaatgccaagatttacaaattccatcatgtttaaatataaggacaaaaataaacatttcttatattaaaaaaagccccacag

SEQ ID NO: 12074 - DNA, 940 bp, Homo Sapiens
gcggccgcctgcgcggcgccgccccgtggtcggatcctgggcggcagagaggccgaggcgcacgcgcggccctacatggcgtcggtgcagctgaacggcgcgcacctgtgcggcggcgtcctggtggcggagcagtgggtgctgagcgcggcgcactgcctggaggacgcggccgacgggaaggtgcaggttctcctgggcgcgcactccctgtcgcagccggagccctccaagcgcctgtacgacgtgctccgcgcagtgccccacccggacagccagcccgacaccatcgaccacgacctcctgctgctacagctgtcggagaaggccacactgggccctgctgtgcgccccctgccctggcagcgcgtggaccgcgacgtggcaccgggaactctctgcgacgtggccggctggggcatagtcaaccacgcgggccgccgcccggacagcctgcagcacgtgctcttgccagtgctggaccgcgccacctgcaaccggcgcacgcaccacgacggcgccatcaccgagcgcttgatgtgcgcggagagcaatcgccgggacagctgcaagggtgactccgggggcccgctggtgtgcgggggcgtgctcgagggcgtggtcacctcgggctcgcgcgtttgcggcaaccgcaagaagcccgggatctacacccgcgtggcgagctatgcggcctggatcgacagcgtcctggcctagggtgccggggcctgaaggtcagggtcacccaagcaacaaagtcccgagcaatgaagtcatccactcctgcatctggttggtctttattgagcacctactatatgcagaaggggaggctgaagtgggaggatcatgggatctcaggagttcgagatcagcatgggccacgtagcgcgactccgtctctactaaaaacacaaaaatttgctgggcatggtgg

SEQ ID NO: 12075 - DNA, 606 bp, Homo Sapiens
  misc_feature (43)..(43): n is a, c, g, or t
  misc_feature (55)..(55): n is a, c, g, or t
caagcacaacagcacccacaccgggaaaaggcctttcagttgngagttctgtgancagcgcttcaatgagaaggggcacctcctgaggcacgtggccagccgccatcaggagggccggccccacttctgcatgatatgcggcaagaccttcaaagccgtggagcaactgcgtgtgcacgtcagacggcacaagagggtgagaaagtttgagtgcaccgagtgtggctacaagtttacccgaaaggcccacctgcggaggcacatggagatccacgaccgggtaaagaactacaacccgcggcagcgcaagctccgcaacctgatcatcgaggacgagaagatggtggtggtggcgctgcagccgcctgcagagctggaggtgggctcggcggaggtcattgtggagtccctggcccagggcggcctggcctcccagctccccggccagagactgtgtgcagaggagagcttcaccggcccaggtgtcctggagccctccctcatcatcacagctgctgtccccgaggactgtgacacatagcccactttggccaccagagcccacttggccccacccctcaataaaccgtgtggctttggaaaaaa

SEQ ID NO: 12076 - DNA, 1031 bp, Homo Sapiens
gcggccgccggtgagcctagacccgcgcgtctccatctacagcacgcgccgcccggtgttggcgcgcacccacgtccagggccgcgtctacaacttcctcgagcgtcccaccggctggaaatgcttcgtttaccacttcgccgtcttcctcatcgtcctggtctgcctcatctcaagcgtggctgtccaccatcgaagcagtatgccgccctggccacggggactctcttctggatggagatcgtgctggtggtgttcttcgggaaccgagtacgtggtccgcctctggtccgccggctgccgcagcaagtacgtgggcctctgggggcggctgcgctttgcccggaagcccatttccatcatcgacctcatcgtggtcgtggcctccatggtggtcctctgcgtgggctccaaggggcaggtgtttgccacgtcggccatcaggggcatccgcttcctgcagatcctgaggatgctacacgtcgaccgccagggaggcacctggaggctcctgggctccgtggtcttcatccaccgccaggagctgataaccaccctgtacatcggcttcctgggcctcatcttctcctcgtactttgtgtacctggctgagaaggacgcggtgaacgagtcaggccgcgtggagttcggcagctacgcagatgcgctgtggtggggggtggtcacagtcaccaccatcggctatggggacaaggtgccccagacgtgggtcgggaagaccatcgcctcctgcttctctgtctttgccatctccttctttgcgctcccagcggggattcttggctcggggtttgccctgaaggtgcagcagaagcagaggcagaagcacttcaaccggcagatcccggcggcagcctcactcattcagaccgcatggaggtgctatgctgccgagaaccccgactcctccacctggaagatctacatccggaaggccccccggagccacactctgctgtcacccgccccgaaccacgagaagctgtgcggccgagaagctgtgcaccggc

SEQ ID NO: 12077 - DNA, 432 bp, Homo Sapiens
ctggaaggggattctccgctggcacatgggagaaggccatcttctgtgtcggtgctgtgatctgccttgttctcacttgctgaggataagggcatacacgctgctcctcgctttcttgttgcccgacttcgtactaagcagctcaggagcagtcactcagacccaaatgtcttgactgtgttgtttttaatcactgtgacccttaaagtacaggccaagtgttgtcaaacaccttggctaaaacagtggagggtgatgggtaaagcagtagagggccctcaacccacacactggctgaaactgccaccaactgccacgatgaacccaactgctgtttatgcccccattttcctttttttgtatctacacccacacgattcccaatgttggatatttctacatgaataaagcaaggatcagtgcctcttatgt

SEQ ID NO: 12078 - DNA, 485 bp, Homo Sapiens
atactccatccaattcagaaataatgtttttctccttggaatagctttttacattaactgtatttgaagatagaaaatttagatctgaatagcagcttttaatagccccataaaaataagtgaaaatatctttaattttaaatttaaacaaaatatctaaaacttaaaaggtatttaatatgtcagcatatttgcaatacaaaaataaacatgctccatttcatttttttgctttcttactcccacgggccagggtgatataaatatttcaatttgtgtcactttctagctatcgaatttataaagcggctttcattttctacgtaagtttttaagcttaattttttcagggaaaaaatagatctcaagaaaaaaagtgtttgggatcataagttaataactcatcctattggtaagggaagttgaataagagtccaaactaatggattagaattgtgtaatatttgcttaaccatttgttaaaa

SEQ ID NO: 12079 - DNA, 439 bp, Homo Sapiens
  misc_feature (66)..(109): n is a, c, g, or t
cctgctgtcgccgaagaatttcctcctgttgtcttcggagttcttcctgcctctttcgctcttccnnnnnnnnnnnnnnnnnnnnnnnnnnnnnnnnnnnnnnnnnnnntagctttgcagctttggccttctctagctatgctgaagcatgttccagggcagggcctggtgtcgtggtgtccagaggaagatcccatacactaccaccttcccaaactgtagggctgtgaagctgtttgggctgaagctcccagatagagccagtatctggcacggacacagacctagttactgagggaatgatgttctgatcagatattctcatcttcaaggtctgaaactgttgaagaagaagtgccaacacctgctgctgctgggaagacagtgctgctttctgctgttgggcgaaaacctgtgcatattgttgtcttcaaaaagt

SEQ ID NO: 12080 - DNA, 308 bp, Homo Sapiens
caaggccgcggacctcgcccacatcactgcacgcctggcccaccagacacgtgctgaggaggggctgtgagcctgggggccactgtggacagacgtgggcttcagaagctcgctggcctgggcccaccagcattttcttttatgaacatgatacactttggccttcctttccccagcgcccctgagggccagaggcagatgtgggctgcaggctgcacagcccgagggtctctggctgcgggcggtgggccccttcatggggctcacctggtggattcacattaaaccggtttctgtgggcaaaaaaa

SEQ ID NO: 12081 - DNA, 586 bp, Homo Sapiens
  misc_feature (550)..(550): n is a, c, g, or t
  misc_feature (572)..(572): n is a, c, g, or t
cgatggtcctcagcttgtagccgccagtgacgtgcttgactgactcgcccattctggtcaccaatgctatcccttgcttcttgtaggcgttcaggtccttaccagtaaggaaaatattaaagtgttcattgaaagacagcacaggatggtccgtaattctttttagaaatttatccaaagcttttcttctggtctccacaaactcttctgaaaaacgatccacaacaccttttaccacaaacttctcgggaagaggggaaatgagatgagtgggctgggattcttccagtttgctcctcaaccagtcaaaatcctggtatcttcgacgaacagaatattctgggaggtcaaactccacccgagtacttttggtggtgatcctataggtgatgtaagtctccattgtacacacatgcttcttgggatcatcgactataacgaagagatctctagtctcaccatcaatatcatcatcaagctgaagtctgttgagaagggaagatgaagaagctggacttgaagtacctgctggagtaccaccgttgggcanaatgagatccttccccgaagcntgaggaccatcgtt

SEQ ID NO: 12082 - DNA, 442 bp, Homo Sapiens
tcacacactcatcctcacacccagctataccacaccccacaaatgttgcttatgtttccttggtcattctgtccatcctcctgtctgtccaaagccaaggacactgctctactctaaattttttgtcccgaagcccccaaatactgcaaccctgacccaatgcacgaagccaccccaaaatacagcagaggacaccaggactttcatttttccctcagtatggcccatcctttgggtatgccaactccatgtccaccaagcactgcatgtaggacagggcacagtttggaggccttggtccagccactgccccagacccaccttggctctctcctcactaacacccgagaagcccagacttcccagtgtttagcaacagattaaactctaagccaacaacaacagaacagggtggagtgagtggaaagcaaatgaaatgtta

SEQ ID NO: 12083 - DNA, 1126 bp, Homo Sapiens
ggacgctcggcggagccaggatgtcggcgagtcgctgggggaagtcgagcagacacccagcgctgccggaactcggggcgcgcatcccgcaagtcggaacccggcggatcggagcccgcagatcggagacggggcctggagggtggcagcacgcaaagggtgtccctgtccctcaaggggtcatggcctccatgttgctcgcccagcgcctggcctgcagcttccagcacagctaccgcctgctggtgcctggatccagacacattagtcaagctgcagccaaagtcgacgttgaatttgattatgatgggcctctgatgaagacggaagtcccagggcctagatctcgggagttaatgaaacagctgaatataattcagaatgcagaggctgtgcactttttctgcaattacgaagagagccgaggcaattacctggttgatgtggacggcaaccgaatgctggatctttattcccagatctcctctgtccccataggttacagccaccccgccctgctgaaactcatccaacagcctcaaaatgcgagcatgtttgtcaacagacccgccctcggaatcctgcctccggagaactttgtggagaagctccggcagtccttgctctcggtggctcccaaagggatgtcccagctcatcaccatggcctgcggctcctgctccaatgaaaacgccttaaagaccatcttcatgtggtaccggagcaaggaaagagggcagaggggcttctcccaggaggagctggagacgtgcatgattaaccaggcccctggctgccccgactacagcatcctctccttcatgggcgcgttccatgggaggaccatgggttgcttagcgaccacgcactctaaagccattcacaagatcgaaatcccttcctttgactgggcccatcgcaccgttcccacggctgaaataccctctggaagagtttgtgaaagagaaccaacaggaggaggcccgctgtctggaagaggtggaggatctgattgtgaaatatcggaaaaagaagaagacgtggccgggatcatcgtggagcccatccagtccgagggtggagacaaccacgcatccgatactcttcggaagctgaggaccatctt

SEQ ID NO: 12084 - DNA, 452 bp, Homo Sapiens
atggagtcctcattgacacctcttttctgcacaaatactggaattcaatgtcaaaagaaaatgacctctgctcaaaagggagaagagtctcaatttcagcaagtacctgtcatgaagggtatgaccttaatgatgtacataaaataaaacaaatgaagaaatggaaaacttttagaaattaaggtgtacttgaaaacgaatatctatcatatgacccctgcactccctctgtatcatctcaggaggtttcaggggcctgttgacatgaagtttcgaagtttcatgttggctttggaatggtagcaaaagcctttcctggctgagatgatgcttaaaacacacctcacttattgtacatgttggaaccaggacatgagagacataggaaaacagaagtcatgaatgtaaattgaatgagaggcttaaacatgcatgaaaatacagatggacct

SEQ ID NO: 12085 - DNA, 745 bp, Homo Sapiens
  misc_feature (98)..(98): n is a, c, g, or t
ccccgttccccctgccctgtgctctgctttctgcgaaagcgcctgcctgggaggcccttgctgggctggctcagggcacaacagggagggctttgtgnccgggacatgcaacccttttgggccctgtcccttcctgggcctctggctaccggttccaagacaagttccggcatgagccaggcatggtacctgctcagatgaccaaaaactctttcaaaatctcatggttatgagcccagagcagtggatccaggacccaggcctcctctccttgccctcccctccctgccctgctccgagtctgagccgacccctaggaccacgtcccttcatccctctttgcagtccccgcagaagctagacagtgcagaaccccacacggcagaatgcagccccggggtcctgtgctcgccacctcccggcgtccatccaccaccccctttccacgcccttggcaatgaagcagtgaaatcagagaacgctaccgctaacaggaagaatgcgctgcgtctcagaagccaggaaaccacgtgggtcagggccagcctgagcagaccaggccaaaaggcgacctcgataatgtgaccaacacgtggtgcaatcccagcacgcggcgctccctgcagacatcagcttgtattgaggaggccaactgcagtggaccagaagcaaacagaggtctcccatcagggtgggcacaggcagccctgaggacatatagtcaccacgcgaggaggagaagcag

SEQ ID NO: 12086 - DNA, 467 bp, Homo Sapiens
  misc_feature (259)..(272): n is a, c, g, or t
cgaggaccgcatgaccctgctcctcaggctgagagcacagacaaaacaacaactcttagaatataaatcaatggttgatgcaagtgaagaaaaaactccagaacaaattatgcaagaaaagcaaatcgaagctaaaattgaagacctggaaaatgaaattgaagaggtaaaagttgcttttgagataaaaaagctgccattagacaggatgagactttcaactgcactccagcctgggtgacagaacaagactgtctcnnnnnnnnnnnnnngtttgagggaatgggttccttctcttctgcccttctgccatgtgagcacacagtgttaaacccctcggatgaagcagtgttcaaagcaccatcttggaagaaaagactgagccctcacaaaacaccgaaactgctggtacttagatatcagacctttgagcctcctgaacatgagaaataaatttctaaggtaat

SEQ ID NO: 12087 - DNA, 257 bp, Homo Sapiens
  misc_feature (97)..(106): n is a, c, g, or t
tgctgcattacgccatggcttcaagtgatcttctaagccttgacatcctaaagtgctggaattacaggcatgagccactgcacccagccagttaaannnnnnnnnnggataatgtctaagacaggctcataatccaaattctgctctgtggtatcagataagtagttccagtgtatgtgtaattatcgaaggggatttaaataatttccatggccattaagttattaataacttataggccatggagtaaatggcag

SEQ ID NO: 12088 - DNA, 437 bp, Homo Sapiens
gggcctgccatttactccatggctgaacagccatggctctagaaaaataaaagcaatagtaaaatggaaggtggaggagagggagaaatcaagaacaccacacacatttccggcttaagcacccagtggtgtcatttaacaaattaagaaacaccagaggaagtgtaggaatcatacattccgttctggatgtgttcggtttaaggggcatccaaatggaaacattcagtagcaattcgatagagtggtcctcagactcaggagagaggtaaaaactgaagacataaaaatgaatactcagcacacagatgaaaaatgaaatagaaagcgatgagaaagcccaaagaaattcaaacatttaataaatgagcacagaaagactcaaaaggtgactgagagccaggcacggtggctacgtcgataatcgccaacacttg

SEQ ID NO: 12089 - DNA, 442 bp, Homo Sapiens
tcacaacagatacacttccctctcatgtatttggctccgctgttgtatcccacctggaatgccttttctactccactcttgtctgaaaatgtaggtcacatcctaccccctccaaagcttttctgataatactggcctctccaattcctctgcgttggttgctcagcccttaccctcatatcacacattctgcctatcacctgtgcttcctgcctaagtccttctaagagtttcgtatgctcatgtgcatccattctctctccctggtgtggccacaagcttcttgtgggaggagccctattatatgctttctctgaatcccacacaatgtctagcctcgctgggtactctgacccccaccctatcagctagcacagtgcctggtatcgcataatctccataacgtttgttgtgatgaaaggtacagaggaagggatgagtt

SEQ ID NO: 12090 - DNA, 603 bp, Homo Sapiens
aacgagagctgcataccgattcgccccgacatcgcatgcattcaactgcccctggtttagcagctcatcaacttgtggactggtcagagctttgcaacagttgtgacagctgctgaaaaaatggatgcaaattctgcaacctcagaagaaatgaatgaaattatccatgctcggtttattagagctgtttctgaactagaacttttaggatttataaaacctaccaaacagaagactgaccatgtggcaagactaacatggggaggctgctagaaagcaaataagcaaagccagaactatcacatttagcttaagagaaaaaggtgaccagtcatatttacatatattagaggagcctgttttgttgagaagataaatgtgtaacccccattgatgtttaaccagaaaagtacattgctaaccccaaacaggcatgtatcaaaacacctgtggagtactttagactccaacaaataataatgtaactaaaactgctcacacattttactgtactttccaaagtcattactaaattgtgagtaaatcattcttgaacttagagtatgtaaatgtaataaattccgttatccaggagtataaaaa

SEQ ID NO: 12091 - DNA, 578 bp, Homo Sapiens
  misc_feature (258)..(258): n is a, c, g, or t
tatgtttgttctgtcatcccaccgatgatacacacatcaggcaagcagctaatttgaacatatgtacagagtctatgataaagatttaaagttaccaaaaagattcagctataacatattaaattttctttaaaagagtttaccataaacacttaaagaaaacataatttatctaagcacttgaattatctaaaaataagaagaaaacctctcttagggtaagcaaaaaccacatcatcttggggaagctgaataggnagggtactggatgactcagtgaggtaaccctttagctggtatttaaaaacctaatacacaacaaggatattttcaagaatacagattttcaaaagcaattttgaactatgtctttaaaagatatcagaacttggtgaaggtcttacaaataatcatagaacacaatgttaagaaattaacttctcttgtggtatgttgaaattgtggagcattcatgattttcttttattgagaagttcttggtgtaaattcaaaactagtcatattttatcaacatttaagcttcttagtcatgccaagaaaaccaaaaaagatgaaaa

SEQ ID NO: 12092 - DNA, 469 bp, Homo Sapiens
taccgtgtgggcgactcgagattgctcatctttgtgcgggtgctgaggatccacgtgatggtgcgagtgggtggtggctgggacacgctggagcattacctggacacgcagagctggggacatggcatgccctgcactcagtcaccccgagggctgagccagattcctggatgtgatggaccagctcagctgtccccagaccccatcccttctccttttcctttgtggccttaacccttctgcatcagggagccccctctgcctcttgagtaccagacctcatgggaccagaccccttgggaccacatggcacaatgggacctctgttgtacattccggttgggggatgagcgttgctatttaattactaatattattgaatgccttagaggaggccgggcgagcccggtgttctgaagacctgtggcccagcagagcctctgacagtaaagttttgctccagcaatag

SEQ ID NO: 12093 - DNA, 471 bp, Homo Sapiens
tgaaaactgaccacgtgccaggtgtggccgaagcccccagggagggccacattcggggagcggggggtcgggggagggccaccgactggctctgctgccagcacaggcccctccctggaagtcctcgggagcggagcgcggatcggcacgggctctgggctccccgtggagagaagctgtagtttttaccaaattgtgtacatctgggcagatgtttaatttctgtgactaatcactgaactagatgaatgttaaattttttatgtctgaagcctgagtctattttggatctgtaaataatcattgccagtgtgacttttgttcaacaaaaggattgtactgtattaagaaccgatgaaaaaaattctcctgtaacatttttttaagaaaactttgtttgtttaaagaaaaagtattgtataaattataatttttatttaaataaacctaaaatgctttgtgctaaggctc

SEQ ID NO: 12094 - DNA, 581 bp, Homo Sapiens
gacgagcttggaggaaaaggaaccgggagccgcccacccgggggcgctctccggacccccagggtcctagcgcgcggcccttaccgagcctgggcgcccggatttcggcagcggatcgcctttccgggttggcggcccgcctgattgggaacagccggccggttgccgggggaacgcgggagtcgggcccgacctgagccacgcgggcttggtgcccacctgtgcgcgccgcctgcgaagaaggaacggtctagggagaaggcgccgccggccgcccccgtccccaccgcggccgtcgctggagagttcgagccgcctagcgcccctggagctccccaaccatgaagctcaacttctccctgcgactgcggatcttcaacctcaactgctggggcattccgtacttgagcaagcaccgggccgaccgcatgaggcgcctgggagactttctgaaccaggagagcttcgacctggctttgctggaggaggtgtggagtgagcaggacttccagtacctgagacagaagctgtcacctacctacccagctgcacaccacttccggagcggaaatcattgcagt

SEQ ID NO: 12095 - DNA, 571 bp, Homo Sapiens
gtcatttgcatccagtagctattcagcaaatatacctatggcacaaaggatataagttatgggtataactgaaataatcctgggtttaaagcaaagctctgataaatacagaagatgtttctccaggtgccagaagatatgttgaagtttgagctcagactgaccaaatgctagttatggggtatgtgatagctccaaggtagtaatataaaggctattttaattagaaacttttgagtaaatggccctcaggatagtgatttctgtttgaatgtcactaaccttttttagttacagatccctataataatgcttgagtctaggcagaacaactttgtgtttattctttgcaaagggtagggtagtgctaacaacctgctcttcatttgctttttctcccctttgccgattcagaatgctgctttgtcaatttgtgtgcctgctgtaggaactggtccgttttccaagtgtgacagtgcaggcagagaagggtggatgagctgtaaatgcagcctagaacacatttgattatagagaatgaagcactaatatcccaatataattggagttt

SEQ ID NO: 12096 - DNA, 703 bp, Homo Sapiens
ataggtggttgcaagccactggtcacattttcatcaagcagtcaacatgtaaatttctgttgtaaagacaccttatttaatataatcgattcattaacattgaagtcatgaccaacaacactgtaactcatgcctgaatgaagcttatctgacacataagcttcataaggcacacaacagcctttttacccttaggaacagctttttgcccttagcactatgcttgggggccattttaaacagtgaaatcaaaaaaagaacagaaatgcaaaaaccatggcattagcgtaaaaaggacacgtttatagtatgaaagctggaacatggccttgttcaacctcagctcagaatatgtgtacagcaagttttttgctgtaccacaaaattttaggttaggcaaattcacaaatacggaatccatgaataacgaggatcaactgtacttaactatattttaaagctgtgacatttatctacctggtttatggaatagaatttatagctgaatcatgctccagtatttgagtgatgttttaaatatcctatgtctgaaaatattcctcctaattgtgtggtaatttgcttttactgtttccacagtatttcaggtctttgctcattcactcagtaatactgagcacttaccatgtaccagaattttactaggcacaaccatgaataaaaatacaattctcttgcacca

SEQ ID NO: 12097 - DNA, 1052 bp, Homo Sapiens
gctaggtacgaggccggtgttgaatcggcacgaggcggtgacggcgaccgcactccccgcttcccgctccccgcgctcctccgcccgggtccgccagccgaggccgctcccgagcgtcggaagatgccggccgtgtccaagggggacgggatgcggggcctggcggtcttcatctcggatatccgcaactgtaaaagtaaagaagcagaaataaaaaggataaacaaggaactggcaaatatcagatcaaaatttaaaggtgacaaggctcttgatggctatagtaaaaaaaagtacgtctgcaagttgctcttcatctttctccttggtcatgacattgactttggacacatggaggctgtgaacctgctgagttcaaacagatacacggaaaagcagatcggctaccttttcatctctgtgttggtgaactcaaacagtgagctgatccgcctgatcaacaacgccatcaagaatgacctggccagccgcaaccccaccttcatgggcctggccctgcactgcatcgccagcgtgggcagccgggagatggccgaggccttcgccggggagatccctaaggtcctcgtagccggagacactatggacagcgtgaagcagagcgcggccctgtgcttgctgcgcctgtacaggacgtcccccgatcttgtccccatgggcgactggacatcccgagtggtgcacctgctcaatgaccagcacttgggtgtggtaaccggcagacacaagtctcgatcaccactttagcacacgaacaaacccagaagagtccaaaacctccgtgtctctggctgtctctaggcctaagcagaatccgtgacgtctgcatccacagatcctccagcgattacacttactatttcgaccggctcctggcctgcctgtcacactgctgagactgctgcagcgctacccaccgccaaagccctacagtgcgaggccgcctgaaccgagttgcctggagaaaccctgaaccaacgccaacgaaccggcaactcgaagcacggcccacaacccaccccaaaaacgcg

SEQ ID NO: 12098 - DNA, 485 bp, Homo Sapiens
  misc_feature (228)..(264): n is a, c, g, or t
aatgttgtgttattttgctccagattttcatctataaacaaaggagcatttgttttgattttactctttttggtataaaaatttttgctagcttagtaaaacgaattggaaaacttgactatgatctggaacagataatgcaagaaggaacacataagtaagttgcttcggtgccaagaaaataaaaaagctattatcaggtctcctaaccaccccagtttgtaaggnnnnnnnnnnnnnnnnnnnnnnnnnnnnnnnnnnnnngcctatatccttattatgttaacctattttatttttctatatttcgtacatatataagtattattcatggttccaagcaatgagtgtaatgtattttctcccaatagtaattgtttatattcataattattcagctctgctgctaaacacgtagttccacttcgtttttttcttcttgctactgtagttattacaataaatactgtatttttgaagcaaaa

SEQ ID NO: 12099 - DNA, 627 bp, Homo Sapiens
  misc_feature (275)..(312): n is a, c, g, or t
  misc_feature (588)..(588): n is a, c, g, or t
  misc_feature (602)..(602): n is a, c, g, or t
aatactttctaattcagtttatagccattgtctgacaagagtagcaaaacattatcaataaatagtccttagtttgtacatcattttgttaaaaatgtttgatgtcatccatttttagtgctgcgactgtaaacgtacaatagagtaagaaattagacaaagttttcatgtccagtaacataataaaaggcctttcattaacctatctagaagtccccaatgcagtaggaaaacatgttcattcccctaacattgcagtatatactagcattagnnnnnnnnnnnnnnnnnnnnnnnnnnnnnnnnnnnnnnaaaaggcatacccaaaagaggtgtttaatcaccatccccaccaaaatatagtttattatctctctccctcttttttaatgatagtgtaaactgaatccaattcctggcccccagagcaaataagctactgtcagaggcaagaacatccaactgctgatacgcagcaatccccatcatgccagttggggtcaagcctttcagcgtcagcacactctcactctcttctctgagcactgagaacactctggccattttgcctattgctcggatcttgtnccttatcacctctnttccggctgcagctgttgcaccatc

SEQ ID NO: 12100 - DNA, 1461 bp, Homo Sapiens
  misc_feature (672)..(698): n is a, c, g, or t
  misc_feature (874)..(953): n is a, c, g, or t
ggcctgatatcagaagaggctgaattcgatggattcctttaattggagtccgcgtagtcagcacagacagcagtggaaaggacgctctgggtcctgttatttgctagggagggtaaagggagactatttcaaagctactgttcctagtccagctttaagtttcggtaagaaacatgcctgttttgtttcatgatttcgttaattaatggaaatttggcattgagggattattttattgagggtagaagagattccagaatcatcatctgtgatgatggtgtcctttagggctcttggagcagccagaccatgtttccaagagaaacctggtgatattgccagcagaccccctgccatcccccccagttgtcctggggctgaatgggcaaatctgtccaaacagctagtaaccggctgtgagggagagggtcagaagcacttagcgttggcctctgattgctgtcctctcttgtcctcttcccactccaatgatgaaaatgattttctctaaatgcctgggtaaggatgctttcaaggagctcacttggcctgcttgccctgccctctcacctctgacacccagccccaggagccagaccactcctgcctccacctctgactcttcagcagctgaagattaatgcagagaaagagcaaagcccaaaagggagnnnnnnnnnnnnnnnnnnnnnnnnnnncgaagcccagagaaggcaggctgtgcctgagcctggtagcagagctcagttgctgggtgaggatggcactccccgagttttcccaaccgacgggatgaccttccattgtgttttcccaaccctgctcatcctgtagcataaatgaagtgcactattaaacagaatagtttttcagnnnnnnnnnnnnnnnnnnnnnnnnnnnnnnnnnnnnnnnnnnnnnnnnnnnnnnnnnnnnnnnnnnnnnnnnnnnnnnnnggggggggggcctaaaccccctcccgggggggcagcgccaacaattatagccagccaccgcccccgcttctttttttgaaaaaaagagggcgggcccccactaataggcgagccgcgcgtactattattattacacgcaagcacgcgagcgcgcccgcggctggtttaaacaaacacgacgtagtcggagagaaaagacaacacctcgggctacgtggaggagaatcttattgtgagagaagagacagcccgcccacccattaatccgggggcggggaggagcagaaactatatgtggagcgagacacaaccactctccccacgagagagataatttatattaccgcgccgccacgcgaggcaggaacatatattaaaaattggagaagatggttcaattacgtttgtgtgtaaacaccaccacgcccggttattattctcgcgcgtggcagaagaaatttttggccacagaggaagttatttttagacaaaattatttcccccgggg

SEQ ID NO: 12101 - DNA, 111 bp, Homo Sapiens
atgatccactgttactggctaattccagggattttgatccaaattattgaaaattcttttactcatttttatatttttctaatcatccaaaaatataatattagccataat

SEQ ID NO: 12102 - DNA, 412 bp, Homo Sapiens
gcctccagcctcaatctgttccgtagctcagagcctgcctgccaaggccaagtgccctagagcccacccggtgtcctgaagtcctcggggggaggccaacccctggctcactggcacagggcaggtgggctctcggggaaggtgtcgggggccccctaggagggagcgctggggacattgccatgggacggaagtctgcttggcagtggctttgataagcgatgcttgggggtcagaccaccccctagaggagccacgtgccgcccagccaccttcaatgcctgccaccctgcccgaggatgtacagagccgtgcccacacatttccttgcaacttgatcaaatttcttaaagcaaacaacaaaaatgtacaattctgaaaatcacatattaataaacaggtaaaatattat

SEQ ID NO: 12103 - DNA, 465 bp, Homo Sapiens
aagacagaaagctcatggtgcaaattgttatttccagtgcgagggctggaggcctggcagaatgggtgctgatggagctacagggggagatcgaggctcgctacagcactggattagctggaaacctcctgggagacctacattacaccactgagggaatccctgtgctgatcgtggggcatcatatcctgtatgggaaaatcatccacctggagaaaccttttgcagtccttgtcaaacacactcctggggatcaggactgtgatgagcttggccgcgagactggcacccggtacctggtgacagcactcatcaaagacaagatccttttcaaaacccgccccaagcccattatcaccagcgtccccaagaaagtatgaaagaacctcggattttccctagagagcggccaactccttggactcgtgctccgctgccacctcgaggacggctcgacggttccct

SEQ ID NO: 12104 - DNA, 572 bp, Homo Sapiens
agcggccgccaatgccctctcccgtttagtaggggtagggggacacggcgatgagcaagacgaagacgctttggtggcgcggtgccgcagcacgcacggtgagccggtagaggccggcgcgggtgagcgcgcgacgggtgtagaccgcgccaaggcccgcgcgcagcggacgcagcgcgaaggggctgcgggggtcgggctccagcatgctgagctcggtgcggttggcggggacgccgacctcggagaaggcggtgaggcgggccacgtcgtggtgggcgcgcacgcccaggggcagcggcagcagccggtactgcagcgtagaggggccgcccgtgccgcaatcctgcgagcagcgccggaagcacgtcccagggctggggccctgccggtaggtggcaggacaaggtgtgtccacacactggtagctgccacggggtgttgaagcacatctggccgggtccacactcgatgctctcctcctcgcactcgttgatgtcctggcagttcttcccgctggggagcagacggtagccgggtgggcacaggcactggtagctgccctcagtgtt

SEQ ID NO: 12105 - DNA, 697 bp, Homo Sapiens
gaagaacagtacgaagatctcatctgtcacggcaacgtcatcagtaccatcgtgtgcagagcactgcagtttcctcctgaaggctggctccggctctccctcaataatgccagcatcacccacctggtgatccgacccaacggccgagttgcgctcaggaccctcggggacacggggttcatgcctcccgacaagatcactcgatcctgagggctccggcctctccttccctctgtcctccctgcacaggccgcacacacttaacgttttgttcccaaggagaccggcggaaagtagaaacctgcaatgctgcatctgggaactgacttgtgaccaggctgagaaggggagagttgggatcagacagcctgacttctctgcagggttttatacctgaccatgaacccccaggatggcgtggggtttaaggtgaaagcgtctcacgcacaagtcaggcctgttgtggggacctgaaagaggcctgacccagaccaccatgttcgcacccacagctgacccgtgctgagggtccaggctccattggcaaagccggtcaggcacgagggcgactgaggcacgtggatgaggagggcacccaggttctgttcacaactcacttcacttcatacatccttttaatttcttaaaaccctcttgtcccttaaatatttgtcaattaaagattttctggctgggc

SEQ ID NO: 12106 - DNA, 388 bp, Homo Sapiens
  misc_feature (288)..(317): n is a, c, g, or t
ccgcctttgaacaccccacgacaaacttggatgctctcccttatataaaagctctgtacattctctcttattgtgaaattataaactcagtacattatattgtaactatacattacatgcccatttcccccattgtatttatcaagacataaagacacaaggtataatttagttctaattccctttcacctacaccaagtagctagatatacctggcaaagactagtcattcaataaatgactttctaaataaataacacacttaataacaaaatatatgactcatannnnnnnnnnnnnnnnnnnnnnnnnnnnnnggaaaaaaattcccattgtggcccccccagggattaattggcagggaaccctcaaaagttcaccctccagg

SEQ ID NO: 12107 - DNA, 449 bp, Homo Sapiens
cctgaccctagcccagctgatacgtgctgctctgtcccccagccacggggcagggaaccagctggcagccagcctggctgtgcccagcagcggtatgggccctgaggacacctgaggttgagagagtggcccccatctgtggccacactgctgactgcacacacagtgtggcgtgagggacatacagccctctccctggtgccctcaggcggcagggctgaacgggctgtctctgctgtcccctccagacccggcgaggcccccctccgagactgcagcctccccccagccctcctgcagctcctctccgtcccctcctgtgctggtccccctggctatgccctgtggggtggtctagtggcctagctccaactctgtccaggcaggaaggccctgcagcagtgacctcacaggagtgggcccagaagctgggcacaggaaggccccta

SEQ ID NO: 12108 - DNA, 566 bp, Homo Sapiens
cctagaggatccttcaccaggacagatcgacaaagctctacattccaggctgcgctcaaataagagagaagcagctggctttcctcaagtggtctctgtcatagaatgtcacagcgttcacatctcaggatatctctagctgtcatcgtgtaacgaaaaaatgtatcccacggaaaacatgtgttctgcttctgctgctttcaagtccagcaaaatcagcctgcaagttgataactctttgataacaaaatatgaaaatgcatttcagcaccgtgatcactgctgccaaggaacaggacactctgtggaaaaaagcagctgtaaagtgagttacacatcacaggaaagggaacttgatgggaaagaaacgaatggcagccttccaggagataagatcagaaacaaaatggtagcaggcttgttaaatagtggaatttcaaacaaaaccattcacacctccagtagcatcaaactcagtgaggaagggctggaaggaaaggagcaggatgtatcccaagaaactgtattttgtaagtataacatctctgatcatgctatacaagaac

SEQ ID NO: 12109 - DNA, 378 bp, Homo Sapiens
tgccatttactccatggcacagccatggtggagaacagtttggaggttcctctaaacactgaaaatagaggtgccacatgatccagcaatcccactgttggatatataccccagaaataagaaatgagtatatcgaagaaattatctgcactcccatgttggttgcaccactgttgacaatagctaagatttggaagcaacctaagtgtccatcaacagattaatgtattaaagaaaatgtggtagatacacacagtggagtaatattcagccctaataaaaagaatgagattcagtcactttgctacaacatggaaggaactggagtatcattatgttaagggaataagccatggacgttatggcaggccccaggtt

SEQ ID NO: 12110 - DNA, 540 bp, Homo Sapiens
cctcttctgctccttagacacctgaatggactaagatgaaatgcactgtattgctcctcccacttctcaactccagagcccctttaaccctgattcatactccttttggctggggagtccctatagtttcaccactcctctcccttgagggataaccccaggcactgtttggagccataagatctgtatctagaaagagatcacccactcctatgtactatccccaaactcctttactgcagcctgggctccctcttgtgggataatgggagacagtggtagagaggtttttcttgggaaagagacagagtgctgaggggcactctcccctgaatcctcagagagttgtctgtccaggcccttagggaagttgtctccttccattcagatgttaatggggaccctccaaaggaaggggttttcccatgactcttggagcctctttttccttcttcagcaggaagggtgggaagggataatttatcatactgagacttgttcttggttcctgtttgaaactaaaataaattaagttactgg

SEQ ID NO: 12111 - DNA, 335 bp, Homo Sapiens
tacgagacttctaaaaactagcagacgaaaacagtgaatcacaactataagggaagccccatcagactaacagcagaaatcttataggccaagagagaatcgagacagatatacttcaacaatactggaaagaatgaaactactggaccaagaatactacacctagacaaagctgtctttttagacatgaaggataaataaattctttcccagatcagaaaaaaatcaagggaatttatcaacactagatagccctacaagaaatgcttaagggagttctaaatctgaaagtgaaacgcggcaatatgtaccgccatggagtaaatggcagggga

SEQ ID NO: 12112 - DNA, 493 bp, Homo Sapiens
tgccatttactccatgcccataatattggaaatccccaatcattttctttatggaagaacaaatgactaatacgacgactgaacgacttttcatcatctctgtaagttattatcttcagcactgcttgtgcattcgcaagaccatgacgtggaatcagattcagcattgcactggagaaagaatccctacgcttttttggtgtggtctgtctggataaaagcgtggcatcaccataatcttccatggcagatttcgcacaaaacacggagggctaaggaccgactcactcagtctgctgaagcgctccacagtgaactgaaaggctgcctcggagcgccaactggtgtcatcctccatgtcctcctccgcggtgttgtgtccatcactcagggccacattcccattgatcacagggttctgagtaattcttggtggctcatcatgtatctcccgcttccatctccatgtcctcggcctcgcgttaatgctcgt

SEQ ID NO: 12113 - DNA, 408 bp, Homo Sapiens
gttgtgcttggggaagccacctattacccatagcactgtcgcacagcgttgttccctttactacagctggcctgtgggacaaagacaaagaggcatccatcgctctggccgacatgcgtgcctcacacagagtccaccagattctcttccttaggaagctggaattgggatccgctcagtgaatgctagcactgaacattgtggggatttgtcgagtaggagttgaggcaaccaaactcaagtttgagccacgtgagtggatgaatgagccaattctgctggtccacgaagaggaagaaggatggataacaagctgagagagaggcagagaagggagatgaagtggccacagagacagatagtgaaagtccctgctttctttctagtttcttgggatacagggtttgg

SEQ ID NO: 12114 - DNA, 1012 bp, Homo Sapiens
cgggcttgccatgcggtcaaggtcccgcgaccgcgagcctaggctggttccacgcccaaccagggtccttgccagctccggcctgctcctgttggggaaaacggcggcccctccggacttaacgtccaccaccagagcggacagcccctccacgagtttcttactgagaatggaggctgtgatgagtggcaggctgtccacggtggctgtcacaatctctggctgcatatagaattccgtccgcaggaaccagctgctcactctgacccacgatacagcagcccgcctggtccagcagcacttgcatctgctctgggctctggatgacattgaatccaggaatagactccagcttatccaaggtgcctcctgtgtgccccagaccacgtccgctgatcattggcaccttgcagccacatgccgccagggcaggtgcgaggaccaggctgaccttgtcacccacaccccctgtggaatgcttgtccacaagctgctggcgccaggcctctggccactccagctgctgtcccgactgagccagggcctgggtcagcaccgaggtctcctccagatccatgccccgaagtcggatggccatcagcatggccccgatctgtgcgccctgcgcgctcccattcaccacagcggccacgaagcccctgatgtccgcttcgctcaggcggcctccgtctcgcttcatgcggatcagctccgggagctgcttgggctctggcgaagggtcgggaagtccctggctcccttccccggagaagtcaccaggcgcgggtggggccccggttcccggggtcatcaaggctgccatcgctccgggcctgcttagggcgctgccctcgcccgcttgctccggatcccagcccaggtacccggcctcgcccgcgggtcgggaccgtagggttcagggttcgcgcacagcggtccactgccggcggcggggcggcggcgccccaggacggcaggcgggtggggatcccgggaattccggaccggtcca

SEQ ID NO: 12115 - DNA, 218 bp, Homo Sapiens
acgtgggacctattactttaaagtgaattggaaacaacataataaatcaacctgtgagttattatgttagtttccaattcactttaaagtaataaactatatataaaaaagctttcttgtaccatctgaaaccttctcatgtgtatatacagtactttgggaaactttgcataagaccatctgggtctactggttgaatggtaagagaagggagtaat

SEQ ID NO: 12116 - DNA, 172 bp, Homo Sapiens
catatgtcccatggtcttctcttcaacattttcatccaattagcccacaatcaacttagataccacctgcctctcacactaagtagtactctctacttcttaggcctccatttactttcttagtttctctactccctataccgtattctctatgtttcctatccgcaacttc

SEQ ID NO: 12117 - DNA, 262 bp, Homo Sapiens
cgctgcatgccaggaagtctccacttcgtgcaccaggcctgcctgcagcagtggatcaagagctccgacacgcgctgctgcgagctctgcaagtatgagttcatcatggagaccaagctgaagccactgagaaaatgggagaagttgcagatgacgtccagcgagcgcaggaagatcatgtgctcagtgacattccacgtcattgccatcacatgtgtggtctggtccttgtatgtgctcattgaccgtactgctgagagac

SEQ ID NO: 12118 - DNA, 515 bp, Homo Sapiens
agagtggttctattgctaaatatattgactagctttcttataacaattttactttgaaattcaaagttccaaagctaaatgtctaaaagaagtaactgcagcttgttctgctgattttggaaaatagtattaaccatgtaagatctttggggttggagtgaaggtcttatctgcattaattttgttaatgcacattgtagatgtggagaacatcttgacctgcataaggattgcgtctcattttattgtgtagtgctttttcgaaatatttacatttctttggttcccatgttcatgtattctggagaagtaaaatttcttgattactgggcagaccctaaaactactaagagaaacataacatgtagttagctgtctgctcatggtttgttcaaatctaagctaaccttaatgttgctgtgtccgctgtccacagaaaacgcccttaagtagccctaccttactccttagagcttattttgcttttgtatttaataaaagctgtcttaaatgtt

SEQ ID NO: 12119 - DNA, 487 bp, Homo Sapiens
aaagatcatgaatttgtgacttagttctgccctttggagaacaaaagaaagcagtctgccatcaaatcaccttaaaatgcacggctaaactattcagagttaacactccagaattgttaaattacaagtactatgctttaatgcttctttcatcttactagtatggcctataaaaaaaataataccacttgatgggtgaaggctttggcaatagaaagaagaatagaattcaggttttatgttattcctctgtgttcacttcgccttgctcttgaaagtgcagtatttttccacatcatgtcaagaatgattcaatgtaaatatttttcattttatcatgtatatcctaaacacacatctccttcatcatcatatatgaagtttattttgagaagtctacattgcttacattttaattgagccagcaaagaaggcttaatgatttattgaaccataatgtcaataaaaacacaacttttgaggcaaa

SEQ ID NO: 12120 - DNA, 576 bp, Homo Sapiens
  misc_feature (25)..(25): n is a, c, g, or t
  misc_feature (410)..(432): n is a, c, g, or t
gaaagcattgaatatagaagacagnatccatctcgttgctctgtttcccttagtaatgttgaggcaagaagatttttcaacaaggagtttctaagtaaacccaaagcatagttcatgtactggaaatggcagcagtttctgatgctgaggcagtttgcaatcccatgacaactggatttaaaagtacagtacagatagtcgtactgatcatgagagactggctgatactcaaagttgcagttacttagctgcatgagaataatactattataagttaggttgacaaatgatgttgattatgtaaggatatacttagctacattttcagtcagtatgaacttcctgatacaaatgtagggatatatactgtatttttaaacatttctcaccaactttcttatgtgtgttcnnnnnnnnnnnnnnnnnnnnnnnaaaatatttaacagttcaatctcaataagacctcgcattatgtatgaatgttattcactgactagatttattcataccatgagacaacactatttttatttatatatgcatatatatacatacatgaaataaatacatcaatat

SEQ ID NO: 12121 - DNA, 818 bp, Homo Sapiens
ggttaaaagggacaacagcacgagcgagccgcagacgcgatgcccggaaaccgagcggaatttttgggatccggcgcagcctacccttggtggtctaaacggatgctgctgggtgttgcgacccaggacgagatgccttgtttcttttacaataagtcgttggaggaatgccattaaagtgaactccccacctttgcacgctgtgcgggctgagtggttggggagatgtggccatggtcttgtgctagagatggcggtacaagagtctgttatgcaagcccgtgtgccagggatgtgctgggggcggccacccgctctccaggaaaggcacagctgaggcactgtggctggcttcggcctcaacatcgcccccagccttggagctctgcagacatgataggaaggaaactgtcatctgcaggggctttcagcaaaatgaagggttagatttttatgctgctgctgatggggttactaaagggaggggaagaggccaggtgggccgctgactgggccatggggagaacgtgtgttcgtactccaggctaaccctgaactccccatgtgatgcgcgctttgttgaatgtgtgtctcggtttccccatctgtaatatgagtcggggggaatggtggtgattcctacctcacagggctgttgtggggattaaagtgctgcgggtgagtgaaggacacatcacgttcagtgtttcaagtacaggcccacaaaacggggcacggcaggcctgagctcagagctgctgcactgggctttggatttgttcttgtgagtaaataaaactggctggtgaatgaaaaaa

SEQ ID NO: 12122 - DNA, 478 bp, Homo Sapiens
  misc_feature (33)..(33): n is a, c, g, or t
  misc_feature (92)..(92): n is a, c, g, or t
agactctaacccgagacctgggccccacgctgntggttcatggggtcactccagtcacctgcactgatctgtgatgcccctgcctccagggntaggtagagagggcccaggcaggcggcctatcctgatccttggaggaggaggaagaggaggccactgtggcccgtggccctgcccttgggacgtggagcccaggggaggtttgaaggggatcctgggcttgggcatcacgcccacctcctttggcagagggaccccagcacactaactctgggtggctgtccccaccgtgcaggggagggagtccgcagcctcccttcactggtgccttgatgctaggggccaggcctcctctgtgactctgggctacctcagtttccccattttggccagactcaccggcccactggggtggtgatgttttcgttctgttttatttttctaactctgctgaccatgaataaaagaccaaaacact

SEQ ID NO: 12123 - DNA, 412 bp, Homo Sapiens
tgctttgccgacggggcctcccggccctgatgcgtgtacactctgcgggctgcaccgggtggctctggttgggggcgaagctgtgttgactgggagagcgttggaaattgagacatgaagagatgacgggagtgcgtttctctgggtttgatctccatcctgttttctcccagacacaccacacctaccttgggggaatgccgttgcctgttccacccctttgttcacttcgcgttaactgctgtggtaactttttcaggatctgtgtgaagaatggtaatgacgtagttgaaaggaaaatgtactgttgtgtgtttcatttgtgtgatttcgtaccaaaaaaatgtgtttgaactatattgtatgtaatttggaaatcgtgttaataaaaccctgcagtttccaaaaatat

SEQ ID NO: 12124 - DNA, 400 bp, Homo Sapiens
  misc_feature (57)..(228): n is a, c, g, or t
ctggtgttgctcgctctagcaggatccccttaccaccctcgatcacgggttcaagcnnnnnnnnnnnnnnnnnnnnnnnnnnnnnnnnnnnnnnnnnnnnnnnnnnnnnnnnnnnnnnnnnnnnnnnnnnnnnnnnnnnnnnnnnnnnnnnnnnnnnnnnnnnnnnnnnnnnnnnnnnnnnnnnnnnnnnnnnnnnnnnnnnnnnnnnnnnnnnnnnnnnnnnnnnnngtgtgagccaccgcacccggccagaagtttattaaaaagctctagaagagtaggaaagaaatgaaagtgcacttgggagagatccaagtgggcaacttgaagaacatgtgtccaattttgatggtcttttcaaaacaccaacttgttattttgttgatcttttgtatttttt

SEQ ID NO: 12125 - DNA, 441 bp, Homo Sapiens
tcggaccttataccccacgatcactgtctgctgcgagctcctgcaaactcctaataatccgagggacagaggggagtggtggtttactgttctagtatctacttttatgattcaaaaacctgttctttttgaaatcacatggtacttaaagatatttatattatcttctctatcgtcttttcctcccttcatttttactttggtaattttacctattaagattgtgaaggaacttgacattttagggatttcttgtagatgttgtaatgaaatatggttttggaatttgatttagaaagaggtggaatgtagtccgttttctttctccggcttcccccaaccttccagttctttataggtggttcattgctctgactaccagaggccttaaatgcaggttgcgtagttgaccatgcgacctgtgaggctccctttgaacct

SEQ ID NO: 12126 - DNA, 492 bp, Homo Sapiens
  misc_feature (53)..(53): n is a, c, g, or t
ttccatggcagaaggcccaaaccagagaactggccagacagttctgttgcacntaagcagcatgtgcacttttccaagcacatctcattcccttcctgactccaattatttcaacagcaccttctcatttgcaccagcccatttttgagccccaacaaactatgattttgaaatacctctgaagaccgcatgagctaaccactaagggtgacagtgctctagcctactcaatttcacctgagggcagaaacaaggcaggagagtcttgtcacctggattcggtgcttaggatactttacaatcttctttggatgcatggccaagtcagaagggtaacatcatctggggacagactcaagtaatatggcaccacgtctatggtagaaaaggttgaagaaaaacaggagaatcacatcacctaggtgttgggcttagcaatatgaaataatcccctcttttggccaactccagaataaagaagtgtgttgcatt

SEQ ID NO: 12127 - DNA, 406 bp, Homo Sapiens
ttacaaccccacgatcacactaatagcttgaaagaagcctactaacctggaaacatctaacactgtcagtttaatggacagattcttgttgtcatcaccctatcagtaacacctcgtaaagacacatacttcatttccagcacctcctatactagcaagggacctacatgtcaggcacttcatacatttaataccaagagaaactccactagggagggactatcctcagtttacacgaaaagaagctgaggcttggaaaggtgaggtgccaaattgaaagtcacacggctagtaaaacatgcattcgtgtttcaaatctgactccttctaacctttccctagtaccaacaccacttcacttctggctgtttctacttgctcattaaagattctgttgctgctaggc

SEQ ID NO: 12128 - DNA, 289 bp, Homo Sapiens
ctcggaccttactcccacgatcacttacaaccccacgatcacatacaccttcatctcaccgaaatggagtgggttctgcacatcatgtgcccggatcacactgaacccgatgtcactgcctgtggtcatcacgcccttgacagtaactgtggcaaccaggtggcttgacgaagaccagctgaagttcccactgccaccgtgggcccttattgtgtactgataggcgcccgtctttggttgccacggaaatgtcaagatgctgggatacagggtgatcgtggggttgtaa

SEQ ID NO: 12129 - DNA, 388 bp, Homo Sapiens
ttacaaccccacgatcacccccagctactggtaatcaccattctactctctacttctgtgagtttgacttttttagattccaaatataagtgagtctcagacacctctgacatactgatttcaattcctttggatatatactcagtaatgggattgctggatcatatagtaattctatttttagttttgtgaggaacctctacactgttttacaaaatggctgtatttatagtttcaccagcagtgtataagtgttccatttctctgtgaccttgctaacacttatctttcacctttttgataatagccagtctaacaggtgtgaggtgataccttattgtggctttaatttgcatttctcttatgattagagatgttcagcattctt

SEQ ID NO: 12130 - DNA, 715 bp, Homo Sapiens
ggcgggcgtctcggggagagggtctgaggggcttggaacgggagatgaagaggaagcagccggccagcagcagcccctgtagggtggcctggaagtcactgaacttgactccctccaggtagaggacgctctggctgtaggccaggatgagggcattgagcgccaggatcttgaacatctgtagcgtggtcaccagcgtgcagcggccctgcttgatcacgtggcagatgcactggatggatgagagcttggaggtgaagggtgctgcgatgctggcatcccccagtttcacaatgggcgtactctcgtcctcgaggtctcgcagcacctggctcaggcggtccctctgggaggttggctgctcctcggagggagggagccccgaccgctgcttggctgtcctggaggtggctctgatgccactgttgctcagggttgggctggcccggggccgccgtcgccgctcgacaacccgctcaggggcattggccaagagcgccacacccacgtcagcatgcttcagggcgcccacgtcgttggtgccatccccacacatgagggtcacgtagcccagctccttcaggctggtgatgacaaactccttctgcttgggagccacacgggcgaacacctgcacatgggggatgaggcggagcagctgctgggggtcggtggcctgcaggtgggccaagccgtcgcctgtgaggcacagtgc

SEQ ID NO: 12131 - DNA, 117 bp, Homo Sapiens
tgtcctctgtggttttctgggcttatgttaaaattataactcaatcaccagtctttataaatttgctttttagtatttaaaccaaacctaatgctaattgtgatcgtggggttgtaa

SEQ ID NO: 12132 - DNA, 242 bp, Homo Sapiens
  misc_feature (146)..(185): n is a, c, g, or t
aagaaacaaatcataaaagaacaatcaaatggaaattctagaactgaaaaacacaagaacagaaataaaaaattcactgaacgggcttatcagcagaagggagagagcagaagagtcaacctaaacataggtgaatagctcgtggnnnnnnnnnnnnnnnnnnnnnnnnnnnnnnnnnnnnnnnnaatgtgggaggtgtaggttatagtgagccattattgtgcgcactgtatctctggaca

SEQ ID NO: 12133 - DNA, 385 bp, Homo Sapiens
actccttactgccaaaggaacccctatcactagatggccaccttatttactaactccttcaggccacacacctcccagctaaagcaggagttatacactgttgaggacatcgaacaggttcagatgaaatctcgaggcaacagaaaggccgatgaggcagcaaaagaagcctccctttcttctgcctctgcccctctccttcctgttatcccagcaatcctacccaagaactctcccaccgagaaagctttgctatacagcaaggagcctcctttcaaggggactggatagtcaaaaatcaaaagctcgtcctcccctaagagcagaccagagaaattctgacatctcttcaccaatccttccatatcagaagtgcgcctgggtg

SEQ ID NO: 12134 - DNA, 321 bp, Homo Sapiens
ttacaacccacgatcacccagactgtccagacattttcacaaaacagaccagcagcagctaggacatttcaacagattcggtgctattctgcacctgttgctgctgagccctttctcagtgggactagttcgaactatgtggaggagatgtactgtgcttggctggaaaaccccaaaagtgtacataagtcatgggacattttttttcgcaacacgaatgccggagccccaccgggcactgcctaccagagtccccttcccctgagccgaggctccctggctgctgtggcccatgcacagtccctggtagaagcacagccc

SEQ ID NO: 12135 - DNA, 771 bp, Homo Sapiens
aggaagcacactgcaatagagtgaacagcagaatctcaacctgcaacagtttgtgttggtgcatccaaccaccaatttgcagccagcgcagtttatcatctcacagacgccccagggccagcagggtctcctgcaagcgcaaaatcttctaacgcaactacctcagcaaagccaagccaacctcctacagtcgcagccaagcatcaccctcacctcccagccagcaaccccaacacgcacaatagcagcaaccccaattcagacacttccacagagccagtcaacaccaaagcgaattgatactcccagcttggaggagcccagtgaccttgaggagcttgagcagtttgccaagaccttcaaacaaagacgaatcaaacttggattcactcagggtgatgttgggctcgctatggggaaactatatggaaatgacttcagccaaactaccatctctcgatttgaagccttgaacctcagctttaagaacatgtgcaagttgaagccacttttagagaagtggctaaatgatgcagagaacctctcatgtgattcgtccctctccagcccaagtgccctgaattctccaggaattgagggcttgagccgtaggaggaagaaacgcaccagcatagagaccaacatccgtgtggccttagagaagagtttcttggagaatcaaaagcctacctcggaagagatcactatgattgctgatcagctcaatatggaaaaagaggtgattcgtgtttggttctgtaaccgccgcca

SEQ ID NO: 12136 - DNA, 370 bp, Homo Sapiens
tacccttacaaccccacgatcaccaaggttcactgagttctgagtgcaaccctcatggtggtcagtgcctgtgcaagcctggagtggttgggcgccgctgtgacctctgtgcccctggctactatggctttggccccacaggctgtcaagcctgccagtgcagccacgagggggcactcagcagtctctgtgaaaagaccagtgggcaatgtctctgtcgaactggtgcctttgggcttcgctgtgaccgctgccagcgtggccagtggggattccactagctgccggccatgtgtctgcaatgggcatgcagatgagtgcaacacccacacaggcgcttgcctgggctgccgtgatcgtggggttgtaa

SEQ ID NO: 12137 - DNA, 546 bp, Homo Sapiens
aataaaacacaagaaagacatttaaaaacaaaaatcacttatctttccatgatctagaaataaaatttcatgagtaatctgtcatttttaatgaatcaatgtcaataagtctttataaatacacacaaacatgcacacacaacactgtggtctaattccacatagcttaacactaacaaaaattgtgtaagttagttttttataaccctgtgggagggttctgggaacaaataggaaacatgcaatatgagcatgtattcttccccctccacctctaatcccagcctcaatcaacctacttcccctgagccttatggtagtttgggccttttgtcaatgagtataggcaaatgaaacctagattttattggagttacataaagagggcgagcaattgaaaggccttaaggcagatatgggcgatggagtatcctgagaagatataggttctcagagaattgtagaaactgtagtgacatgaactcgtcttaagatatctggtttctttgagcacaaagtcaatgaacagtgtgggccaagcctcac

SEQ ID NO: 12138 - DNA, 357 bp, Homo Sapiens
tccgggccgacctcgagctgccccgggacgcgttcacgctgcaagtgtggctgcgagcggaggggggccagaggtctccggcagtgatcacagggctgtatgacaaatgttcttatatctcacgtgaccgaggatgggtcgtgggcattcacaccatcagtgaccaagacaacaaagacccacgctactttttctccttgaagacagaccgagcccggcaagtgaccaccatcaatgcccaccgcagctacctcccaggccagcgggtatacctagctgccacctatgatgggcagttcatgaagctctatgtgaatggtgcccaggtgtccacctctggggaacaagcggggggct

SEQ ID NO: 12139 - DNA, 195 bp, Homo Sapiens
  misc_feature (177)..(177): n is a, c, g, or t
cggaagcacactgcaacataggaaataatattatgtagactgagataaagaatgttaagaatatttgaacaaagtttgaaccagatgaaatgtaacaggcagaaacagaagtaggaggatttgtggactgatctaagttggtctcttgtgacttttatgactttccactgaagaatnagtgataagatgtcctct

SEQ ID NO: 12140 - DNA, 271 bp, Homo Sapiens
cacccaggcgcacttctacagcatcaggcggcctgtgctaaccctcagcaccttcccgggctcaggctgggtgctcatccattcactctggggacggcctcatccatccgttccctctggggacggcctcatccatccgttccctctggggacggcctcatccatccgttccctctggggacggcctcatcaatccgttcactctggggacggctctcatccatccgttcactctgggtaacgcctcagtccatcacgtagaagtgccgct

SEQ ID NO: 12141 - DNA, 822 bp, Homo Sapiens
aggagagagaccaggccttgcaggccaaggcgagcctgaccatgcccgctggtgcccgagacggaagatgaccgcaagctggcggctctgctgaagttccacaccttggactcctacgaggacaagcagaaactcaagcggaccgagatcatcagccgctcctggtgtcccctcgcccccggatcctgcctccagcagcaaggtcagtcggcgtcctgaagaagctggcacagagccgcagaaccgcgcttgccacctcccccatcaccgtcggggacctgggcatcgtgcggcggaggtctcgggacgtcccggagagcccccagcatgcggccgacacccccaagtctggggaaccgcgggtaccagaggaggctgcccaggagccggcccatgtcccccggagactgtcctccggaaacaactgagacccccaagtgcagcagcccgagggggcaggaagggagccgtcaggacaagcccctgtcggccagcaggctcctcccaggaggcagctgacacccccgacacgaggcacccctgcagtctcggctcctccctcgtggcggactactccgactcggagagtgagtgagttcgatccccatcctggagactggacccgctctagaggtccctggacacacccaggaggcccctcacagactgcagacccccggctcgcccaccagccctgggagagctcagatgccgcatcctccccagaccgcgccttcctgcaaccgtggagttatttatttggtcctggtgagggtgtttgtgccttgtgagactccgtacattaaagacctgtcttttctt

SEQ ID NO: 12142 - DNA, 899 bp, Homo Sapiens
ggatcggcataagcagttctggcgctactttgctggtaacctggcgtccggtggggccgctggggccacctccctttgctttgtctacccgctggactttgctaggaccaggttggctgctgatgtgggcaagggcgccgcccagcgtgagttccatggtctgggcgactgtatcatcaagatcttcaagtctgatggcctgagggggctctaccagagtttcaacgtctctgtccaagggcatcattatctatagagctgcctacttcggagtctatgatactgccaaggggatgctgcctgaccccaagaacgtgcacatttttgtgagctggatgattgcccagagtgtgacggcagtcgcagggctggtgtcctacccctttgacactgttcgtcgtagaatgatgatgcagtccggccggaaaggggccgatattatgtacacggggacagttgactgctggaggaagattgcaaaagacgaaggagccaaggccttcttcaaaggtgcctggtccaatgtgctgagaggcatgggcggtgcttttgtattggtgttgtatgatgagatcaaaaaatatgtctaatgtaattaaaacacaagttcacagatttacagtgaacttgatctacaagttcacagatccattgtgtggtttaatagactattcctaggggaagtaaaaagatctgggataaaaccagactgaaaggaatacctcagaagagatgcttcattgagtgttcattaaaccacacatgtattttgtatttattttacatttaaattcccacagcaaatagaaaataatttatcatacttgtacaattaactgaagaattgataataactgaatgtgaaacatcaataaagaccacttaatgcacgcaaaaaa

SEQ ID NO: 12143 - DNA, 520 bp, Homo Sapiens
tcatgtgtaataggcgtataatgtataacaggtgaccaatgttttctgaatgcataaagaaatgaataaactcaaacacagtacttcctaaacaacttcaaccaaaaaagaccaaaacatggaacgaatggaagcttgtaaggacatgcttgttttagtccagtggtttccacagctggctaagccaggagtcacttggaggcttttaaatacaaaacattggagctggaggccattatccttagcaaactaatgcagaaacagaaaatcaactaccgcatgttctcacttataagtgggaggtaatgataagaacttatgaacacaaagaaggaaacaatagacattggagtctatttgagaggggagggtgggagaaggaaaaggagcagaaaagataactattgagtactgggcttcacacctgggtgatgaaataatatgtacaacaaatccctgtgacacatgtttacctatggaacaaaccttcatgtgtatccctaaacctaaaataaaagtt

SEQ ID NO: 12144 - DNA, 347 bp, Homo Sapiens
  misc_feature (246)..(280): n is a, c, g, or t
aatttatcctctgttgattttttcttttgctttatgggtttggcttgtttttcttgcatggtttggagctgatcgcttctcccccaccccctagggtaccagcaggcagagccttgccctctgctcaggctggggtccagtgggaggggcccaagatctctgctcagagaagtgcagggggagccttccagctcactctccctgaggactggcttgacaggggctatgggtttgctttggtgttgnnnnnnnnnnnnnnnnnnnnnnnnnnnnnnnnnnncgactgcccatcccgggtcctttccctgatgggttggggcagttacctggttgctgttttaattaaa

SEQ ID NO: 12145 - DNA, 1037 bp, Homo Sapiens
  misc_feature (26)..(26): n is a, c, g, or t
  misc_feature (536)..(545): n is a, c, g, or t
catatagtgaatatagacaaggttanaaaaaccaggtggtaacggtcggatatcccgggatatcgtcgaccacgcgtcgctgaaaactcaggagctggcatcaaactcgtagtcccatagtcagtgttaattacacacattgttaactattggatgaaaaatacatgctattgattgtgtccaaagcctcccgaggacctccgtggggatgctctggtagcctgaatacagaactgaggtgaaagtccaaaccttgaattttacagtagtaagttggtaaaccatgtgctctgtgctatgagttaattatgttttcccaaatactaatgtggcacaagtaccatattttatcagagttcttatgtacagtatggtgaagataagtgacaagcacacatttttcttgcttcactgctgttctatattacacaggttgttgtgttttttttaaaaaagaaattaagcagtagttagtctctaaaaatacaatgtttcaggctaccacagtgaataaatagaaatgtaatcagggattnnnnnnnnnncttatgcagcttttcaaagttgattgtttcaaaattggtgtttatttaacaataagtggtaatgtacttgaatgcactttttatgacaatgattcagtaatggtaattttactattaaagaaagtgaaaggtttacgtttgttagcatggctcagaatgtagctgtcaggtgtttctcacctaagggcaaaagaaaatgatagtaataattgagtaagtgatgtatggattgtggacagtgtggtaggcttggctgaagaagggggtaggcggttcctgttcttcctacttggggataatatctcacgaagtcgatatgctgacggtccagtctccatatgtttatagtatgtacttacatggagtaagtaggttcacggttttagggaaggggagaggtgaaagggtatagaagatggtgttaggaccacaaataaggcgttcaaaaaaagggatcagaacattggatgtacggaggagtgtgagtattaa

SEQ ID NO: 12146 - DNA, 1040 bp, Homo Sapiens
  misc_feature (449)..(472): n is a, c, g, or t
tcgtatcattagaagaaccccagagatagcattcctctattttattttactttcttttggattgcactgattgtttttgtgggaatgacactttatctggcaaagtaactgagagtttggtaaaagaatattttcttctctgaataataattattttcacagtgaaaatttcagtattttatcactaatgtatgagcaatgatctatatcaatttcaaggcacgtgaaaaaaattttttagtatgtgcaatttaatatagaaagatttctgcctgtttggacaataggttttgggtagtacagattaggataagtaagcttatatatgcacagagattattgtattacctgtaaattgatttacaagtacttaaaagcgtggtccccagtgaggccaagaaagtttccggttaagttctttaataataatcctacagtttatcttaagnnnnnnnnnnnnnnnnnnnnnnnncactttaatttaggcttcgttggttgatggtggaaaaaaatgctcaggaaatatttcagatatttgccaaaaaaccagtaataaggttaccttattaaaatagtgatatttgcttaactatttaaggtgtcactgataaattaatttgtacttctgtgtttagaaattatagcttcttttcccttagtcaaattttttagcatattatacacatttctggtgtaatctggttggaagtgcaataatatgttagtaagttacattttaaataatggctcatgtgacaatactcccaatcaattggcttatagaatttaaagatctgtatattagatttgggcttaaaggcatgagaagtataagactgggttggggggcttggtaagaccaccagcctcttaatgatggttagcttctttaggtcattaaatcaataaaaacatataatgctgtatggctcttctaatgctcctcttccatttccagttatcttcacatttacatttaaatatacaaacctgagcccgccattattaatttccctataaaatgacgatacatgtgaaca

SEQ ID NO: 12147 - DNA, 333 bp, Homo Sapiens
ttacaaccccacgatcacgaagcgatccaagcagcggaagttacagcagaaggccttccgcaagaggcagctgaaggagcagaggcaggcccggcaaggagaggctcagtgggctcttccttaacgaagaggtgctgtccttgaaagtgactgaggaagaccatgaagcagatgttgatgtattgatgtaataagggtgaatttatcaacgttctttgtgagcattaaaatactccatccttatgggtttacatgcatcttgaccaaaattttggttagggctgtgctgatgtaccattaataatttaagccagtggttcttggcaggtgatc

SEQ ID NO: 12148 - DNA, 242 bp, Homo Sapiens
ttacaacccacgatcacggcactgagtcaggcgaagtgccctggaggtgccagagacactggcatcctggggccaggctttgtcaggcgtctttttactgaagctgtgtctttcaggatcattcatgggcaaaatgcagaagcatagtgacttcaagttacctttgctttgtgatgatgctggccacagtgtgccttcgtgtgacagggtgttttctttcaacatcttaaaactcacagttc

SEQ ID NO: 12149 - DNA, 358 bp, Homo Sapiens
gccaggccgaggccactaccccctgacactgccggaagagcacagggacacagccagagcccacggagggcccttcccgcaaagcagaagccgccagggcaggggccggggctctcatggagctgcctgtggtgaaacccatgggcagggtgggtggagggactgatgcgaggtcccccaggcctcagcctggagctcctgagccgtgacagttttcaggggccgtgcagggcttcagcagcacctcctgcctgccagctggcgtcttgtatccaaatcaagatgaggaagagggggcctgtcgtgccttgagaaagctggaacgggaatcaattaaacattgtggtgctggcgcctg

SEQ ID NO: 12150 - DNA, 444 bp, Homo Sapiens
  misc_feature (184)..(245): n is a, c, g, or t
cggcccttctacccacgatcaccagtagcctcttccaaattactctcttaaaaaagaagtaaatgaaaccgacgggatcctttttctttttggagaataagccacatgccatgtaccaacaggaaaaagtcagaaactgaggttcccattctcactcacatacttccttacttgtggttcaagnnnnnnnnnnnnnnnnnnnnnnnnnnnnnnnnnnnnnnnnnnnnnnnnnnnnnnnnnnnnnntggtgcaaagattgtatcagtaaagcatcccacaacaggtgtaggtgctacagctggatgaacgctgctctcattgtagtcaatgtgatgttcacaaagaaggttttagggcagaaactgtccaggggccacaccaccaggagtctgatatattagtctcccaaataaactctcaggaaggccagtcctcagagagtcc

SEQ ID NO: 12151 - DNA, 1271 bp, Homo Sapiens
  misc_feature (92)..(107): n is a, c, g, or t
  misc_feature (175)..(175): n is a, c, g, or t
  misc_feature (414)..(415): n is a, c, g, or t
ctggttttagtgtgtgtgtcgggggagtgtgtacctatatataaaggacaagtgtgatatgtgtgtatatgtatatacatacatacatgtcnnnnnnnnnnnnnnnnatatttgagagctaaggaaaactcaaagcagccccttcattatcttgcgtactacttcaaagatttcntgtcagccctaattacaagtgtcaccatatagttggggcttaggtacttgcttacaggaagagcaattccctagcaaaggtcattagctcctaaggcacttgaagtcaaagtgacagccctgaaggaaattgcactccagccctcctccaggatgtctaataaagatgggaaacttggatgcccagccattttggtgacctgagagtctaactactccagttagacctaaggggcacannagcagaattcatgaccttgtagttgtggcagggtctaggaagtcctctctccccaagtagaaaatattctcttgccattcctgaaattccacattcatataatggctgtgcaatacatgcttctcaataagaaaattaactgcatgtttactgtgtgctgatcacatcagatttttatgtttaaaaaaatctcattatggattgagtccagcccagctctaagagaaaaagaaggcccatatgggagacttcagtctcattattattgcctttatccagcagtgcttatgaagccccctaccctgtcccattccagaaaccataagactcaggcagttcttgattctggaggcctgcctggtaagataagatagtataatttggaactgagaacataccagaaacagcagaacgagggccagagcagaaaaatgaaaataagtggagacaccttagtggatacattggtgcaaaaaaagccacggagcccatactgggcttgatatgactttgaggggacagcagattaatacttaatgagggttaaacctgaccagtctttctacagtgacaggccacactgcatgaatggggagaaccaatgaatccattgtcctctgcctattttcctgtgcacagtcacattccctccttaggaatcttccccttccaccctttacattaaacaagggaacactgaatctttcaagggaattacacgtttgggttaatgtttcagtatatcattttcatactgtaaattattttgtaagagagatttactgctatcccaggatgttcggacttggtgcccctgtgcatttggaaatcaataaactattactggaaatgccaa

SEQ ID NO: 12152 - DNA, 402 bp, Homo Sapiens
ttacaaccccacgatcacacaatttctatgagtggagcttgccctgggcctgctggacagtcaacagccagttctaggacagtcaatgtgccagacgtgaaagagaacacaggctatggaaaatagcagtcccagcaaaaaacaagagaagatagaggctgccaggtaggcattttgttcttcacaaatttgtgcagagctggctctgggagtggaagccaggttccattacagactcatggacaactaactgacagatgctggaatggactggatgactagtgggggtcaaagggccagtatgccccataaattattttacaatgtcgtgaattctaccatgaatttgttaattcaacaaatatgtattaagtgtaggctctgggccagcctgtataaatc

SEQ ID NO: 12153 - DNA, 407 bp, Homo Sapiens
aggatccccttacaaccccacgatcacgaagactccaggcctcccgaaggatgtatctgtggcagagctgctgagggagctgagcctcaccaaggaagaggaactgctgtttctgcagctgccagacaccctccctggccagccacccacccaggacatcaagcctatcaagacagaggtgcagggcgaggacggacaggtggtgctcatcaagcaggagaaagaccgagaagccaaattggcagagaatgcttgtaccctggctgacctgacagagggtcaggttggcaagctactcatccgcaagtctggaagggtgcaactcctcttgggcaaggtgactctggacgtgaccatgggaactgcctgctccttcctgcaggagctggtgatcgtgggttgtaacg

SEQ ID NO: 12154 - DNA, 338 bp, Homo Sapiens
  misc_feature (158)..(170): n is a, c, g, or t
atcctgtctaaaaataaatacatatgtgtgtgtaaggttgcagctgggcacaatgctttatgcgtgtaatcctagcacttttggagccccagatgggcagattgctatagcccagtagttcaagatcagccctggcaacatactgagactctctaccnnnnnnnnnnnnnttagctgagcatggtgatgcatgcctatagtcctagctactcaggagcctgaggtgggaggatcacttgaacttggaaggtcaatgctgccgcggtgagccgtgagctgtgagccatgagccatggttgtgccactccagcctgggtgacagagcaagaccctgcctc

SEQ ID NO: 12155 - DNA, 335 bp, Homo Sapiens
ttacaaccccacgatcacccagcaaggaacaccagagggagagtggggtgctgcgggataaatacgagaaggccctgaaggcctaccaggcggaggtggacaagctccgcgcggccaacgagaagtacgcacaggaggtggcgggcctgaaggacaaggttcagcaggccaccagcgagaacatggggctaatggacaactggaaatccaagctggactcgctggcctcggaccaccagaagtccctggaggacctcaaagccatcctgaactcgggcccaggcgcccagcagaaggagatcggcgagctgaaggcagtgatcgtggggttgtaa

SEQ ID NO: 12156 - DNA, 365 bp, Homo Sapiens
cacccaggcgcacttctgcctagaactggaattcaagagctccagtcctgtgccatttacagctgcaggacgagcctgctgcagcgttcttgcccatcagtctcctctccccaccagcgcactcttctcaaccacagcgcacaacgctctctccagcactctcatcttcagagggtgcctttcctccacgaccaatcttatgcaagagaagacatggcaaaacccaaagcagtctggttgctattcctctccagcgcacgcattatttatactgagatgtggggggctgaggtgggccttccattcagcggcaagtacctactgcgactaacctgcctagcccagaagtgtgcctggtgcggtac

SEQ ID NO: 12157 - DNA, 446 bp, Homo Sapiens
  misc_feature (407)..(407): n is a, c, g, or t
ttacaaccccacgatcaccttaaatacgaccagctggtcatccctcccgaagttttgcggtaagtgcctgttagaccccagaagccgcatcaatacatcttcgtgcttccaaagggcttggttcagtcccatgaatgtttaaggcttgatttccaaatgtgtgcttggctagatttggctcagaaatctgcggcatcgacaaagatccgcagcaaaaggtgctaactgctgactcagagaaatgaaatggcaaaggttgtatacaggacgggatgttttcctcgcccaccattgcaaaacggatttaaaaaataagccctaacatggcaacggccgtttgttgccttggtgtttaccgtttttgcttttgagcagaaaattaggggaatttcccaggcgtgtggatnacgctgtgtacagaatgaagtgttctcagggacgtcacg

SEQ ID NO: 12158 - DNA, 364 bp, Homo Sapiens
cacccaggcgcacttctcaacattcctggtcaagacagacctcttaaaatcatgggtaaatatccaccgactgcctcctagaagcccgcactgtgctgcacgctgctggggaatactgaggaggggatgtgaaatgtctgtatgtgacccaggacctaactgtggaatggagtccaattctcagggacagagaaagtgctccggtgtgtcctgctggtggagagcacaatcgtcactggagactggaagagctcagggcaggctgatggattattcaggagaggcttcataggggccaggggcctgagctgggctctccaggggtactgcatgggtcccatgggtcaccgaagctcgaattcgt

SEQ ID NO: 12159 - DNA, 241 bp, Homo Sapiens
atgcaacacaccaggaactggactcctgcatctctcccgaatgactaatgccctctcatttctgggcctctgtatttgttactcctattgatcaatatcctctcttgtcctcagtacaaccaactctgaagccaagggaccacctttgcacatgagagacagacatcaggaagcccaactgatcaatatgaaatcagtcatccacggccgggcgcagtggctcatgcctggaatcccagca

SEQ ID NO: 12160 - DNA, 167 bp, Homo Sapiens
ctaaagcacacttcaacaagacaattagatctctgtccccgtgggatcatgcattctaatggaggagcagacaaaaaataagtaaacctatttcaagttgtagcaaggcgataaagggtataatgagccaagatataaaacacaggagagaggcaactttacatcag

SEQ ID NO: 12161 - DNA, 420 bp, Homo Sapiens
agaggatcccttgacaaccacgatcacccagtgggtttctaggacttcttgactctgtgtctgtgttcttaaccaggggtcatcagctttggcccatgagccaaatctggcctactgtctgcttttgcaaataaagttttattggaacacagctgtcttagtctgcttgggttggtgtaacagaatatcatagactggatgtcttcaacaacaggcatttatttcttacagttttgaaagctaggcagtataagatcaaggtactggctgatttggttcctggtgagggtacactccttctggctgcagacagctgtgttctcacgtgtcatggagagagagctaggtttctggtttcttcttagaggacactaatcctgtcatgagggacctaccctcatgactgcatctaagcctgat

SEQ ID NO: 12162 - DNA, 267 bp, Homo Sapiens
cacccaggcgcacttctggtaagactgaatttgggattttttataaagagggcatggagtaattgaatcctggaaggaggaagggagcttactgcttgggaggagaggagatcttgtagattatgagaactgtggacggtggtattctggctgaaagttagtttcctgctttctagagctaagctggctaccacttctagtgctttaaagcaggctggccaccctttgactgtgttatctagttgtatagagaagtgcgcctgggtg

SEQ ID NO: 12163 - DNA, 460 bp, Homo Sapiens
ttacaacccacgaatcacaggttccaagcacaaccatctgatcctttgagacatagacacaacaaatgaggtcctcaggggtgcatagtatctcatggtggccaggcctggtgttgcctcaatctcatctagtaaagtctgggtttaggccccacagggccccagacagcacatcttcttctttaagatggtggaccatcccagcactggccatctcaggcaccaatagccaaagaattacagtgctgggagtgatctttcactagggtgcactatggccaagggagtctctcagggcctgggacccacctaggccttcccacccattgttcccaggggaaagggaaccaggcaaaatgcccatggccttgagatggggctccctggtggaggcctttgctagtcttgcccagacatggctgccaccagcctcttgagccacagctttctgtacgggacc

SEQ ID NO: 12164 - DNA, 181 bp, Homo Sapiens
tttcagctgatggagaattccaggcaagcggtggccaagggccagagtacacccaggctgttctccatcaagcctttctacaggcctctggggtcagtcaactcagacaagccactgactaatccgagaccaccttctgtcgggggacctccagaagtgcgtcaagggtggtgcccagtac

SEQ ID NO: 12165 - DNA, 272 bp, Homo Sapiens
ctgagccaccttggctgacaataataaaaaattttaaagcaaaactaaagatttataaattgtaaaatgcggttgtaacaagtatttactgtaccagtaaatatgaaaaatattaatgtcctcacacacggaggtggcttgtgagtggtgtgagcatttcatggtcagagtttggcagttgggcgagagacaggatggatattaactcgaaacatcgcagacacaaaactgaaaacactgatgcggtgcctgcaccgttgcctcctttcctg

SEQ ID NO: 12166 - DNA, 301 bp, Homo Sapiens
  misc_feature (142)..(231): n is a, c, g, or t
cgcacttctgcacccaggcccacttctccaggctctgctctgtagcacacccttgggtgacccctcaccccaggcgcacttctggctgagccaaagcaggatcccattcaaggcattccatcccatatatgactgaaagggnnnnnnnnnnnnnnnnnnnnnnnnnnnnnnnnnnnnnnnnnnnnnnnnnnnnnnnnnnnnnnnnnnnnnnnnnnnnnnnnnnnnnnnnnncagttaggaggaaagaagattgatttagagatggtgaatatatcactgtgctaaacagaataagtgctcc

SEQ ID NO: 12167 - DNA, 248 bp, Homo Sapiens
cacccaggcgcacttctggagaacatgatcaccctcaccctggacttgacgtcaactacccagtcttctcccctctcctgttaataaaggtctgtgtgtctgtgtttgtctaccactctcttccctatttctctgtggcaatcaagctccaaaacagcgcccagtgaaccttgcctcctggtatttgtgcccattgcattcctgcaccgaataagctaacgcgtgtatgaccaacaggacactacaga

SEQ ID NO: 12168 - DNA, 376 bp, Homo Sapiens
actcaacacagatgccggctcaggaggcatctgcatctatagggggttcgctagtcgcaaacaatcatatctacatccactaagggggatggagatggggcggcagggcctggcctggcctgtgcctggcgacggtggctgtcaccgcctggatggcgaccccgggagcagaacagttaatacagctcaccggcccggggacggaaactgtccctttcgctattgcttttggaaagagcccaagtggaggcctgtattttggaatactcatgtgataccttctcatttcataggcaatggggcttctatctgaggcatgggtcccagctggtaggacggtaaaacccagctgctatcctagactgagagcctgagt

SEQ ID NO: 12169 - DNA, 1237 bp, Homo Sapiens
gggtccggaattctcgggattggactaaggactagtgtctgttggcagcagcattgtgcttctccagcctttgcgtattgtggtcactcattttgttgtacaggaacagctttaagaactatgtcatcactcccagaatcttctgcaatgtgtagaaaagcagcaaggactagattgcctaggggaaaagacttaatttactttgggagtgaaaaatctgatcaagagactggacgtgtacttctgtttctcagtttatctggatgttatcagatcacagaccatggtctcagggttttgactctgggaggagggctgccttatttggagcaccttaatctctctggttgtcttactataactggtgcaggcctgcaggatttggtttcagcatgtccttctctgaatgatgaatacttttactactgtgacaacattaacggtcctcatgctgataccgccagtggatgccagaatttgcagtgtggttttcgagcctgctgccgctctggcgaatgacccttgacttctgatctttgtctacttcatttagctgagcaggctttctttcatgcactttactcatagcacatttcttgtgttaaccatccctttttgagcgtgacttgttttggccccatttcttacaacttcagaaatcttaatttaccagtgaattgtaatgttgtttctcttgcaaattatacttttggtttagagagggattaggtcttttcaaaagggtgagaacagtcttacatttttcttttaaatgacatgctttacagaatgttggtaatgccatgtcatttaaagtatttcatagataattttgaggtttaaagtccatggagggtgattggttctctttacacattaacactgtaccaagctttgcagatcttttccgacacacatgtctgaagacttattttcaaagacagcacatttttggaaactaatctcttttccgtaatatttcctttatttcaatgattctcagaaggccaattcaaacaaacccacatttaaggttctttaggattatagaataaattggcttctgagtgttagctcagtgagctaggaaagcaccaatcgatatttgtttcctttagggatactttgttctcaccactgtccctatgtcatcaaatttgggagagattttttaaaataccacaatcatttgaagaaatgtataaataaaatctactttgaggactttaccaagtaa

SEQ ID NO: 12170 - DNA, 633 bp, Homo Sapiens
  misc_feature (91)..(136): n is a, c, g, or t
  misc_feature (261)..(308): n is a, c, g, or t
aatagttattgagtgttctacagcttacagtaaataccatagttacaaattcttggcttcaatctttcagagtgatcactgtctgatcttnnnnnnnnnnnnnnnnnnnnnnnnnnnnnnnnnnnnnnnnnnnnnnccagatttacacttcatacacacaggcaaggccatggggctttccaatctttacactccggactgtgttttgaaaacacctataaattctctgatcaaactacttggaagacactggtcaaaggnnnnnnnnnnnnnnnnnnnnnnnnnnnnnnnnnnnnnnnnnnnnnnnntcttttaaaatgtgagttccaataaaatttaaaaattagattccaacctgtagattaaaatgaattaaaaaatacaaaatcatatacaacgctctcttcacaggggatgttacatgccatgagaacaggtttctctgtcatgtgatatgaaacagggaagcagatgcctttaagtcaggatggggacaggcccttgggcctttcaagattattacagacaactccaagtagctagaggcctggccttaccccccctgggtaaggaggagcttgagtcacaccatagatccagactatctggctgacccgaggaagaaaaaggggt

SEQ ID NO: 12171 - DNA, 506 bp, Homo Sapiens
tgttttgtttttaacattccaagctctctctggtcccctatccaaggagaaatgctagggcctcgaggatgtcgctatatatttttataactaaatgataaatttatattcaaattgtttgaatacgtttccaaaactttcagagtacaagtcattgttaagtttgcctttactttaaaaactaaaagaatacatttctatataaactagcagtcaggaatttgcctgttttctagcttcttcatctatctaaaatatatatttagctaccagaattatggtactcctaataaaatacttaataaatagcatataaaatcaaagtttaaaagtaaatgatggcagtttgccatactaaaaagataaagaatgtctaaaattataggaagataagatattagccctcatagaacttaaacttttagaaattctgaataaggaaatatattctacatagataaggtgtgaaacactcagctttctaaagtgaaataattaaatagtat

SEQ ID NO: 12172 - DNA, 659 bp, Homo Sapiens
gatccccttacgatgtcgcgtgccatgtagacgtcacgaagagatatagcgatggcgtcgtgcagatgcagcacgtcgcacacagacatggggaacttggcatgacgtcacaccgagatgcagcaacgacgtcacgggccatgtcgacgtcacacatattaatgtcacacagacgcggcgatggcatcacacagacggtgatgatgtcacacacagacacagtgacaacacacaccatgacaacgacacctatagatatggcaccaacatcacatgcacgcatgccctttcacacacactttctacccaattctcacctagtgtcacgttcccccgaccctggcacacgggccaaggtacccacaggatcccatcccctcccgcacagccctgggccccagcacctcccctcctccagcttcctggcctcccagccacttcctcacccccagtgcctggacccggaggtgagaacaggaagccattcacctccgctccttgagcgtgagtgtttccaggaccccctcggggccctgagccgggggtgagggtcacctgttgtcgggaggggagccactccttctcccccaactcccagccctgcctgtggcccgttgaaatgttggtggcacttaataaatattagtaaatccttcaag

SEQ ID NO: 12173 - DNA, 520 bp, Homo Sapiens
gggcccctctcttttgggacagtttttgcctcaagagcctgcagaattttttccatgacttccgggagattgaggtggatgtgtacatggcggcctgccacagccctgtggtcagccagcttgaggctgggcacttcttcgatgcatccatcaccaagaagcatctctttgcctctgtccatgatgctgtcacctttgccctccaacacccgaggcctgtccccgacagccctgtttcggtcaccagactctgaacatgctacatcctgcccaagactgcacctctggaggtgcagggcacccttgagaagcccctcacccctaggccgcctccaggtgctacccaggagtcccctccatgtacacacacacaactcagggaaggaggtcctgggactccaagttcagcgctccaggtctgggacagggcctgcatgcagtcaggctggcagtggcgcggtacagggagggaactggtgcatattttagcctcaggaataaagatttgtctgctcaaaaa

SEQ ID NO: 12174 - DNA, 847 bp, Homo Sapiens
  misc_feature (256)..(267): n is a, c, g, or t
tttaacttggtgtgggtggaatagcaagtttctgatctaaaacaagtaatgcattgcttctataaaggtgacaacatgtaaggcagttcaaagaatgctgactaaccaaacgaaatgcagttattggattatcttgctattcatatcagcttaacttgttattacgcattgctcttaaatctgtacagcactccatttacacagagtaaccccactcttgattaatctgttctaaagtgccagtattatttacacnnnnnnnnnnnnagccaaaagtctggccagttgtggcatcaggtgaagatgtcatcccagctctattatcatttacattcaccaagggaaattctgaaaattcagcacttgtccctggtccccgaaggttcacctgtccattggcagtgctaaattgagtagctattccagctcttgatacatgatagggagcacggaaaggctgattcaaaggagctcatttggtaagcttggtggacaggctgggcctcagctttcttctgagaagtcacttgatccagaaagtcctgtgttgatgtggcagaagcatggtttgtctcatcacctgaaaagggaaatgagtgctgtgaatcaccaactattagtccaaagtgggacttatctggagttgttcttagtggagaattcattcctgatcgaaagctattgatgggcatggtggcatagacctgcttgtctatggaagagaatgctggctgatttgggagggtctggttatcagtcacaaagttaaggctcgggctattcaaataggcatcattttggctagttctgtccaagcctgctgcagaaacttggagtattcctgcac

SEQ ID NO: 12175 - DNA, 519 bp, Homo Sapiens
gtggggttagattactcatctgtccaccaagtgggacatttgcatggactgggggcttaaaggacttagaagagacctgtaagtaaatcctgaaaatgagccaatccccacttgaatggttactggagtaaacccacctttaccaccccaattacagcacccgaggccgataaaccaacttggctctggttcatttttcttttcttcatttgtgatgctcagattcaaaatgtgtgttctacactgttacaggcttctcttttgtttgattaaagattttagtcctacttttgtatggacacattagaatattcagagaccaaaatagaagaatttgctgttagatatttttcagaagtcagcagatttgtggcaaatcatttatttgcctttttaaaaattcatttaagcagttcagagagtagactactcagaaaattatttcacgtaattgtctaagaggtcaatattttttaatgcatattgaatcaaataaagtgctctaaagaaattattata

SEQ ID NO: 12176 - DNA, 483 bp, Homo Sapiens
tcgttagcctaaaaccaactctctctaaatttaaaagagtgattatttatcttagtatttatagaagtatgagattatcagaaggtgcgatgcacaatgctcattattttatcctagtacaagacacgtataacatctaacagtaaagaagatggaatctttctataaaaacaattctgttattaatagttgactgacttcagtaactttgaggagtagaatgaaacttattaggcaagatctttccacatacactacattgtattgttcaaaattcatagaaattacttgcaatatattgatttaagccttatgtagtgactgttgctatatttgaagtagcatttttagtttgctgtttttcctcactgcttaatcctacaaaaaccagccatctgcctaaaaaataaaagagcaaaaatgaatcagtgcaaccggtatacgaaaaataataattattaataaaactgtaaagggaaaaaa

SEQ ID NO: 12177 - DNA, 475 bp, Homo Sapiens
aaactgaaatctataattttaagggcttaacctgtgactttaataagctggaacagtccactgaatgggtataatgaattgcagtatatacgtatgattgctttttaagtgattatcttttcttctgttaagtcatgtaaattcataaatccttttgcactgatgtgttgaaccttattcttgtacattcattcaatcaaggcaaacttttataatttttcttttgtttccaatgaccttgaaatgttatagcatggtaatattctatgcaactatagttatactttttggtttgacactgtattttttcacattgatttactggttgatgatagattttataacctaacggttctcatgcggtgcgtaattgtagatgcatgtacttgtgtgttttgtgtaattattgaagtgcaatgatgtataaaaaagtggattcacctgtttttaaaaataaaacattgataaaaggtga

SEQ ID NO: 12178 - DNA, 166 bp, Homo Sapiens
gagcgagggaagaaaaagctgtatgcatttcattgctgtctacaggtttctttcagattatgttcatgggtttgtgtgtatacaatatgaagaatgatctgaagtaattgtgctgtatttatgtttattcaccagtctttgattaaataaaaaggaaaaccagaaa

SEQ ID NO: 12179 - DNA, 1426 bp, Homo Sapiens
gggctagccccctccacgtccctcctagatctacagctgcccctttgatgacagcgccattgagtcccctgggctgggggggtcatgcaggggtgaggcagctgcctgccgccggtactcattgcctggccaggcaggacacaggctggcgggcactgagagtgggccccacgaaatccattgtcaggttaccaggatgaagaacccaggctggtcgtggagtgcagggcggggcctgccggaagaattatgggcactgcagcaggagggcagcctgggccattagctcctgatgtcatcgatttgggtgaggggacagggaagtcagaggaagctggccagtggctcatcacgaagacttacagcagcggagtggtgcctgattcctagtacagctgctcccactgagtctccagggatctgtggttcaggaccccctgcaaaccactcccagacccctgtactggtgggaggagaggacctagaggaaaggtgctgggcagataagcagccgagggaggccctgggtttagcttatcagtcttctgggcccctcctgccccaggaaagggcagccgaaggaccatggtgttgcccctgtcatcgttatcgtcctggccatgagcttgcaggactgggagggccggagtcagccaggcagacggcagcacagcatttgcctgttggcaggtggccttgagtggcttcccaaaggcaatcgatccacgcagaacaaaactcactataatgaggggtgaagcaccttggatcacatgttgagttcgttaattccagcagtctgtttctaagggaaacatggctgcagcccgtcctgcccctccacccacccaccaggtgcccagtgttcccaagggccccgaatcccaaccttattcaggcgtcagcatctctgcaccccaaatgcctgttagggaggatagtgaaggctgagccctcctgggctcatcaaaagccagcagtgagagaacacccccatctctctgaggtgaccttgtagggcagtccgtgctgtctggctggcctgggtgaggtgggcagggaccaaggcctggcgcctgggcctcgctggccttgctctgcgtgctgacttcatcctgatagtaccttgattttcctactgtgacttccccttctgtcgacttcctcaccaactttaaaattccgtattgagagcagtttcctaagttacctcaaatcctattcagaagaaggttcttcctggaagttgggagggcggaaaacaagtttagtcacagaagactactccatgtttgagcttctgtttcaagggaagtgagtaactgccggaggagccctgcccctctgcagtgtgtggtgttgccctgatacttttcagattgaggtgttacttacatgtaataaaatgcacagacttaagtggtaa

SEQ ID NO: 12180 - DNA, 499 bp, Homo Sapiens
ctgcactaagagaaattgcactaaatgaatctcgttcccaaagaactacccccttttcagctgagccctggggactgttccaaagccagtgaaatgtgaaggaaagtggggtccttcggggcgatgctccctcagcctcagaggagctctaccctgctccctgctttggctgaggggcttgggaaaaaaacttggcactttttcgtgtggatcttgccacatttctgatcagaggtgtacactaacatttcccccgagctcttggcctttgcatttatttatacagtgccttgctcggcgcccaccaccccctcaagccccagcagccctcaacaggcccagggagggaagtgtgagcgccttggtatgacttaaaattggaaatgtcatctaaccattaagtcatgtgtgaacacataggacgtgtgtaaatatgtacatttgtctttttataaaaagtaaattgtttataaggggtgtggcctttttagagagaaaa

SEQ ID NO: 12181 - DNA, 646 bp, Homo Sapiens
  misc_feature (130)..(188): n is a, c, g, or t
ggaagtggcaggggaggtgctgctgctccagcgtatgggatgctgggaggagggccagatgtcactgtgacctctcccactggcacggcagaaagtcctaaacttctcttggacttggagtgtcgcttcnnnnnnnnnnnnnnnnnnnnnnnnnnnnnnnnnnnnnnnnnnnnnnnnnnnnnnnnnnngatttctcggtaagaatcatctatcactaactccccagcctctagttccccaccagaggatgagtctgattctaccagaataggttcaagccctgaaagatcaaggttagcactgtgggactctgcgaactgggaggcgtcagacccacagccttcagggccaggagatgaatgtgcgtctgaggatgacttgtgctttttccgggctgtattcagaaagctctgtaactcatgtcctaggagtaaagcaccctgcgcatcccgagctgatttctttgaggattgtttcacagtcgcttgttgggagggatattgaaaagactcctcatcaacagagctgcttcccttctcctttggtgacagaataagtttcatttttaaaccatcaggctcccgaagggtcagtgtctctgtgttcacatagagaggtttcatttttttcgatttgtgggagacac

SEQ ID NO: 12182 - DNA, 1147 bp, Homo Sapiens
acttccaaattggcccccattctgttccctctctgtgcttctccactgcttctcagctgccacgctacgctctgtgtgtgtgcccgtacgtgtgtgcatgctcaagagtgtacagttctcagatccaccctccctacaatgaatgaaactctcccacagcccttccctaccagttttgagaatcactgctttcctcatttccacgtctcaggctgcataggagaggaagttcatctgtgtgtgcaccgggctttgggatgctgttcctttgttggagggagcagagcccttccatggccttgggggacatttggaaatgaaaggaaaaggtgcaccccagaggtggggctgtctctggcctggacacgcgctctgtggaccaacagttttgccattgataggtgatcgtggggttgtaattacaaccccacgatcactctgtaccccaggtttctatcaatcaatcactaaaatgggtatcataattcctaagggaattgttatagggaggaacatctgaatttgaggtcctgagttgttgggagccaagacctggacatccatagtcttcagctatgttctgcctatccagggtcgtgtgagttatggaggggaagctctctctgcctttgggcaggagcaaagactgagaggacaagcctgtcccttcttggcatagaggctttgggacacaggagagctgaaatccttgtactctggacaacagacaagatgtacagtctcaagaatccttcttctaatccaatacagttgaagtctctgaacaagcctgagaaggtctctcagctggggaaaaacccactttaatcaatctacaacacaacactagaaaatactaaagaaagaaatatggctctggtgaattggctccagctttcgttcaagactttttggaataaaaatgaatatgaattttgagggccacgcaaactgtggatttgtgggtcaaggaaccacatgtgtggaggacttgaggggggcaaacggtctacagaacatacggcccacctcccaggagcagggagggcccaggtcgcaaaggactcctcctcccctgtgctgcaggtgccgtctcctcacctgttctctaaagcacctggtgatcgtcggggttgtaaggggatcc

SEQ ID NO: 12183 - DNA, 984 bp, Homo Sapiens
  misc_feature (465)..(477): n is a, c, g, or t
ctaagctcacttagaaaagttgggcaccatttaaaagagttggagaacagaccagggtggcttcttgggcacagctggatggtgctggaagccaggcctgggatttggagagaagagtttccgacatataaacccacggaggtcaccagccctccccgcatctactctcctaacagctcaggacagccccgtcacactactgccagccctggtgactcactttgttggcaatttttaaagccctcttcattatgtacttcctactcttcagaacctctgtgataagcaatacccctgccatacagaacgctggatctcggtttactcagcctctccctgtagcgtcacaggctgtgcactcacctaggtgagcccctaagagcagggtttgcttctgcttcacctaacgccacgtcttccctcaaatgtgtggtcaccaaatgtttgcaaaaagggtctctagcnnnnnnnnnnnnnggcacattaagccctttaaaatacttctgacctatctttatactcagatctcacctcgtctcaaaaagttttatggggtaatgcgccaatgaaaggtacagtagtattagtgagttctgaagcttctaattacaaagaccacagaggctggctggtgagccatgcttctcatgctcccttctgtcacactgcagatgtctcttttacctcggcctcatcatcggttagttatctgtcagcaaaatgtagaaaggtgatgggcgtggatggagtcaaaatccaggacaattctgtcataagggtacagtaacactcttctcctttgcttgtttttctcaaagaatgctttctctttcttctccaaagcctgtgctctcagaagaggctgctgcatggagctccggaggatctttggagagccttgtgtaacttgaacgttggcttcgcttatgtgtcatgctttttagattctcattctgaatagtggttgggtgggtataccagtaa

SEQ ID NO: 12184 - DNA, 398 bp, Homo Sapiens
gcgctgctcttggtcttctgctcatggatgacgcaccagtcgtgcatgttcttggtgaagtcggccagcctgagcaagcggaggacctacgccggcctggcattccacgcctacgggaaggcaggcaagatgctggtggagaccagcatgatcgggctgatgctgggcacctgcatcgccttctacgtcgtgatcggcgacttggggtccaacttctttgcccggctgttcgggtttcaggtgggcggcaccttccgcatgttcctgctgttcgccgtgtcgctgtgcatcgtgctcccgctcagcctgcagcggaacatgatggcctccatccagtccttcagcgccatggccctcctcttctacaccgtgttcatgttcgtgatcgtggggtgtaa

SEQ ID NO: 12185 - DNA, 883 bp, Homo Sapiens
gttctagagtatcacaatagcactgactttccacacgggatatcatcgctggtgagtgcatcgtctcaggagcccaagaatcaggagtgaaatagccacttctagtccccttatgtcctatggaaacaacgccttccgcacccctagcacctgccgtcctcactgtaaaggttcatcaggatcgtccaccgggtatatcatacgcttcagatcatgttgcttatattgttgctgcaatgaccatcgttttcactttgctggtaaccacttgattgctgacagctacagtcaatgaacctgctgatgactttttttaatgtagtacaacagtgacagttatgacaggcttaccttggaagagttgtcatttatactgccaattttttggatgaagatgtttttataaacctttcaaaatggtctgcaaacagagcaggaattgcacaattaactcaataatgctgtgtgttctcaagaagctcccttagtgaggccgatcttaagatggccgattctgcccgttgaaggcatcctgggaaagaaaacaagcatcccagcgggcatctcaccacgacttctcctggagtcctcacacggtcactgacaactacagtcagttttaggaactagagtgccgtatcatcagacttaccctgtcctgccccaccttccctgctaacatcgaggtgtgtgcagttaccttctgagcttggaacaagcagactggaattttcctctgctacctcttgtgtataaaatcttgtttataaaatttcaaaaggaagtagatacactagggaagaaccttaattctaaatttggttcatgtgtggcaaagttcttagcttctaagagtataaaataaatttttcaaaaacaaaaa

SEQ ID NO: 12186 - DNA, 124 bp, Homo Sapiens
gagatggagtttcgctcttgtgacgccaggctggagtgtagaccgcgagagggagaaggggaggaggacgggagacggcaggagcctggtgatcgtggggttgtaaggggatcctctaagaact

SEQ ID NO: 12187 - DNA, 716 bp, Homo Sapiens
  misc_feature (60)..(60): n is a, c, g, or t
  misc_feature (217)..(217): n is a, c, g, or t
  misc_feature (486)..(486): n is a, c, g, or t
ataaagggccaggtctccccagtaccaagtcctttcctcatgaagttgtgttgcctcagnctgtttagggaccattgcctgtcttggtcacatgagtctgtctccttactttagtcccatgggcaatccttgcttaatgcttttgttgactcaacgagggcccgaggcattaggttttctattaaggtctctgccccaggcatggtgctctatatcnttggccaaataaattactttccttgaatatccaggaatcttttagtctaaagcaatgaggagttatcacctcatcctcaaactccaacaagatctatgccttagtgttgtttttgttgtctgctttgatgtaaaagcaagagtatttggagcaagaagctgcaatgcgccaaatacacaataggccttttctttatcattcatacgaccatttctggtttaggtgtatgtagttgggccatgttacttgttccagaggaagagactaanagatataagaataattttttagtcctaaatgctgttttgtttactttctgtcaagatatttacccgtgtcaaattcaaactacagtactgtgtaattatgtataaagtttttttatttatttgaagttagactagatatacgtttttaaatttaacatctggctggacagtgttctattaactcattgaatgtgtttcctttgtcttgtgttaataaatattgatgcctg

SEQ ID NO: 12188 - DNA, 532 bp, Homo Sapiens
cctgtgtgacaacactgcacaacagccggatacgctttataccgccaacccccccaaccctgtgtgacaacaactgcacaccaaccagacacggttaaaacagccaaccccaccaacacccgtgggccaacactgcacaccagccggacacgctgaaaatagcaaaccccacctacaccctgtgccaccattgcacaccagctggacacacttaaaacagcaaaccccaataccgtgtgtcaacactggacaccaacaccgtgtgccaacactgcacaccaaccgacacactaaaaacagcaaactccaccccacacgctggcctgactgcagcacctggaaatctcatccagtgcccgtggggatgtgacatggcgcgaagggtgtggaaaacagcgtgtggtgagtttctaacaaagtaaggacatgtacctatggcccagcaaccaccacagcctgagtgtttatcccaattaaacactctcaccaaaaacccagtctgcaagtgtttacatcgctttaccacgtgatg

SEQ ID NO: 12189 - DNA, 270 bp, Homo Sapiens
tggctgattctactcttttgtcatggagattagcagccatcttttctctctcctccatcatgagattgaatccaagaggggcaacaatcttccaaaggttagtgccagaagtaatacattgagttttaactgcctcagtatttctttcaatgtcaactatttcctcatccttttaatctctaaatccttaatgatgcagaagcctcaaaaaggtacagatacacctcatcaccaggttatcttcagataactggaaaatggcaactcaaa

SEQ ID NO: 12190 - DNA, 612 bp, Homo Sapiens
  misc_feature (133)..(210): n is a, c, g, or t
ttacaatccccacgatcaccaactcctaggctcaagagatcctcccacgtcaggctttcaagtacctgggactacaggcacgggccaccacacccagctaatcaaaatttttctgggggggatgagatcttgnnnnnnnnnnnnnnnnnnnnnnnnnnnnnnnnnnnnnnnnnnnnnnnnnnnnnnnnnnnnnnnnnnnnnnnnnnnnnngtgtgagccaccgcgcctggcctgtgcagggttttctttccagtgagttcttctgtctttgcctgattcgcccctttctgagatggagaccatgcgctgtccccatgggaagcatttcttcaccgtccgaggccaggctgtaccttcccttctgagttcctgtggtgcccgtcctggctcggccacaccacttagactggattggaacatctaaactgcgctgtggcctgcttggcacatagtacataggcagaaacattgctcagggagccaggccatttgatgtgagcttctgcatttcttccctcttcacctttctttgggacgtcttttgtcttttgatcttggaagaaagcatctatccatttttccaaagttaactgcgtgatcgtggggttgtaa

SEQ ID NO: 12191 - DNA, 312 bp, Homo Sapiens
cggaagcacactgcaacattaaacagaggctcctgttcatcttgtggtaatgatgggttgtttcatgcttatcagaacccccagcgttttctgagaagtacttcagaatctcattcctcatatttcattggtatttgtggagcctatgtttaatgttgccacgtgtttttatgtcctttttcgttggacttgagtactcagcccagttgttctaatagatgctttgcattttctctgtgctttggcatctgaatatgttctttaaagtttgtttccaagatgctttgttttcctgtgcagggatccggccgg

SEQ ID NO: 12192 - DNA, 319 bp, Homo Sapiens
ccactccagcccccattccagcatgaacagtggagtcggtcggggtccccagagtggcagctgtgtgtccgcgggttcacccgtgagaatccaccacaaggggtacccaccgcgaggcacgacagcttccttcaagctctttctgctcaaacattcatcgcggggcaagaaaagccgtgttgaatctctaccgggccgaaccttgggccttggtgtcagcgcacggcagggccacagagactacagccctggggttccagagccggctctcccgtgctctccagaaatcccagccatagtaaaaagaatctgttttttg

SEQ ID NO: 12193 - DNA, 571 bp, Homo Sapiens
ttacaacccacgatcacgccaatgaggagtgggagacggcctccgaaagcagcgacttcagcgagcggcgggagcggcgggaaggccctgggtccgagcccgactcccaggtggatggtggcctgtcgggggctagtttgggtgagaagaaggagctggccaagaggagcttctccagtcagagacccgtggttgacagacagagccgaaagctggagccgggagggtttggggagaagcccgttaggccaggtggtggtgacacctcccctcgctatgagagccaacagaatgggacgcctttgaaagtgaaaagatccccagacgaggccttgcctggaggtcttagtggctgcagcagtgggagtggccactccccctatgccctggagcgggcagcccatgccagtgctgaccttcccgaagcctccagtaaaaaggcagagaaggaggccaagttggctgctccgagggcaggtgaacagggagaggccatgaaacagtttgacctgaactatggaagtgccatcattgaaaattgcgggtccagccccgaggaggagaagcagca

SEQ ID NO: 12194 - DNA, 391 bp, Homo Sapiens
acggggccggcgcttctggaccaggcgcacttctaacttgttttttcattaattcattcagcaactgtttattgagcacctactgtgtgccaggggctggggcacatcggtgaatgagaacacgaccaccctgggagctgactggcgagggagatcagctcaggggtgcacagtgctgtgtctgatggtggcaaggactaggaagaacctaggacagggtggcagggacatgacagtggggcacagtgtacagggcagagtgagccatgggaggctttggggaggaaatgttcctggcagagggaatggcacatgccaggttcatgagaaatacacggtgtgtgtcagcacagtgaagaggccagtgaggctggagaagtgcgcctgggtg

SEQ ID NO: 12195 - DNA, 407 bp, Homo Sapiens
gtatccccttcacaccccacgatcaccagactgtgcatctggaatctttcttgctgcagaaaagtatgcaccttccagaatcgatggcatatagacacaattatgcgtgttttgacaacggtaagtatgcttctttcagacagctattatacgaagtgctgggatatactgatgttatcatgaagtttatgttctagtcagggaggtaagaaattcacaagtaaataggtaacattaatgtcagttaggaataaatgccatgaagaaaaacctaaagcagcatggaggaatattatgatggcaggataaggtgggatatagggcaactggccaagtgttttagattagagttagtcaggaaggtctctcagaggagataacatttgagtagagacctaagagacatg

SEQ ID NO: 12196 - DNA, 386 bp, Homo Sapiens
gaggatcccccacccaggcgcacttctgggggcaccggccgccgcgcctgcctgagggccaggatcttccgctccagacgctcttggtcaaacgccagcacactgaggctatgcagggcccgggctgatctgttccctgactcccttgcaggggcaggcacaggaggcgccttccctttgggcccagcaacctgtgtgggcacagctgccggcacagggtcaatgaccagccacctctctgtcgtcgtctccaactgctgggctgtcagtggctcccgaatccggaccattacctccagtcgccaccctgtgggccgccgaccatccaggacctcaaggatatcccggacctcacctgctatctccaagtgcatccagcattcacc

SEQ ID NO: 12197 - DNA, 275 bp, Homo Sapiens
cacccaggcgcacttctccaggcgctgctcccacttcaggcggcccctgccagctgcaacacagagacaaatccccgaggcggggagactttcagggcatcgggatgctgaagcctcgcggtccccattcccaagcccaacccgtgcgccgcctgcgcctggcgcagttaatttgggtaagggaagacccgtttggtccacagctggctggaaagcccaggcccccggcgcagcagccccggccaatccactcggcctcacgggccccgacagaa

SEQ ID NO: 12198 - DNA, 405 bp, Homo Sapiens
gctccaggcgcattctgtatcttcagcaactctcggcccagccacacataaacccactcagcctaagctactcagtcgattccctgggaagccatcctcagctacccagactaagtgaggttgtgggtcgcatccatccagggtgctgcacttctcccctagtaactcattgctccatgtctatctgccagcactggatgctccttgagggcaggacggtgcctgtcttccagacctctgtgtcctgtccctagcacagtgattggcccagagtaatcccaagttcatgttgctgaatggctcagatgtgtaaatgaatgagattcagaagcaacccacacagagtgggctccaggactaaaggtgagatcacccagtgtgccttctatgacaggttgagagccg

SEQ ID NO: 12199 - DNA, 556 bp, Homo Sapiens
ggggaagaaaaaatagatctctgtcagacccctgaaccagttgcgcccacagcccctgtagctccggccttccacctccacagaccgacctgtcacccccatagcccacatctcggaccacgtaggagcaggacaaatatgtcctctgtcaagacccctgaaacagttgtccccacagcccctgagctccagacttccacctccacagaccaacctgtcacccctaagcccacatctcggaccactaggagcaggacaaatatgtcctctgtgaagaaccctgaatcaactgtccctatagcccctgagctcccaccttccacctccacagagcagcctgtcacccctgagcccacatctcgggctactaggggaagaaaaaatagatcctctggcaagacccctgaaacacttgtcccaccaactcagaagtttcctaaattggctgctttctctgcatttagtaagtttataaccaatgactcaatcaaagaatgtgcttgtaataggctgctggtttaattttagaatcaaaagttttatattggcacacata

SEQ ID NO: 12200 - DNA, 224 bp, Homo Sapiens
tcttaatgtgtgccagatatttaaaatgcaactccattagtctgtcaaccttctcactgtcattttcagtgaatttattcagaagccgggtccgctgctgccctctcaggttccgcaggagggaagccaggatcgaacagacatgctcttcatgttccttctcagtggttcccactttatgaaatctcccaggaagatcaagaaagtgggcacacattatggag

SEQ ID NO: 12201 - DNA, 489 bp, Homo Sapiens
gaggggaaatacagttctcctgcatatttgagaaaatgtgaagtcctgtcaagacaatctaataaacataataatcatagcctgctgacactaaggaaaaaggacctcattcactctttcttttatgcagtgatttactggtccctactgatttccaaattggatcacgatagtaaattatccatgctggtacctgtgaaagtaagccctgggatccatatttgttttgtgttctgcttaaatcagcaagaatgataaatttgatggtgtgaaattggaagtatcaagggctttctttggtgattgagggaaataatgtctctacttgtaatttattgtgaccctttttcactgtatatgctttgtatgtctaatatttatttcaatgcaaattcaattgttccttcatctgtattgttatatctaagattttattgatgttaaaatctaattgtggaataaaaatctctctggaatttagcagataaa

SEQ ID NO: 12202 - DNA, 691 bp, Homo Sapiens
  misc_feature (31)..(31): n is a, c, g, or t
gcagagcacccagtgctctatacgccggcgnaagagcctgaccactgcgtggtcatcaagtatgtgccgtacgtgggtgacagcaagcgcgcgctggatgagtatacctcggagctgatgctgggcggaaccaacacactggtgctgcacaacacgtgtgaggactcgctgctggccgcacccatcatgctggacctagcgctgctgaccgagctgtgccagcgcgtgagcttctgcactgacatggaccccgagccgcagaccttccaccccgtgctgtccctgctcagcttcctcttcaaggcgccactagtgccgcccggcagcccggtggtcaatgcgcttttccgccagcgcagctgcatcgagaacatcctcagggcctgcgtggggctcccgccacagaaccacatgctcctggaacacaaaatggagcgcccagggcccagcctcaagcgagttggacccgtggctcccacctaccctatgttgaacaagaaaggaccggtacccgctgccacaaatggctgcaccggtgatgccaatgggcatctgcaagaggagcccccaatgcccaccacctgaggccccggtcacacagtttctcggctcttcctccccgctgccccccacgaccctaccttgaaggcccccacaaataaaggcgctgccactcagccctccttccaaa

SEQ ID NO: 12203 - DNA, 476 bp, Homo Sapiens
cactaccagagaccggaacatgaacattttgcagtactgcccctcttccgacatgtggacgctctttgaaacatgtgacgtccacattcgcaagcagcagatggtgtctgtggaagagaccatctacatcgtgggggggtgtctccacgagctggggcccaaccgcaggagcagccagagcgaggacatgctcaccgtgcagtcctacaacaccgtcacccgccagtggctctacctcaaggagaacacgtccaaatcgggtcttaacttgacttgtgcgctccataacgacggcatctacatcatgagcagagacgtcaccctgtcgaccagcttggaacaccgagtgttcctcaagtacaacatcttttcagatagttgggaagcatttcggcgttttccagcttttggacataacttgctggtttcttctctttatctgcccaataaagcagaaacatgactgaattgaaaaa

SEQ ID NO: 12204 - DNA, 411 bp, Homo Sapiens
ttttctaatctaagttcgtttattgagttacagtggtctttagtaaagtaaaacaatttcccaatcccaggccttgtgatttgagatggtaccttagaaaaagttacacgcagttccgtggttgaatatatttgagatggtaccttagaaaaagtttcacgcagatccttggttgaatatagttgagggagcgtagtattgacaattcttcatgtaggaaacctgaaatgaacacagtcacagtttgattaaaacattgtcctgtttgttgcaacagaaaactcggatagttttaacaacaggaaacacttgtaggacttcctttaccaacatactttttaaatgttttgctattggttccatatttatttagatttataagtgtcaataaagcaaacttttgatgcctca

SEQ ID NO: 12205 - DNA, 735 bp, Homo Sapiens
  misc_feature (27)..(27): n is a, c, g, or t
gtcatattatttgtaaaaaagagcaancttgctaaaaaacgcaaagatgccatggggaatacccggcaggagatgactcacatggtgaatgcaatggatcgaagttatgctgatcagagcactctgcatgcagaagatcctctttccatcaccttcatggaccaacataactttagtccaagatatgagaaccacagtgctacagcagagtccagtcgccttctagacgtacctcgctacctctgtgaggggacggaatccccttaccagacaggacagctgcattccagccatcagggtagctgatttactgcagcacattaatctcattgaagacatcagaaagctatgggttcaaagaggaatatgagagcttttttgaaggacagtcagcatcttgggatgtagctaaaaaagatcaaaatagagcaaaaaaccgatatggaaacattatagcatatgatcactccagagtgattttgcaacccgtagaggatgatccttcctcagattatattaatgccaactatattgatggctaccagagaccaagtcattacattgcaacccaaggtcccgttcatgaaacagtgtatgatttctggaggatgatttggcaagaacaatctgcttgcattgtgatggttacaaatttagttgaggttggccgggttaaatgctataaatattggcctgatgatactgaagtttatggtgacttcaaagtaacgtgtg

SEQ ID NO: 12206 - DNA, 755 bp, Homo Sapiens
  misc_feature (485)..(507): n is a, c, g, or t
ctctaaagataaaaatgtaactaagtcttctgtgaaatatcatccatctaatcttgatgctgttgcagatggtggtgacacaagttaattgacaaactactgccaaatggtgcacaatattttgtaaaaagtacccagtagccccatttcatacaatgtacctaaattatgcagtaacttggcatcatcgttccctccttgttgctgtgtaattagtcagtgttgccacagtgtgtggcgctgatggagatgtcagaaccgagaacacttaaccttctttgattgtttttcaagttttaagacttcgatccacccctatgagagcaagtaattgtggaaatatttttggtgtaaaatcattccagagtatgtaatatttaactgatagctgcatgaaagtgagattcgtgttactttggcttttctgtctctgttgacacggttgcacatttccaagttactacagcgtgaaaactgtgtgtttnnnnnnnnnnnnnnnnnnnnnnngagattgtggcctggttttgtaaaagttttaggtaaaattacaattgattgttttaggaatcattattaaaaattttctgcaaatcataaagctatatcgaggtgttgagcttagccactatgcacattgtaattattcattgtggctgtccagttctatgatgcattctggcattttgtaagctgctctgactagcaatatatagattcatttaatgtgttaacattggttaataaatgtatttaaa

SEQ ID NO: 12207 - DNA, 461 bp, Homo Sapiens
gcccaagaagtactcaccaattatgcatatgatgaaaagtttccatcaaatccaaatgcccatatctacttatacaactttctaaagagacagaaggcacccaagatcaaaattgataagtgtgcttaaggtatagaatttttatctcgatgtttgaccagggttgggaatctacattaaaacattcttaggccattgctttctaacttttatagcatctacagaaaatttcaataatgtacagtacactgagataaacagagaaagttggctccagctgccatctccatgtatgtatcatccacgctatcccctgctgcccggatgagactgaggagagaggatcagaagtcttgtgcaaccctggttggaatactctgcactgatattttttgaaaatcaactttattgaaatttagttttcagagagtaaacacacttattttaagtatgtgaaaaaa

SEQ ID NO: 12208 - DNA, 693 bp, Homo Sapiens
tccgccaaatctatgacaaattcccggagaaaaagggtggactcaaggatctcttcgaacggggaccctccaatgccttttttcttgtgaagttctgggcagacctcaacaccaacatcgaggatgaaggcagctccttccatggggtctccagccagtatgagagccccgagaacatgatcatcacctgctccacgaaggtctgctctttcggcaagcaggtggtggagaaagttgagacagagtatgctcgctatgagaatggacactactcttaccgcatccaccggtccccgctctgtgagtacatgatcaacttcatccacaagctcaagcacctccctgagaagtacatgatgaacagcgtgctggagaacttcaccatcctgcaggtggtcaccaacagagacacacaggagaccttgctgtgcattgcctatgtctttgaggtgtcagccagtgagcacggggctcagcaccacatctacaggctggtgaaagaatgagagactcggggagcagggaggggggaagagacgtgtgtgcaggaaacggggacgtggggaggggacctgcaggggcagccccctgaagtgccaagagagctgagaggagcagttgtgactctacccaggaacaaactgtgcctgaacctgaggtgcccaaccccaaataaacccaagatgctgtgta

SEQ ID NO: 12209 - DNA, 416 bp, Homo Sapiens
  misc_feature (128)..(128): n is a, c, g, or t
agggtcagttatacaatgtgaactctttatctacgggaatgagaatggaggatcattgaaggccatgatataaacaaatttgcatgttgaagcctgtataaaacatggtacagtgagtgaatataccncccatccccaagaacactttatacatattaaatggatatatgattactgtgcaaaaattcattctggaaatgaacatatatttgagcactaatatgtaatgtacatcttctgccctaaggagaaaataaatcataaaacttgttttacattcaaaattactttcccgagcatgtcttagagtaatctacgtgttgatgtatgtaaattgtattttaggtaggcaaagaaacaagtctggttatttatgtaaaaactagtctaataaagtgagtggctttatccctttg

SEQ ID NO: 12210 - DNA, 513 bp, Homo Sapiens
actgcaattgtggtcagaattacagtatgcacaaagaattaattagcattattaaagagtcctcactaaacatttcatatgatcacactgaagaactgtaacattccatagagtgaagtggttcaaatttctcttggaatttttacttttgttggccttattttatgatccttttcatatttcttttgacttagagtattaatacatggccaaaataatttagttactacctcatacaaacaatataatggttactacacatcacaggaacttagttttggtttaagtcatttttgattgcttttttccaatggaatatgtatataccaggttttagcaaaatgcacacttttggctctttttggtatatgttctttatattttaatgtgagtatatacactaagaacaaactaaattgtgatttatgatcttcatttattttaatggtaatggttttaaaatatgttcctgattgtacatattgtaaaataaacatgttttttaacaaaaaa

SEQ ID NO: 12211 - DNA, 382 bp, Homo Sapiens
accacctcttcagctgggatgtggacggtgaccccctcctccccagcccaacctcgggcctgcgtctgaggtggcccaggaccccaagctgcagagcccagggaagagcagctccagagccctggccggggccgcgggatatcaatatcaggctgccccactccacgttccccagcacatcccaggtggtgggagcagagggtaccctgccccaccagggtccttagggatgctctaggccaaaccacagtttgtaccaaaaaccttgtgaggaggtgggggagccatgtctgtgctcaggaaaagggaaggggatgggggtggctagtaggctcctggcctctttggtttataaataaactgtgtctgtctttgagaaagc

SEQ ID NO: 12212 - DNA, 811 bp, Homo Sapiens
tggaccattgacactcataatatgcccattggaccacagttaagatccagcctctctcacctcttcagtgtctgagtgcatgagtctgcacctccagggaggctctgtgcagtactcaccccctcgcgtctgctccctccaaggtgtgggggtgggcagtgctcagggcctcctcggagccaaaggacagcatggccggcacagaggaaggggtacctgggctgggtgcagggccatcccactgcccttgagctgtggctctggcaggaaggaggggcagcccatccctcttctccctcctggggattctggggaatgggatgcaacttaagacttctgcctgagaagcctcctccctgctgcctccagggggcaccaaggcacaagcctgtgcagtaggggcgggatgggggtgtggaagagcaggtccaggctcctagcacaactggcctggggccttggcacctctgtaggccctgcctgtgcctgtccgctggcctggggggcctgggcttatctgggccttctcactcagggactctcttgacgctgacttgcccccgcagtggtggccagtgctgcctctgctccaagctgcccctgcgctgggaggggtgggggcggtgccattggtctggtgcagcatagccctggccagtggcctcatccccagcaggcctcccgtgcctctgccagcaaggaggggccggccagctctgcttgcacagggggccccatgtggggtcagcgcacgctcatgtcactgagttccagccgcttttagagtaaagtcgtttatcatcaaaaaaaa

SEQ ID NO: 12213 - DNA, 1738 bp, Homo Sapiens
aacaatatcccaatattaaggtcagtcatggcataaagtgaggcagcctgggaagtggctgctgagaacagcaggggccgggctcgcagctgtggcgcccccaaccctggtggtggccagtgcacatcggctcaaaggtcccacatcctatgtgtgaggtacacactgggggttcctgacaataatgagatcgagctttcaatttttaatgcaatatcctgtctactcactccaatctacctcacaacctttaaaaggacaacgtgtaccttcctttttttataggctgggaaaacattgaaaattaacaaagctcatgactgattgttagacaacagcttaattgctaacattgaaagtctgctcttacagttgaggaaaagtatcaggtgtctgtatactgtttcatgagtaagttacaacagcaattaaaataaacataagacacttcatttttatgtaagaaatttcagattagcataatgggatttatgaaccatgacaattctcttaatatattactcagttataaaacatttttccttataagcccttcaacttacttctcaataatacatccttatatttatgaaaatgttaatattttgaatactttatttcatctttcataatgggcagaaacatactagcatttaataatatttcagcttttcttttcaaaaagaaacaccacaaaataggtcactgagaactttttgctgccaagatgaaaatgattatttgtcacacgaatttaataagttttagaagaaaatatatatatttccttgatctatttccttctgaatttaaaccagcatgtaaagattataaaaaatagtctatttacatggcatagtatacctcagtgatatataaacaaggccataataaagcacagacacatccgactcctacggacacagctgagcagagtccacagacacaagagctaccgccgccctactgcacgttgtaggaactggcgaaatcctagaggaaatccaacacagaaaattcaatgataatattggccaaatttgcctgaaatgtcaacaattttataaaactattaaggtatgtataactaaatccatgaaattataaaaataacattggtacgtctgtgagagggtgtgttccgggtagaggtggagagctacgctgaagaggacgcctcctgcctgctgcgcgctatgtcatcgcctgaggcctcgtcccatcttccgtgaggtcataccactgggtccagcctttggcaagttcttcagatgccagagcaaccaatactttgccaaggagccctttgtctttggacaggaagccgccgctgttcttcacggcaacgtcaagcgttctcctctggacttctggtaacgaaacactgaaatcaaagctttgatcaaacactggatttaatgttttctttgacacgtgtgttttcctccttcctgaccgcctcttgtctggtaataaatacatgcggacataggggtcagagccgtcttcagagaaggcaatgaggtttctgcaggcatgcacgaccacgataagcttgtttctctgcgagctgtgccggatggtcagctggatctgccccagtggagactgtcccagggtcgtcccgttttccagctgcctcagcctttgccgcagctcctggatggcgatgggcagcgagatgtccgaggcgataatggcgtgggctccttgagaagtgcgccttaatgcgggccag

SEQ ID NO: 12214 - DNA, 453 bp, Homo Sapiens
tcatgtatacttggatatggcggggggagggctgggactgtttcgtttctgcttctagagattgaggtgaaagcttcgtccgagaaacgccaggacagacgatggcagaggagagggctcctgtgacggcggcgaggcttgggaggaaaccgccgcaatgggggtgtcttccctcggggcaggagggtgggcctgaggctttcaagggttttcttccctttcgagtaatttttaaagccttgctctgttgtgtcctgttgacggctctggccttcctgtgactgactgtgaagtggcttctccgtacgattgtctctgaaacatcgtggccgcaggtgccagggtttgatggacagtagcattagaattgtggaaaaggaacacgcaaagggagaagtgtgagaggagaaacaaaatatgagcgtttaaaatacatcgccattcagttcgtta

SEQ ID NO: 12215 - DNA, 408 bp, Homo Sapiens
  misc_feature (218)..(232): n is a, c, g, or t
  misc_feature (253)..(302): n is a, c, g, or t
gacgagccggcaccttatacccacgacacaggtagtaactgggatttgaatgctagccatccagctccaggctccatgctcataatcgtaaggtgtaactgcttctcagcatggagagatgcctcagggctctgaggtcagctgtggttcaaaaacaggctcacaaagtaacaaaaggaaaaaatccatcaattgaattgcatcagaactaatatacnnnnnnnnnnnnnnnggagagtggactctcacttgnnnnnnnnnnnnnnnnnnnnnnnnnnnnnnnnnnnnnnnnnnnnnnnnnngtgtctccggggtcctcggggttcagcttcccgagcagccgggatcacgggcacttgccaccacgccgggctcacttgggtatttctagtgatcggggggttgaag

SEQ ID NO: 12216 - DNA, 395 bp, Homo Sapiens
ttatcaacccacgatcacaccatcagaaacactccatgtttgcctctccttttatcccccaactatgtcctgggcctcctaggggaacacagactcagccccattagtggccctagatctgaagcctgcagaactttgttgcagagggaaggaaacacaattcctccccactggctccgagttggagctgagacacaaagtgaggacacaggaaaacccactccatcctatcactgcttggatgtgacgaagtggcttgtagtttacccagggggcaacacatgccttcagggtaatgattttaaggcaggatgcatttttaaatcacctggggaaacttgtcaaaatgcagatgttcaggactcagtctcaggctctgacttaataggtctgag

SEQ ID NO: 12217 - DNA, 557 bp, Homo Sapiens
tttcactctaaagatactttttatttaaatattttatgatgatacatatacaaatataatcttccaaaaaacaaatgtaaaactaatacaaatcactttttcaggaacaaagaaaatcatttagaaaatgtgattatgctaaaagaggcaggttaggtttccaaggctgctcaaggtggaagcttaagaccaacttttgtttgagtacacaagtgatatttacattttcatatactagtgatatacctgttgcatacttggcaaaataaaactgatagtaagtctataataataaaagaaacaacaattactaagtaaacaattctagatgatggaagagtaacctccatttaagctacagacttagatgtctaaaaatatgtgtcctgatctgtacacagttagtgggagcacactatagaaatcctttgcatgacaccattcaacaatattttttaaaatctacaaaattttaaagtttcacttccctagcaaaatatcttcagtcaagaaattagtctttgaaaattatgaaaattgttgtgggaaatatttcg

SEQ ID NO: 12218 - DNA, 445 bp, Homo Sapiens
  misc_feature (221)..(230): n is a, c, g, or t
tcggccttacatttccacgacacacaattattacaattacatctgtaagaactgttactgggaatatatctctgaaacagtctcatgcattgcaggggacatttatcttttttaatgatcatcaacacgagtgtctttttgtagctatataagtgatttttacctccttctattaatatcctcttgcatgctttagaagccaaaggaaacagcccccacannnnnnnnnncctaaagcaatggtttcagttaagccaggcccatggcatctttggagacagaaagctaccctttccattcacggcaacatgacattcacaatgtgctttcctaaatggatggaaaacccctcaaaaaagcccctcaaatctgtgtttcataaactgtactcttagcaataaagtttattacagacctaaagtatctgcataaacccggttaattg

SEQ ID NO: 12219 - DNA, 533 bp, Homo Sapiens
atgagccaatgcccccagcctgttccagccatttttaatgactgtacagtattttggcttatgagtatatcaatatttgtaactgatcccctattttagacttttttaggtggcttctcatttttcatgaatcagagcacatagactgaaaaaccccgcctttttaaaaacagcacttctcattgggaccccaccaaatgcagaggcgtaggcccttcagtttgaaggaaactgagcaggcagtgtgccaggccctgggagacagtgggaaggtatcgtccctgtttatcagatgaggatgccgaggcagagttaaggaagcgaggcatgtgagcacccaggagtttaaggcaggcctgtgctccgaacgtggcttcctgcacacagccccgcccttctgcggccagtgccacacatcacacctgaagctccagctctctggtccccaggcctgagtcatctcccttgctcccgctccgccaggctctgctcctgaatgactctcctggggtccgctgtctaaaggatccgta

SEQ ID NO: 12220 - DNA, 441 bp, Homo Sapiens
cccaccaacactatggggggctgttcgctggagctgaagagaggtctccaggcctaggaggcggtgaaggggggagtcacggagtaatccaggaccatcagtatactccaacagaatgtccagcagcaaccagcacagacaccacacgtgaagtataactcagaagcagtagcaggactgatgaccaccatggcactgaggagccaaagcaggacactaatgtcaaaaaggcaaaaaggccaaagccagaatctcagggaatcaaagccaagaggaagccaagtgcatcttccaaaccttctttggatggagatggagaaggtgccatcctctccccaaagtcagaaacctcatatctgtgatcactgtagtgctgctttccgcagcacctatcacctgcggagacatgtcctcattcatacaggcaaaagtcctttccag

SEQ ID NO: 12221 - DNA, 400 bp, Homo Sapiens
cgtaacacagggttcaggggtgtcattaaagacacactttttttgccttgacctcagttggtttgttttgccttaggctattccacctctcgatcacaagagctgctgctataacttccagttttacatctttgtaaaattgtatctcaaaggcagaaaaggccatttcgtctctcatttgttttatccatgaagaagatttttaacaaaagcctccagaagatttcccctcagtttccattgacttagatcaggttacagagaaaggcaatgtctgacatttttggtctctgttagaagtagactctgttgaaaagaaagaagctaagctaggtgtgaagaatggaattggaagcccactgccttcccataagaaaggtttataataatttagctcact

SEQ ID NO: 12222 - DNA, 163 bp, Homo Sapiens
cctcaaatgtgtatactttcataccagcttgtaagcttctgagatcaggtatggtatctatttctttatatgcataatagtttgaatatgctagttcttaagttttaaaattcaaattgagccatcataaacgtgggcacagattatggagggggatcctcta

SEQ ID NO: 12223 - DNA, 494 bp, Homo Sapiens
tgtgtcgatctagagatccccgacctagacgtacacaggaagaacttttgagcttccgggcacagcaatattgtgggaagataatatattgggcaactagtgtaagataagggctggctcataaggtttgttatatagattcccctcctgccatctgtgggctgatcagagtctagagattgtattggctattaagaaatcatcctgcccttcttggtagagaaggggagggcagagttctttcatgtgtctgctttttctcacactgtcttcacctcaaaatacatgcttatgctggggtggcaaatttgaggtaacaacactctcaaacccttcaaccatcaatctaaggtgaccaggaactaacttgtagtctaacaaagccaggttcactgacccattttcaatggagggagaatgcacacccagataccatgggggcatctcaccaaaacaaaaggacaaggataggacaaacaacggtggctcatgcg

SEQ ID NO: 12224 - DNA, 302 bp, Homo Sapiens
gtgatctgtccacctcggcctcccaaagctgcttgggattacaggtcgtgagccaccatgcctggcctgaaattcgcttctaaattacctcagtgcaaatacagaaatgtccatggcttgataagaggatgctgaggcatgacaagatgctgagatctcaggatctgggtgataggcggctggaagggctctgtgctatcctttcttcctgtggttgaaaatgttcataatttaaagaaggatgttaaggttcggagtgtaggacttccgaaaacattgcatctccagtgggcattatggag

SEQ ID NO: 12225 - DNA, 402 bp, Homo Sapiens
catgccagggcccccaggcagccagcaccagcccaaaggccacagggctggggaaagctgatgtcctgttaggatggctcccaggacctctgactcaaggaagggtgaccttttgtttcctactctgctgagaaatcacttgattcttcctcaaatgaatcaccttcctgaaccccagattcttctccaggaatatgggggccatcttgttatggggactatcttgttttccagtttcctgcctaccctaaatactttgaggctgaattgcagattttcagtcattttaccttctcaggtaaaagccatgaaagaaacaagcctactccaccagccaaagcacttgcccatttgctggcttcatgaaccgcaggtgggaggtgtttgtgttaaaaaacagca

SEQ ID NO: 12226 - DNA, 395 bp, Homo Sapiens
tgatttgtcagcatctccctcaggattctgctggtctcttgcagagtgaatgagtggcacctgcctctcctatgggtcctttgggatctgagctctgggccacagtctggccgcagccctgaagctcctggcccctctactctcagctcttcgggacagttctctgcctggcacacaaaagaccctcctgacaccagccgacctagacacaccccctccaaagatcccatcggagcccaccatcctgggagcatcacccaaaacccttcctctggcttctcggatttgcatccgaccttcgaatacccctccatcccgcaatttccaaatgagtagtcacccctacactgaggtcctgtctctgatgggcagcccctccccagacctctcagtcg

SEQ ID NO: 12227 - DNA, 406 bp, Homo Sapiens
aagtcctgtctctacccttggagaataccaacacctaacttatccctcagatgagtccccgaatccggcttgcctctggctcagagcagagcaggctgtgtgctgatgacacaccatgccatcagtcaagttacttgcaacagagccaagctgtcagcccagggtccccagcacattcttagaaaaagttaaatatgtgagctctccataggctgtcttgaggaactggtgtttgtgagctccagaaagccccacatactgcaaggtagataaggaacagtccgtttgagccaatcggcaggaacgctgccgtgcagtggagaatgaattctgacgtcagagacctgtctgaattctggggtttgccactgggctccagatcagctgcagggatccccacaaaatc

SEQ ID NO: 12228 - DNA, 443 bp, Homo Sapiens
cacccatgtttcagaaggcactaattgtcgctttgggcgcctcagtgtcataactgtagacatcattcttgggagttgttggggggaaaaatcctagctacttaaggtttctgattgattcttgataaagtgaagattattgtgtgtggtgaatgagttcagtgagtccccatgatgcagtagtttttttaaaaaattagagagtaattatatcttttacggaaaaaagttgttttagtttgtcaggttttccctctttgaactgtttttaatgtttacaaacctcactttagctctaacattttgtgtttagccctcaccaaaaagcacttactgtggcaggaagattttgcagtaacatggagaaatccccaagatcaagtgctgacaaatgttgacagctttagcagcgtactgtgtaataaatactccgaacggtgcca

SEQ ID NO: 12229 - DNA, 744 bp, Homo Sapiens
cccggcctggacactgagtacatatgtgtacactctgagggacactgggcagaggccaggctggagggggcgctcagagtgtcctgagaaccacccggagagcggggattaacgtggaagcagcggagcttctgagggaaccttgttcttgtggctgcccacaggacagctttgaaatggcagcaaaggggtaggaaggaggctgtccccacctgtcctcacctgttcttgtttgtccctgctgctttgcagaaagggtttgatgtgttcaatgcactggatctcatggagaacaaaaccttcctggagaagctcaagtttggcataggggacggcaacctgcagtattacctttacaattggaaatcccccagcatgggggcagagaaggttggactggtgctacaataaccagtcaccagtgcgattccggataaagccactgaaaattcgaaccaggaaatggaaccccaccactgttggtccaattttcacacacgtgagaatccctggcaaagggagcagaactgaaccggctttaccaaaccgccagcgaacttgacaattgtattgcgatggcgtgggctgcgtgacgtcactccggtcgtgtctctggtctccgtgttttccagttaattacatcctcatgcagccgtgatcaagggaatgtaactgctgaaaactagctcgtgattggcatataatggagttaacgggtgaataataaaagtatatatatatatt

SEQ ID NO: 12230 - DNA, 466 bp, Homo Sapiens
caatgacttccgtggaacctcccagcttccagtttctgattctagtggttccatactgagggccactacaaagtgatgccaaggacagacagggaccatcccacttcatgtcagccctcacttccttttctcaatgaagaggtaacttggcacaccaagtatggagtcccttcttctggttctcttccttcaatcgtgaatctgatatgctgctcctcattcagcaaagatattctaaaagttgctttaatttgacttctacagtgtttagcatgatttaatttatttaccaagattgattctgctttacaaaggacccaaatctggttcaaaatatcaaatgaactgctggttcagaatatatcaaaatttatatttaaatgcatcattatttatagtaatattaagcaatgccatatacatatgccaggaaagtaaaactatcaactttgctgtgttagtaagg

SEQ ID NO: 12231 - DNA, 428 bp, Homo Sapiens
tggagagagaaccatacatggaatactaggcagagatgaatggactttagaatgagacactccggagctggattcctggttttgtcacctaccatttgtgaggtcttcagtaagtctctttagtatcattttcttctacagtcacacaactaataagggccaggatgcacattctgatcttggaactctgagtgctgggctgggactaccttgtcttgtagccttattgagaagctagaaactgtgatctgttgggctccattgcccgacttgcacactaaagcagatttgcaagcccttccccttcctcacctgcttacttcataaaatcccaggcctcctccacagagagactgtattggttagctcttggtgtattacagcaactacaacgcctaggtggctacaaccacgatcttataggctgt

SEQ ID NO: 12232 - DNA, 174 bp, Homo Sapiens
ctccattaatgtgtgcccagagtgctacagggattcctctagttaggttaatagagctcgtggcgtaccagcctgatatagttcatgggaaaactcgacctgttgaggggtctctgaccttgctctgagtcttgctgtaaatatctctttcatggttgccagtaaaataaagtt

SEQ ID NO: 12233 - DNA, 138 bp, Homo Sapiens
gatcccacctccataatgtgtgcccatagtcccacagcaggtaaggaaatgagccaggatttgggcctatgcctgtctgatgtgccaggtcaatttcctttgcagaggctgcctttaattaattaattaattaatttt

SEQ ID NO: 12234 - DNA, 398 bp, Homo Sapiens
  misc_feature (249)..(264): n is a, c, g, or t
ctggccccatatgtgtgcccatccataaaatctaaattgtatggatgggctgtaatttagtctaatcagtgtcttattgatgaagcttattttaaagccttgtacttttccagctgataattaggtacttgaagatttgtgactgttacatctcatgaactataggtttattcagaatggaatattgctaccacatttaatgttttttgctttgaaatttatttgctagcaatgttactgtatatgccnnnnnnnnnnnnnnnnatactttctatgacatttaatttttgatatggctcttagaaacacatagctagattttgtggttttactcaatctgttattaatacattcatatttgttgtatttatttatatgtttgggcacacattatggag

SEQ ID NO: 12235 - DNA, 583 bp, Homo Sapiens
ctccataatgtgtgcccagaatatgctcaaaaggcccaagtaggaaatatattagagatgtaggttttcatctatttttttgaaaggctctatttaaatccatacgctctaagaggatacaatgaaacctctcttgagattatcccatttgaaagccagttatcaaaaaaaagggcagtattatgctgaataatacgtagcttcctgaataggcaggactcactagcgtctgatatctaagttggggctcagtggaatacgcaaagctggcggtattttatagaaattacaaagttccacaagaaaagccaggttataggattacccatgttagcagtgtggtcctcttcttgatacctgaggttgttgagggtaatgtatgtgtgcttcttagacccagttcctttaagaaaagtttcacaagcagctaagcatcagcttcacagttcatcatcaagcaattcagaaaagcaactagcaatgcaacttgcaggaaaagaatctgaatgcactaatggaaaatgaatgtgctaccttgttcttacttatgaggaaaagacacaggagtatgctgctgtgttga

SEQ ID NO: 12236 - DNA, 404 bp, Homo Sapiens
ggatttatagcttgacatgtgagctgaagcctctcctcccttctgtcgtattctgggcagacctcaaggtctggctcaatagagcacaagcatgaaaagatacgagcaattccacatagtagagaggtgtgttttataaagatacgagcattctccagaatgtgagccttgtagattcagtgcataaaaccaagccatgatttcctgcagtgatcacagagcagagaagggagaaagcccttttatcacaaaccagcaggaagtctctgtaaaattggtaaggattctggtttaagtgtgaagaaccacattttttggtgtatgtttctgggcccatgggaaggaacagatcatatttgacatacaagaatcaaatgattcaggccaggcatggtggctcactc

SEQ ID NO: 12237 - DNA, 529 bp, Homo Sapiens
  misc_feature (14)..(14): n is a, c, g, or t
ctagaggatcccgnctgctgatattggtggggaaacaaagggatattgctctaagattgattaggatgattgtagctagagtcttgaattctatctgtatacggcagagaaactttatagagtgtagagaggtgagcgaaaggatgcaaaagcactttgagggctttataataatatgctgcttgaataaaaaaatgtgtagttgatactcagtgcatctccagacatagtaaggggttgctctgaccaatcaggtgatcattttttctatcacttcccaggttttatgcaaaaattttgttaaattctataatggtgatatgcatcttttaggaaagatatacatttttaaaaatctattttatgtaagaactgacagaggaatttgctttgtataatgcaggctggctttacaaaagcactgtagcaaatttactacaagtctaaaagtatacatatatgttaatagatatatgtgcaactagatatggacagcagttgtatttttttaaataaatatttttaacaa

SEQ ID NO: 12238 - DNA, 470 bp, Homo Sapiens
cagcaggcccaagtgctgctctgactgaaaactgagttaacaagatgaaatctaaaggatattcacagtgacttcaattcaggaagaatgcttccaaaagagcccagtggggaaatctgacatcacagaagacattaattcagtcactttcaaagagtttgtctacaggcggtttctctgttatcaaaggcatttgaaataggattttacttaaacaataatggaacacaggagtatttaaagtgaagaacactttgcctgaatgtgatcagggcacataagtgacattggcatgcttcatatggcgtgcttggagccagaaaaacttagcggtttattttgtttatatttaagcacagcttaaaaaaattcattatcgtttattcagtgtccgaattgaggccatttgcgaagaaaattctagccctggtggagaattatagaataaagattataaatggttggataag

SEQ ID NO: 12239 - DNA, 432 bp, Homo Sapiens
caaacttattttttaaatcgttgtacatttcttattaaactaagtgcttaattttaaagtattatgttgccatcatatagtgtataaaaatgtataattgccaattgattgtaactattatttatttttaaatgaaagtgtaagaatgctttcctgattcaacaaacttggttatcaaactgtttccttatcctcttttctgatgtagcataaaaattgtcccggtttgagttataactgccagtagatgaccagtcacaagtgaaccacttctcagttgccaatctttgctcatattaaaaacaacttacaaatacttagtttttgtatctaatctctgattattaaaatgtttataaagtttatttttaccaaagagatgcaattcattatcacaaagtattgcataataaattttgtttaatacctttt

SEQ ID NO: 12240 - DNA, 199 bp, Homo Sapiens
atgagccactgtgcctggcccaagataaaaaattgattagctattttagtctgcttcccattttaagttttaaaatctgatatgtattttacatgttctagccagagcttaagtgctcaacagagcagtggccagcagctactatactaggcagtgcaaatctgagttccagacacaattttaagaaactcaggaagca

SEQ ID NO: 12241 - DNA, 416 bp, Homo Sapiens
catcagagacaggatgaaactagttaatctcaaaaggcagcagctgagacatcctgaaatggtgaccacagagagctaatagctaccagctacctacagatttgcagttcataatcccgcatgttgtcaacatactacagcattagccaccacaacttaagatgcatttcacagccaaaataagtctcatttcttttcatgacacatttctctttacatgttaacaccttgctactaccaaggcataattacttaacatgcttcgaggctgtagattccaagtatcttaaaagaaggaactataaacattgcactgaaaacttgctttaaagctttacctgacctgtcagtttgtagacaaacaactgataataagctttgaatggtgctaataagagtaggaattctctctatta

SEQ ID NO: 12242 - DNA, 100 bp, Homo Sapiens
ttttaggtttttggtttttaaaacagggcttttttatggggaccacttggcccaaaatttgggcccgaatttttgggcccccttaaaaaggttaatgggg

SEQ ID NO: 12243 - DNA, 677 bp, Homo Sapiens
  misc_feature (375)..(410): n is a, c, g, or t
  misc_feature (659)..(659): n is a, c, g, or t
agcggccgccgctgggtcggccgggggcttggcctttacttttcccttggccgcgtccccggaggcgttgtcccggcgcgccgctgccttcctgggctcccgggccccggccctgggcggcggcactgcagccggcggcgcggggccggaatgctggtgtgggcccactccgtggccgagggcgccctcgctgccctggcacacgagcttgtgcttcttccagtcctgacgctggtgctccttgcagcagtagaaggagctgcggcaccggctgcagcgcaccagagttctccatcttcccgcacagctcgcagtactgccggtctcgctcgctcgggctcggcccgccgggcacgccgcttgtcattggccatnnnnnnnnnnnnnnnnnnnnnnnnnnnnnnnnnnnncgagcaggagtgggtagcggccggacgctcagccctgaggctgtgggagcggggagagagataggggccgttactgcgccatgcacccgctacccttcgcctcagggaggcgggcacccaaggcctcggccggccgtttcgagtctaagctcgggcacgcgcaagcggctcaggcctcatcgcggcgaggctgagagatagggctgtgcgcgatggcactgggtcagcgccgggctgggagcgagacgncctcgcgcgcgcgaatcg

SEQ ID NO: 12244 - DNA, 506 bp, Homo Sapiens
ctccggccgcagaaccagcatcgggtgttcactgtcgagtctcgagtgatttgaaaatgtgccttacgctgccacgctgggggcagctggcctccgcctccgcccacgcaccagcagccgcctccatgccctaggttgggcccctgggggatctgagggcctgtggcccccagggcaagttcccagatcctatgtctgtctgtccaccacgagatgggaggaggagaaaaagcggtacgatgccttcctgacctcaccggcctccccaagggtgccggcactctgggtggactcacggctgctgggccccacgtcaaaggtcaagtgagacgtaggtcaagtcctacgtcggggcccagacatcctggggtcctggtctgtcagacaggctgccctagagccccacccagtccggggggactgggagcagttccaagaccaccccacccctttttgtaaatcttgttcattgtaaatcaaatacagcgtctttttcactctgaaaa

SEQ ID NO: 12245 - DNA, 370 bp, Homo Sapiens
tcccccatacacacatatacactcacagcctttctggcctcttcccttggggaggggccacctgtagtatttgccttgatttggtggggtacagtggatgtgaatactgtaaatagcttgtgctcagactcctctgcgtggagagggtgggtgcaggaggcagaccctccccccaaagccccctggggagatcttcctctctctatttaactgtaactgagggggatcccaggtctggggatgggggacaccttgggccacaggatactggttgcttcaggggtacccatgccccctgccctcgcctggaatcagtgttactgcatctgattaaatgtctccagaaataaagaataattctgccaaaaaa

SEQ ID NO: 12246 - DNA, 714 bp, Homo Sapiens
  misc_feature (487)..(496): n is a, c, g, or t
agcagtttctgcttaggtgacctagaggtcctcagcagtatcctccacacctatttattgaggtgcacctgctggggattcataatgagaatataacaagaggatctcggtgaaaggccttagtgggtgttttgtgtgaggtggcttgtagctagctacttccctacagatggtagagtattccaatcctctttgtgttagggttcttgcttccagtttgggatgtattaaaaccaccatttcactgcttcccttcctccaatatgctctgcagcttttcttgctgtttaaacctctcgcctcagctttatttatttgtaagctgcattactaactgcccagtgattcggtgaaagctttttactgaaaaagttaacatttctagtcatcccaatcaactggcttttttcaaccaaaattttatatcattctttgtctatcagatacgagaggaaggaagataatacgaagacatgttgaatagtgnnnnnnnnnngaacacaaaaactggggcaagccaatgtgatgtatccctccctgtaagatggcaaatgttttcatttttaagattccgaatgtaaactagtgtgttagaaagcaaaccccccgccactcaaaccagtaattcccttaacccttaatatatttattaaaatactttatgagaacattaccctttgtaggttaaaaatgaggataaaatgctaaactatc

SEQ ID NO: 12247 - DNA, 488 bp, Homo Sapiens
gctccgggcgacaaggggctccagggaaaggatggtgctcggggcaggccaggtgctccagggtcaccggggctccctggtcagattggcagagaaggacggcagggctgcccaggagtaagaggattgcctggtaccaaaggtgaaaaaggggacattggtattggcattgcaggagaaaatggtcttcccggccccccaggtcctcaaggtcctccaggctatggcaagatgggtgcaacaggaccaatgggccagcaaggcatccctggcatccctggacccccgggtcccatgggccagccaggcaaggctggccactgtaatccctctgactgctttggggccatgccgatggagcagcagtacccacccatgaaaaccatgaaggggccttttggctgaaattccccacctgcctttggatgaaagactccgttgggaataaatggccaaagcttataggactctgtgacaggttgtgaatg

SEQ ID NO: 12248 - DNA, 660 bp, Homo Sapiens
taacacaggaaataatctcatcatttccaaagatgtcttcatgtcccatcaatgacatgctaccagacatatcagattccacaggataatggcaccaagctacccaagtagatgtttctggtattctagactgccgttcatgcttgtttcctaaagtatacttaaaagtttcaaatacagtttcacttagaaactgcaaccctccaagtaatgttatgtttacttaggtattaatgttatgtttacttaggtatgtatcagaggcaataatttccaaagcagatcttagaatataaccaatttgttagataactaactttatctctatcacatctgtttacaagcaaagtattactttgtctggacttatttcatcttcagtgtctgggatcgtgggcaacagagcagatcgcgttaagccccaaaatttttgaggtgacatgtcttttttggtggccgtaaacttccatccaatatggcttgcacagatcttacactgggcaacagtccaggcatacctaagaaattaaggaaagatatcagctaaggaaacatttctgtactccaagcctatcatataaacctatcatgaagacagactttagaggcaaattctaaggattagagattctaagttgagatttgatccatacagttccc

SEQ ID NO: 12249 - DNA, 711 bp, Homo Sapiens
acgagagccagacacaagactgggtgagagaccagtactatacatcctgggcgtgaagcccagcgcgtccccggaggagatcaagaaggcctatcggaagctggcgctcaagtaccacccggacaagaacccggatgagggcgagaagggacacggacatctgcaacctgacatcagcttgtactcatattctgggttttcggtgacaagtgacacacagttgatcataagtaccaatcatagactgaaaatgctctgcattttagagacagaagttaaaagcttttccatcctgtttacagaaagtttgctttttatctctaaagaggctcatgacccacctgaataggtgaattgaaggatgaggcattgcaaggaaaggctgctaaccctcccgttcctcctttcacttcttgccattttcttacaaaactttggttgttccgcatgggtcttgagaggtggggccgttatagtagctgatagcagtgtcacctgggccacgtttgaaaccacaccaatcacccatgtagcatttaagacctgtggaaacgacgctggaatcaaaatacctgtctgtgttagttgttccaagctggagaaagctacttcaggacggttggctgaatggcaacagtgatggaatatttatatttagccacatgtgctgaatgtggctgtcacaagtttaaaatgctttcctgtaaaaaa

SEQ ID NO: 12250 - DNA, 395 bp, Homo Sapiens
  misc_feature (282)..(290): n is a, c, g, or t
gaaaggccgcgaaatcggcatgtggtacgcgaaaaaacaggggcagaagaacaaggaagcggagaggcaagagagagctgtagtacacatggatgaacgacgagaagaacaaattgtacagttactgaattctgttcaagcgaagaatgataaagagtcagaagcacagatatcctggtttgctcctgaggatcatggatacggtactgaagtttctactaagaacacaccatgctcagagaacaaacttgacatccaggaaaagaagttgataaatcaagnnnnnnnnntgtttagaatcaggaacagatcatatattgaccgagattctgagtatctcttgcaagaaaatgaaccagatggaactttagaccaaaaattattggaagatttac

SEQ ID NO: 12251 - DNA, 364 bp, Homo Sapiens
tagaggatccccgacctagacgtaacacagtcctcagggccccaacctggccaaacactcatccacaggaagatggaagacatttcccatgctcccctcagacgatgggagatcacgcagcaatgaaaatgaaccatgtcagtatggatgggtctcagggagagaatggagacgggagatcacgcagcaatgaaaatgagccatgtcagtgtgggtgggcctcagggagagaatggagacgggagatcacgcagtaatgaaaaggagccacgtcagtgtgggtgggtctcagggagagataatggagacgggagatcacgcagcaatgaaaatgaccatgtcttgggtggtctcaggagagaga

SEQ ID NO: 12252 - DNA, 570 bp, Homo Sapiens
  misc_feature (235)..(235): n is a, c, g, or t
tttgtccccaaacaagaggtggacgtgggcgtggtgcacttcactcctatgatacagccctagatagagcagccattcaagctggtggaaaaagtggttcagaatgtatttcagttccgaaggaaatactgccatcgagggctcagaatgttattccctgaagcgcagcgcttggaaagcacgggcaggctgttagagttggcagacatagaccatactcttcggccccgccagnctctccatctcacactttaagagcctctgtgatgtatacagaaaaatgtgtgatgaagacccacaactctttgcatataatttcagagaagaactcaagcgaagaaaaagcaaaaatgaagaaaaagaagaggatgacgcagagaattacagactctagctgctgcctgggggcgagcagcctaccagatgtcgatttgcactacgtggagcttcttatataggtactcttttgtctttacagaatgacgatacaaatgccaatgaccagatgtgacttattttccttttactatacagcttggcagagaaaataaatatcatcaaataagatac

SEQ ID NO: 12253 - DNA, 378 bp, Homo Sapiens
atgtaagaggcgacttgctcctccttgtcttccgccatgattgtgaggcctccccagccatgtggaactgtaagtccattaaaccccttttcctgtataaattacccaatcccgggtatgtctttatcagcagcatgaaaacgaactaatacacgtttaataaaatatagagcactgggagagcagtagatttgtgacaagtggagaaggaaattcagaattcagtctggaacatgtttagtttgagatgcctattggctgactgagaggagatgttgagtaggcagatagataaagatgtgtcaaatttaggctaggctgaaaatatgaatttaggacatcttaagcatctaaaaccacagatgcaagtcagtgaac

SEQ ID NO: 12254 - DNA, 388 bp, Homo Sapiens
  misc_feature (78)..(78): n is a, c, g, or t
gggaggagcttgggcccgacggagccactctgtgcatggggggctgctcggggcagggtgccggggggtaggaggcangcccgagcggctggaagagagtgtggtgtgatggacgggcagcttcctgtgtgctccaagggatgagcctcgtggggcagagggcccggggccgccgcctggcctgggagtccctccctggtttttattctcagtacctcaggctcccctgtgtacttggaggggcagggagccctttcctcggttctggcctccagaccagggtaacggcaggcccctccaacaggtgctcacagccaccgaggcaggggctgcagccacccactgggagtcttgtttttatttataataaaattgttggggacacctc

SEQ ID NO: 12255 - DNA, 444 bp, Homo Sapiens
  misc_feature (137)..(137): n is a, c, g, or t
gaatgagccccctgacatgcccagccctattctgcagaacgaggctgccctagaggtcttacaggagagcattaagcgcgtcaaggatgggcctccctccctcactaccatctgcttctatgccttcgtataacacnagagcagcgtgttgaacacgtgcagaaatctcccgccgatagccaagatagcttgctgactgggtttgacaactctctgtataaaactttggagtatacgatccaagaagttaaaatcagagccccaccaagtagacgtgtcccgcatccatttggcttgtgatattctggaggaggaggatgatgaggatgataatgcaggcacggagataaagatactgcggggccacctgcggaccagtgtgcagcacgaggttcctcgcggacagctcagggttgctctcttgttctgaaaatgtcctagata

SEQ ID NO: 12256 - DNA, 477 bp, Homo Sapiens
gtcaagtgatataacctattgtaaactgactatcaaactcctgggaaaacaaattttggaaaatgcttgatgatgatgaattagtcaacaatttataagatatgacattaaaagctcaggcagtaaaagcaaaaatatatcaaacctaaaaacttctgtaccacaaaggtcacaaccaacagggtaaaaggcaaactgtagaataaaagaaaataccagttgagtgtcccttatcttgaaatgcttggaatgatgtttcagattttgtaatattagcactattcatactggttgagcatctcgaattcaaacacctgagtctgcgatgctccaataagcatttcctttgagtgtcatgttggcactcaaaaagtttcagactttggagcatatgggatttaagatttttggatcacaaacattcaacactatagttgcacatcatactgtgatacgtctaggtcgggatcctctaga

SEQ ID NO: 12257 - DNA, 361 bp, Homo Sapiens
acatagattatacagaaaagctgtgtttgcagattagatgatttcatcttggaatgatgtctacactacttgaggtgacctatattcattacaatccttataaagattccattgacatttttgataaacagaaaaacctatcctagaattcatatggaatctccaggccccatgaataggtctaatcaatcttgaagcagaacaaaattaaaggtctcaaaacaattacaaaactgcaataagccataaaaaagtggtcatggcgtaaagtacatactgtaacacacttatggaccaacacaagagagacctcagaaaccaatcctggcataatatggtctgatgatcttccatcaggatg

SEQ ID NO: 12258 - DNA, 586 bp, Homo Sapiens
ctggacaacgtattcctatggaatcattattgattgatctcctaaggggatgtttagcttgaattgcacctctctgctctgcgtgccacggccacactatgttcagatggtctgaacaaaattgtcagatggtagaaatgataagaaatacggcaagggttcctattatctggaaccatggcggtgtagtggcacctcaacctcaaatggtatggccctttgtaggagctaaacataaggatttgtggaaactgttaatagctcttaataagatcaaaatttgggaaagaataaaaaagcatctagaaggacaccgtacaaacttgtctttggatattgcaaaattgaaagaacagatatttgaagcatcccagcacacctgaccttaatgccaggaactggagtgcttgaaggagctgcagacagattagcagctggtaatccattaaaatggataaataacacttggaagctctgtgatttcaatgaagattgtgcttttaatctgtgttatttgtatagtctgcagatgtggatcctgactctgcaagaagcagctcgctcctgagttctgtgtacgtcagtc

SEQ ID NO: 12259 - DNA, 477 bp, Homo Sapiens
  misc_feature (153)..(393): n is a, c, g, or t
  misc_feature (417)..(425): n is a, c, g, or t
ccataattcttaactgatgtaagcctgcaatagctgtaaactcatcagggattcatcaggtaacaccaccaaagttaaggttgcaatattttacaaactcacaggctgaaaaattccttaaaaactatctggctgggcatggtagctcacacnnnnnnnnnnnnnnnnnnnnnnnnnnnnnnnnnnnnnnnnnnnnnnnnnnnnnnnnnnnnnnnnnnnnnnnnnnnnnnnnnnnnnnnnnnnnnnnnnnnnnnnnnnnnnnnnnnnnnnnnnnnnnnnnnnnnnnnnnnnnnnnnnnnnnnnnnnnnnnnnnnnnnnnnnnnnnnnnnnnnnnnnnnnnnnnnnnnnnnnnnnnnnnnnnnnnnnnnnnnnnnnnnnnnnnnnnnnnnnnnntgacagagtgagaccctacctccnnnnnnnnntcatctaatgcagtagtttgcaagctacaagtaggtatggaattctctgtgg

SEQ ID NO: 12260 - DNA, 337 bp, Homo Sapiens
attagttaagtacaaagaactttcgtgtccatgaagcagcgacagaaatacagaataccaggactgcagtctttctagtccttctgtttggagtttggagacgcaaagatgctcttctgcctgtgaagttcaagggccaggctgcatggacaggatgacaagatgacccgtggccttaggacagcctcacagttcacatggcagtagtagtgatggaaagtgccatgcaaaatagcatggttgggtgggtaggttgagtggctataagtgccagatactggcttggggacaggtcttccatgcactgtctaccttgaacaataaagacagaccaggt

SEQ ID NO: 12261 - DNA, 660 bp, Homo Sapiens
  misc_feature (457)..(457): n is a, c, g, or t
  misc_feature (464)..(464): n is a, c, g, or t
  misc_feature (564)..(565): n is a, c, g, or t
  misc_feature (623)..(623): n is a, c, g, or t
ggaggaatttgccaaatattttatttcaaaatttagcctctgatatcataaccacaagatattttaaatcaacagtttctaagcatactaccacagtttttatgacctctccatcatcttgtggtttctagagattgacagatactatgtttgtgttatagatatggtaattaatgaaacaactttaaattgtcttccattctttcttcctcagttcatttctttttgtcttcccactgatagtctttggcagctcttgaataaattctacctttctgggatatttgtaaggtgctgtaggttttttaacatgctcctgaatctcctttattagttgttcttgatcatgtgacttgtaatcaggatttagaacgacaaaagcctttactacctctcctctgatggggtctgggctgctgacaacagctgactctgcaactgaagggtgttcattcanggcattntctacctcaaatggtccaattcgatagccagaggataatatgacatcatctgctcttgcaacaaccagaaatacccatctttatccatatattctctgtnnccagtgatatagaaattggctcgtagagtttgagctggttttgaagattatctacgtnatgagtaaaaaggccaattggcgggtggtagaacttg

SEQ ID NO: 12262 - DNA, 653 bp, Homo Sapiens
gtggctttctcttcaaatccacctcgtccttcctccatgacttataagtcatcatctctgctggtttctcaaatgagatatgcttcttggggtcttcagtgaagaggaatagcaagtgaaaggaggatggtggcagggaacatgaacccctaccaggcttctaggcttcccctgcatggcagccagcctctaagttggcccccaaccatccctgccttcttctattcacacccttgtgtggttccttcccacattgaataggcctgacttgtgtaaccactacactattgaagaaatgagagtttgacttctgagggtaagtcataaaatacatcgtggcttctgtcttgttttctttgatcgcttactttgggggaagccagcttccaggtcatgaaaatactcaagcagccttatggagtgctccacatgacaagggatggaggcctcccaccaatagccatgggagtgtgcaatcttgaaagctggtccttcaattccagccaagcattcacatgaccgcaatcctagctgatctcgcttgtgacctctatgggagaccctaagccagaaccactcagagaagctgctctggaacgtcagacacacatgaactgtgagatagtaaacgtttattgtttaaagctaaaaaa

SEQ ID NO: 12263 - DNA, 813 bp, Homo Sapiens
cctcttctattaagttttagtgaaaagcctaattacagaaaattgtgcagatactagtgaagatactagtataagtttaaaggaacatgtgactgtaaaatctcacatttacaaagtgcttgatctcttcatatttcacacgcatgttttagaatagattttagggagtgtttaattcattatccttttgacttaaaatttttgttaccaacttcctaggacttagataatatataaataagtacaaatcccaggggaagtgttgtgatgctagactaaaaggtgggaatgtgctgctgttccgtgagccttgttccattgttgaaaatttgatgcctcagtgtttattcagtaccacctcatggagcttcaatgtaaatggattatatgtataattggtaatttgtatagttttgtagattgtagattaaatgcactcatcatgtcacatgtaattgtgcttggagtatttgtgttttattcttttacttcaacgggttcttgtctgttacatctctggtgatttgaaatatcaggaaagacagtttgtcagaaatgagaataatatagttgaaatcagttgggctaaaatattctacagcaagacaatttcttttgggtgaactgattctataatttacttacttttaatgtaaggattagatttattgttgagctgctttccagatcagactgtcactttatagtttttctacataaagattatatagttgcaaacaaaggttgtgaaatttcccttttgttgtttttgacttttaattaataaaagtacattgttttcatagcaaactt

SEQ ID NO: 12264 - DNA, 1415 bp, Homo Sapiens
gcccagttgcaccacgagcgctgcggacactcggggcggcagtcggtctgtcagtcctcccggccaggtcccgcggcccgcacctgccgcccgcacctgcagctccgcacctgcggccagtgcctactgccctctcttgccgcccgcacctgcagccccgcacctgccgcttgcacctgcagccccgcgctctacccggttcaagcatggctgaccaggcgcccttcgacacggacgtcaacaccctgacccgcttcgtcatggaggagggcaggaaggcccgcggcacgggcgagttgacccagctgctcaactcgctctgcacagcagtcaaagccatctcttcggcggtgcgcaaggcgggcatcgcgcacctctatggcattgctggttctaccaacgtgacaggtgatcaagttaagaagctggacgtcctctccaacgacctggttatgaacatgttaaggagtcatcctttgccacgtgtgttctcgtgtcagaagaagataaacacgccatcatagtggaaccggagaacaaggggtaaatatgtggtctgttttgatccccttgatggatcttccaacatcgattgccttgtgtccgttggaaccatttttggcatctatagaaagaaatcaactgatgagccttctgagaaggatgctctgcaaccaggccggaacctggtggcagccggctacgcactgtatggcagtgccaccatgctggtccttgccatggactgtggggtcaactgcttcatgctggacccggccatcggggagttcattttggtgcgacaaggatgtgaagataaaaaagaaaggtaaaatctacagccttaacgagggctacgccaaggactttgaccctgccgtcactgagtacatccagaggaagaagttccccccagataattcagctccttatggggcccggtatgtgggctccatggtggctgatgttcatcgcactctggtctacggagggatatttctgtacccccgctaacaagaagagccccaatggaaagctgagactgctgtacgaatgcaaccccatggcctacgtcatggagaaggctgggggaatggccaccactgggaaggaggccgtgttagacgtcattcccacagacattcaccagagggcgccggtgatcttggggtcccccgacgacgtgctcgagttcctgaaggtgtatgagaagcactctgcccagtgagcacctgccctgcctgcatctggagaattgcctctacctggaccttttgtctcacacagcagtaccctgacctgctgtgcaccttacattcctagagagcagaaataaaaagcatgactatttccaccatcaaatgctgtagaatgcttcgcactccctaaccaatgctatctctcactcgctggga

SEQ ID NO: 12265 - DNA, 696 bp, Homo Sapiens
  misc_feature (174)..(174): n is a, c, g, or t
aaatggttaatgtggtatggacagaagttgaagtctagagtcggcacgttgctgtttgttattagtttttctagaagagtatctagtggtatttggatgatttgtcgacactctgtagttggaattactataatatgtagtatgtactagtagtttttaagtagtggggtatanaatgtttcttagatttgctgggaagtgaggaggaggcagaagcatctgaagatgacagcctgcatctgcttggaggaggaggcagagactcagaagaagagatgctggcctagagccagccggttgcagcgttggattgtgccggctaagacctgccagggagatgggacccttgtgccacctgggccagcaaagaggaggggtccagagaacagctgaaatactgtcactagtggtagtgacttgcttttcctgtgcacacatgtagcccatcaggacagcgagccgacgggtcacgccaggggccggcacgcactggcacctggccccaggagcggggccgtgtgaacggtgatgaatgttgaaaatgcgtctcagagaggtattcacatgaactttgtatgagacttatttatatttttaacataaaggtttgataaagaacttagggattaaaaaaaagatggagttttctaacgtgaggatgaagtctacacttcagattaaaaagggttatgttgt

SEQ ID NO: 12266 - DNA, 794 bp, Homo Sapiens
  misc_feature (607)..(607): n is a, c, g, or t
agccatgggctctccacctcggcctctcctctggggctgggccctgccagtctctccttcgagcttccccggcacacgtgctctggcctccaggtccgattcctcaggctggccttcaggccatgcggcaatgccaacccccacaagtgggtgcgacacctaagccacagcgacgcctatgtcattcggatctgaggctccccaaacgaggacacgacggccaaggtggcagtttgtcccacggaaggacagtcgtttcttttccagcctcctggccttcggactctgaatctgggcaggaagagtcctcagtcccaagaccaggagggggcaatgggcccagcctttctgtggtatctgatgcaggaaggactgcagtggatcagaacttacaaaccaaacttttattctgagaaactggctgtacaatatctaaaaagaaagtgacatgaaggaagcaatctacaacttccttccgcttagcgagcatgcatgtgtgtacgtgcacgtgtgtacatgtctgcatgtgtgggaatccgggggctggcaggtggagcatcacggagcaggctgaggggagccggagttgggctgggagcattggctntttggagtccctggagctggagggggactgtccccagcctcctgcttccccccacaaagggcactgccgctgagtggggacggggacgatgccgggggaggaactggagaaggatgggaggtgggggctcctttgccctcccctgttgtgggaagtgagaccacgatgtacttctggacactcccag

SEQ ID NO: 12267 - DNA, 587 bp, Homo Sapiens
atgaatgaagcattcagagacttaatatttgaaaaaggaatagtcagtattttatattttattacaggtactgatatttataaatttaataaactgtaccatgctgctgcatgttttcaagtacatgttgaacagtaaggattggggagttgttttttaatggtcacctaaagcagctgctatagaaatgttgaactaaaattttgcatctggtcataccttcatgcatttatcatttgcagatatttttccatcattattaaaaaacaggaacttttaggctctgaagatcatgtggaccagagcaaattaaagttcagtttgtgtcacaattcattgccagacttcattggaatgctttgtttgatgatgtatgttcattctcagctttattttcagatgcttaactgggcaatgaagtctaacttcaggttgaactttctcatgtttaatctcaggctaaatgtaaatgatatttgtaaagtttgaataaaattctgtttactcattttgagttagtatgaaaaaaagtgattgtatgtttaagaattgaaattgttcattttgtgataaatgattaattccaa

SEQ ID NO: 12268 - DNA, 493 bp, Homo Sapiens
ctcacctattaccataaactgactgagccctccctacacaagccgtaactactgctttgattggacaagagactgatttcagtagttttctcttgataagagaacacatggccgtgggcgggttctggacagtttacagaagctatgcacttgattgcctttgtgtccctgcttcaccttttgaagcatagggcctaattataatgtatttaaatgttgtctccaccccaaagtgaacatgggttgcatgtaacaggcatgtttactcagcatgcatgcagcaggatcccttcacaaatattcagagctccccctattccctgttgaatatgtatatgtggccagccagatcaacgtaaatcactattcgccctcccctccctggaaacctacttttcgggtttcagcaggaagctatgcctcccagtctgtcagaatggccacttgcaggctgtaaccctttataaaaaaataaaatctcctttctaaattt

SEQ ID NO: 12269 - DNA, 587 bp, Homo Sapiens
acgaggctccatgcaagtgaaatgtcaactcaactcaaccgtccctggtgtcaggcaagcccgagggacccaattctgcctttcttctggattttcctaacctgttaagagtcttgaaagtccttaaaccacgggagactatctggcacatgacacgggatgagacttggtgggggtcccacgggggacaggtccttccagcggttcctctgcacccagcgctgcacgggcatggggcgtgggtaatcagcctcccgaaagccacgcgagtcacggtcctgcctgcgaagaactcccagggcgaccttggggctgaggagtgggcctgcttcggccttctgctcttctgttgtgtggtgaccctcaccagaggacagcttcatgctcttggacttcccagcctcaagaactgtaagaaataaatttctttataagttgcccagtctgtggtatttggttatagcagcaggaaatggagtgagacaatgccctttaccagatcaaattccctttcatttctactttgctgtttttaccattaatagaatgtgaaatataacaataaacaataacgtttgacacattga

SEQ ID NO: 12270 - DNA, 1119 bp, Homo Sapiens
cagagtgcaccgaaagaagagggttccagggacccggcagacccgagccagcagggcagagtgagaaaccttagagagaagttccaggccttgaactctgtcggttgatgctgactcctgggggagggaggagtcatgttgaaggttggggaagaacctgggcatccttcccctcaaacctgggctcatggagcccatgcccagggcccctcaggtgggcggaaagtccatcccctccgcccttcaggaaggatgctcccgtgtgcaggggtctcctgcctgtgccatccactggggctcgagacaatttcccactcacctgtgaggccggtgtggctgcttcccttgtaaatagttgttctctggtaagaagccaaatatttaagctcacttcttcccagagagaggaagctctgctcaggcctccagcgttggctggccatggccacagccagatggaggagcccatccccaggagactcaggcagtggcctggagaggctttgttctgtaacggtgccttttcttagggtccaggcaggaatgaagccaataatttattgctttccattctgtggtatgatgtgcgtgtgcgtgagtgtgtggcccctgtttattcccctcctgtcaagaatgaagtggattcagttcaggtacttttgagggttgttgtgctgaccctgtggttgtcgctgatgtacacacatttcattatttgccaatggtgcaataaccactgctgaccaacccactatgtgtgaactccttcctaggcttggctggggtagggaaggttattcatgggccagggatgtcttagggagatggagacatggaggttgttccttccacactcaattgtcacttgggcttatgaaacataaggcacccgggtactggtgggggaggtcggggcaggaggatgtgagggcgggctttttctttctgctgcctagactcccatgggcttctctgtctagcagcagcctgctgtcctgtctagggtagggggtcccgcatgccagccttttgctcttttccccaagggccagagttggaccaagccaaagggaggtggtgaggtggatagactgtgtttctcatgagcagatgctccac

SEQ ID NO: 12271 - DNA, 628 bp, Homo Sapiens
gtcaccgtctcgctgagggacggtgaggccaccctggaggtgtacggcaccaggggccagagcgaggtgagcgccgcgcagctgcaggagaggctggccgtgctcgagaggcacctgcggagccccgtgctcacctttgctggcggcctgccagatgtgccggtgacttcagcgccagtcaccgcgttctaccgcggctgcatgacactggaggtcaaccggaggctgctggacctggacgaggcggcgtacaagcacagcgacatcacggcccactcctgcccccccgtggagcccgccgcagcctaggcccccacgggacgcggcaggcttctcagtctctgtccgagacagccgggaggagcctgggggctcctcaccacgtggggccatgctgagagctgggctttcctctgtgaccatcccggcctgtaacatatctgtaaatagtgagatggacttggggcctctgacgccgcgcactcagccgtgggcccgggcgcggggaggccggcgcagcgcagagcgggctcgaagaaaataattctctattatttttattaccaagcgcttctttctgactctaaaatatggaaaataaaatatttacagaaagctttgaaaaaaa

SEQ ID NO: 12272 - DNA, 578 bp, Homo Sapiens
gtttttgttttcaagcttttcgcctacattttagactaaccctgcttattcctgtgaatcaagcagtgatctcctgcagcttggaagaaaaaataagggatgggtaatataaaaatctgaatcaatatattagttctgggcaattatcctgcaaattctaccaggtaataaaagtgagtagggtgcccataacccagaagtttcttcgtttaggaaaataaaaacaaggaacttcatagacccccccaaaggggaattctatatcttgacaagtaaaagtttagatggaaattatctacaacaccacacttacggaaatagctatactcactctattatttgcaaaaggattatacacagtagcaccttctaactgaaatattaaacagagagtttacattgctgtcatattttgcttaatcattatccttataacagggataatagctactaacaaaaaggaagcatgaaagttttactatcactgagcctggtaggactttttattgagtttagtgatgcagttttaaatgaaacatgccgcttttggataaatacctctaagaaaggaaaattta

SEQ ID NO: 12273 - DNA, 595 bp, Homo Sapiens
tttgttggttagaaatatttattatcccctccccccacatacagattacttctcagaaacatgaagatattatccatgtcctcatcaattacagtttgtagaaaataaacttaactcatatcccatcaacaatgtatttctatcatttttttaaacaatagccatttcatttttccatgttagttccagaatagcttcaagttttatcttttggatcgaatccagtcaatctttgtttataggtaacagtttcctaacagatcccctcccccaacccctaaaaaaattctatatcctaagtgataaactcttcttgtacattcagcaaactttatactggaaaagaaaaagaataattgagataggtatttactttcgtgcacagtaataaatctagctgagctgctacaccttgctttgcaaagatgtttacataaaataaatcatctcttatcaagttacaatggtaatttcttgaaatgtagatatgaaagctatacacttaatccactgaaatttccttctaattttttaatctgtaattaaaccatcaccataaggacaagcttcatcccaagatgttcccccttttccc

SEQ ID NO: 12274 - DNA, 465 bp, Homo Sapiens
ccaagaattcggcacgagggtgagacgacgtctcactatgttgcttcatttaacaaataaggggaggaagggcgggggcagaatggaggacacagactagagttcagcttttacaagtggcaaaggacaatttggattcggcctcccacagcttcatttgtaatgctttcaagacatcttccatctgtgttagagacttttctatttcaactctgctttcaagattaaaaagctctttatcttctgacacaatttgcttttcagaggaccctaaaacataactttcaatggcttcaacactgaggcaaaacaagtctctcttgtaatcaagattcttgggcgtgcatctgtacacgtagccaagattgagtgagcaccccgcgcagcacaaagtctcaaggacgcaaccattttccttttcacgtttggatagcttctgttccttatccacagaaacattacagg

SEQ ID NO: 12275 - DNA, 454 bp, Homo Sapiens
ataatttaagattgtacagtactctaaacgtctgcaaaggtctagatgttatcagtatcactagtttttatttctgccagtagctcccttttaggttacattgttgtcctctttccagtgtggcatctgtcattggtttttcactatggcaagttcattaaaaagcttgctccattgttatcttcaagtaatgcccataaggagatggaagatatctgagacaattaaggctttagcttctaggcaagagaaataacgttgcattaaatttcaagtttctttctgctagacttgaatgtgtctagccactctaatttatgggggcttttggttttttcctattgtactttgtatgtagaattgttttgaaatatcaagcatatttactttgaatttgaactctttcttaattttgtatttatcctttgaataaaatgtaaatccaatatttata

SEQ ID NO: 12276 - DNA, 565 bp, Homo Sapiens
cttgcgacgcgcgagagctgtgctgtgccgcgcagttaggccagcagtcagtccgcggagtcagctagcctgccgctggagggcagccatgaagcattaccaggtgcgagattctggacgcacagactagggagaatctgtgttacgtctaggtcgacctaaacgttacacatgggtgttattctataacgcttcctagctgagttatcacaggagaacctgatcacatgcatcagagagcttggagaaagctaaagtgattcagccaggctacggtgttcagtatgattacttacatccccgtcagatcaccccttccttggagactcatttggttcaacgactcttctttgctggacagatcaatggcaccactggttatgaggaagctgcagctcaaggtgtgatggccggaatcaacgccagacttcgggtcagtcgcaagcctccctttgtggttagccgaacagaaggtctacataggatgtcttcgattcgatgacctcactactctgggcaccagtgaaccataccagcatgtttcaccagcgagtagagttcctct

SEQ ID NO: 12277 - DNA, 582 bp, Homo Sapiens
taaggtgtcaccttataagcatctataaattgagttctttttcttagttgtatggccaggcagtccccattttaggagttggcttctgcaaattcaatccattgagctaactgttggggagcaatttggtagttgtagacatttgcagggaagggagatgtctgattctaaatgggagttgatgctcaggtccccagccaggtttgcatccagccctgagacatgtaggaaacacctttcagacccaggctctgaagattcccagaagccacaaggattgaagggaaaaggtgatcctggtaactgttccaggattgctccaggtttgagatggtattgctaaatttaaaattaaacaagagacccaacaacagcttttaaagtgtcttctatttcattgtattttttttaacttgccccaatgatagaaaagtcttttgctgaaatgattttgatgatttttgtttatcgtttataaaaaggaaaagaaatatacaaactttgacttttgtgactttgtgaaggtttctttaagatgtgcattcctttctgcttgctctctagtaaatgttttactaccgg

SEQ ID NO: 12278 - DNA, 549 bp, Homo Sapiens
tccggtttgagggcctgcgggagaaaaaactccttctggggtttcaacactcaggggttcagagaactgctcctgtgaacagggcccctctcccctgaatgggaaaggggtctggggatgggaggccgcaccacagagaggtagatgatgcctgggtgtggcccatcttctgtgggccccttcccagacaccggatccatgggcactaacccgcctcccaaggctgatgcccggaggcagcttcctgggcaggagggttccatgggcactaacccacctcccaggctgatgcctggaggcagcctccagggcaggaaggaccctgtgctccccgccccccatcctgacatcctgttcttttgcacttaccctgtgctgtgaatgtaacagtgggccttgccccgcccactctgatttgcattttcatttgtgtttgtttacacatccatgcactgcctgtagcagtcgattgtcacagcttcgacttttggatggtagagtgtgtgcactgactgtgagtcgaataaacaattgagacgatttccttcc

SEQ ID NO: 12279 - DNA, 559 bp, Homo Sapiens
cacaggagactctcctactcattgtttgcctgtgcattgtggccaatggtggcatttgtagttcctgaacatcagctgggaactgcatatgcttcatgcagtccattcagaatcttgggttggccatcatttccatcattgctggtatgatactggattctcgggggtatttgtttttggaagtgttcttcattgcctgtgtttctttgtcactttcatctgtggtcttactctatttggtgaatcgtgcccaggctgggaacctaaattattctgcaagacaaagggaagaaataaaattttcccatactgaatgagaagttaaaatgaatgtgtcatgagaatgggcttaacacatcgttggtttgaaaacttccatttttaaaaatttagagtttagtcattagaaaaaataatggactggaaagtactatttatatccaaatatacctatttcaaagtgtatttgtgaggcctgttttagcctgtgtcttttgtattgtgtgttgctaaagaattctacttttagtaggctaatcacaaacaagggttagaaaat

SEQ ID NO: 12280 - DNA, 598 bp, Homo Sapiens
ggatctgctgggtgacatgggggtgacacggggtctgtgccgggctccttggatgacacgtagagactgtggctggttcaaacgctcactccagtttctcctcgttcacgttttgtggtgaagtggatctggcagccgcccatgatatagtccaaggaaggagtacacccatgtggaacttgaggtcagcacaaggacgaccactctctgagttcgttataactgcgtctcttcatgcttgtatttggggttcacacaggcccacttgggcactgccccttcctcaaaggccttcagcatctcctcgaaggtggtagagaattcgtccgatgaagtcgtgctttccatcgagagtcgtaatcccaagaccaggcactttagaggccttgtctcctcgcagctgcagagggaactcagagagactttgaaggcctcccacaccgggttcaggttgttcttcaccacctccgtcctgtacaccagctgcaagccctggtcgtcgttgaccctgtagagctccaggaaggggtcggacttgctgaagaggtccttgtcgtccagcttcctgcccggaaggagagctccacgtagccgattt

SEQ ID NO: 12281 - DNA, 462 bp, Homo Sapiens
aactcaggggcgagctgcagctcctcctttgaccccagccggaccttcagcgagggcacccacttcactgagtcgcacagcagcctctcttcatccacattcctgggaccgggactcggaggcaagagcggtgagcggggcgcctatgcctccttcgggagagacgcaggcgtgggcggcctgactcaggctggcttcctgtcaggcgagctggccctcaacagccccgggcccgctgctccttcgggcatgaaggggacctcccagtactacccctcctactccggcagctcccggcggagagcggcagacggcagcctagacacgcagcccaagaaggtccggaaggtccgccgggtcttccatcctctgtgtacccacccagctcaggtgaggactacggcagggatgccaccgcctacccgtccgccaagaccacccagcaggtgccacggcggtcgc

SEQ ID NO: 12282 - DNA, 1087 bp, Homo Sapiens
cggctggtaccggtccggatttcgggatcatggcggatggtcaggtggcggaactgctgctccggcggctggaggcgtctgatggcggcctggacagcgccgagttggcggctgagctgggcatggagcaccaggcggtggtgggcgccgtgaagagccttcaggcgctgggcgaggtcatcgaggctgaacttcggtccaccaagcactgggagcttactgcggagggcgaggagattgcccgggagggcagccatgaggcccgtgtgtttcgaagcattcccccagagggcctggcccagagcgagcttatgcgactgcccagtggcaaagtgggcttcagcaaggccatgtccaacaagtggattcgggtggacaagagtgcggctgacgggccccgggtgttccgagtggtggacagcatggaggatgaggtgcagcggcggctccagctggtccgggggggacaggctgagaagctgggggagaaggagaggagcgagctgaggaagaggaagctgttggctgaagtgactctgaagacctactgggtgagcaaaggcagtgcctttagtaccagcatctccaagcaagagacagagctgagcccagagatgatctccagtggctcttggcgggaccggcccttcaagccctacaacttcttggcccacggtgtcctccccgacagcggccaccttcacccgctgctcaaggtccgctcccagttccgacagatcttcctggagatggggttcaccgagatgccgactgataacttcattgagagctccttctggaactttgacgccctcttccagccccagcagcaccccagccccgtgaccagcacgacaccttcttcccttccagatcccagcggaggcccctgcaagctcccaatggactattgtccagcggggtcaagcgggacccactctcagggcggctacggcttcacaaggggaacaagtattaactgggaaagctgggacgaaggcccggaaaaaacctacttgcgaaacccccaccacattcagcccaggcggcccggggcgcgtctaaccgccccttggccccgaagaaa

SEQ ID NO: 12283 - DNA, 305 bp, Homo Sapiens
ctgtgactaactagtttgtcttccattccattgttttgaaactcagtatgctgcccctgtcttgctgtcatgaaatcagcaagagaggatgacacatcaaataataaactcggattccagcccacattggattcatcagcatttggaccaatagcccacagctgagaatgtggaatacctaaggatagcaccgcttttgttctcgcaaaaacgtatctcctaatttgaggctcagatgaaatgcatcaggtcctttggggcatagatcagaagactacaaaaatgaagctgctctgaaatctcct

SEQ ID NO: 12284 - DNA, 441 bp, Homo Sapiens
  misc_feature (301)..(302): n is a, c, g, or t
  misc_feature (326)..(326): n is a, c, g, or t
ttagagcaggctgccaacagacggatctagctgcgatcgaggcggacccgggacatctgggcgcccatcggagcctgtggtgggagtgatggtaacgagatccctcgccagactccagcaagactctcaggatcacaaaacgggcctgcatatgggcctgtcgccagttgaaggcctcaggtgtgtagaactccagagcgagcagctcggcccgaaccatgttgagccagttcacgtagatcacgtcctccgcatcagccccctcaaagccaaagatctccagcacttgcgggtggagacnnaggtagagacccacgctctcagcncggcactcttcgtagctggagtcgatggtgctgaacttgctatcccaggtctccccgctccgataccagctctgaatctggaaaaggagctccactgtcgggcttagggtggcca

SEQ ID NO: 12285 - DNA, 481 bp, Homo Sapiens
cacgactcggagtttggaaagaatcaacgtattaattcagagatattgtattctaaaattgacagttccaacagggccaattgtagtgagaattttagtttgaccaactcttcatgtttgttagagactattacagtttctctttggagaaaaggtacatatttactgtgatattttattttagctcttccgcaatattcttctttggaatggactccttacagatgacaccttgcaagaactaggactagggaagctgctaaatcgttaccttattatagcacttctcaatgccacacctgggccagatgtggttaaaaagtgcaaccaggtaagttgtgaagggaagaacgattctaattttatcatttctaaaaaatttagctattaaaatctattatttagcaaaataattaaatgtgtggtactcatatatagacaaatgggccaggcacagtggctcatgcctgtaatcccagca

SEQ ID NO: 12286 - DNA, 527 bp, Homo Sapiens
cagtacagtgctctgttcattgcaagctggcaaatttatgtagctatgtggaatgatatgtcataatgtaaaattagataaattcttttttcttataattaatataacatttctggacttgaactctggcaagagatgccaaaaggcattggtaccgtgttatttgtttatatgaattactttttaacaaggaatgtttcttattcattaaatgaattcaacattttctctgtaaaaacaatagagtttcagtacatgaactatagaaaaaaatctatatataatgtacataaatgttacatttgtaaagaaaatgtaaaaatgtaactatagcatatgaattgcttaaactgtgctgcattgttggatgacaactctttttgtcacagttagagaatgaggttgactaatgcatattatgaattgagtccacaaaggaacacaaaactctttgtaattctgttaaatcttttatgtagatttatttatgatcagcctactaattaaaactatttcgcttgacagta

SEQ ID NO: 12287 - DNA, 207 bp, Homo Sapiens
aatgtatcagtttgaacctagaatattgaattaaaatgctgtctcagtattttaaaagcaaaaaaggaatggaggaaaattgcatcttagaccatttttatatgcagtgtacaatttgctgggctagaaatgagataaagattatttatttttgttcatgtcttgtacttttctattaaaatcattttatgaaatccaaaaaaaaga

SEQ ID NO: 12288 - DNA, 513 bp, Homo Sapiens
ggcctccccaggaccacccccgccgacagcaaggcaggcggctgagcagcggcctggagcagcagagccaggctttgtagcgaggccaggtcttcggccgcatccggtacggagagtgcagatgcaggtaaggccccggcctgccgctatttatagtgcagccagtctgctaaaaatacactgggcctgggcactgccgccgggacatggcagcctggacgtggggctggggctgtgggcgctgctggcggggttgactcttccagtgagggcagaaccaggctggcaggaggggaggacggtgtacctgctgctcagagcccccaaggctctcctctgagagccaccaagcaggacagagcagctcttgtcccaggtccctcgggctgagcgccgtgtcaccaggagaatagtgctcacagcccaggcagggtgtgtggctcctggatgggctcgtggggcgggatgggacagggcacgggctctcagaaaataaactgctttattggaatt

SEQ ID NO: 12289 - DNA, 598 bp, Homo Sapiens
tgcaccgggtatagctgtacacttccaattctagccatacgctcagctcatccatgcctcagaagtgcatctggagagaacaggtttctaagcataaaagatgaaagagcagttggactttttaaaaattcagcaaagtggttccctctcttagggacagtcaaaaccaagtcacttaggtagtaccaaaataaataaggaaaagcttagctttagaaacagtgcaacactggtctgctgttccagtggtaagctatgtcccaggaatcagtttaaaagcacgacagtggatgctgggtccatatcacacacattgctgtgaacaggaaactcctgtgaccacaacatgaggccactggagacgcatatgagtaagggcactgacggactcatgatttcttcttaccagatgctttcctgttctttaagagtttaaaatcatcagaaaggaaaaacaaactctatattgttcagcatgcaatacataccacgctagggctggctcaattgaaagtgggcaaaagcttacaaatactaaaaagaacgtgctgccgcgcagtgtggagcccactgtttggaaataaatcttcctaacact

SEQ ID NO: 12290 - DNA, 878 bp, Homo Sapiens
  misc_feature (42)..(42): n is a, c, g, or t
  misc_feature (72)..(72): n is a, c, g, or t
  misc_feature (678)..(709): n is a, c, g, or t
gtccaaggagagattcttgatgccgtgtatagaatggtgccnattcccagcggccgagggcagtgaacatgncttggagtggcgccaaggccggatcgcccgggtcgtgctgcaagatgaggacacaccaccaagattgagggtgactggaagcggctcaacacactgatgcattatcaggtgtcagacaggtcggtggtggctctggtccccaaacagacctcctcctacaacatccctgcctctgccagcatctcccggacgtccatcagcagctcattaatgccatgtccattgagagctgagaggaggagcctcgcattcctgggaagagggacctgtccaagctgtcacactgggagtctcagatggaaggacaagtgatggggatcaggccccagagcttgctgtcccctgagaccccatcctggggagaggggaggactcctctccctacgccagccaagtttcgtcatagccagttccagctgggagagacagtgggcgtcgtccatcctcagtgagaacaccagagaacccggggccgggagaaggtggttcttcaagccgagaggcacgagctggggacagttctgcctctgtgactgctgctttgcatgaaaactcatttgatgtatattggggaaataatgagaactttatttaatttttttaagnnnnnnnnnnnnnnnnnnnnnnnnnnnnnnnngccgccctgttaatcccgtccaacttttgtttaattctgatttctgtctcccttccttcttttctcccattcctccttctttatataatgcctatttccaaatgccagagaaagcagagatgctgagagacattggagagaaaatgactgtctccttttccttgaaatt

SEQ ID NO: 12291 - DNA, 906 bp, Homo Sapiens
ctctaatacagcacacagacacagggttatctgtgtcgttatcaactacacccaacgtgacgccgccatctcttcgcggagacgcatcaacacttcagcactcaaacacaacgtgcgtgtcaacaggctcttctctcctcccctctccgtcatatatttataagaacgggggaccttaatttgcaagtcaacaccttttgttaaccggctgagcagtatcccgagctcaacacctagtcttcacctaaggtcgactgagctggcaaacgagactctgctgcccaccctcatcgcgacattgtgcatattacctctgatgtgcggtgacgtgacccgagaggagctgggtggatccacaagcccaagtctctggtgcctccttctccaagcctcaggcaaaagcgttggcaggcacctacagcatctcctcctctctcaccgcagaacctggctctgcaggtgccacttacacctgccaggtcacacacatctctctggaggagccccttggggccagcacccaggttgtcccaccagagcggagaacagccttgggagtcatctttgccagcagtctcttccttcttgcactgatgttcctggggcttcagagacggcaagcacctacaggacttgggctgcttcaggctgaacgctgggagaccacttcctgtgctgacacacagagctcccatctccatgaagaccgcacagcgcgtgtaagccagcccagctgacctaaagcgacatgagactactagaaagaaacgacacccttccccaagcccccacagctactccaacccaaacaacaaccaagccagtttaatggtaggaatttgtattttttgcctttgttcagaatacatgacattggtaaatatgccacatgcctttggtggaagt

SEQ ID NO: 12292 - DNA, 392 bp, Homo Sapiens
gcatgtattggtgtggtgacagcaacagtgacgaatagtacctacgagtatgacatgtccaatggataggaaccccaatgaaatgttcaagttcaatgaggagaactacggtgtgaagactacctatgatagcagcctttcttcttatacggtgcccttagaaaaggacaactcagaagagtttcgacagaagagagctgcgtgcggaccagttggctcgagagattgaatcaagcccccagtaccgcctacggatcgccatggagaacgacgatgggcgcactgaagaggagaagcacagtgcagtccagcggcagggctcagggcgggagagccccagcttggcatccagggaggggaagtatatccctctgactcaacgagtccgggaa

SEQ ID NO: 12293 - DNA, 821 bp, Homo Sapiens
tctgcaccagccatggactgctacacggcgaactggaacccactcggggactctgccgggtaccggaaatatgagctgtacagcatggactgggacctgaaggaggaactcagggattgcctggtggctgctgcaccctatgggggccccattggaagtgctccagaaccgggttctggatgcccggatctttcacactgagtttggttccggagtggccatcctcacaggggcccaccgcttcaccctcagtgccaatgtgggtgacctcaaactccgccggatgccagaggtgccaggtctgcaaagtgcaccctcctgctggactgtgctgtgccaggaccgagtggcacacattcttctggctgtggggcctgacctttacctcttggaccatgcagcctgctccgcagtgacgccccctggcctggccccaggagtaagcagcttcctacagatggctgtctccttcacctaccgacacctggcactcttcacagacacaggctacatctggatggggacagcatcactcaaggagaagctatgtgagttcaactgcaacatccgggcacctccaaagcagatggtctggtgcagccgtcctcgtagcaaggagagggccgtggtggtggcctgggaaaggcggctgatggtggtgggcgatgcacccgagagcatccagtttgtgctggatgaggactcctaccttggtgcctgagctcgatggggtccgcatcttctcccgcagcaccacgagttcctgcatgaggttccaggcggcagcgaggaaatcttcaaaattgcctcaatggccccgg

SEQ ID NO: 12294 - DNA, 692 bp, Homo Sapiens
actggtccggctcacagcttctctccacttgcccctcctgtggcactggacaagcagtgggcttttcgttgtccatgggcttttttggtggggatgtgaccagctttgaacccttccccttaaacatgctcctcctgcacggaagagacaggcgcaggcgagagactctctccccaccacccagctcaggccccagcacagcccggcctctggcctcactggcgtctgtgcccagtgacgcaggcaggtgagctcctggcaaattagcattgcaggctgtgctctctcctcctgctctgctgcagctgggagtgtgcagagactggaggggatgacagtcaccctctgttttctgtggtggctctgttttctgtggtgctggatgcacctctgttttctgtggtggctccaagagagtgcacggtccctgctgattgaaagaaggatgaagggcagaagaggggcggggagctgtgtgccctaagatctcattgcctttttatgccgattaacatgcttttagcccctactgagcttatagttaacagaagtttccaggtctttcttcacctgaactgtgtctaaagcagttccctccaccttctgtatttatacgcttgatttttaaaacctaaatgttgggcttcacatttgttccttgtaaattcatcttggtgattacagttctctct

SEQ ID NO: 12295 - DNA, 349 bp, Homo Sapiens
ctcaggggcgagctgcaactcaggggcgagctgctcagggagtaggtagaagtaggcttgggtagttgtgcataggaggagaagctgtttcggctctttagctgttcacgcccctcgtgggttgagccgctattaccagcagtctctctgatggaccatgagatacttcccacaggttccccactccagctgactcgctccaggtatcatcgtcatcatcatccacgaagtctcggaggctgttcaccgcccgcttggactcctttaactgtgaaagctcatcgtcttcatcgtcaaaggtaaaagccttgaacttggctgttccaatactcctcctatacccttgtca

SEQ ID NO: 12296 - DNA, 588 bp, Homo Sapiens
tggggatgtccgggatgacccagtccacaaagtcgctcatgaacatgaccaggttctggaagacgatgacaaacgccagccgggctgccaggacggcccagaagtccttggagatgtcgtacttgttttccgaccacggcggctctcggtagtctttatacctgcagatctgcacctcgtagcccaggtccagggggtcattgggggccgtgccgttctggaagtcactgacgtacaaggaggagagggtgtggttgacgaagccgtgcatggtcccgttcttactgtacatgtagaggtacaccaggcgcgggatgaagtcagacgtgaaggagatcacgaaggcattgatgatgacagcaagcttcccaatgcctctgaggatattgtaccagattccgatgtctttggctctgacagctaccggccttcggagctcagtgacaaactttgaggcgtccaggcggatctcgatgatgttgttcagcagcgcaaacagtggggccagggggaaggaggcgacaaacctaccgagcctggtgatagctggttgttcaagatagaatcttagttcaacttttaaattac

SEQ ID NO: 12297 - DNA, 409 bp, Homo Sapiens
tgcactgttgttcataccaggtagcctggatctccagctctccaaagtgtttcatggcatattctaacactccggccgctgcctccggctgctgtagcttattattaatgctgatgagagattctagaatggcaggggtggggcctttctggaactccagttctttgtagtgtagtgctttggcatatgctcggcacttggcagctctctcacccagcagaacaatgccattgtcatctctcagtggcagggggcccttgtcactgtgttccatgaattcagccaagtttaagagggtctgtgtgacttcagcgatgtcttgtgaggtgagggccaactcgaccgcttctgatgagctcatcctgttgatcttcattcagttcagaccagcagcacacaaatccgccct

SEQ ID NO: 12298 - DNA, 292 bp, Homo Sapiens
ctgttgttcatacctggtcgctgtatcggggggcaggatgtggcaggagggaaagagtacattatagaaaaccagtggacctccggttctgagagcagggatacttggatgaccctaaaggcagagtctctcctggggaaggtttggagaagatggtcatggatcctaccacgtgaggcctgctggggaaaggagctcctgctgggtgcgagaggagctgcagagttgagggaggggctgccgaggaagagagcccagggctggcattagggtgtgtaagcagggggtggct

SEQ ID NO: 12299 - DNA, 354 bp, Homo Sapiens
tgcactgttgttcataccacatcactctgtccaactgaaagagtgtaatttaaaaaagtgtaaaaactgccaaatgtaagtccacattattatccattcttgtaggaaacgtaataaatgtgctccacaaatcccccaccctcctagatactggcattgaatgaggcgcccacgtgggctctgccctgaacttttcttccttctggcccttcttctttccgttcatgcctactgagaaggaaactctccttctgcatctggagctgagctccccaagggcttctaagcctacttcccgcaccttccgaagagccttatcccacagagccctcactccctcaccgctggcttcct

SEQ ID NO: 12300 - DNA, 309 bp, Homo Sapiens
catgcactcccccgatcagcacccctggaagtgctccttcttgggacctgaggagggcagtaggcagcatggcccacgtacccacctctcaagagaggcctccagcaatgcctccttttagccacaggccctgggaccggtgagccagggcctacagcagacccacatggacacatggacacatggaaacgtggccacactgccacagagtcaaggagcccttctccctgctgagcaggctaatgccttaatccctttacacaaagcctgctgattctttcctcggcggggggtatgaacaacagtgca

SEQ ID NO: 12301 - DNA, 431 bp, Homo Sapiens
ccttttgaggaggaacagggagcctcctcctccatgagcacttacagaattgtgtaaaattctgtgaaacagtggtaagcatgggcacccgatttcagctgtcctgctgccgctgccctccaacctgctctgtgtgtgtgtgtcgctgtgcttggtggcagtgtgccgtgctcgtgccggctcttcccagcagactggtatctggctgtaacgtttgacgtcttcatattgccagtctgtattgaggggtgatgtacatggccatacagccaaatgggtctgtgtaccagtgtggggattccaagaacactgcctgtcccccacagcaaatattgatgctgttggtcagccaaagattttcctctcctttgctgcttaaacttgtgccttaatattgtacataataaatggataaaatggcaaaatgaaaa

SEQ ID NO: 12302 - DNA, 463 bp, Homo Sapiens
ttcaacataatgaaatagacttgaaagtctctaaggctctatcagttctgacattctaggcttcatatacattaagttgagccatatgtaatcactgtgtttgtaggttagaaacagctgagtatcgtagtttcatatatggttccagctaatacatgcaatgtggctggtgaacacttctgaattcagaaactatcccagatctcagctagaaccatccactgttctgtttgtccagtttcaacttaagggatctccatgcggtccctggaagtacccattgaaacctgcgtatttgtgtatagcagaactctgaaataatattctgatagcagttatctctgaggaattgggttataggtgattttccctttccgcatgataaatttatgtaatatttgactgacttgaccgtaagtatgttacttgtataataaaaggaaaaaaggtacttctattttcc

SEQ ID NO: 12303 - DNA, 391 bp, Homo Sapiens
  misc_feature (24)..(24): n is a, c, g, or t
ctcatactagagccaccagcaatncagcgcgccttccttccagaggaactcgcatcagcctgatcaggcttcctggtgagaactgaggagcggactcacttgatgtttcctggaagcagagcaaaatgctcttgtccctgtcgcgtctcattttgtccatgtcccccgtgcacggttcaatggtagattcgctgtcccctcagcgggggccttgaagactccctgatcccagacctgtcgtctctcccaccccctccccaaagccactggaaggagcacatactacctagaagtaagaagaggagcctcagaagaaaacaaagttctattttattaattttctatgtgttgtgtttgtagtcttgtcttagctctggacgtgaaatacttc

SEQ ID NO: 12304 - DNA, 396 bp, Homo Sapiens
  misc_feature (208)..(217): n is a, c, g, or t
gtttcatgttttatgtgtagatctaatagctgaactgattcaaactgtaataagctcatcaatttcatttctatgaaaatgtgctctgttgtcacaggatgtttctgttgattttattcatttcctgggaattggtaaacatcatgttcctgatgataacccagtagcaaaaacatttgtactgagtggtacaagccttggggactgnnnnnnnnnngattaaaaccattaaaaagaaactcatttttacgctgaatgaacatttatatgattgcattgggaccagtcatttcctaagctacatatggccatcttgacagtgttttttcttttgtgtgtttaattattatgtgtaaatcataaagacaaataaatttcactgtgccacccagcaaa

SEQ ID NO: 12305 - DNA, 509 bp, Homo Sapiens
aaggacgtaatggagaaggcagcagaagtctataccggctctagtcgcgggtcctcggcccaaagatcgaggcggtgcagaaagtgaacaaggctgggatggagaaggagaaggccgaggagaagctggccggggaggagctggccgggggaggaggccccccaggagaaggcggaggacaagcccagcaccgatctctcagccccagtgaatggcgaggccacatcacagaagggggagagcgcagaggacaaggagcgaccggcaggagcgcgagagggcacggggggactcggaggccctggacgaggagagatgaaccgcgggcagccaggcccagcccccgcccgagctcaggctgcccctctccttccccggctcgcaggagagcagagcaaagaactgtggggaacgctgtgctgtttgtatttgttcccttgggttttttttcctgcctaatttctgtgatttccaaccaacatgaaatgactataaatggttttttaatg

SEQ ID NO: 12306 - DNA, 474 bp, Homo Sapiens
ggacttagaggaaactctggggcacaaggaggtgatgcctgtcacttggacatgggtgcagccgccagagccgccctccagggcacagggtgggcccgggtgagcttgtgtgctcacacctgggcaggccccgcggcagcaatggcagctctcctgtacaggctgagtttcagccacaccaagaagtcaaagctaaccgaggctgtgccttccgagacccccgggatggcccctgggaggccaaggagtcggggactgggtacccggagcagagtcactgtggccacggagaaccgcagctgagctttatgaagccacgtggccacacctcccggtgcctccaccccaagcaaacacagatcgctcagaaaatgggaacccagggcaaattgtatgtgctccttactgggtttattataagtgtcacatgttttttataataaaacataggtgatttccccttaatggacaaaa

SEQ ID NO: 12307 - DNA, 785 bp, Homo Sapiens
cttcaagtcatgtgtgatacttctaggccttctcctcctctatgatgtatttttggttttcataacaccattcatcacaaagaatggtgagagtatcatggttgaactcgcagctggaccttttggaaataatgaaaagttgccagtagtcatcagagtaccaaaactgatctatttctcagtaatgagtgtgtgcctcatgcctgtttcaatattgggttttggagacattattgtaccaggcctgttgattgcatactgtagaagatttgatgttcagactggttcttcttacatatactatgtttcgtctacagttgacgatggactattggcatgatacttacatttgttgtactggtgctgatgaaaaaggggcaacctgctctcctctatttagtacctggcacacttattactgcctcagttgttgcctggagacgtaaggaaatgaaaaagttctggaaaggtaacagctatcagatgatggaccatttggattgtgcaacaaatgaagaaaaccctgtgatatctggtgaacagattgtccagcaataatattatgtggaactgctataatgtgtcattgattttctacaaatagacttcgactttttaaattgacttttgaattgacaatctgaaagagtcttcaatgatatgcttgcaaaaatatatttttatgagctggtactgacagttacatcataaataactaaaacgctttgcttttaatgttaaagttgtgccttcccattaaataaaacatatggtctgtgtaaaaa

SEQ ID NO: 12308 - DNA, 194 bp, Homo Sapiens
cctgtaaatctattttttacagaatataagaaacatcaatgacctgatctgtccttcctcctccttcccgcttcccccaaaatcacattccagtttttattgtctttgtgtccaaagtaaactaggtgacttatttgtataaaatgttattttgccacatgagacagtaataaaagaaagattttcacagtaaa

SEQ ID NO: 12309 - DNA, 1052 bp, Homo Sapiens
gaaagatttgaatttttttattatcccagcaaacattacactagagaaaatgattgggaaaatacaaataagttcattaaaaacacaggctgattattcatatctattacattcagaattatgcgaaacaattagttatattgcaaagctgtaattctttttctaacaaagcatgattttataaaactttaatgttgccactgattcaattttaatacaaaatacttatatacacaatacaatataaaagtaaactgtgtagtgccttccacaaagggatatattaaggcgctttacaaatataccaatattttgacccaaattacttttttgctttagattaaaattgaacaggctaaatgttccactttaaataccaaagggatgtttattaaaaatttttttatctaaaaataccttgggtaacagcagcagcaatgtctaaaaatcctcccactgtattctctaatttctaacacattaagtcagaataaaacaattccactcacagttttgcactttgcaacagcagaaggtaataactttttaaaaaagtcaatctcaaagtgactttttagtcatacattctatagtttctattacaaataagaaggtagaaaagatacagcagtagggcctgccttatgatgtcactggacaatgcataacagtatctacaattacataattatagaacacatcttataaatactattgatatgcataaaaagggtaagtataataaagacagcaagtttttaataagaaaattattttaaaagaaaacatatagaaccaatgttttcactccatttcaatggaaagcatctatatttttaacattgtttttctcatctttttggtcaggaagcaccagattctatactggaagaagtagatgtagttttggaataagatagctgataagtatatccaaactgttaaaattgctgataccaaaggcatgtatactgcttcagataaatgcaaaagcttatagtatcagaggaaattttaaaagaatacatatttgcgccaggcgcggtgggtca

SEQ ID NO: 12310 - DNA, 351 bp, Homo Sapiens
tcataccaggaatcactgcttccagctggggcaggtgagatctttacgccttttataacatgccatcactactaataggatattgacttggatagcttgatgtctcatgacgagcggcgctctgcatccctcacccatgcctcctaactcagtgatcaaagcgaatattccatctgtggatagaacccctggcagtgttgtcagctcaacctggtgggttcagttctgtcctgaggcttctgctctcattcatttagtgctacgctgcacagttctacactgtcaaggggaaaagggagactaatgaggcttaactcaaaaccatgcccaggtttagagttaagcctcatt

SEQ ID NO: 12311 - DNA, 249 bp, Homo Sapiens
agagtgtggccaaaggagcatgagaaaaaacagcggagtcattaccaacttccccatcacccacatttacaccctcaggcggctgctaacgctgctgccaagggagaatcatgacggcagaaggaaaaggggtatataatacggtattaattattccggctctgtggttagacctgattaatgcccgggttcccaacacccccagcctgcaactagtcctacattccccaagggagacttccctgtgga

SEQ ID NO: 12312 - DNA, 358 bp, Homo Sapiens
  misc_feature (48)..(48): n is a, c, g, or t
tggcttcttctgcatcctgcagaggctctctccatattcttccttcantcactgccgatacgggagaggatggaaacaaacccgaaacgtcacacacatgtgcacgtctgcatccacgtgggactagcaccagtgactaacaccacagagatggtgccacacatagccagggaaacaaacagcagtgggaaatcagagctctgtggttggccagccagggtcaagcaagagaaggaactgctccttcaaggtgctggcctaggacatgaaaataggccagaccaaggaaatggtacgtcacccaaagggagagaaacaaactagtagggagtaccaggcacaaggagaatgacaaagg

SEQ ID NO: 12313 - DNA, 379 bp, Homo Sapiens
ttgttcatacccagaaagcaaaggtgtcactatcttagcgacccaagtggtggtgtcagcactcataaagttttggattttggggtatttcagattttagatttttgtatgaggaatgttcaacctgtatgtgaacaagcattaccaaatatcattgaatattaatatcttttgcgtaaaaactgctattatcagcatcatagtttctctaaaaagtaaacttggggatcatagtccgatagagagacgttgctaaaacataaatcagcctctgcaaaactgtttacatatttattgggttacatatccctacttggtttgtttctatctcctggtcactttttctcttccacgtccaactatgaagagaaaatattac

SEQ ID NO: 12314 - DNA, 337 bp, Homo Sapiens
acgctgcgtcgccggaacaagccggagcggaaggaacgcatcagcgagcagacctaccagctctcacggtggactccgattatcaaggacatcatggaggacactattgaggacaaacttgacaccaaacactacccttatatctctacccgttcctctgcctccttcagcaccaccgccgtcagcgcccgctatgggcactggcataagaacaaggccccaggcgagtaccgcagtggcccccgcctcatcattttcatccttgggggtgtgagcctgaatgagatgcgctgcgcctacgaggtgacccaggccaacggaaagtgggaggtgctga

SEQ ID NO: 12315 - DNA, 497 bp, Homo Sapiens
aggaaagcggtggttgctggagacaccagaagccctgccagtggaagaacagctaaagctgcttctggagcggctggacgaagtgaatgccagcaagcagagtgtgggccgctcacggcgtgcaaagatgatcaagaaagagatgacggcactgcggcggaagcttgcccatcagcgagagacgggacgtgatggccctgagcggcatggcccctcgagccggggtagtctgacaccccacccggcagcctgtgacaaggatgggcagacagatagtgcggcagaggagagcagcagccaggagacaagcaaaggcctgggtcccaacatgtcctcaacccccgcacatgaggtgggcaggagaacctcagttctgttctccaaaaagaacccgaagacagctggaccgcccaagaggccgggccggccccccaaaaaccgggagagccagatgacccccagccacggaggcagtcctgtggggcccccccagctcc

SEQ ID NO: 12316 - DNA, 469 bp, Homo Sapiens
ggttggagaaggctgaggctctgaggcccaggccaggatccagtaggagaggggcttgggtccttgtcagccacctcccagcaggctgatgtgtgggtctccaaggaagatgccttgaaccccttctgtttcaggggagccgagatcctcccagcctctcatctgcatccccgccaggatcgagggaatcttcgtattcattgctggtccacgaagagctgcccactccctccagagcctgactttccaccgccccctctcccgccttgggccagccaccactcgtggggggcccagccctccatgctctcccctgtctgaagcctggcccctgactacctcctctgcaccaccaggggagccagccttactccctggcccccatgagccctccccacctgggggctcccctgccctacttagggaggacctcgctgcagccaccccagcgaccacccccgatacagca

SEQ ID NO: 12317 - DNA, 468 bp, Homo Sapiens
agtagagatacgggatctgctatatgcccaggcgggaactctttatgttatggggaaaggctgtgtactgggataaatgtacaacaaatactttgtgcatctccgtttagtgattattttttcaatcttcacatgtgttcccttgcttttaccggtgggttctatataggcctggtgcgaaacaaacctgcggaggtgcatcagcgagcaacaccgttttgtctgcgacacctgtgacaaggcgttccccatgctctgctcactggctctgcacaagcagacccatgtggcggcagaccagggtcaagaaaagccgcaggccacgcccctgcctggtgacgccctggaccagaagggcttcctgcacttgcttggcctgcagcacaccaaagacagtcaggcctgcccccgccgaggaacctctgccggatgacaaccaggcattcagctccagacactcaagtgtca

SEQ ID NO: 12318 - DNA, 247 bp, Homo Sapiens
ccccttcctttggtgcctccctgggggctttgggccgaatcccccagggaatcagggaccagctttactggagttgggggcggcttgtcttcgctggctcctaccccatctccaagataagcctgagccttagctcccagctagggggcgttatttatggaccacttttatttattgtcagacacttatttattgggatgtgagccccaggggggcctcctcctaggataataaacaattttgcaga

SEQ ID NO: 12319 - DNA, 295 bp, Homo Sapiens
aaaaaaaacgtattgcatttaatttattgaggctttaaaacttatcctccatgaatatcagttatttttaaactgtaaagctttgtgcagattctttaccccctgggagccccaattcgatcccctgtcacgtgtgggcaatgttccccctctcctctcttcctccctggaatcttgtaaaggtcctggcaaagatgatcagtatgaaaatgtcattgttcttgtgaacccaaagtgtgactcattaaatggaagtaaatgttgttttaggaatacataaagtatgtgcatattt

SEQ ID NO: 12320 - DNA, 460 bp, Homo Sapiens
gattattatataattttataactggcaacatttgagttagtattgactttgtctaaaagaggcttgacttcaactgggataaaaatgtcagtgaattttgttaaagtagtaaaaatgcagttgacttagtaggaacataaaattatttcctaataagataatattgcactcctaccaaataaacaggattttagtaatatctgagggattgttgatggtgagttagactgtatttggcatagaatttggaaatgtaacttgaatgtaaatatgctgcaaaatgttgaatgtatacatagaaagactttttctgtcgacgccaaatgcccgttgtaaatgaaccttaaatattacattcctcctttgcacaataatatttctttataacacttatgattttttcccccaggacaacaaactgcccttaagagtcatttccttgttatcacaggtgtcaata

SEQ ID NO: 12321 - DNA, 960 bp, Homo Sapiens
ctcttcctttaccacgaccgcccgcactcaccttccaaatccttctgctccctgtggtcctgcagcacatcagcgaccacctgtgcaggtcccagctccagaggagaatcttcagcgccctggtgttggcctggtactcctccgcgtgccacgtgtccaacacgctgcgcccacttacttacgggggacaagtcactctcgccacatgaactcaaggcccttcgctggaaagacagctgggacatcttgatccgaaaacactagaacaagagtttggcaaagaacacccgtgctggggtcgggacgaggttgaagggtcttggtcaatgtacgtaatgagcagggtgggccccacgctgggaggacacgggctgggctgagcagggcctctagtggaacacatgggggtctcattgaaaagctctctgatgagcacctccttttgtgcaaagttaattttttctcgacaataaagatattccgtgtcttcacccctgaactaagacacagggagtatttcagaggccagcgtaggagtcatcgacaacgaaaagccgagaacccagggccagcagtggagcctcagcagaccagggcctggtccttgctaattgctgcagggtggagtttgatctggcagacccgatcctccttcatgaacacccagcaacctgagcaagtcccggccctgccctcagcgagcccggcaggcgtcccgggacagctcagtgttggagggccacctgaaccacgagccagggctggggcttgcatgtcattgtctatgacagcgtcaagactggcccttggcaccgtgctgtgtggaaaccctcccctctgagactccactgagacgtggctgagtgaaatcttcctcgtcagtggtcaaggtgtgtcatccatacagctccatgcctttgtcttttttaaatgtaattaaaaaaggaaccaactgaaaaa

SEQ ID NO: 12322 - DNA, 355 bp, Homo Sapiens
cagtgccaagtaaataaagtagctgaacttcatcaaatgattttattcttaaagtcattaaagcatgtaatgttcccctttttttgtttcaggggtgtacagattgaagaagtgtaggtgtttatgtggttttagtgacaaaccccatgtgctttcattgattttatgttttatgttaaaacatcaaccgcaaggtaaaatgcatattgtatgttgttggatacgtacttaactggtatgcatcccatgtctttgggtactagtgtatgaattctaatctctgtaaatgaaatgttgtatgtgttaatatatttaatagatgtaacttaataaactggcattgaagactgacaaa

SEQ ID NO: 12323 - DNA, 468 bp, Homo Sapiens
cagtgagctgagatggcaccacttattgcactccagcccgggcgacagagcgagactccatctaccagatccttatgacgcagctgatgcctgccttggttcctaccactctggtgtagacagaggactttgtccaagtctcacactaaacatgcccgggcttcgatgtgcctggaggatttccccacagggacccacgcacctccctgtatctgcgcagcttgctcgtgtggctggaagcgctgtcgataagcttcacgcactggcttgccagttcttcagctctaggacttgtagctttaagcaaacggtgtggcatgggttgagtgtggccacctgcaggatgtgcagggctgcctcagaagctggctggggactctagcctctgtgttcataaagacattaagaagtggatggatgttgttccttttttgaagttgtcattaaagtaggtgcaacaaccaaaaa

SEQ ID NO: 12324 - DNA, 933 bp, Homo Sapiens
  misc_feature (869)..(893): n is a, c, g, or t
ctttgtggggcaaagccgtcctggggggcatgacagtgtctcggaggggaattggggcctacccttaagatacccaaggcaagctccgtgccccgtggtcgcacttggaaatggactctgggtgagcgaagccaccagttgtgagagaacaggagtccacacgcggcattgcaatacctggtttcatccatgtgtatcgtctctgtagattaccttctggcccgtttccaacagcgcttagtgattccgtcaaggtctcccccattgggaaggccatagggcattaagctgaaggatactgacctctcctccgttttcctgtacctctaacctttagtctgtcaaggaaaacccttaggacctctgaattcaagaggactgagtttgtgggtgaaccttgaaggtgctctttcgtgctacaaggccctgggagatagcatggacgtgcattgagaagccagcctcagaccttagcttgaagcagcttgaggccagacctactgtagcctcagcatcttgctaggaggcatggaagtgatctatcctgccaggaggcctcagagtgatctgtcctgccaggaggtgtgagagtgatctgtcctgtgaggcatttaggggctttcaggaatttagtaaaaggtggagtatgcctttccagtatcttccatcttcctttgtatacttgtccttcctcccatttcctccctttggcccgaggtaggaggatggagggaggctgctactctaccacttcctgtgtgcctctactgtggcctcaaccctggcaattatagctactcccatcccttacctgggcatgtgtgagcccttctcactggattttatacccttgtgtctgtgtacataannnnnnnnnnnnnnnnnnnnnnnnnaaactttgtacaaaaggcaagcctcctccttgtggcaaaa

SEQ ID NO: 12325 - DNA, 1257 bp, Homo Sapiens
  misc_feature (126)..(126): n is a, c, g, or t
  misc_feature (160)..(160): n is a, c, g, or t
  misc_feature (831)..(839): n is a, c, g, or t
cgaaagagagctcctaatcaccaagatagacagttctcagataaagtgaaatatccagttaaagcggacctctaagagcacccatgccacaaaatgaaagtgtagaggtccaccagtggtagcagngatgattcttgtaataccgctagttgccagtcgncccccttaagatggaaagcttggacagaaaccttggaagccttcttatgagcgaattcaggaaatgaaagctagaaaagcattttgctacccatccaaagcacttacagttaggcaaatattaaagagactggtagctcatcatcctccataaaagagaaaaaattcggaaagtgatcagagcacttattcaaaatacagtgatagaagttcagaaagctcaccaaggtcaaggagcagatcttctaggagtagatcttattccagatcatatacaagatcacgtagtctagctagttcacattcaaggtctaggtctccatcatctagatctcattcacgaaataaatacagtgatcattcacagtgtagtagatcatcttcatatacttctattagcagtgatgatggaaggcgagctaagaggagacttagatccagtgggaaaaaaaatagcgtttcacataaaaagcatagcagcagctctgaaaagacacttcacagtaaatatgtcaaaggtagagacaggtcttcatgtgtgagaaagtatagcgagagcagatcatctttagattattcttcagacagtgagcagtcaagtgttcaggccacacagtcagcccaggaaaaagagaagcagggccaaatggaaagaacacataataaacaagnnnnnnnnncagaggtgaagaaaaatccaagtctgaacgggaatgccctcattcaaaaaaaagaactttgaaagagaatctttctgatcaccttagaaatggcagtaagcccaaaaggaagaattatgctggtagtaaatgggactctgagtcaaattcagaacgagatgtcactaaaaacagtaaaaatgactcccatccatcctctgacaaggaagaaggtgaggccacatccgattctgaatcagaggttagtgaaattcacatcaaagtcaaacccacaaccaagtcgtccacaaatacttcactgcctgatgataatggtgcttggaaatcaagcaaacagcgcacatcaacttctgactctgaggggtcctgttccgatcggaaaacaataggggaagccactgcctcaaacatggaccgc

SEQ ID NO: 12326 - DNA, 556 bp, Homo Sapiens
ctgcttgatccaaggggcagcctcgccttcaatgcagtccagctgagtgaagctaaggtattttctgagccaacaaagatgatttcaggctctatggctcgaggcatttccctggatgaaataacacttcaaaaagacttaaggccacttgtgtctctctcttgggccacagactttcagtaattccaagagcaaagctccttatacaaggacacagacagtacgggagccttggaagccagggctggctgccccttgccccagcttggctctgggcaaaccagccaggcaccaaaagcgacttccctgacatggagttggcagcagttcaagcaggaccttaatcaccaaggagactgagcacccttcaggagccagcatgtgaatctcaatgtccacatgaagatgtggtagatggggctgcagcgacctcgggcagggaaaccactgaacaccgggctccagccaaatgcagcataattttgtggaagtctagaaatgctgactgtccttgggaactgctcaatattgggaatgttatcagctccgcacactg

SEQ ID NO: 12327 - DNA, 363 bp, Homo Sapiens
gaaccggacgcgatggggggcgggggtggttaggggaggagggagactagttactaacagtccaggaggggaaaacgttctggttctgcggatcggcctctgacccaggatgggctcctagcaaccgattgcttagtgcattaaaaagtggagactatcttccacgaatcttgcttgcagaggttaagttctgtctttggctgttagaaaagttcctgaaggcaaaattctcataaacttcctaaaatatttatgcgaagagtaaaacgatcagcaaacacattattgggaagttccagtagttaatgcctgtcagttttttgcaggtgagttttgtctaaagtcccaacagaacacaattat

SEQ ID NO: 12328 - DNA, 238 bp, Homo Sapiens
ggcatgacggattaaggagagaggcagcagccacccggtggcagggcagaggtaagaggaagtccactcctggcaatgaatcaaggaatatctcaaatatggaaagctcaccacggagagcaacagggtcacattactcatacattcagccagcagaaaaaatttagagagctgaccctacacagcaatccacactcaaggaaattctgtggacccggagacccccccgatacagcga

SEQ ID NO: 12329 - DNA, 291 bp, Homo Sapiens
ttaggggggctggatggaacccaatctccgtggtggtacctgaggtgtcaggcacactgacctgactccttggggtcccaggagctgagctggctcgtcccccaagcgacggcgggcagaggacaaggacgaaggcataggctccccgtgacatctggtgaggacgatgaaggcggaggacctgcggcgggaggatgattgagctgcggcagcagctggacaaggagcgctcggtgcgcatgatgctggaggagcagccttgccaacattccactaacccccgatacaggg

SEQ ID NO: 12330 - DNA, 292 bp, Homo Sapiens
gctaaaagggggtctgacaaacaaagcccgacatgtaccagcagatcctactccacattccttcctctgaccatcacctaaaggccctcttaatgccttgtcctgtgctcgcacctccctccttcctggtcttaggctccgctggtcaccacctctggggccctctggggctgaggtgtgatgtgcacgtccctgccctcctgtccattcttgctttgcatctggttgaagaggaagtttagtatttacctcgttgattctgctcaaacacaaaccacagctacccacagcg

SEQ ID NO: 12331 - DNA, 226 bp, Homo Sapiens
  misc_feature (168)..(168): n is a, c, g, or t
aagactggcaatggggacaggcctcctgggggcagatcttcacatttttcaagtgagaagccaaacattcggttattacctgaagattcttgattttcaaatgttggctacaagactcaacattttcaagagcagataaagggctggagcaggcgcagcattggctanggacaagcttcccatagtggctcctcgcccccgtatacagctgaccagggtgatccct

SEQ ID NO: 12332 - DNA, 491 bp, Homo Sapiens
cgctgtactcgggggacctcaattattacttgactttccctttagtatcccggctctgtaccgtggtagaatgaggatcatcccttcagccaggcagggattaggaggaatgttcacttaagagttctgtgtaggtgctaggatgacaacagggaggtaaacaggctcgtgcgtaactccatcacctgacctgtcagctcggagtccccgctaggctgcctccacgcagcagggccctgcagcctaagagttaaaagcacagattctagactcaggaagatccaggttcaaatctgacttaccacctatgtgatcttcagaaactcagttcatctctcagaagtgtatttcctctttaaatggggtcacggccacctgccgcacagggtcatgagaattagaggagaggaggatgtgtagtgtctggcgcagagcagacacctgtaaaatggtggcttgtctattcacatcattttctctccagttctctc

SEQ ID NO: 12333 - DNA, 110 bp, Homo Sapiens
tcgcgatgggggggagatggggacaggacatattgagggacacaaggttaccatatacccaagggagccacaccatcctagttgcctccccaaagcacatttcttccatt

SEQ ID NO: 12334 - DNA, 451 bp, Homo Sapiens
ataatttccaccaccattcgggctgtttccacgcagcgactctgaaatgaaatggggcccttatgaagggcagctaacctagggaagccctcttctgcaaatggttccactggggtctgcctgctcctgtacccaccagggagtcaggaatgcagaaggcaaggccttggtcactcacacatgcacccgttagcctctagtttctgtgggaaggcttggagcatgctgaaagtaaggcccaggactttgcagagcctgttgtattgtggacatgtcccccaaataaaatcaatcctgatgctgcactcacacagcctgaggactttctcagtgtaggtgtcagcctccaaggggctcttcgccttctgccctcagagatggacctcctagtcctcctctgacagcctagctttcactgtctgccccactaccgcccccaccccgcagatga

SEQ ID NO: 12335 - DNA, 876 bp, Homo Sapiens
ttttctccccagaagccttggtcatcatttgattatacaccggaaagggccgctggaaacccaaagcgtagggaattattagaccaatcacaacaaaagctgtatcttattcagatgattcctcgtcaaaatttatttaccaagaacttaacacctatgaactataatatattttttcacttgttaaagcactgtttcgggaggcgcagcgccactgtaatagaccacttacgttcattgactccacttgatgcgagagatatattgatgcaaataggaaaacaggaggatgagaaagtagttaacatgcaccctcaagacttcaaaacactttttgaaactatagagcgttccaaagattgtgcttataaatggctgtatgatgaaaccctggaagataggtagcaactagactgtcgtttttggtggagcggttcatttatttggaaactatgacatgaaaaccaaatttgaaaactcacatcctttcagcagaaggtaactgttcttgtcttgcacaagccaggcagatcatttctcctaagctgatatcattggcttattggatgaaacagtgtctgctattttattcacaattgaataaaatgaaaacttcaattaattgtggatttgatcagattgaattcgttttgtttcagattcctatttaaatatttcacttgtactgttgctgatttttgcatcttcttgaagagcaagagtctgtacattattaagcttagaaagtaagcaaaactgatttactggtttgcctttcagtttgttgaaatgtattgtcaagtactgtacaatgaaattgtttaaattttaatatgatttaagctttttagaaattaaaatattttaaataagaag

SEQ ID NO: 12336 - DNA, 533 bp, Homo Sapiens
tcatctaaatatgaattacagcagattaaacatgaacctattgcactctgtaagaatcaaggaagaacctgtgaatgttaatattcctgaaaagactacagcactgaataatatggatggcaagaatgttaaagcaaaattggatcatgttcaaattgcagaatttaagattgacatggattctaaatttgaaaatagcaacaaagatttaaaggaagaattgtgccctggaaatctaagtctagttgatacaaggcaacacagttcagcacattcaaatcaagataaaaaagacgatgacattttgtgctaaatttgcatataccatctaaaatccttttttaaaaaaatttaatgtaataaagattcatgaattctgaaagcaagccaaggacttgctcctatgtctgttacaaaacatagtttatgtagctttgtaacattcctcagtgcctgtccataactgtgaagtattaagcccttagggccagatgccctgtaaacattgcaggtttaaacataaaggagtcttt

SEQ ID NO: 12337 - DNA, 637 bp, Homo Sapiens
ctgacttgccaatgttgtatctatgttaaatagtaagctgatgtgtatgggagcctaaacaagtgtagtatcctgaacttctcccattaattgctattcacaattgggaaaagtgtggagattggttcctagtgagttttgtggcctactccacatttgctcttccttcctcagggttagtgatgaaaaaaagtaaatatccttttcatatgtccattagaatgtatgaaaaaaatcattttaactaaaagcaaaagaattttatcttatatctaaaaaatatataacttactatatgtttcagttgctctctgaacaaaaattatcttcaatttaatatgtggaatgtgttttctagctttctttgaattatgtatggcaacctggtttagcactggcatcctgaacagttaagagtcactgggaaattattgtatttctttataaatttactgtcatatcaattgctggaaaatgctatgatttttctattattaccttctaagttgtattctctcttacactgtagcctcaactaaggcaattttgctatgtttgttcttcactatgatttactgtgtgccaaaggagttttgacagggtacagagtattttactaaaagtatttttaaatgtt

SEQ ID NO: 12338 - DNA, 471 bp, Homo Sapiens
aaaaactctctcttcccctgctaaacgggtatgcttcctcagggtacttggtgagatgtcaattctcctgtgtatttcagggctcttttgccgagtactatgttcttcagtggctttctgatacgaagtgaaccgctcgtttagggtcattgcagctgacttgaagtattgctctttaacatgatgaaccaaggacacaatgtgttgaataaatgaccctgaagtgcttttgctggcctgtggcaacttaatgtggtcaaagatggatcggaattcttgctccttcttgacagaatggacaagtgtactagcaagcagcctgtctttagtcaaggaagcaagtctgttagaatcatcaagaggaacaggggccattttgaggttgacttcaggacggtgagaatcactcgctatcattttgatcctaagtgggctttcctctctgaaggtagacttttctcgtgcatccag

SEQ ID NO: 12339 - DNA, 948 bp, Homo Sapiens
ctgacagtgaagatagtactgtgtccatccagataaaattagaaaatgaaggcagtgatgaagatattgaaactgatgtactctatagtccacagatggctctaaagctagcattaacagaatggttgcaagagtttggtgtgcctcatcaatacagcagtaggcaagttgcacacagtggagctaaagcaagtgtagttgatgggactcctttagttgcagcaccctctttaaatgccacaaccgtagtaacaacagtttatcaggagcccattatgagccagggagcagccttgagtggtgagcctactactctgaccaaggaagaagaaaagaaacagcctgatgaagaacccatggacatggtggtggaaaaacaagaagaaacggaccacaagaatgacaatcaaatactgagtgaaattgttgaagcgaaaatggcagaggaattgaaaccaatggacactgataaagagagcatagctgaatcaaaatccccagagatgtccatgcaagaagattgtattagtgacattgcccccatgcaaactgatgaacagacaaacaaggagcagtttgtgccaggtccaaatgaaaagcctttgtacactgcggaaccagtgaccctggaggatttgcagttacttgctgatctattctaccttccttacgagcatggacccaaaggagcacagatgttacgggaatttcaatggcttcgagcaaatagtagtgttgtcagtgtcaattgcaaaggaaaagactctgaaaaaaattgaagaatggcggtcacgagcagccaagtttgaagagatgtgtggactagtgatgggaatgttcactcggctctccaattgtgccaacaggacaattctttatgacatgtactcctatatttgggatatcaagagtataatgtctatagtgaagtcttttgtacagtggtta

SEQ ID NO: 12340 - DNA, 447 bp, Homo Sapiens
  misc_feature (128)..(149): n is a, c, g, or t
  misc_feature (201)..(210): n is a, c, g, or t
cccttcaggacgtaagtatctcagtgcctggtacagggctcaactacagtatgggtgctctgactaatctattaaataaattgtctgtgttgaattatctcaaccttaaaggcaatactaagaagaannnnnnnnnnnnnnnnnnnnnnttaacagagaatatggccagtgcttgagttctttctccttctctctctctcnnnnnnnnnnaaataactcttctgggaagttggtttataagcctttgccaggtgtaactgttgtgaaatacccaccactaaagttttttaagttccatattttctccattttgccttcttatgtattttcaagattattctgtgcactttaaatttacttaacttagcataaatgcagtgtgacttttcccacacactggattgtgaggctcttcttaaaagtataatggcatcttgtgaatcctat

SEQ ID NO: 12341 - DNA, 1021 bp, Homo Sapiens
  misc_feature (53)..(53): n is a, c, g, or t
gcttccgagggtttctgagagttgggggcacgcggtccctcccaatttgtttntgcccctccatggggctcccccgagagaggtgcttccactttccaacctagctcctgatgtttgagaagctccaaggctactgggctccggaggtcccagcccggtggttgcgggggccggctgactgtgctgcggttgggcccctcctcgacactccatccgggatagtaaggtctgtatatccctgatcatgtgctgagccatcaccagccgtacccggggctcactctgaatcggggcctgttccactgttgatgtgaacatccacagcagagccgtcactaggaagattgaaggttccaaccatgacatagctgttggcattccggtcatgaacagaggccccaggcccccgagtaccagggggggatcccccaccatgagtggctgaggcagaccccgtcccagaagatgccccagaagggaggtgagtctgaggaggagcccgttccaccaggtggataacctttcccccaacattgtattcctgaagcttcttatcatcttgcagaactcgtccctggtaaatgagccgttgtttttcagatgggatgctgacagaggcagcaatgtgctccttaaactcttttacattcatctgggcccccacaataaaggtacgagtttgagagtccaaggtcttcaccaacacctccaagctgtcaggctcctccacagcggtactggtactatcattaggctccatggccgacaggtctcgtcacttccggtctcccccaaacctgccaccgacggccacttccgtttccccgatagtatttggggatctcgaagcgatacttccggctccccccaggtccccaagctttacttttgtggggcacgacgagaaagtccgcagccccaaacagtgagtttctgagggcgagtcgggccggggccggcctaggtgggagggagccgagcaccccgaggaaccgccaccgctgtcgcccggatccgaaaa

SEQ ID NO: 12342 - DNA, 447 bp, Homo Sapiens
tagaagtggcagcccagtgcgtcacacagcccggccctcttctctactgaagatggagttagctggctccaacaccacagccagttctcctgcccgggcccgaggccgacctcgaaaaactaagcccgggtctatgcaacctaggcatcttaagtcccccgtcaggggtcaggattcagaacagccccaggcccagcttcagcctgaggctcagcttcatgctcctgcccagccccagcctcagcttcagcttcagcttcagtcccataaggggttcctggagcaagaaggctcccctttgtcactgggtcagagccagcatgacctcagccagtcagccttcctgtcttggctgagccagactcagagccatagctccctgttgagcagctcagtcctcacacctgatagcagtccgggaaaactagacccagctccatcacaacc

SEQ ID NO: 12343 - DNA, 242 bp, Homo Sapiens
atatcaagtagacttgcttaaaaactggttttgaagggaggacaatgtaatgattttcatattttctatttgagacaataaagaggtagaaaacaaggaagaacagcaagagtgggcagagggcagagagggatgagttcaggtttggttgttttgacagaggtgctttagggggtcatttctaatgtgggttgaaaacatacatggggatcccggatcccacatggtaaattgattttgtt

SEQ ID NO: 12344 - DNA, 534 bp, Homo Sapiens
tactggggccggagggagagcccttcaggttcagagtgaagtactaccttgccaggactcagtcaggggactttgggagaaagacttgatagccaggctgactgggttctaggcaggccctctggaaagggtagctcacctaacaaagctcctccaactcagcatgccagacccactttgaaatctcacagaatcttgctggtaatggtgactttagaactagtagaccctttttcctaggcacggaccccccacctttgtctgtgtggtgcccaagtgcctgcgccacccccaccctcctgctgcgctgaccgctgcatggtgtcgtgacctgggcctcatttgtagctgcactgcctttccttgtctgcaaagttggttttgtccactctgaccaagacctctagtttttggtgggtagggggtctctctggtttccccttcagctataatctctatttttaaaatctcaaaatcatgtcccctccacttccactgccaaacagcttggtgaagaaacaagaagggaactat

SEQ ID NO: 12345 - DNA, 409 bp, Homo Sapiens
tggacgcctgctgctccaggctctgggctgagaaactttcaggatgctctcactctgggcgtgatccaagggacgtcgcaggcagcagctgctgatggctgcatggccctccacgctgggcttgggggttgtagtgttttgcggggagctgcccctctggctctggtctaggttggcctgtgacgcttttatgggccttgaccagggggctcggtctgggtcgccccttgacagacaggagccgctcaaccacttcctccagggtgcattcctgggctgcagtaggggatgtccagggtcaagggagaagggagccggagagggagggatgggggcttgaggaagaggcaggaaaaagcggccacctcccctgggcagaggatgggttggggccaagggcaggctcccc

SEQ ID NO: 12346 - DNA, 433 bp, Homo Sapiens
cggtaacattctcctcctgtattctctcctctctctcgtttgaaagcctgtacaaagaaatggtacaaatggatggttaacttaatgattccatcagagccagatttttctctgtcaggtccctggataaggtggaggtctgaaagccaggagacagaatatgtacttaatcgccctttctgacctgcttaccagtgaccaggactactctccaggcctttcttctgccacttccccattcttcctggctagttcagttgggtctcagcacttcaactcctggctggatcctgagtttttcttggttgcagggaaagctctcactgtctgcatctccttccccacccccacctcccgttttgcagctggccattctggctgcctcacagctatcctgccttaattcatatttgattgcctggacagaaccacc

SEQ ID NO: 12347 - DNA, 381 bp, Homo Sapiens
cccttcattcagcaaatacaagtacccccagagaatcccattcccctagacagagcaggtggttctcccgcgaagagagtcagatacaggccactgagggggtcttcctgggctagctgaagcagagcccgccaaaatagcttctttaccaatgagaacatttctgaatataacaccagaagcatctatacaattggaaaaaattgcgtgaattttaaggattgaacatgtattgttttaaacataggaatatataggtgccttaaaagcatacacatccacattacactgagtagatcgagtctttctctcctttgcctgccttcctcaccaacctcctgcctcttcacactgtgtggggtgtgtatcggtggtgtgtgg

SEQ ID NO: 12348 - DNA, 608 bp, Homo Sapiens
cagaatcagatgactggcataacctttcttttggagattaaagagaccacagagtcgcttcatggagatataagtagcctgaaaacaacttcactagagggcttagctggtgtagaggaagccagagaacaaaatgaaagaaatcgtgactctggtaatctgcatatgcttcataaaagaccactggatcccaagagtgaagctcagcttcaggaaattcggcgccttcatcagtatgtgaaatgcgctgtccaagatgtgaatgatcgttctagacttggagtgggatcagaatctggaacaaaagaaaaaacaaaggcacctgcttgtgccagagcgagagacactgtttaacaccctagccaacaatccgggaaatcatcaaccaacagaggaagaggctgaatcacctggtggatagtcttcaagcagctccgcctttaacaaacagacttccctgtggagcctgtcctcggctgttccttcccagagcagcattcacagttttgacagtgacctggaaagcctgtgcaatgctttgttgaaaaccaccatagaatctcacaccaaatccttgcacaaagtaccagccaaactgtcccccgata

SEQ ID NO: 12349 - DNA, 288 bp, Homo Sapiens
aggcagaacagtactggcggaagtagcagttgaggggtgacgccaagcactcgaagctgacgccaaagagtcggtggagggcctcaaagacatgcacaggcagcgatccctgcaggccagtcccctcgtagaggcccacgccgaacatcatctggtaccgtcggagaagacatccagacccggggcagcaacctctcaaaggcagagtcatcaatgcagctgtagcggtaaaggagccacagcttgctgaagtagttgtcggctgacctgaccatctctccctattaa

SEQ ID NO: 12350 - DNA, 1024 bp, Homo Sapiens
tcatgagccaccatgcccgacttccctttgtgtaaaatgagataatatgtatgtcacagaattgttttaaggatgataaaggactaagtgagataatgtaggtgaagtttagtatgatgcctggctcatagttaagtgctgaattatgatagtaatcaatatctactcctaacctctttcttcacagattttaagcttctgtctttctagggggttaagagtcataaaccaaaattacactttcctctgctaggtttcctccctttcctcttcttgacagtctgatgggaaacaaaggcacacataagagcctagttccaagtagtcaagagcctgagaggaagggatatggagagtaatccttcatatctccaggagtgcctgtgaagaagctgaggaatgcggactgggaaaacacactaatggataaggaaaaacttttcctggggttcgggaacacgagatagaaagtgcacaactggctacataacataagaatattgtgtcaataatgtctaaatgcctccgagagcattgagatgggaattgtctgggacagcgtgacaacggggctgtgagctgggtaaagagaggaattcgggagaataacggcgaccatctaacaggcactaacctgccattaagtgctcacattagtgccagcaaggagcaccgaagttacagtactctaggcttagacttggaggaaaagacaggcaatgcacgtaaggaggggtaacaaaagcagagctgagtctgatagcaagacagagatactagggcacgacaaatggagatgcgggcagactcacggcgcaacaaaaatctcacactgacccggcagatactgggaagccgataaagtaaaacacagacacgcagacgcgcgatacaataggaacaaaagaacacgaaagatacggacagagaccagcaatacaaagacaggcaaagtacaaagacaagaagaaggaagagacacaaacgacaatccaaaaagcggaccgcaccagggcgagtcagg

SEQ ID NO: 12351 - DNA, 489 bp, Homo Sapiens
gtgggcagccccatcactgtgttcaatagtgtgagaatgtagctaaagcccctgctgctgctgctgcacatgccacagcaggcggtgggggctgcgtggggacaatccatcgtggagtgttctctcagcttaggtctggacaggagacttggcgggagatgctccaggatgtgggtgattctgtacctggggaggctatctctgacctcccgacaggggacactcccaggccagcccaggggtcaggggcagaggtgcacacctcagcatgagccaagactggggtcagggagcaggtgtggtttgagccaggacctggggcgggggtggggccggggcctttctgcctcatttgctttcaatgaaagcctcaaagcagccaaaaccaggctttcccccttcctcgagtttgaatatccagaatcttttgtacttcttgttggttaaattgtttatttttgtaaaaaataaaataaaattagttaataa

SEQ ID NO: 12352 - DNA, 400 bp, Homo Sapiens
  misc_feature (103)..(111): n is a, c, g, or t
tttttttgagttatgatatagttattttttattgtgtaagcccttattagttcctccctcatcccatcttaaaatattcaacaatagatagtggctcaaaaannnnnnnnnaaaaaaacagactgccatgaaaaccaaatcttttcttcctgtaatagtggcttcctagtgttatttctcattaatgggagtatccgtggacttaactgtatattgcattttagttctggtcgtgtaataatttaatgacttcacacataaaaaactaatcttgtcttgagttttaaaaagttactagcacccatggttaaggaaggaaaactgtagctcacttcttcaatacatttgtttcttttcaattcatgaaatcagagaatatggaagaaacaggatgacagtc

SEQ ID NO: 12353 - DNA, 437 bp, Homo Sapiens
  misc_feature (99)..(119): n is a, c, g, or t
  misc_feature (169)..(194): n is a, c, g, or t
tgactttaaccaggtttcagaatctgggccttacctttacaggttcaacaaaagaatggcatcaatagaggcagaagtatagacattgttttaaaaatnnnnnnnnnnnnnnnnnnnnnaaacattttagcattatagctgtctgaatccttcaataagaaggagaggnnnnnnnnnnnnnnnnnnnnnnnnnnaaactcaacaaccataaaacaaccctgcatgttataaaaggcagaattaaattttatttatttaaatccatggaactctggtaggccaggatatattatagtaccattatcaatgtgatattctgaaaatatgaactgagcgtcattaacaattgttggtacctaaacacaaaatgaatttcaaaagttactttgttctcaagatatgtcattcttttgggaataaatacttctggtgacaaa

SEQ ID NO: 12354 - DNA, 1044 bp, Homo Sapiens
ctcttgacaaagagtaaaaaatgagactaagagccttgactatcatatgtctgttgagcacttgatacctgaaaaatttagatgactgggggtggggaagctttgaataaccagatatatacatatagatagatagctaaaggaatctcatcactacactttcatttttttatttataaagtactccttatgtatcaactcttgtgctaggcacagaagatgcaatgctgaataaaacagacagcttagattcctttttgtgaagtgtaacatgtacccttcccaaatgttttattaatcacagattcctatcattgggtgcctcataaatttgtattctttcaccacttctaaagtcaagctctacatggtaacgttcctcagtttggagacactagacatgcttcccttcttctgtggagtttctggtgtctaagaaggctcgatcgcctactaaagtttctctggcataagctacatgtataagggctgctcacctgtgtgagttctctggtgtttaaataaggtgggagttctgaatgaatctttttccacattcatcacatttaaagggcttctctcctgtgtgaattctttggtgtgtgtgtagatttgtgttatgactaaagcttttcccacaccatgagcatctatatggttttattccttgatgggtcatgaagtgcttattaagatctgaactccatctaaacctcctgtcacattgttgacatttatagggtttctctccagctgtgaattactgtggtggtttaataagagtcagagctaacatctgaagcttgttcccatcattctctgacaccttaaaacggtttctgcccctgtggggcctttccgcatgaagatccatgaagttgttggaagctcattgtttacaagttgcaggtttctttcttttcttccttggaaaagctcgatgccatttctgtaccctgtgtgtatcaccaggattttcctgcccattgttttctgggcatttcattctgtctttttgcacttgcatccagagaggatcctctg

SEQ ID NO: 12355 - DNA, 551 bp, Homo Sapiens
  misc_feature (487)..(487): n is a, c, g, or t
agcggccgccagccggggcgatggcggggctctggctggggctcgtgtggcagaagctgctgctgtggggcgcggcgagtgccgtttccctggccggcgccagtctggtcctgagcctgctgcagagggtggcgagctacgcgcggaaatggcagcagatgcggcccatccccacggtggcccgcgcctacccactggtgggccacgcgctgctgatgaagccggacgggcgagaattttttcagcagatcattgagtacacagaggaataccgccacatgccgctgctgaagctctgggtcgggccagtgcccatggtggccctttataatgcagaaaatgtggagggaattttaactagttcaaagcaaattgacaaatcctctatgtacaagtttttagaaccatggcttggcctaggacttcttacaagtactggaaacagatggcgctccaggagaaagatgttaacacccactttccattntaccattcctggagatttcttagatatcatgaatgaacaagcaaatatattggtaagaaacttg

SEQ ID NO: 12356 - DNA, 289 bp, Homo Sapiens
gcggaaggccaggcagggccttcctcctcttcctcctccccttcctcgggaggctccccagaccctggcatgggatgggctgggatcttctctgtgaatccacccctggctacccccaccctggctaccccaacggcatcccaaggccaggtggaccctcagctgagggaaggtacgagctccctgctggagcctgggacccatggcacaggccaggcagcccggaggctgggtggggcctcagtgggggctgatgcctgcacccccagcacaataaaaatgaaacgtg

SEQ ID NO: 12357 - DNA, 543 bp, Homo Sapiens
  misc_feature (416)..(432): n is a, c, g, or t
tatattcctgtttagatttttgcaggagagaagttaaaaggatttgctccttgtatgatgtaagtggcccaccccaattttgtaacatgatgcaagtgtctggcactaagggaagcaagagtagggttgtggaaagaccaagctgatggggagggacttgtttacgggaatttttttagttttccttttcaaaggaaaacattaaaatcccttaggaatttggtattcacatctcagagaactacaacacaaaagtgcagacttatatttgagaattaatgttaaccctttgtgtctagtttgaagcttcttgtatttgtctaaaacaacaagccagaattttgtatctcctttgataaaaagtgtgtataatgtaaagtagttttgcatattcttgtgctgcacatgggctgaannnnnnnnnnnnnnnnnaaaaacttgaagcagaaccttgtaatttgtgtaaatgacaagtgtaaaatcctaccataaaatgctaaaaatatgcactgtttcaaataaaaccaagaaatgcagcattaa

SEQ ID NO: 12358 - DNA, 554 bp, Homo Sapiens
gccattcagagactggagtgagatttgggtgtggagggggaggcgccaaggtggaggagcttcccactccaggactgttgatgaaagggacagattgaggaggaagtgggctctgaggctgcagggctggaagtccttgcccacttcccactctcctgccccaatctatctagtacttcccaggcaaataggcccctttgaggctcctgagtgccctcagatggtcaaaacccagttttccctctgggagcctaaaccaggctgcatcggaggccaggacccggatcattcactgtgataccctgccctccagagggtgcgctcagagacacgggcaagcatgcctcttcccttccctggagagaaagtgtgtgatttctctcccacctccttccccccaccagacctttgctgggcctaaaggtcttggccatggggacgccctcagtctagggatctggccacagactccctcctgtgaaccaacacagacacccaagcagagcaatcagttagtgaattgaatggaaataaacgctttagttataatatga

SEQ ID NO: 12359 - DNA, 932 bp, Homo Sapiens
tggcatcaccctcttatcccaaaagaatatgccagttcccatccagcaccgaagaaaatcagctcctggggctggtggttggaggtgggtctgtccactgtgggggccaaagtgttcccctgctggagacagtttgcaagttaagaacctaaggtatggggacagcatcctgtgcttgggcattgaccagccaaagctcacatttagaaatccctcagtgcttctgtggtttcacctgggcatcgacgacattagggaagcctttgtgaccacaagggcagggcttgtgccctgagtggcgaggtggtgacctgaggccagtgtgatgtggttggatctcagcgtgtactgaatgccagtctggccggacacactcgaacgctaagagaatggtccaatttgatgatcttatttctatttcgatcaggttttgactttttgtagatgaaaactaccagggaaaaggggaagcaggtacccaataaagtttagaaagatccagtctgtgaaacccttagagatgggctgaaagttaagtccaccaacccttgggcttaatcaggacggaagaggagggggtgtggggggcagagcgtaatacaagccccagccctaatcccggccccccagcccagtcttcccaatcccagaggccccggcggcctgtgctcctcaccaccctggtcaggggaatagaaggaaatgcaatttccgcctgtctgcccgacttccaaaaactgcctcctcctgcccaggcctctcccaccaccaccttccctccaaagataaccgtgtccatgccatccgtggcatcatctcgagttttcatttttggatgaagtgacatttagctttaacaagacatttccaaagcgcctagtctcctccaaaatgctaactttaaaagttgggcattgtaggcgaaaaatccc

SEQ ID NO: 12360 - DNA, 389 bp, Homo Sapiens
gcacgaggccttggcccacctaaggccccaggtgggaacatggtcacccccactctgcataccctcatcaaaaacactctcactatgctgctatggacgacctccagctctcagttacaagtgcaggcgactggaggcaggactcctgggtccctgggaaagagggtactaggggcccggatccaggattctgggaggcttcagttaccgctggccgagctgaagaactgggtatgaggctggggcggggctggaggtggcgccccctggtgggacaacaaagaggacaccatttttccagagctgcagagagcacctggtggggaggaagaagtgtaactcaccagcctctgctcttatctttgtaataaatgttaaagccagaagtt

SEQ ID NO: 12361 - DNA, 284 bp, Homo Sapiens
aatcatttggccattcttactgtctcttagatattgtgctgggggccagcaagagaggcagagcaagggacttgcagattactagcagatgatcagtaaagataagtgccattaaaaggagaggtagttgctgacaagctgccagggtatttaaggataagagtgactaatgtatgctgagggcctactgtgtgtcaggggctttatgtacactctctcaagtgtcttgacaacaacccaggagggaggagctattttcgttgttaccagatgaggaaataaag

SEQ ID NO: 12362 - DNA, 378 bp, Homo Sapiens
ggagctgagccccgccctgccatgaggttttcctccccaggcaggcaggaggccgcggggagcacgtggaaagttggctgctgcctggggaagcttctcctccccaaggcggccatggggcagcctgcagaggacagtggacgtggagctgcggggtgtgaggactgagccggcttccccttcccacgcagctctgggatgcagcagccgctcgcatggaagtgccgcccagaggcatgcaggctgctgggcaccaccccctcatccagggaacgagtgtgtctcaaggggcatttgtgagctttgctgtaaatggattcccagtgttgcttgtactgtatgtttctctactgtatggaaaataaagtttacaagcac

SEQ ID NO: 12363 - DNA, 522 bp, Homo Sapiens
aatgcgttctccacatggataatttgtaactgagaccatgacatcactacaggcagccataagaggtgccttacatgtggtagcagctctggtttgattcaagttgctaccatgtacattgacagcacatataccataaccagcgtgttgggttgaattgcactttctacctttgtatgagatttacagactttccttctgggtttgtatcatgaccagaggggtactatagggttggtttatactgcaatatagaggatcagaagccatttgatttggtaggtgtgtcagaagggagaatgatggcagacgaactgctggaagaggtcagaagatagccatgctaaaatgcaattatatcctcatgtttatcccaaactaatcttggacttttccactcattagctttgttttgcccttgtttcccttgaaggtttaagttcaaccatattctgtcaactgttcagtttcagtggaatcttgtatttctggttcattataacaaactgttcgcttaaatcc

SEQ ID NO: 12364 - DNA, 638 bp, Homo Sapiens
  misc_feature (52)..(52): n is a, c, g, or t
  misc_feature (581)..(595): n is a, c, g, or t
ttgccacagaacatggactcgtgtttaagagctctgggaaagacttctgtcngccagggccttgggccagcatctaccacctctccccagtctggggccccaaagccaaaaggccccgcccaccagccgcctgggcaggaacaaaggcttctcccggggccctggggccacagcctcaccctcagcttcccacccccagggcctagacacgacccccaagccacactgaggtgccgctgctggagatgcgtgcccccggcggctacccgctggaccggccactctccccagcccccttgcttctctccagccctgtccagcaagtgcagggtgcctgcacttcaccctgtgcagagaggtgggatggggccgtgcacacagggatgcccgctccacatcctgcctgcccctcagccctggcccaggccccttttggaggcagctgaggaaggatgctggggaaagccctcttctgcagctttgtggaaggctgatcagtggctgctgggtggcgggtacccttgctcagatgcctggcagggctgggtggcgattcataaagacctcgtgttgattccccnnnnnnnnnnnnnnngggcggcgctcgcgatctagaacactagttctagatcgcgagc

SEQ ID NO: 12365 - DNA, 454 bp, Homo Sapiens
agtttctgcttttattaaaattgttcacagttttatacattcatgttcattaaaaatgctatttagaaaagagtttgataaaataaatattatacaaaattcgaagaaaaaagaaaagagtttctgtttcagtcacaaattagggttattgtgatgtgtatttatcatccccaccttcctgcctcccatcatgctcttcatccctccctccccctttattaccgttttttgtacttgatgccttctctgtgagcagtggctctgtgggaaggagggagccgggagcctggtgggaagccttccccagagagatggctttaggggctttatttaaagactgtgatgatggagccacgcaaggctgcacctctgtgtgttgggagacgatgatgatgtccattgctgtgtgatggcttggaatttaatttattaaagtcaaattggagtttaaaaa

SEQ ID NO: 12366 - DNA, 578 bp, Homo Sapiens
  misc_feature (268)..(268): n is a, c, g, or t
gagctgcgaaagaaactgaagtgcaaaagtttcaaatggtacttggagaatgtctttcctgacttaagggctcccattgtgagagctagtggtgtgcttattaatgtggctttgggtaaatgcatttccattgaaaacactacagtcattctggaagactgcgatgggagcaaagagcttcaacaatttaattacacctggttaagacttattaaatgtggagaatggtgtatagcccccatccctgataaaggagccgtaaggctgncacccttgtgataacagaaacaaagggctaaaatggctgcataaatcaacatcagtctttcatccagaactggtgaatcacattgtttttgaaaacaatcagcaattattatgcttggaaggaaatttttctcaaaagatcctgaaagtagctgcctgtgacccagtgaagccatatcaaaagtggaaatttgaaaaatattatgaagcctgaagtgtaactgagggtgggagatagtaaacccattaaatactgtgaaaataacactgaacttggaaactatatttctcagcggtagtttaaattttca

SEQ ID NO: 12367 - DNA, 718 bp, Homo Sapiens
cggcggctgcaggcggcgggcaaggacggcgggcacagcgcagcactccccgctcgttggcccgggtatcccagcgcggacccacgcgatacgctgacgccccgacgccgatccggccgagccaagactcaacgatgactctgaataatgtcaccatgcgccagggcactgtgggcatgcagccacagcagcagcgctggagcatcccagctgatggcaggcatctgatggtccagaaagagccccaccagtacagccaccgcaaccgccattctgctacccctgaggaccactgccgccgaagctggtcctctgactccacagactcagtcatctcctctgagtcagggaacacctactaccgagtggtgctcataggggagcagggggtgggcaagtccactctggccaacatctttgcaggtgtgcatgacagcatggacagcgactgcgaggtgctgggagaagatacatatgaacgaaccctgatggttgatggggaaagtgcaacgattatactcctggatatgtgggaaaataagggggacaatgaatggctccatgaccactgcatgcaggtcggggacgcatacctgattgtctactcaatcacagaccgagcgagcttcgagaaggcatctgagctgcgaatccagctccgcagggcccggccagaccagaggacattcccataatttgggtaggcaacaaaagtgac

SEQ ID NO: 12368 - DNA, 972 bp, Homo Sapiens
gttactatcaagcaaccaaactgcaagctttgggagttgttcgctgtccctgccctgctctgctagggagagaacgccagagggaggcggctggcccggcggcaggctctcagaaccgctaccggcgatgctactgctgtgggtgtcggtggtcgcagccttggcgctggcggtactggcccccggagcaggggagcagaggcggagagcagccaaagcgcccaatgtggtgctggtcgtgagcgactccttcgatggaaggttaacatttcatccaggaagtcaggtagtgaaacttccttttatcaactttatgaagacacgtgggacttcctttctgaatgcctacacaaactctccaatttgttgcccatcacgcgcagcaatgtggagtggcctcttcactcacttaacagaatcttggaataattttaagggtctagatccaaattatacaacatggatggatgtcatggagaggcatggctaccgaacacagaaatttgggaaactggactatacttcaggacatcactccattaggcacagtgaacgtgggtcaactaatcaaagaagtgaaaaagtttgagaaagtaatcgtgtggaagcgtggacaagagatgttgctttcttactcagacaagaaggcaggcccatggttaatcttatccgtaacaggactaaagtcaaagtgatggaaaaggattggcagaatacagacaaagcagtaaactggttaagaaggaagccattaattacactgaaccattttgttattttaccttgggattaaatttaccacacccttaccccttccccatcttctggagggaaatttgggatcctcacctttttccacttctctttattgccttgaaaaaagtgtctcatggaggccattcaaaaatcccaaaaggggtcaccctttggtccgaaaatgccaccctggtaaaattaattaactccttcctt

SEQ ID NO: 12369 - DNA, 453 bp, Homo Sapiens
  misc_feature (53)..(53): n is a, c, g, or t
cgggcgccgggcggggcggccgtggagcagcagcctcggtgcgacgtggaggnctggaggcggcggcgatgcactaggcctcgctcagggcggctgccccgggacccgcagttgagtggtgattttatgcaatggcttcaagccacagttcttcaccagtgcctcaaggaagcagcagtgatgttttctttaaaatagaggtagatccatcaaaacacattcgacctgtgccatcactgccagatgtgtgtcccaaggaacccacaggtgattcacatagtttatatgttgccccatctatagttacagatcaacatagatggactgtatatcattccaaagtaaatctcccagcagcattaaacgatcctagattagcaaaaagagaatctgacttattcacaaaaacatggggattggactttatggacactgaagtcataccttcaatct

SEQ ID NO: 12370 - DNA, 887 bp, Homo Sapiens
gtcacggagaggtattaagaaatggagagaaaaataagcagaatccaccttgtttctgaacccagtataactcattttctacaagtatcttgggagaaaacactggaatctggttttgttattacacttactgatggtcattcagcatggactgggacagtttctgaatcagagatttcccaagaagctgatgacatggcaatggaaaaagggaaatatgttggtgaactgagaaaagcattgttgtcaggagcaggaccagctgatgtatacacgtttaatttttctaaagagtcttgttatttcttctttgagaaaaacctgaaagatgtctcattcagacttggttccttcaacctagagaaagttgaaaacccagctgaagtcattagagaacttatttgttattgcttggacaccattgcagaaaatcaagccaaaaatgagcacctgcagaaagaaaatgaaaggcttctgagagattggaatgatgttcaaggacgatttgaaaaatgtgtgagtgctaaggaagctttggagactgatctttataagcggtttattctggtgttgaatgagaagaaaacaaaaatcagaagtttgcataataaattattaaatgcagctcaagaacgagaaaaggacatcaaacaagaaggggaaactgcaatctgttctgaaatgactgctgaccgagatccagtctatgatgagagtactgatgaggaaaagtgaaaaaccaaactgatctctctggggtgggcttcagctgctgtaagtaaaagatgattccattatttcaagtcttgatgtccctgatattgcccaagtagaaaaagggagaccaggaatgccaggaaatctgggacagaacctaaaatggtcct

SEQ ID NO: 12371 - DNA, 345 bp, Homo Sapiens
tacaggtgtgagcactgagcccagccatttaggaagtattataaaggcccttaaagttcgtaaggaaatgaaagggcttcgtattaccttttcaactaggcaacaatgtactttttctttccttagactttggcttactggaagatttaattaaaaggtagaggagaagtaaatttgctgtaataattttgctgtaaataaaacaaagagtttattttattagataaagaatgtgaagtaagcatgaagagacaggctttgggagaaataccagaaagggatttttcaaagatggcattgtttaatctccgtgtggccctcggttgtgcaatcacagatgagcca

SEQ ID NO: 12372 - DNA, 1095 bp, Homo Sapiens
  misc_feature (54)..(92): n is a, c, g, or t
  misc_feature (867)..(867): n is a, c, g, or t
attcccgggatgcggccgccgcaggtagatcgctcctgctgctcctctcctctnnnnnnnnnnnnnnnnnnnnnnnnnnnnnnnnnnnnnnnctgactgccggctgcttccctgggctgggcgtcagccgccaccggcagcagcagcaccaccggacggtacaccagaggatcgcttcctggcagaatttgggagctgtttattgcagcactgttgtgccctctgatgatgttacagtggtttatcaaaatgggttacctgtgatatctgtgaggctaccatcccggcgtgaacgctgtcagttcacactcaagcctatctctgactctgttggtgtatttttacgacaactgcaagaagaggatcggggaattgacagagttgctatctattcaccagatggtgttcgcgttgctgcttcaacaggaatagacctcctcctccttgatgactttaagctggtcattaatgacttaacataccacgtacgaccaccaaaaagagacctcttaagtcatgaaaatgcagcaacgctgaaatgatgtaaagacattggtccagcaactatacaacacactgtgcattgagcagcaccagttaaacaaggaaagggagcttattgaaagactagaggatctcaaagagcagctggctccccctggaaaggtacgaattgagattagcagaaaagctgagaagaggaccactttggtgctatggggtgggccttgcctacatggccacacagtttggcattttggcccggccttaccctggtgggaatattcctggggacatcatgggagccagtaacatactttcatcaacttatgtaaggtgccaatggcaaatgtatggcctattttngtaaatgacacccccagggaatatggtttattccaggaagcccagaagaccgaacaaaaacttaactattttttccataaaagggagcccaaaaaggccacggttttgaacctaaagaaaataccattccacctccagggaatgcaattgtgctcccgggccaaaaatgggacccctataagagactgtgagaaaacccctttcacaaggacatttgggcctctctcc

SEQ ID NO: 12373 - DNA, 575 bp, Homo Sapiens
  misc_feature (412)..(412): n is a, c, g, or t
  misc_feature (429)..(429): n is a, c, g, or t
  misc_feature (523)..(523): n is a, c, g, or t
  misc_feature (538)..(538): n is a, c, g, or t
ctgtcatggcggcggccgcccccaatgccggaggctcggcccctgagacagcgggttccgccgaagctccgctgcagtacagcctgctcctgcagtacctggtgggtgacaagcgtcagccccggctcctggagcctgggagcctgggcgggatcccaagtccagccaagagtgaggagcagaagatgatcgagaaggcgatggaaagctgcgctttcaaggctgcgctggcctgcgtgggaggatttgtcttaggaggtgcatttggggtgtttaccgctggcatcgataccaacgtgggctttgaccctaaggatccttaccgtacaccgactgcaaaagaagtgctgaaagacatggggcagagaggaatgtcctatgccaaaaatttcgccattgtgggagccatgtnttcttgtctggagtgtntgatagaatcttaccggggaacatcagactggaagaccagtgtcattcagtggctgcatacgggaggagctatttgttttcagagctggcttanagctgggcattgttnggggaagggttttgctgctttctctgctgcgattgat

SEQ ID NO: 12374 - DNA, 296 bp, Homo Sapiens
atacaaatacaagttaattagctctattaagttgcaattttatttttataaagctttgtaaagttatgaacatggaaaccctaagaatcacctaagctttttacataagtaaatttcaagttgacagtctgtccattttgaactatttataattaacaggacacttaacacagtaatatcttagacaaggaagagggcattaattctgcaggcaggtagcaatgaaaatgccaaacctgaacaatcagtcactatttccttatacagtttgagtaaaagaggtagactacagaaag

SEQ ID NO: 12375 - DNA, 519 bp, Homo Sapiens
ctcaggaagagtgagattttatatttgacaataaagtgttagactccatttctaaataccagacttcaaaagataaggttcaaaagtgttataagaagatattcctttttttgtcctagagaacttattttcctgtgaaaatgcctaccacaaagaagacattgatgttcttatcaagctttttcaccagccttgggtccttcattgtaatttgctctattcttgggacacaagcatggatcaccagtacaattgctgttagagactctgcttcaaatgggagcattttcatcacttacggactttttcgtggggagagtagtgaagaattgagtcacggacttgcagaaccaaagaaaaagtttgcagttttagagatactgaataattcttcccaaaaaaactctgcattcggtgactatcctgttcctggtcctgagtttgatcacgtcgctgctgagctctgggtttaccttctacaacagcatcagcaaccctaccagacatcctgagcaacgg

SEQ ID NO: 12376 - DNA, 442 bp, Homo Sapiens
  misc_feature (51)..(52): n is a, c, g, or t
aatcactggaaactcaaagagtggaagagtggaagtgcgaaggaatcttgnngtagctcttaactaattcgccagcagtgaagaaacttcaaccaatcatgttttccttgaattttgcaaagaaagaaaatccaaagcattgcttggatgttcttttaaggcattttatatcagttgaaccttaaactgaaatatgaagacaagctttataaactagttttttgatatgaagtatatcaattatgtttgccttttgtgaagaagtaaatgagttgaatttgtatttcacttactagattatactaatgagctaatggggtcattgccatcctccctactcatgactttgatgagttattgctgtaacatcacttcttgatttaatttgatatggaatcagaattgggagaaggtatttttaaataaacaactttttaatgga

SEQ ID NO: 12377 - DNA, 301 bp, Homo Sapiens
attgttgaatcttcgaaagatttcaaagtgcaaggcatcttcccagttccacctggcagtgtgggtattaatgtgcctacaaatgatttgaatttgaaatttggaaaagaaaaacaagtgtcatcaataccacaagatgtgagagattcagagaagatgcctagaatctcaggttttggcacattacttaagactcagtcagatgcgataataacacagcagcttgtaaaagacaaactacgagccaccacacaaaatttaggttctttttatatgcagagtccacttttaaattcagaac

SEQ ID NO: 12378 - DNA, 1035 bp, Homo Sapiens
ggaccggtccggaattcccgggatctttgaggccagggcaatacagcaccatctctgaagtagctttgcaatctggaaggggtacagtgtcccttccctcaaaggctgctgagcgggtggtgggccgatggctcctggtctgcagtggaacagtggctggagcagttattcttggtggagtaactaggttgacagagtctggcctctcgatggtagattggcatttaataaaggagatgaagccacctacaagccaagaggaatgggaagcagaattccaaagataccagcaatttccagaatttaaaatcttgaatcatgatatgacactgacagaattcaagttcatctggtacatggagtactcacaccgaatgtggggtcgccttgtaggccttgtgtacatcctgcctgctgcctacttttggagaaagggctggctcagccgtggcatgaaaggacgtgttcttgccctctgtggcctcgtctgcttccagggtctgttgggatggtatatggtgaaaagtggactagaagaaaaatcagactcccatgacatccctcgggtcagtcagtaccgccttgctgcccacctgggatcagccctggttctttattgtgccagcttgtggacctcactgtcactgctactccctccgcacaagttgcctgaaacccaccaactcctacagttgagacgatttgctcatggaacagcaggtcttggtgttccttacggccctctcaggggcttttgtggcagggctagatgctgggcttgtttataactccttttcccaaatgggagaatcctggatcccgggaggacctctttaccttctcccccatcctgaggaatgtttttgagaatcccaccatggtgcagtttgatcaccggattctgggaatcacttcagtcactgccattacagtgctctacttcctctctcgggagaattccccttcctagaaggaccagatggcagcagtgactctgctggctttgggcgtatacacagggggggctgggcatca

SEQ ID NO: 12379 - DNA, 459 bp, Homo Sapiens
  misc_feature (136)..(136): n is a, c, g, or t
gctatgagctgcaccatcgagaagatcctgacagacgccaagacgctgctggagaggctacgggagcacgatgcggccgccgagtcgctggtggatcagtcggcggcgctgcaccggcgggtagcagctatgcggngaggcggggacagcgcttccggaccagtatcaagaggatgcatccgatatgaaggacatgtccaaatacaaacctcacattctgctgtcccaagagaacacacagattagagacttgcaacaggaaaacagagagctatggatttccttggaggaacaccaggatgctttggaacttatcatgagcaaatatcggaaacagatgttacagttaatggttgctaaaaaagcggtggatgctgaaccagtcctgaaagctcaccagtctcactctgcagaaattgagagtcagattgacagaatctgtgaaatgggagaagtgat

SEQ ID NO: 12380 - DNA, 616 bp, Homo Sapiens
aaaagccttaggaaattagacttgagtcacaaccatataaaaaagcttccagctacaattggagacctcatacaccttcaagaacttaacctgaatgacaatcacttggagtcatttagtgtagccttgtgtcattctacactccagaagtcacttcggagtttggacctcagcaagaacaaaatcaaggcactccctgtgcagttttgccagctccaggaacttaagaatttaaaacttgacgataatgaattgattcaatttccttgcaagataggacaactaataaaccttcgctttttgtcagcagctcgaaataagcttccatttttgcctagtgaatttagaaatttatcccttgaatacttggatctttttggaaatacttttgaacaaccaaaagtccttccagtaataaagctgcaagcaccattaactttattggaatcttctgcacgaaccatattacataataggtaagattttaatagtcatgtaatgtggtgtctttgatagcattctaatattcctatcaaactcagagtaataaagtctaacattgcttacagtgctatgcacagtctgaccctttgctataatggtcttcttgttcctt

SEQ ID NO: 12381 - DNA, 560 bp, Homo Sapiens
  misc_feature (36)..(36): n is a, c, g, or t
  misc_feature (109)..(109): n is a, c, g, or t
ctggaaggacagccgggaataaaacgtgccggcgangtctaggagtcattggtcacagagacccagcccgagtttcccatcgcactgagcactgagatcctgctggaanctcctgcccgcagcatgagctccgcagccgggttctgcgcctcacgccccgggctgctgttcctggggttgctgctcctgccacttgtggtcgccttcgccagcgctgaagctgaagaagatggggacctgcagtgcctgtgtgtgaagaccacctcccaggtccgtcccaggcacatcaccagcctggaggtgatcaaggccggaccccactgccccactgcccaactgatagccacgctgaagaatggaaggaaaatttgcttggacctgcaagccccgctgtacaagaaaataattaagaaacttttggagagttagctactagctgcctacgtgtgtgcatttgctatatagcatacttcttttttccagtttcaatctaactgtgaaagaacttctgatatttgtgttatccttatgattttaaataaacaaaataaatcaaaaaa

SEQ ID NO: 12382 - DNA, 757 bp, Homo Sapiens
tgcccctggccgtggtggtcttctgctccctgaaggtggtgactgccctggcccagaggccacccaccgacgtggggcaggcagaggccacccgcaaggctgcccgcatggtctgggccaacctcctggtgttcgtggtctgcttcctgcccctgcacgtggggctgacagtgcgcctcgcagtgggctggaacgcctgtgccctcctggagacgatccgtcgcgccctgtacataaccagcaagctctcagatgccaactgctgcctggacgccatctgctactactacatggccaaggagttccaggaggcgtctgcactggccgtggctcccagtgctaaggcccacaaaagccaggactctctgtgcgtgaccctcgcctaagaggcgtgctgtgggcgctgtgggccaggtctcgggggctccgggaggttctgcctgccaggggaagctggaaccagtagcaaggagcccgggatcagccctgaactcactgtgtattctcttggagccttgggtgggcagggacggcccaggtacctgctctcttgggaagagagagggacagggacaagggcaagaggactgaggccagagcaaggccaatgtcagagacccccgggatggggcctcacacttgccacccccagaaccagctcacctggccagagtgggttcctgctggccagggtgcagccttgatgacacctgccgctgcccctcggggctggaataaaactccccacccagaaaaa

SEQ ID NO: 12383 - DNA, 1494 bp, Homo Sapiens
gctggaccggtccggaattcccgggatttgcaatcgcggtacctgtggatgagagacatagacgagagagtgagatggcctggtttgccctctacctcctgagccttctctgggctacagctgggactagtacccagacccagagttcatgctccgttccctcagcacaggagcccttggtcaatggaatacaagtactcatggagaactcggtgacttcatcagcctacccaaaccccagcatcctgattgccatgaatctggccggagcctacaacttgaaggcccagaagctcctgacttaccagctcatgtccagcggacaacaacgatctaaccattgggcagctcggcctcaccatcatggccctcacctcctcctgccgagaccctggggataaagtatccattctacaaagacaaatggagaactgggcaccttccagccccaacgctgaagcatcagccttctatgggcccagtctagcgatcttggcactgtgccagaagaactctgaggcgaccttgccgatagccgtccgctttgccaagaccctgctggccaactcctctcccttcaatgtagacacaggagcaatggcaaccttggctctgacctgtatgtacaacaagatccctgtaggttcagaggaaggttacagatccctgtttggtcaggtactaaaggatattgtggagaaaatcagcatgaagatcaaagataatggcatcattggagacatctacagtactggcctcgccatgcaggctctctctgtaacacctgagccatctaaaaaggaatggaactgcaagaagactacggatatgatactcaatgagattaagcaggggaaattccacaaccccatgtccattgctcaaatcctcccttccctgaaaggcaagacatacctagatgtgccccaggtcacttgtagtcctgatcatgaggtacaaccaactctacccagcaaccctggccctggccccacctctgcatctaacatcactgtcatatacaccataaataaccagctgaggggggttgagctgctcttcaacgagaccatcaatgttagtgtgaaaagtgggtcagtgttacttgttgtcctagaggaagcacagcgcaaaaatcctatgttcaaatttgaaaccacaatgacatcttggggccttgtcgtctcttctatcaacaatatcgcggaaaatgttaatcacaagacatactggcagtttcttagtggtgtaacacctttgaatgaaggggttgctgactacatacccttcaaccacgagcacatcacagccaatttcacacagtactaacgaagaggtgggttcagcttctatcaaacatctccaaaggatgggtgaaattttttccacttcattttaaatctatgcaaaaaaagcgaatgactgtgatgctaccatattactgggaaaaacatggagaaccactatgtagaatacccgcgggttcactggagt

SEQ ID NO: 12384 - DNA, 646 bp, Homo Sapiens
  misc_feature (567)..(567): n is a, c, g, or t
gcacgagcggccgcctccatgaagcggaaaagcgagcggcggtcgagctgggccgccgcgcccccctgctcgcggcgctgctcgtcgacctcgccgggtgtgaagaagatccgcagctccacgcagcaagacccgcgccgccgggacccccaggacgacgtgtacctggacatcaccgatcgcctttgttttgccattctctacagcagaccaaagagtgcatcaaatgtacattatttcagcatagataatgaacttgaatatgagaacttctacggcagattttggaccactcaatctggcaatggtttacagatattgttgcaagatcaataagaaattaaagtccattacaatgttaaggaagaaaattgttcattttactggctctgatcagagaaaacaagcaaatgctgccttccttgttggatgctacatggttatatatttggggagaaccccagaagaagcatatagaatattaatctttggagagacatcctatattcctttcagagatgctgcctatggaagttgcaatttctacattacacttcttgactgttntcatgcagtaaagaaggcaatgcagtatggcttccttaatttcaactcatttaaccttgatgaatatgaacactatgaa

SEQ ID NO: 12385 - DNA, 847 bp, Homo Sapiens
  misc_feature (131)..(131): n is a, c, g, or t
ctagcagacctgtatcatctatgtacaacaaactcaaggaaatatgtttattagcaggatcatgaattaattgacccatttccggtacctctggtcataattggaagtaaatatgatgtttttcaggattntgagtctgagaagagaaaggtaatatgcaagacacttcgatttgttgcacattattatggagcatcattaatgtttaccagtaaatcagaagctctattactaaaaatacgtggagttatcaaccagttggcatttggcattgacaaaagcaaatcaatatgtgtgaatcagaataaaccactgtttatcacagcagaattggattccttcgatcaaacaggatctcctcatgttcctgaaaatgacattggaaagcttcatgcccactcacctatggagttgtggaaaaaagtgtatgaaaagctctttccaccaaagagtattaacacgctgaaagatatcaaggaccctgcgagagatcctcagtatgctgaaaatgaagtcgatgagatgagaattcagaaggatctggaactggaacagtacaaaagaagttcttccaagtcttggaaacaaatcgagcttgattcttgaacctatttcaattactgtatatttatttcttcttttccaacatacaaataagattataccgtgaattaactattgtggcacatcatgcgacagaaacgttaaactgcacaacttcttaacggacaagccgcatctcctggactagtgcatctccccgtctatcctgaagcttctcaacagcaaaacttattgtacacccccgcgtaactttttttacactacaacaatcctctactacctc

SEQ ID NO: 12386 - DNA, 490 bp, Homo Sapiens
agcgcctggagccacacaggatccggagcctgggggaaaagcggcgcgggagccggcacccaccgctggaggggcggcgacggcggccgtagcgacctcgggaggcaatgcggagccgccatggccgagttcccgtcgaaagttatgcacgcggaccagcagtcctgcgcagggcgccgaagcctcggtgtcggcgctgcgcccggacctgggcttcgtgcgctcccgcctcggggcgctcatgctgctgcagctggtgctggggctgctggtgtgggcgctgattgcggacaccccgtaccacctgtatccggcctatggctgggtgatgttcgtcgctgtcttcctctggctggtgacaatcgtcctcttcaacctctacctgtttcagctgcacatgaagttgtacatggttccctggccaactggtgttaatgatctttaacatcagcgccacgttctctacatcaccggcttcatcgcctgctct

SEQ ID NO: 12387 - DNA, 473 bp, Homo Sapiens
cccttctcgggcaggtatccccagcagtcaattaacaataagccagtataaaacacctaaataaccaatctacaatctcccttcacaagtctttctactgtttttagatgaatgtacgatgagaaattcaacgttaataattctggattttcttatcacaaaaaagaaaatgaaggacctcaaagcacctgaacagtttatcgaccagtttgaatctatttatcttcatttgaatgtcttctagaatatgtaaaaagtcataaaatgtatcttccatgctacatgtacaataagaacttcaataattgtatatatgcctttgatgtattttcccctcaagattatcaactgtgtgttcgacagtgaatattcaatctggtaccagttgaaatttttggttataaatgtaatacgaattgtttcacaaacagaaaacatgtaaagcagtattaaaatttggcaaaacaaaaaaa

SEQ ID NO: 12388 - DNA, 521 bp, Homo Sapiens
gcggccgccccaccctccccacccggggaagccatcacagctcatctgcccgcggctgcgtgaggacagcaggggtttttcttcagagtctattttttcagcgacaaggacccaggtcttcctgctgctgccagggagagcagggacagtgccgcgtgcgagatgagctcgaacactgcccgccttactgccgcctaccccgcccgccacgccgccgtcgatgccagcgctgtccccacgggtaccaggaagtgcagagccgcacaggagctgccccggagctgaggggacggtcttcggctcctctgcaccccgtgattctgcccacgctcctccaccacgaggcactgacctgcgtcgggtggtgaccgtggctggcggtcacgccctcagcccctccgggcacacgtgccgcctgaccgggcgacccttttcagttcggcaaacgtcgctcccttcattttgggactgaggctgcagcattggaacaaaagagcattatttcaatttttctttctttt

SEQ ID NO: 12389 - DNA, 435 bp, Homo Sapiens
atgaaagacagtggctacaaggtttctgccccagagaacttgtatttgaagcaggggatagcaaacttatctgcagaggttgtctcactcaagagacttatagccacacaaccaatctctgcttcagactctgggtaaattactactgagtaagagctgggcatttagaaagatgtcatttgcaatagagcagtccattttgtattatgctgaattttcactggacctgtgatgtcatttcactgtgatgtgcacatgttgtctgtttggtgtctttttgtgcacagattatgatgaagattagattgtgttatcactctgcctgtgtatagtcagatagtccatgcgaaggctgtatatattgaacattatttttgttgttctattataaagtgtgtaagttaccagtttcaataaaggattggtgacaaacac

SEQ ID NO: 12390 - DNA, 203 bp, Homo Sapiens
cacggatttgctggtgcagtacaactaggcttaatagggacatgaggtgtggagaggaggggaagataagaccatagagagagctgaaaaccagatggcttgtgctaagagctgcaaatgcgaagcaaaagatttgggagattgtttttatttgtgcttatttttttcctatcacaaagtaatgaatgatccttgtaaaaaaa

SEQ ID NO: 12391 - DNA, 142 bp, Homo Sapiens
catggatttgctggtgcagtacaactaggcttaatagggacatgcttaaatgtttctgcgacttcctgcccttcctggatctcttttagactccttaagggaatgaggttttaaagacataaaagcagggaaggcaaaaaaa

SEQ ID NO: 12392 - DNA, 183 bp, Homo Sapiens
gatggatttgctggtgcagtacaactaggcttaatagggacatgactacgtatgttaggactgagaaaagaacaggctaaaatggtgccaacttgagtcattattatccagctttaattggtacccaacttgagactttccagatagaagatcactgagtgataccaggtggggaggaaaaaa

SEQ ID NO: 12393 - DNA, 119 bp, Homo Sapiens
catcatcatgatggattggctggtgcaatacaactaggcttaatagggacatgtcaaattcacacaacaagttagtaaatataacacaagagaaaatacgacttacaatggcaaaaaaa

SEQ ID NO: 12394 - DNA, 353 bp, Homo Sapiens
ggatttgctggtgcaatacaactaggcttaatagggaagcattttctgcctggttgcgaggtggctgccacacctccaagcatcatatctgagttcacagtgggaagaagggagaaggataaagaacaatggcctggtctttgtgacaggagttcaacctttatcttatggccagtggggacctgttgaagggtctgaggtaggacagagatgataacaaggatggctaacatatattgagcaactaactctgcaccagagaatattctaagtgcacaataatacatatcacctcaactaatccatagagcaacctagatacagaaactatcattatccctagttacaaaaaa

SEQ ID NO: 12395 - DNA, 279 bp, Homo Sapiens
  misc_feature (179)..(191): n is a, c, g, or t
ggatttgctggtgcagtacaactaggcttaatagggacatgtaccacccctagaatttccggtaaaccagcaccagcctgaagatcatattctcatcaaactgtggaagaaaaactcaagccagcctgggaaggaccctgccttgtgctgctaaccaccaagactgctgttcgtacagnnnnnnnnnnnnngaatggactcatcacatccgagtcaagaaagtgccaccccctccagagttgtaggccatagtcccaaaggaaaaccctatcaaactaa

SEQ ID NO: 12396 - DNA, 158 bp, Homo Sapiens
ggatttgctggtgcagtacaactaggcttaatagggattcttataagttctacagaatacacaagaaaaaaacctcttagagctaacaaagtcaaaaagttgctggaaaaatacctgtatagaagaagtagtttgtatttctgcacaaaaaaacaatc

SEQ ID NO: 12397 - DNA, 216 bp, Homo Sapiens
ggatttgctggtgcagtacaactaggcttaatagggacatgggctggataatgctctttggcccttagagacactgggcagctgagagaactcacaggggctgtctgcaacaacagtagccccatccaagcagcacattttgttcctgaagtccaacgaggtcttctcccaaccagagccacagagaggccacacagttccatagggccaaaaaaa

SEQ ID NO: 12398 - DNA, 127 bp, Homo Sapiens
ggatttgctggtgcagtacaactaggcttaatagggacatggaaggactcaagtttacaactttacctcctacagattcttcctaattaaaaggaagtattactcgaagatatattcaagcaaaaaa

SEQ ID NO: 12399 - DNA, 129 bp, Homo Sapiens
catggatttgctggtgcagtacaactaggcttaatagggacatggaaactgaaaaacctgctcctgaatgactactgaataaataaaaaaatgaaggcagaaatagagatgttctttttgaaaccaaaa

SEQ ID NO: 12400 - DNA, 563 bp, Homo Sapiens
aggtacttcatcccccctagacttactcctacaaatctggagtcacactgaccctgtgggattatggtcacacacatcagacgtgtgaccctgggactttcggatgaactcttggaacctcagctttccataacagatggttatgaggattaaaggaaagaccacattgatagaaaaagcttagcattgggcctgacatataatagatgtttaataaacacaagtttgttccttccctcccattccagatccggtgtttttgagaactgtgttacggtcaggtgatgataactggggcatgtctgctgccctgaataaataagagcttatctttctatctcgagtccactctaagtggtcagaacttgagtagcactaaacatatacctgttgactgactggctcatattgggtgttgtggaaggagcacatagcacctgggagcccagaggcctgggtggaagctctggctcctaccctagcttgttgaatggtcttgacctctctggccctcagatttctcatctgtaaaacaagcggaataaatcatacattctgattct

SEQ ID NO: 12401 - DNA, 534 bp, Homo Sapiens
tcagggctgggtgcggagattcgccctggtttttccaaggcggcgattccaggagaatcggacacatcctcgcctcccttttcccctgcctgcgcctacccaacaccacgtcctaacacctctagagacccaggttttaaattgtattattgctttttaaaaagccaaatgccaacttcttaaaaggatcagggcgggttggaatcgccgcggggacaggcgggcgggacgcgccgcagtgtccgtctccggctgtcagaaatgcggtgagccgaaatttaaatgccctcccggagacggggacaagtcagcggctgcggagcgatctggctcacacaggcgatatgcggtccctactccaaggagctcaggatgcaaggggctttctgcccaccgcaaagcaacccccagccccccaaaacccagagagcaattaacacaataaagcaggaatgtccgaccggccgggagtcagcgtgaatatattcataaggcagaaatctcgaaagggtagtcttaaaaaccattcccgtt

SEQ ID NO: 12402 - DNA, 698 bp, Homo Sapiens
agcaacctgtccctagaagcaatcgcagtgcttaacatcccctagcatgcatggtggctccaacctcttgggtgataccagtagaccccatggggatatctatggaatcaaccagcccttaggtgctacagctaaagtcatcaccgacgctggatatcctgaaaacctgtgtaccagacctaagtgacaagagactggaagtgcttgggctggagggtgcaattgagatgggccaaatctataccaagctcaagaatgctggacgtcggctggccaagtgctctgagatcaccttccacaccacaaaaacccttcccatgcaaattgacggagaaccctggatgcagacgccctgtacaatcaagatcacccacaagaaccagatgcccatgctcatgggcccacccccccgctccaccaatttctttggcttcttgagctaagggggacacccttggcctccaagccagccttgaacccacctccctgtccctggactctactcccgaggctctgtacattgctgccacatactcctgccagcttgggggagtgttccttcaccctcacagtatttattatcctgcaccacctcactgttccccatgcgcacacacatacacacaccccaaaacacatacattgaaagtgcctcatctgaataaaatgacttgtgtttcccctttgggatctgctaa

SEQ ID NO: 12403 - DNA, 410 bp, Homo Sapiens
  misc_feature (61)..(72): n is a, c, g, or t
gcggccgccaccagccggaatagcaaccggcggagcccgtgcgcaccgcagcgcagcgcannnnnnnnnnnntgcgggcgccctcgccgcccggctacctaccgccgcctgggcgccgccgctgcctcccttccccgcttctaccctccagcagacgcccgccggagcgacccctcccagggtgaccgggggaaggtgttccacgtggccatagcgtttgcgtcacaatgacctggcggacaggtgggagccacagcgtacaccccaggattccctctgtgctgtgcgtagtgcctactgcttgcttccaggttaaatttctgtagctttagaggacaggagacttcatgacttcactgccaagaaaagttacagaggcctgctgtacctggaaatcaagtttgagcttc

SEQ ID NO: 12404 - DNA, 375 bp, Homo Sapiens
gcctctgctgtgctcctggcctccctcctgagtctccaatacagccacaagccccttccctggacctgggtgcgaagctatgaattcaccagtaacagctgctcccagcgggctgtgatattcactaccaaaagaggcaagaaagtctgtacccatccaaggaaaaaatgggtgcaaaaatacatttctttactgaaaactccgaaacaattgtgactcagctgaattttcatccgaggacgcttggaccccgctcttggctctgcagccctctggggagcctgcggaatcttttctgaaggctacatggacccgctggggaggagagggtgtttcctcccagagttactttaataaaggttgttcatagagttg

SEQ ID NO: 12405 - DNA, 302 bp, Homo Sapiens
aaagggttccgaagatggatggcagtgagggctgcacaccagcgtgagtgtccctaatgcccctgaactgtgcattgaaaaacagtgtacatttaggacagtacattgatgtgatgtgttttttgccccaataaaaagtatgcgactttaaaaaatgtccaatgggttcctggccacagcgatgcaagaggccagtaacggggagactgcaggcatgggggagggctgggcagggggtagagcatcagggaactttctgtactttctgctccattttctataaaccttaaagtgtgttcttt

SEQ ID NO: 12406 - DNA, 749 bp, Homo Sapiens
  misc_feature (114)..(114): n is a, c, g, or t
  misc_feature (140)..(141): n is a, c, g, or t
tcccgttccaagcccctcaagaccctctcccgagaacggcccctgcccaacatcttcaacctgtacaccatcctcaccgtcatgctccagttctttgtgcacttcctgagcccntgtctacctgtaccgtgagcccaggnnccggagccccgagaagcaggagcagttcgtggacttgtacaaggagtttgagccaagcctggtcaacagcaccgtctacatcatggccatggccatgcatgatggccacccttcgccatcaattacaaaggcccgcccttcatggagagcctgcccgagaacaagcccctggtgtggagtctggcagtttcactcctggccatcattggcctgctcctcggctcctcgcccgacttcaacagccagtttggcctcgtggacatccctgtggagttcaagctggtcattgcccaggtcctgctcctggacttctgcctggcgctcctggccgaccgcgtcctgcagttcttcctggggaccccgaagctgaaagtgccttcctgagatggcagtgctggtacccactgcccaccctggctgccgctgggcgggaaccccaacagggccccgggagggaaccctgcccccaaccccccacagcaaggctgtacagtctcgcccttggaagactgagctgggacccccacagccatccgctggcttggccagcagaaccagccccaagccagcacctttggtaaataaagcagcatctgaaaaattaaaaa

SEQ ID NO: 12407 - DNA, 800 bp, Homo Sapiens
  misc_feature (204)..(204): n is a, c, g, or t
  misc_feature (237)..(237): n is a, c, g, or t
ggcgttgaagccttctataccgcgtgggccacaacaacccgccaagttctttgtggcgcacagcagtttgtcatcctcagcgcccacaagctggtgttcatggggacacctgtcaggcagaccaggctgctacgtgccagccaggtgaccattacagcaacctgctgtgcgacccttgcgcggcatagtggccacacaaggtcngctgccttgcagtacccatcgccttccgcggcncaggacatggtggagagggtcaaggagctgggccacagcacccagcagttccgccgcgtcctaggccagctggcagccgcctgagggtggtgacccaggagggaggcaggggaggggtgcggcggtcccagctccctggctcccatgtcaagagtcgctgtgccacaggcttagggacaggaccccagctctgcgtcggtcctggtgccctggatgcccaggaatctgtatatatttatggccgggcagggtgtggggccatgcctcctcaggagccgaagcccaggggccggccagtggccttccccagcatgcaccacgggcccgggttgggtcaccagacggggctggagtgtgagggtcctgcagcctgcaggacctcgtgccaccccgagggctgagcctggtcccacgagggtgccgtgtcccctgacagggccagtgcagtttggtgtgtcctccgccttaccaggagaagaacctgaagaactatttttcgttattggttttccaatcatttgactaagagtctccatttaaataaagtttttaaaaggaagagc

SEQ ID NO: 12408 - DNA, 400 bp, Homo Sapiens
atgtcgaagcacggggaacccacagccccgaggcccgggcccaaagccggcggcgccggcccgccccccgcgagcgggcctcgcacccccaatctcaaccccaaccccctcatcaacgtgcgcgaccggctcttccacgcgctgttcttcaagatggctgtcacctattcgcggctcttcccgcccgccttccgccgtctcttcgagttcttcgtgctgctcaaggccctgtttgtgctcttcgtcctggcctacatccacatcgtcttctcccgctcgcccatcaactgcctggagcacgtgcgtgacaagtggccgcgcgagggcatcctgcgtgtggaagtgcggcacaactcgagccgcgcgcccgtcttcctacagttctgtgacagcggcggcc

SEQ ID NO: 12409 - DNA, 550 bp, Homo Sapiens
  misc_feature (467)..(505): n is a, c, g, or t
ttcactgcgtgcctgtgtgctgggatctagcgtggcccgactgggcagctcctttccttccctgacgctgctccaggggaaagaaggaccagggtcaatccggggtgccccaggtggatcagcgaatgcccctgaagccaggtgccagttgcatccccgtcagatgcccccacccaagtctcctgagcctcattagtcacccctcattttcctctggggaccccaggccccagctcctgtctggttagaggctgaaggggtctgagcgacacctaccctaggggaccttcggaggggtcttggtgtcctctgacttctgtcctcagaagggagctcagaatgcagctgaggcttcccctggggcccagggtgtctgtgtccgagccacagccagagtgtgccctggagagtcgctgggatgcacggtgggctctcgtcatcctgtccccactccaggctcaggctgnnnnnnnnnnnnnnnnnnnnnnnnnnnnnnnnnnnnnnngagtgagaccctgtctctataaaataaaaacaaaaataaagaaga

SEQ ID NO: 12410 - DNA, 261 bp, Homo Sapiens
catggatttgctggtgcagtacaactaggcttaatagggacatgaaaaaatgctcaacatcactaatcatcagagaaatgcaaatcaaaaccacaatgagacaccatcttagtcagaatggcttttgttaaaaagtcaaaaaacaacagatgctggcaaggccgtagagaaaagggaatgcttatacactgttggtgggaatgtaaatgagttcagtccctgtggaaagcagtttggagatttcccaaagaacttaaaaaa

SEQ ID NO: 12411 - DNA, 133 bp, Homo Sapiens
ggatttgctggtgcagtacaactaggcttaatagggatagggatcgaattcgaggctcgaattcgagctcgaattcaagcttctaacgttagaagccttgaattcgactcgaattcgagaaatattgagattt

SEQ ID NO: 12412 - DNA, 174 bp, Homo Sapiens
ggatttgctggtgcaggacaactaggcttaatagggacatgtcaaatctacttgacaaagactttgaacaactgtcttaaagatgcttagggaactaaagaaaaacgtggggaaagtcaagaacataatgtatgaacaaagtggaaatctcaataaacagaaaacctaaaaaaa

SEQ ID NO: 12413 - DNA, 141 bp, Homo Sapiens
ggatttgctggtgcagtacaactaggcttaatagggacatgtctgatcacataaaaactgaaacttctgtataccaaaagacaccatagataaagagcaaacgcaagccacagactgacagaagacattttaacccaaaaa

SEQ ID NO: 12414 - DNA, 490 bp, Homo Sapiens
ggtcaaggtcatccagagacctgtcctcctgcatagccttgttgggaaggaccaacaggtggcttgctggtgcctgagacacaagagactggtgagatgagctgaaaatgggaggtatttaacgggtgcttactctgtgtcatgtgcccttcttgctgctgaacaaagtggataaattccttgcctgaaagtaattaaggaagaggagaatggatactggagaaaatagtgatccatcacagcccactcctttggccctccatgtagccaggctcaccattttttctcagcagtggagcgtaatcaccacataccaacaacccaaagtcctgtctgggtgctgcatccatctccaagtccaggatctctgggtgatgtgctgtcctctccatcaagtgacagggtggctcttgcctcccacacctacatccagtatgtaatgatgttgtagaatggtatatctgcaataaaatctctctttcacaaatgg

SEQ ID NO: 12415 - DNA, 137 bp, Homo Sapiens
aaaagttatttgcatgctaaatagtttatcctagtctgaaagaaatatttaataattctgttttgtgtgtgtgttataacaatatggaaatttagataaatttcacgtttgtgtgtgtattaatatgcttaattata

SEQ ID NO: 12416 - DNA, 889 bp, Homo Sapiens
tttctccagtcctccttccatcctgtttctttctaacctttcatccctgaacttataagggctaaacaggctattgtcttgggactcatcttgattgactcacaattttatcttcagaaactaaagtcatcctctgcaactaaagtaagatttgattgacacactttcaaaggtggtgtggtgtaagagaaacagtgctagaatcaggagatttgacttgtgatccatcagtaactagcagggtgaacttgaaagtccatttctctctctggtctcagtttcttggtctatgaaatggggtgaagttaaactagatgattttaaaagttacttgcaatctcacactcacgattctagtccatatttctagaagacagagaagaactgtctgccaacttttcccagctaaatccagggagagctccaagccttgaacccataggactagggatgcatatgcatgggatatgcatgggattctaggctttctgtgataaattccagggctgtattactggggctgtgatgtgggattaggtcaagtccccccaaacttagtttctttcctaaagtgtctgtgtgaaaatccatggagatgctgaagcagagttggaggaatagtgttatcctcaaagtcctcatgtcagggccccctgtgcacacgggtgcagtactctctatggcatggagcccctgggaaagctggccaaagactctttttctatattgttggcttctgagttccatccccaaaataccgcaagggagctgaacagctcaagtggcctcaccaggatctcattgaggacaaaagaaaaccaactcctcaaatattaactcattggttcctgtggctaggtgtgtgtgtatgctgaggggtgtgtaaaga

SEQ ID NO: 12417 - DNA, 463 bp, Homo Sapiens
gaatgacagcaggagtgagactgtcttaatgttacactcagctctaggaaaaggaagaggtaagaaatcaaaacaaatctatgaaaagtagagtgagggagaaattactcctcagattcttgcaaatactcttaagtgcatgtaatcaaacatttgaaaagaacctagtactaaaggggtgtcactgttttcatcccctccccgtcatgttctctctccgtctctttagcaggaccccaacttcagagggtgcagcctctgaaagagactgtgaatctatatataccatttctgggacgaattcatcttctgaggcctcacacactccacatcttccatctgaattgcctcctagatatgaagaaaaagaaaatgctgcagctacattcttgcctctatcttctgagccttccccaccgtaaactatggactctagttcagttttatatgcaatggatcacta

SEQ ID NO: 12418 - DNA, 425 bp, Homo Sapiens
tttccccctcagtggaatttccaacacactgccctgagtgccccagttaggcctggcacccttggctggtgggaggggcaggccctctgcctgtctgcttacagaagcccagggccagagggtggtggaagccgggtagacggacattcttgcccaaagggcctagaccagagagccaggcctgcatacagtagttggaggcatggggcagaaagcactcccctccctcgagcactcacctcacctccagggcaaaccccagcaagagacgcacccagtggttttccagcccacaggaggccctgccctcattggccccctctctcctttctgatttgggcccaactgtcgccgtggagcctgggccaaagcgacttttggaaacacggatgccagtggaggccacagcagctccgggccccatg

SEQ ID NO: 12419 - DNA, 564 bp, Homo Sapiens
  misc_feature (336)..(336): n is a, c, g, or t
attcagtcagagacgcctggagacgctcagggcagtcccccagagctaaagcggcccagactcgatgaaaacaaaggaggcacggaaagtctggacccttgatgggacctcggcttctgctcgaagcctaccaggctcccggtgtgtgcagggagacggtaaagctggaggtgcctgagaccagggcttccatggagcgggacacactgtaaatggatttctataacagaagtgacatgtgtactgatttttctccagaaatatggatgctgttgtattcagtacccatttttaaccttgggacatgaacgttttaacgtagtaaatcctcttttntgatgagtttctgaaactggagcggttcaacgttatccagtgtgaaaatcagtgagtcctccctggcatcctcgtgaaagtgcacacacttcatggagggactccttttcaataagaattaggaagatgagaaagtaatttgagattttactctgtcgaattttagagtatttgaagtgattgttagatttcacttctaaggagttgattaaaaaaactttggaaggt

SEQ ID NO: 12420 - DNA, 652 bp, Homo Sapiens
gacagccacactaggtagctgcagcaaggcacaccactcagcctgtttggggacacctatgagaccagggtgatcgcctatggcaaagtcacacgcgaaggcctgagacagaatgtgaacgtgtggctgtggcagctggagggctcctcggtggtgacaatggggggacggcgcctgagcctggcccctgatgacagcctcctggtgctagctgggacctcgtatgcctgggagcgaacacaaggctctgtggccctgtctgtgacccaggaccctgcctgcaagaagcccctggggtgaccctcttgccatggcctgaagcagccacaggtgtgccaagcaccctcgagtgccatccctgccaaacaactctcccagcccccactacctctctgtgtactgccgctgtgtcccccacagacctgcacattgttgtcacccaccctcctgcccttctcagcccagatgccatgcccctgggcgggcagcagctccccatcttctctggcagactcagcccactgccttgccagtcttgccaggtggtctacccccggccccgctcctgcccattcctctgtccctgcagactcagtgcagcacttccacaccaagaaggccctcaataaaggcttcctgaggaacgcaaaaa

SEQ ID NO: 12421 - DNA, 482 bp, Homo Sapiens
gcggccgccggcgccgcgcagcgctgcgcacaatgagccgctggcccctcccccggtccgccaccctagcgcaacctgcagcagccgccagcacccggatgacggccgcgcgtgcgcgttggcgcagggaccggcagcggcgcgctcggtcgagcgggccgcggccacttgggcggtgcgctcccttgtgtggactgggaggtcgggcacgtcctaccgcagcaacgtccgccgcgccgccgttctctcgtcgcttcggttagccattttcttgcaacgtcttgagtcttgagcaacaacgatgtgcgggcactgaatgacatagtgcgcgcgttactcaacacaaaccgagggggcgcgtgcgcgcgctgaacctctcaaggaaatactttatcagttctgctgaataatcgaaaaattgtcgccggtgtgcaccaacgaactaggttccccgagttccattcaaaagacctcaaagcagt

SEQ ID NO: 12422 - DNA, 566 bp, Homo Sapiens
ctccacacgcagtatgaagataaaattacatagtattacctagacatagacagtattacctaggtagatgcactgctcacctgcacccttccccagctctcatttatgttaggtgatttgggatagggatagtgttttggggtatggggggagtgtttctgacctgctttgcagacgtgcctccgcacctcagcagtttggggtgtggccccagggcggttcttggatgtaaaaaatgtggccatctagcctcgtaacttcactgtcacctgtgtcccatagggtgccttctgaatactgttattagaataagtttgttgcagaacgtgaccctgcgtgcaaacatgtaccgtggcctggtatatgatagagattgatattaatgtaccatgtatgttaatgtgaatctgtgggcaggatacttttccatggcaggaaatatccaagctgttgaaactggttatgttttaatatgcctcattgtgcctttactgttgtgtggactgcgtgagggacaagaagttccatttgatgtcaataaagcaaagtacttgcctacttttttg

SEQ ID NO: 12423 - DNA, 1051 bp, Homo Sapiens
  misc_feature (21)..(21): n is a, c, g, or t
aacgaggactaagtcgatcanataaaagcacggcgtgttttaattatatctgaaacggggcacaaaactataacgaccttaggtagcgaggctgggtggcgaattcggcacgaggaggaattatagacccccaggtcagccagttaagagctctacccacacctgtcaacccctctctcccccagtttaggttctgagcagtattggacttgtagcctgcagttgtcttttgacttgcaggccgcaggtgtctttctgttatgtgaatgagttccatggaggggcatatgtgtgattccaccgttagatgagcccttggggcaggcagtttgggatgtgctcttgggggaaagttggctgtttccttgcgctctgctcctacccgaaggtttttaagtccctctgaattgctcatctgagattagtagagtagcaggcctgaaggatgatggttttgtcctctttggttctcacctgcttgagaagtaaaacagtaactttgttcttctgggcccttaagcttttttggttaagtcttccttttcagaagtagatgtcattatatgccaaaagtctagctctttgctttaccatacagggacctgtcccaaagaaaaaggctctttttttagccagcatatttccccttctacccttttactttgttgttctgattttaggactctggctggccatgtgcttgtggttgcctctcctgcatttgccactggatttgcactgcatcgtttggagatacaaagcgagcagttcttggtcagaaccctcctctgcttttcattgtgtttgataatggttactgggtccttctctcaagggtagcaaggccaagctgatggctgcttgtttaggaggccatcagttccttcctgtggagaagggtctgaaatggaagtcagtggtagaaggggctggtctgctgggcagggcttacatccactgagttctaagattcctttcctgatctgcacctacgcctggtctgtatggtggaatttgtcagctggaactcagaaacaacaacttgaaaaaa

SEQ ID NO: 12424 - DNA, 530 bp, Homo Sapiens
  misc_feature (117)..(171): n is a, c, g, or t
ttaaaatctcgcccttggtgtattgcctaagtcagtaagcagaaagcaccttcttcctggagaaggatcaagtcctcaaaaggtaggaaatgtcaaagtgtcacttcattgtcattnnnnnnnnnnnnnnnnnnnnnnnnnnnnnnnnnnnnnnnnnnnnnnnnnnnnnnnccaccctgtgaccaaaatacccccgagtccaggaattgctgtaaacaaacccagatgcaggatcaacccttctcagcggcagtcggagctgacggcagtcactgcagtatcagtcctcgaggcaggggctggcgggagtgggcaccaggagggccaggctgccaggctgtgcgcgtgatatgtacctggagctgcagacctgggggttgcccatcctcaggaaggctgacctttctggggtccccgcgttctccctgacccaggaggacaaaagcccctttcagccctgtgagccaacaggagaaacagtgtctttcattggagtttctaaaatactctccaaagacagaaaaattctt

SEQ ID NO: 12425 - DNA, 552 bp, Homo Sapiens
ttggagtttagacaagtctttataaaagaaccaaaagctcaataaatacgtaacttcacagaacccagcccaagccaggggtggcctgtgggactgggaaggtgggggcagggcaggagtgaatcccactggaggccagtgagggtagaagtaggatgggcagcctaggagcccagccctgaagactcgagctgagctggtaacttcggggagtaggtgacgaggggctggcctgggcaggtggggtggtactgtggcctgggcctcctccactccatccagtccggcaaagcgcaaatcgggcccgggcgtaagcagggatcctgcccagcatccggactcatgcatacaggaggcagtagctgaagcaggtgccggcacgccccaggaggcaggctgtctgctgtctcttggtcaatggcactcttgagggactccctctgctcagacctccgaggcagtgagcgtggagttaagcagcaggctggtcctgagtcggtagagctgggctcaggtcgaggtgctgtgctaggcagagacccctggtggggg

SEQ ID NO: 12426 - DNA, 301 bp, Homo Sapiens
gagttaataattacctaatattttcacatatctagctttttactaacccatggccagcctttttttcaaggaaccccaacgttttcgccacatgcctaacgatacccttttccaaaggctcaaacacatcccgtgtgtctaactgattctcctggtcgcgacctagaccgatcacttcctgacccggctgcacagctcttatctcgagcttttctctgctctcatccctgagactcactttgtctgtctcctttcttggaatcccctgtgtaaaccgagaaaataaaatcctaagctctct

SEQ ID NO: 12427 - DNA, 525 bp, Homo Sapiens
  misc_feature (18)..(18): n is a, c, g, or t
gccccgcctctggtgggnttggccctcaccacctcccatgcttctgagaagaggttccaaattgggctcctgtgcccagagcgtccacagcaccattcccagtgtagactcccagtcttctccacattgctgtcatggcgtcagttcaccagactcattgattttgttttgcttgttaagcaaaggaatgtcacatacctctgtccagctttttagcgaaatacatttcgcctattgcgactttttccatttaccctgaagcctagaaagtaggtggaactcacacaaatggcatttccagagtctgccatagctccgtctcctccagctgctggataatacagaggaacttcaacttctacagggaacagtggttggccaggctgcagtataactgaagcatgccttggagagagcagacactgtgggggccagggccatctccctttaatgtgttcatgttaaaacctatttgagtgtaagacttgccctttctaacaataaatgctctgtgtttaagttcaa

SEQ ID NO: 12428 - DNA, 396 bp, Homo Sapiens
aaatatgtataaatgtgggcaccgtcatttgtctagaaaaatctatagtaaatggttttgttttcctttcattgcaaagtctcatacttgttcttccaaaaatcagttctatgagttgctttaaaattagcctgggacgtccaagaagtgttaagacatctgcagtaactggggcagccagtccctggaggccaactcagggaacaacaaactccttcgccaagccgtccacacatgccagctgatggtctaggacccaagtatgtgccaagagtgaggtgtcttacttctaaggagaggcaagcagtttgctatgcaagcgggtcgctggccctggacctaaagatcttctctctaactccatattctttaaataaacttgtcttttatgaggaa

SEQ ID NO: 12429 - DNA, 634 bp, Homo Sapiens
aacccctgagggcaaggcctatgcatattcatccccgcatcctgcccagcacccagcacagagctcagcgtccaggccaggggcagttggtgctacaggaagagtaacggccaggaaggaaggcatccaggttccattcccaacctgcccactacacacggtcatagaaaagcctctcatgacctggccccataacctgggcaaactcatcacctctcactctgttcttcagcagttctgaacttgtgcttctcaagaactagtagatcccagaacacacattacttttttacatttgcatgccctcacccacttctcaagactggtagcccatattgtgcctttgtggaaattaggaaaaggtgccacttccccctcgtgaggctagattccagaccccactcatcccttgactggcaccatactgccctgaccaacctgcatactatttcaacatagcctggagcaaacacgctggtccacccagcaaacccctcctcatccatcaagccacagctcagctgctaccgcctccgtgaagtcatcttcagataccctcacaggtttcgctggtttctctgctaagcttccactgctttttaaacagcctccattaaaacaattatctttttcg

SEQ ID NO: 12430 - DNA, 414 bp, Homo Sapiens
gtgggcgctcctcgccaaaaaaggctaccaggagcgggacctggaaccccagatttccatcacaaccaaactcaaaggggtttccgtgactcagatcaaggagcttggaaaccggctgtgggatgtggccgacttcgtgaagccacctcagggagagaacgtgttcttcttggtgaccaacttccttgtgacgccagcccaagatcacggcagatgcccagagatacagggtcttgctatgttgcccaggctggagtgaagaggctattcacaggtatgatcaagcccactgcagccttgagcctcctaggctcaagccgtcctcccaactcagccttctgagtaactgagactacaggcgtgtaccaccattcccagctaataaagtctatttttaaaaaatcacttgacgat

SEQ ID NO: 12431 - DNA, 487 bp, Homo Sapiens
tttttaatgttgaactaggatatttaaacaatcccagtgctttctatcagaatgtgagctctctgacgggtgagccatagtcctacgttgtgctccttttctgcaagagcagaggtccaagaacagggctaaagacctcagtgggaatgactgttcttcatcacattctggattcacagccaaacagggtagctgtgctgtcaacacacttaacaaggcaactggtcttaacttccggaactatatccaggagccaggccattgataaaacagttctttaaaaattcttgcctttggttcaaagtagggagaaaaggataacttcaggaagttttttatagcttaaaatattgagtctcagaaagttatatatattcatctcagcagtctgaacgcttagatgatcaatctgcaagtaattggaaatgtacaaagaagaaaaattgctgggaagtttgtcctggtccacacaccaccaccaaaatgt

SEQ ID NO: 12432 - DNA, 663 bp, Homo Sapiens
tgagggccctcttcctggcttgtagaggcagccccgtcactacgggctcacagggcatttcccctgtgtgtgttcgcacagagatctccttctctcttttcttcttataaaggtattaattccatcaggagaacccccttgtgataaccaacctaaatttaattaacttccataggtcccaccttcaaataccagcacatgaggggttaggatttcaacacaggaatttcaggaggacacattcagcccataacaccaaccagttttatttttaccatcctctggaaacaaaataaggaacttgtaacatgttcttcccgggcattagatgatctgaatgtgtcaccctcaaactcatatgttgaaacttgatccccaatgtgacagtatttttaagaggtggggctcttaggcatgattaggtcatgagggtggagcaatgggattagtcctcttatcaaggggcttcatgcagtgtcctcccggttttcttttttgcccttctgctatgtgaggacacggtttccctgtgaggatgcagcaagaaagcaccatcttggaagcagagatccttcaccaggcacagattctgctggcaccgagatcttggacttcccagcccccgaactatgagaaataaatttcttgtatttctaaagtaaa

SEQ ID NO: 12433 - DNA, 581 bp, Homo Sapiens
gcacgagccacgtgtcttctttccttcaccaccacccaggagctcagagatctaagctgctttccatctttcctcccagccccaggacactgactctgtacaggatggggccgtcctcttgcctccttctcatcctaatcccccttctccagctgatcaacccggggagtactcagtgttccttagactccgttatggataagaagatcaaggatgttctcaacagtctagagtacagtccctctcctataagcaagaagctctcgtgtgctagtgtcaaaagccaaggcagaccgtcctcctgccctgctgggatggctgtcactggctgtgcttgtggctatggctgtggttcgtgggatgttcagctggaaaccacctgccactgccagtgcagtgtggtggactggaccactgcccgctgctgccacctgacctgacagggaggaggctgagaactcagttttgtgaccatgacagtaatgaaaccagggtcccaaccaagaaatctaactcaaacgtcccacttcatttgttccattcctgattcttgggtaataaagacaaactttgtacctctc

SEQ ID NO: 12434 - DNA, 775 bp, Homo Sapiens
ctcaccaccatcttggttagtgtgcaagactctgggacggcatgagaaaggcagaaagggagcaaaggagctggtggggtgtcacagggcctatgtatgaggcagatgtgagttctgcatccagttttgcaatttatccatttacctgcctgagacttggaaacacctactttatagtcctgattcaagtgttggcggatggaagggaggagactcctgaccctcagaatgagatcaatggcttttcaaaagcagcacaccaaactgtcaaagtggtgatccctcttcatttgacatgctcacaaagaggagaataagacaagaaagcaagctaacccagaaacagtgaggtgacagtgcgcctcaaacacaggaaaataaaatgcataactatactgattggatgctgctcaaaatcagcctacatgccatctttggtacgtgtgaacaaagttaccaattcctattctaactatgatatactcaaaactgtacaatcagtaatgggatgctctaaagacaaaagaactgcaaaccctttttaaaaaattattttcagtaacagtgttactttttggtattaagattgtaagaataccttgtggataatgtggaacaaaccaaatgaatacttatgtgaatgtgatattctcaaattatcatccctggtattccagagtaacaagattcttggtggtgacagaaggcaatacaaataagatagaagttaaataaaaaccttgtagtcttcaatttaaataaaattatacgtata

SEQ ID NO: 12435 - DNA, 250 bp, Homo Sapiens
tggctctagagggggtagagggggtgctgtggagatggggatattgcatctgtttctaacccacgtagccactggccacgtgactacgtaactgaggagtggaatttgtagtttgatttaactgatttaaagacgcacttgtgggtggtggcttcatctggatggggcctgcttgtgttcactctcttggcttgcaagactagggtctgaggcacaccttgtatcctccttgtagttgtgagagccacag

SEQ ID NO: 12436 - DNA, 558 bp, Homo Sapiens
ctgagcaaagtcagttttcaatacatgcaggtcctataatgtcccagattatcgaagctgagctgcagattttggatctttctcatcaaaaatcctccgatctttctgacagcaaaagagaattcaaagagaagtctttcaggagattaaaacattgaggttcaagtggacagtttttcagtggtcttgcttcatccagagataagattcagagtatccagaagaaggctgaatggtctgcatgcccttaacatagctctgcttgaacaattccctcctttcatctgtggtactgcacatgaaactgtcactcactctgcttccttgctgacacttggtgttgtcagactttagacttcttgccaatctaacttctgtgaaaaccctgtcattttaatatgcatttttcagattactaatgagcttatatatcctatatttatgggttttttgtaaacaaattactatttttgaatcatttttctatattatttttaaggctcttgtatatattttggagaataattctatgtgtattatatttgttaccccctctcc

SEQ ID NO: 12437 - DNA, 482 bp, Homo Sapiens
cgtgcaggaagccgccctccacccgcttcagccgcttcacctgcttgcgccgccgcggccggtacttgtagttggggtggtcctgcatgtgctgcacgcgcagccgctctgcctcctccacgaagggccgcttctccgccagcgtcagcgccttccacgacttgcccagcatcttgctcaactcggcgttgtgcaggtctggattctgctgcgccagccgcttgcgctcgtccttagcccacaccatgaaagcgttcatcggccgccggatacgggactcgcccttggctcggcccgcggccccggccggtgctccgctgttcgccggcgcctcgcccttcaccttcatgtccccgatggggctcagcgactcggcccaggggcaggggcccagcccggccatcaccgcgggcagcgcgctctgggtctggctctggtcgtcactggcgtatcccgcatccgggctgctcatggcgctccag

SEQ ID NO: 12438 - DNA, 257 bp, Homo Sapiens
cccccctgcgcgcgcgcgcgtgcagcccggcggggcgctcccctgccagtgggcggggaggaaactgtcaagccagcgcccgccggggaacccacgactgtgtcacctgccccctgagcgttctggagcgccaagcttcgcgatctttgccttccggactcgcagaccggctcaaagcctcccctcagcctctggctccgtgattggcaggcagctgacagaagaaaagttaaaaggttatttctgaagaagagttt

SEQ ID NO: 12439 - DNA, 692 bp, Homo Sapiens
  misc_feature (190)..(230): n is a, c, g, or t
cgggagaccgagggctgggtttggggatcggcggtctaagggctgcctccccgccactccttgtccggaccccgcgcccggggcctcccgccgccgcggcgcctcctcagagagcccgggtcagctgcccctgtggccgcggctggtcccaaactcactgaatcgggaactctggtctgggtacagaaannnnnnnnnnnnnnnnnnnnnnnnnnnnnnnnnnnnnnnnntcgtagttcatcagcctccgaaagcatcctttgctctctttccagaaaggaagagcatctctgccattcgtgtctcaaggacaagcgcttcagcctcgttctctgtgagctgatctgtggatcgcggcgtgtcgggcgacatggaggaagaaagaaaaactgctgagttacagaaaaataggatacaggactcagtagtctttgaggatgtggctgtggactttacccaggaggaatgggctttgctggatcttgctcagagaaacctctacagagatgtgatgctggaaaacttccagaacctggcctcactagggtatccgctacacacaccccatctgatctcccagtgggaacaagaggaggacctgcagacagtgaagagagaacttatccagggcatctttatgggagagcaccgggaaggcaagaacccttgggagaaactgttttggttggggg

SEQ ID NO: 12440 - DNA, 657 bp, Homo Sapiens
  misc_feature (48)..(63): n is a, c, g, or t
ccaggtagtcactgggaacacctttgtggggggttaggacttacccannnnnnnnnnnnnnnnggcttgcctgacaccttacagaggacttaatgcaatgcctattcgggcaataaatgaatacttgatgcattcatacaggcaagaatcccagcatcccagagaagctctgtctgcactgcaaagccatggctgcagacatcagggaagctggtgcagttctagtctcgcctcctcgatttccctgccagcagtcttcctctctctcattcttctggccctctgcagaaccagggaggccaactgacttccacccatatggctttggtgcaggagcagaccaaaggtatctcccaattgaaggctaagaagtcctttgggctaatgtttagggtcacgaagttcctttaaaaagagaggaaagcataccaaaagtccctatggattagttaaagtagttccattcagggcacccatctgcaaacccagaccttctgccaggacacagcttttgtttcctctccctctcaggcttgccatacagaagttctctccaatgaccttggagtgtaactgtctggacaggtccagttccttggagagcagtcctggtgccccttcctgtgagagtgggcttgtccctcccacacaaacaat

SEQ ID NO: 12441 - DNA, 665 bp, Homo Sapiens
cccctgctccgcccctctctggtggcagaggaagcaggtggcaccaactcaccaaagggacttgggagccaccttctcactctgtggaagtactttagtgagagctgactggcaagataaaaaccctgaaattcccagaagttacagatgccttaaagactttctttggaagatcattgcctgtactattccttttttgtgtggcataaataatatattaacctgttacaactgacaacattggttttctgcagctagggagtcttgagtcgagactgctcgccttgatgacttgctcttttttggcagatgtgtggagttggctgttacgacatccctgtgtgatcccagaggaggggcagtagctgggcagaaactgcaggcacacatttgggtggatcacctggcttccagccccttcggggtggtgctcagtgtggggtgatggtatcatagaggaccacggcgcttatcagcattgtttctttggagtctgtgtaatggaatgtatttttcaaatactgatatttgcattttctgtaacaattccttataataaaatgaagtaaaattgtgcatttaaagtggaaactttaataagacatttgtagttacttctaatgcagaagtaccaataagcattaaaaacaaatattagaaaactc

SEQ ID NO: 12442 - DNA, 672 bp, Homo Sapiens
atatcgtcgacccacgcgtccggacgccagttaacgtgatccagccaagcactgtcagcaccaacccagctgtggctgtcgccgagcctgtggtctcctacacctctgtggctacaaccagcttcccactgcacagtcctggtctgttggagacaggcgctcctgtgggtgatatttctgggggagataaatccaagaaaggggtaaaacggaagaagatttcagaagagagtggagaaacagcaaagcggcggtctgcccgtgtccgaaacaccaagtgcaaaaaagaagagaaagtagacttccaggagcttctgatgaagttcttgccgtccaggttaagaaagctggaccctgaggaggaagatgattcctttaataactatgaagtccagtcagaagccaaactggaaagcttcccaagcattgggcctcaaaggctgtcatttgactcagccacattcatggaatctgaaaagcaggacgtgcatgagttcctgctggagaacctaaccaacgggggcatcctgtcgccgagcctgtggtctcctacacctcagtgggctgagctgatcatggttcttgggattttctccctaatctcccaccaatgatggcaaatgagatttggcagagtgggagttttccaggaaataaatagggtgagaagtc

SEQ ID NO: 12443 - DNA, 175 bp, Homo Sapiens
gtcacttgagtgatgtcatttaagccctattttaggagataaaaacagctttggggactggttaaagtcccccagaaactacaataaagaacaacttttgttttaactcttaatcactttgtaattttgactcaatccttttctggaccatttttgttaataaatatcaaagtgt

SEQ ID NO: 12444 - DNA, 461 bp, Homo Sapiens
taatgggagccaaaatgtttagagaaagcttctgggtgtgcctttcagattttgaacaagctgccttgtctaaacatcaatttctactactctgtagccttaaaatgtgctctatttagatccacaggacccttctactggtgatatgaaaaacagaatacagaaattaagagaatcactttttactcaacaattaggggaagtaagtcaaagccctcctcttgcgacagcagattttcctgcgggccacctgttcagcgccttgataggggatagggtgatcaaagcactcacgaaaacagttcattcaggtatggaatgtcagaattcctttggccattttctcctgactcctttgctaggtcccctggtttccttggcagcacttcttggatggaggacagggtccaccaacttctcaagacattgagtcttgagacacaagaaaccacagacttcaa

SEQ ID NO: 12445 - DNA, 674 bp, Homo Sapiens
tctcgtagtgaacaccttatgtatgtaaggtgtccccagcccccgggccacaaacgggtaccagcccatggcctgttaggaaccgggctacacagcaagaagtgaatctctggcaagccagggaagcttaatctgtatttacagctgctccccatggttcacattatcgtctgagctccacctcctgtcagatcagctgtggcatgagattctcataggagctggaactactgtgaactaggcatgagagggatctaggttgcatgctccttatgagaatctaatgcctgatgatctgtcactgtctcccatcacccccagatgggaccatctagttgcaggaaaacaagctcagggctcccactgattctacattatggtgagttgtgtaattatttcattatatattacaatgtaataataatagaaataaagtgcacagtaaatgtaatgtgcttcaatcatcctgaaaccatcccccttcacctccagtccatggaaaaattatcttccatggaaaccagtccctgatgcaaaaaggctggggactgctgacctagtggatggtctggggcacagctcttttagggaatagtctattgttgttgttgttttttataatttgtataaatttgtgaggcaccagtgcaatttcattacatacataggattga

SEQ ID NO: 12446 - DNA, 219 bp, Homo Sapiens
gcggccgcctcactcccggaggaacccgacggcggtggcggtccggacgacttgctgccgctcccgctgtggctggtggccgagggcatcgtgcgcgcgcggaggccgctggaaatcacgagtgggccagctgagggggcaagggtggcggtcccttccgggcagtgtcgcgcgctccgtgggcgcaggccgcttcgccctgtcccgctgcaccgagag

SEQ ID NO: 12447 - DNA, 483 bp, Homo Sapiens
cacgaggatgaaaaggcaccacactcagattcaactcccaattctgatacaggacacagcttctattctgattctggcactgaaatgcagagtaacaaatgtcaggactgtggcactaagattcctacctcccgaagagcctgcaggaaagaaccaactaaagaatttcattatagatacaacactccaggacagaattactcaaatcatagcaaaagaggtgcctttgtccagccccattctttagatgaaagtaaaaactcttcaccctccctggcctctccattttgctgcccaggtcttgtgcactcacctgacacttccaaatccagccctacatctggatggcaagaggctgagctggggctggaaaatatgaaatcgcagtgaccaaggactttgaaagttattaagggctacaccagtgcaagttggtagcaacccataaatgtttgctgaacaaataaatgacttactggataa

SEQ ID NO: 12448 - DNA, 574 bp, Homo Sapiens
ttctctacaacagaagccaagaaggaagccgtctatcttgtggcgatcatgtataagctggcctcctgctgtttgcttttcataggattcttaaatcctctcttatctcttcctctccttgactccagggaaatatcctttcaactctcagcacctcatgaagacgcgcgcttaactccggaggagctagaaagagcttcccttctacagatactgccagagatgctgggtgcagaaagaggggatattctcaggaaagcagactcaagtaccaacatttttaacccaagaggaaatttgagaaagtttcaggatttctctggacaagatcctaacattttactgagtcatcttttggccagaatctggaaaccatacaagaaacgtgagactcctgattgcttctggaaatactgtgtctgaagtgaaataagcatctgttagtcagctcagaaacacccatcttagaatatgaaaaataacacaatgcttgatttgaaaacagtgtggagaaaaactaggcaaactacaccctgttcattgttacctggaaaataaatcctctatgttttgc

SEQ ID NO: 12449 - DNA, 710 bp, Homo Sapiens
cttttgagaattcagcagccttgatttatttgcaggggttcatatagcacttgagtcacgggcgaggtgaggcacagaggtgggtaggggacttactgctttacatttaagttctatggaatttcacatttctattttggggaagaaaggattgtctctagagagagagcatcaggttctttaacaagatttaataaatttgggtccttgtatcgatcaaacttcatactagatcagataacaaaaaattgaatatggctttgcactagaggctattttattttctgtgctgccaatgaactaagtttctataattttgctttcactatttgaaattttaatttatccatcagatgtttattgatacctaatgtgtattcagtactttactagccacttgggatccatcagtgaaaagataagtaactcatgtagtatgttaggagatgattagtgcacaattcatttatgaatgacccataaaagaataagttgataaattagatttcatgaaaattaaaaaattctgcactttgaaaacattattaagaaaatgaaaaggtaagccacagactgtaagaaaatatttgcaaagaatatatctgataaagaacttatatccagaaaatacaaagaacttcgaaaactcaataatatacaacatattatttaaatgggcaaagatttgatcaggcacttcaccaaaaaaa

SEQ ID NO: 12450 - DNA, 369 bp, Homo Sapiens
cagtatctcatttctgaacacctggattgtagctttccctggactgactgtcaaaggaggtggttttaaaaagcaagccaaacaggtttccgtcctttaggaagaccctggaacgtgccagttgattctgacaatttctcatgaacagaaacacctaggaagggagaactggtgagtcttttcaagaggaggaagtccctcaaaaggggctgtgtttcgcaaacggcgccccaaaagggctgaaatacttcgatctggaggaaaaagactcaggcactgagggaaggggagggtgcacatctggggtaatttcaaggctttttccgtgttatctgaggtggcaacaagtaaagatttgttcgttttatt

SEQ ID NO: 12451 - DNA, 536 bp, Homo Sapiens
atgactgacttttataaccctatcactatatatcaccatattctaaatgtctagggaaaagtagggggaaagactggattaggccaggcgtgattacccagtaatctcagcctcccaaagtgccaagtgaaatattttagtgggaaaatgtccacagaataaggggtgtgggcttggtcagtggagagtggttgaagaggtgagagggaaccaaggctcttcctgctatttctttgctagggctggcccatttaggggcttcccttcccttagagatgactgccagggtcttccatccctactttctgccccttctcatgaggggcctgagccccctcagcctcccaggttcatccaaacaaacaacttatggccttcataaaactgtctgattaaatgtgtattattatttttccttttttattatacaggatataaatgcttaactcttttcatgtatttttaaaccaactgacaaataattttgagcttgtcattagcatccttgggctaatataataaaactttgttactta

SEQ ID NO: 12452 - DNA, 785 bp, Homo Sapiens
  misc_feature (770)..(770): n is a, c, g, or t
ctgtcaggagtgggggcagattctgctgctggggaaggaaacaggagcctggttcacaggcttagtgatggagatatgacctcagccctaaggggggttgctgatgaccaaggacagcacccactgttgaagatgcttcttcacctgttggctttctcttctgcagcaacaggtcaccttcaagccagtgtcctgacccagtgccttaaggttttggtgaaattagccgaaaacacttcctgtgatttcttgcccaggtattaagctgcataggagtcatgattctttgtgggtctcacctgacctcttaaggtctaacccatggcacttgtactttgctcacatcttgacttatctacactagttagttctaaggcttggttcagggagttctgaagtgatgggaagtggggccaaatgggagaaccaaggaagtggtttatttgatttaattctgcctctgaacaacaggtaagcaaaaggcacacatgattaaaggaggctgctaacctctgtggaggagggccctgccccaggacaagggttaagacaaggggcctctgaacctgagatgtgggtaaggtgaagcccacacatcaccagcacgttgaagtttagtggtttccctaaggaagcagaggatgtggagagggtctgcagcccacgggctgaccttgctgggagtctctgcctgtcattgtgcccatctttagcatgcatttggggtggcctgttcttcttaaggattgtggctagtatattatagtgancctagcgatagaaaa

SEQ ID NO: 12453 - DNA, 417 bp, Homo Sapiens
ttaatgtcttcctgctgccggtgacaaaccgagaagcaggaaaagaagattctctgagttgatcaggcaatggcaggttttccagtgattgaacacccacccacttccacctccccacttcacccgctacctgggccctgggggcctgggcattcttgcccttccactgtactgcacacagcaggagcttcattcccggatgagccccaggtcagacactggctgggctggacccatgagtcagggctctgcggcagactgaatcaacagagaaaacatggcctggcccagccagtggcccaaacagaaagggaaaggccaatgcctttgcttggtctgggctgggccggggctgtaacagttgtaggcagaagctgagttcaagctgggggtaaataaatacatctccagcaaagc

SEQ ID NO: 12454 - DNA, 284 bp, Homo Sapiens
ctctcaggccaacgcgtgcccactcctggctagatcacagtgtgggtgttgcctatagaacacggctccatgaatattgctatggttcctgggatatctggaggcgacgagtttgcctgtgtgtagggctggatcctgtgggcctcccccaaagccagagtgccctgcacatacctcgggctttcgtgtgaacacaccctgaggttccccgagcttttctgtgcagaacagtaatggagaggtagagaaggaataaaagaactcacttgaaactttggcaaagt

SEQ ID NO: 12455 - DNA, 521 bp, Homo Sapiens
gctggaaatgagaaatctatataccaccttataaagcaagatggtgtgtgattttgacttgtagaccacaagcaggagattgatttttttgtggttaggataaagtatccagaggcaacatcatatacaggccccaaaagtgctgcatgtcaaacagcttatctggaggtgaatatgacgtggtttgcagaactgttaaagtttgggaaagtggttctagtgatggcagagacctgatgtaaaagactcgtgtgaaaagttttaataaaatagattcaaggagtgtgagaatggcaaaaagcaaagtattattttataagatgctttttaaaaaatatttacctgtaacatttaatgaatagtatttttctaacctagtcacacacactataaggtaataagttcaattcagtctacctgttgagtggcagactcatatatttgatatccaacacaatagttggatgtctattaggcatctcaaacttaacaggactgaaataaattcttggttttcttaa

SEQ ID NO: 12456 - DNA, 371 bp, Homo Sapiens
tgacttgatggactcttttacctgcctctcttcctggatcgtctccagaactgctgtggctgccaagctcggtagagacgtggcgccccacccagtgtcatccgggggacttcaagctggaatgcagagcttagaaagggaggggataattatggggtgtgaggtgcattgccctctaaatctttaaacaagcaattggcagtaccccgtgaaacctttccttctcctactcggccgcctcccaccaacctggcatcgttcctcccgggagctagccagcttcagaaagcacatacagcatccttgctgccaaaccacctatgtgcacacaggatttccttaatggcttaataaactgttataaagaaaaa

SEQ ID NO: 12457 - DNA, 403 bp, Homo Sapiens
tgctatttatctccctatcccaccccctaccccacctaacacatttgcactgccgggaatggacactggaagtgccaggaggaaggaaggctggtttggtggggtagtggggaggtcagggaggcggggccaagggtgtcccacattcccaacaccgccctctgatcaccatgggaatctttggactcaggacagggccaggcgcagggctctccctcctctccccttcgctgtcccctccccctggagggcatggtgtcggggggtggcactgagctatgagtcccggggatggtgaggaacgccacagacagagccaccctaggagtgagtatagtgctggtgactgtgtttcatagccccagtccagggctgtctaagaaataaagatcatcagactcca

SEQ ID NO: 12458 - DNA, 998 bp, Homo Sapiens
ctatgtccagatcttctatgacacgacaaaccactttctgcccctggatgagctggagcacagcctgggggagagtgcggcccaggtggcagctggagtggtgctctgggtgagctgggaaaatacaagaaccaaggaatcatgtcaggccatcaaggagtatatggacactacactggggcccttcatcctgaacgtgaccagtggggcccttctctgcagtcaagccctgtgctccggccatggccgctgtgtccgccgcaccagccaccccaaagccctcctcctccttaaccctgccagtttctccatccagctcacgcctggtggtgggcccctgagcctgcggggtgccctctcacttgaagatcaggcacagatggctgtggagttcaaatgtcgatgctaccctggctggcaggcaccgtggtgtgagcggaagagcatgtggtgattggccacacactgagttgcacatattgagaacctaatgcactctgggtctggccagggcttcctcaaatacatgcacagtcatacaagtcatggtcacagtaaagagtacactcagccactgtcacaggcatattccctgcacacacatgcatacttacagactggaatagtggcataaggagttagaaccacagcagacaccattcattccatgtccatatgcatctacttggcaaggtcatagacaattcctccagagacactgagccagtctttgaactgcagcaatcacaaaggctgacattcactgagtgcctactctttgccaatccccgtgctaagcgttttatgtggacttattcattcctcacaatgaggctatgaggaaactgagtcactcacattgacgagtaagcacgttgcccaaggttgcacagcaagaaaagggagaagttgagattcaaacccaggctgtctagctccgggggtacagcccttgcactcctactgagtaagtggtaaccagccctgcacgacccatg

SEQ ID NO: 12459 - DNA, 704 bp, Homo Sapiens
cgcgggttccttgcagactttcacattaagaatgtgcctgaggctgctttactctggaatagtctcagatctaaaatttcctctatataaggtggcatatgttaagttttgcttcattggaccgtttagaatgctatgtaaaatgttgccattctgttagattgctaactatatacccatctctgatttggctctccttaagtgataggatttgttattctaaaggtgataaacttgaaaatatcagaatctgagttttacttgaaattttgcagaatacccaggtggagtgaaaattggaagggttttgtgcaatgactaaaaggtaaaacgctgttaaggttcaagaatcaatactttcaacccaagtagccctctgcttgactgtatattatggaactagtaaaccttaggattttgaaaattggagtctaatctttcaaggaggtgggctcccaggatggtaccattgctctttcctagctaaccctagatatggcagctctttaatgtacttcaaaaagcaaatatatattactaaggaaaaaaagttatttataattgccttgtcataattgttaaggtgttctagagccatttgcatacaatttaatgtaatttcattccattctattgtttacacaacgattactcgaagatgactgcaaaggtaaaaggaaaataaaagtgtattgcacaaaaaa

SEQ ID NO: 12460 - DNA, 430 bp, Homo Sapiens
aaacatttaaaactacttatttttatttatatcagagtaacaaatacttatgaagtcctttgaagttcagcgcacaaatttctcgtgtggggcggggggtgtggccatgttcttgctcttccttctttacacatttgagttgtgccttctgttcttaaagagattttcctttgttcaaaggattaattcctaccatttcacaaatccgaaaataatggaggaaacaggttacatcattccaattttgccttgggtttgaagagtctctcatggtggaacagtcctccagggtagctatgttgttgggctcgccctacatcccagaagctcagagacatttgtcaaaggtgtgccgtccacccattgccactgaccctcgacaacctggtctgacagtccaataaaaaactctctcattttaggtttcttg

SEQ ID NO: 12461 - DNA, 1002 bp, Homo Sapiens
  misc_feature (45)..(45): n is a, c, g, or t
ccaggctccgtgcggactgtgatgccagagaggcgtgcagctctngggcaagtcgggagagggcttgggtggtccccacaaggcagaagaggtggaagggccagagaagaccaccaagaccaccgttcccgcagcgtggggtgagtgacctgactgagactagcgggcagagcaagcagggctaaactccaacccagggcctggtgttgaacgaagtagctttttctttgctcgtttgtctgtgtattaagaagaagactaaaatagccaaacgacgctggtcgcatgcgcttggctgtggtctgtctgctgaatgtctatttttgtctcctgacgagacgtgaggaccatgcccttgatccctccgatggaccagaaacccccttccttgcaaaaaaaggcaattgaattaggaaaagataccccaacctagctcagatccaccaagataagcacagcaaagcttggctgcatttttgaggaataaaaacctgcagaaagcaccgataaccttcaagatctgaatgagattctattataacccgtctaaacgattgcaaaattcctcctttggttttggaagcagcgtttgctctcccgtggctcggattctctgaggaccagggagttgacacacaaaccccgccatgggtccgagccagctatttctcaaggctcccacctcgccaagctcccaagggcctgctggcagtgcctacgctgtgccaactaccctgtctggtacagaccacggctgggtaagcacccttaaaagcaacagaaatgacgtctggaagctgaaatgtgaaactgtcaagatggcttaggagaggaaggagtggacccgctggtctttggcattttgtatttagaattattctaactttatacataatgtataggccgatcttttggaagggataaggttttcattcttgtgcaactcattattctcattattggccttttaaataaaaagttgttttgcagtgagaaaaaaaa

SEQ ID NO: 12462 - DNA, 433 bp, Homo Sapiens
  misc_feature (302)..(302): n is a, c, g, or t
tcggcttctgggctgcctacctggctggcggagacactgtctacctgacaaactggcaggtaccgtgctcattgctaaccactgtctgtccctgaactcccagaaccactacatctggctttgggcaggtctgagataaaacgatctaaaggtaggcagaccctggacccagcctcagatccaggcaggagcacgaggtctggccaaggtggacggggttgtcgagatctccaggagccccttgctgttttttggagggtgaaagaagaaaccttaaacatagtcagctctgatcacatccncctgtctactcatccagaccccatgcctgtaggcttatcagggagttacagttacaattgttacagtactgttcccaactcagctgccacgggtgagagagcaggaggtatgaattaaaagtctacagcac

SEQ ID NO: 12463 - DNA, 453 bp, Homo Sapiens
ccccaatttgtgtgcccaaactcacgtggttctttaacagagaacataggtcaccatcaggaggcatctggaaaatggttactggtttttataatgccaaccctacttagccctgagtatgtggcacaggggaatcagccacggatcctaagcagctaaatatccttccatttgcaggacaatcccataaaaaataattctcttgcctccaatgccagcagcacctccatttgacaaactgttaattaacctaatcctcaccatctagacatttactattaacgaagcaatcaactttcatcctaccagggaaggaactggattaatgtagatttggaatgtaatctgtggtctaatcagccagtgggtgagaagcacctatactatacctaagatattatcccttaaaatatcctagacaaagcaaactattttaatagtggtttcctctgg

SEQ ID NO: 12464 - DNA, 425 bp, Homo Sapiens
aggaccgaaaacatgaactagggctcatgatgaaggcactctcctaacttcatacttactaaatacccgctaaggcacttgactatgcacattgccaagcagtatagaggccagccatgcgaaaccgatgagacaacataggtggaaagaaaggtgaccaaaactatagggtgctcacgtcccccttcctgattttgttagaggatcacggagcatccttagggttggcctagattctgaggggaacagaaaaagaaaaagtttgaagaattttatccgggttttgttttgaaggtcgaggaaacgcaggcatgtctgtaagaaaaagaagctaagttcataacaggagagaggtgatgaggtcaggaggatgtacaggctcaagggaaagggctagctttggaaaccagaggatgcagtgtctg

SEQ ID NO: 12465 - DNA, 212 bp, Homo Sapiens
gtgtgccactccacatacctgcttatcctctttctgaccttacctctttccatagtcccttctcctcattctctaggttttagccacattagccgttctctctgtccctcatacattccaagataatttctggctcacagccctttcacctgcttgttccttcttggaataccattccctccagatcttcaccagactgctgcttctcgata

SEQ ID NO: 12466 - DNA, 542 bp, Homo Sapiens
ctggcggccgatcccaacgaggctccctggagcccgacgcagagcagcgccctggccgggccaagcaggagccggcatcatggattccttcaaagtagtgctggaggggccagcaccttggggcttccggctgcaagggggcaaggacttcaatgtgcccctctccatttcccggctcactcctgggggcaaagcggcgcaggccggagtggccgtgggtgactgggtgctgagcatcgatggcgagaatgcgggtagcctcacacacatcgaagctcagaacaagatccgggcctgcggggagcgcctcagcctgggcctcagcagggcccagccggttcagagcaaaccgcagaaggcctccgcccccgccgcggaccctccgcggtacacctttgcacccagcgtctccctcaacaagacggcccggccctttggggcgcccccgcccgctgacagcgccccgcagcagaatggacagccgctccgaccgctggtcccagatgccagcaagcagcggctgatggagaacacagaggact

SEQ ID NO: 12467 - DNA, 456 bp, Homo Sapiens
cgacctcttatgtgtgccatctctgtgacagcagcactatgtctgtatccagctgacacacaaacaactacctttccttgtagaggtccctgaataagctatgggatatttctgtgttgaactatttccatgccccagtttcccataatcaccatctccccaactgaagacttctccttctgtcgtaaaggctaaagtgtgaccatcagatcctttagaagatgaaacctttttaatggatctgtgaggctcgaatgttaacttttttaaagttgactgattattggagtctccaaggcccagtctcccatagctgcctttcccgcaagctctaacagagccatccgtagaaatgacaaaagtgcagtactgtccagcttcaatggtctgtgcatcagagaaactaggagccagtttgggttgcagtattttctcctgtgtaccttctaccaactg

SEQ ID NO: 12468 - DNA, 537 bp, Homo Sapiens
  misc_feature (271)..(271): n is a, c, g, or t
gagtttgtcttctacgaccagatgaagcaagtgatgaatgcgtacagagtcaagccggccgtctttgacctgctcctggctgttggcattgctgcctacctcggcatggcctacgtggatgtccagcacttcagcctcctctacaagaccgtccaaaggctgctcgtgaaggccaagacacaagtgacacaggccacccccacagccggagcccccgccgctccacagtccctggggccgagcacgagtgagtggacactgcccccccgcngggcggccctgcagggacaggggccctctccctccccggcggtggttggaacactgaattacagagcttttttctgttgctctccgagactggggggggattgtttcttcttttccttgtctttgaacttccttggaggagagcttgggagacgtcccggggccaggctacggacttgcggacgagccccccagtcctgggagccggccgccctcggtctggtgtaagcacacatgcccgattaaaggagaaacgccgggaaaaaa

SEQ ID NO: 12469 - DNA, 837 bp, Homo Sapiens
cggggaggtagaattgggctatttgctgaagcttcttggtggccctgctagcccaggaagaaacttacattttgatttttttgtaccatggcttcggttcacaaattgctgcgtggtacttattttctcagaaaattctctaagccaacttctgccttgtatccatttttgggtattcgctttgcagagtattccagtagtcttcagaaaccagtggcttctcctggcaaagcctcctcacagaggaagactgaaggggatttgcaaggagatcaccagaaagaagttgctttggatataacttcttctgaggagaagcctgatgttagtttcgataaagcaattagagatgaagcaatataccattttaggcttttgaaggatgaaattgtggactcattggagaggaccggaaggccaccctctgcatgaggtcttgctggaacaagccaaggttgtctggcaattccgggggaacagaagatttggataagtggacagtgacttctgataagacgattggaggcagaagagaagtgttgttgaaaatgggcaagaataaccaaagtgcactgctatatggaactctgagctctgaggcgcctcaggacggggagtctacccgaagtgggtactgtgcaatgatatccaggattccaaggggtgcttttgagaggaagatgtcttacgatgggtcccagtttcaatactctgtatctccgtgtacgtgggggatggtcgggccttggatggtgaatatcagggaggacacagatttcttccaagaggacgaatccagatgtataagttacttcatgtttcacccgcgcgggaacc

SEQ ID NO: 12470 - DNA, 1108 bp, Homo Sapiens
  misc_feature (47)..(47): n is a, c, g, or t
aaagggggttctgggtttggtccaccttctgaaaagaaaggggggancccagggtttccttggccggaatacccgtttgtaagggtcctagtgccagcattttgagaataccaaggtccgttccctttttatccagggggagggtccactttttcctaaaatgcttgccggggccccatttgggaaaacttggcctggtaatcaggcataggaagtaattcctggcccacaccacctcatttggggtcccccagaatccgaaaaatcccgaaagagctggtcaatctcagattctccagggaatagggcccggcgagtccccatctcagcaaagatgcagcccaggtcccagatgtccacagctgtggaataatatttgcagcccaggaggatttcaggagctcggtaccacaggggtcacccacctcatgggtgtaagtacgaacaggaactccaaaagctctggctagtccagaagtctgctagcttgatggccccctctgtgttaataagcagattctgaggtttaaggtctcggtggaggacccgatgagaatggcagaaagctaggccctggagcagctggaacagatagctcttgatgaggggaagaggaatgccagtgagagcagaggcatccatgaatttcttgagatcttggtgcagaaattcaaaaaccaggtagagtttattttctgtgtgaatgacatccagcagcttgacaatattaggatggttaagctccttaagcagagagatctctcggatggcagtactgggcacaccctcagtctcagtgtccaggcggattttcttaagcgccaccacctctcccgtcaacttgtttctggctttgtacacaactccgtacgtgccctctccgatcttttccaccttttggaagttctccatgaagcgccagcgagtcgggtcagcccggccctggagcgggggcctgggaaccctgcagaaggcggaccctggctctcgggggccgaggagggggaaacagggcccagtaccgtggccccgggtcgggatggaacgcagtatcctctcgctcttgtcaatttggacaacttgaaacaatgtgccgatcggaaaaatc

SEQ ID NO: 12471 - DNA, 305 bp, Homo Sapiens
  misc_feature (29)..(29): n is a, c, g, or t
  misc_feature (31)..(31): n is a, c, g, or t
tttcaccaggccaggggctggcaaaccananccctcaggccaagtcggccacctgtttttctatagcttgcgggctacctgccctaagaatggttttcacagttttaaatgcttacactttaaatggttatagaagtacctgtctttattcttggccattcaggtttccttttctgtgaatttcctatccataattttcttacgaatttgtagtagttctttataaatttattcattcatccaacagatatttattaagtacctctgtcatgtggcagcgctgtaaataaagtgaacaaaacatt

SEQ ID NO: 12472 - DNA, 375 bp, Homo Sapiens
catccataatgtgtgacacgttgttaaaattctagcttgcacataatgtagcgctattgcattcatatgcaagtctcgggcactatattctcatgacattttccaatactgtagtacacttgataatgagattgaaaacagtcacatatgtcttcatggattctcaaacagtatttaggatcttgtacgtcctaaataagattcttttgcctgatatctaacacctgagtaagatatgttctgtccaactgcataagtcatctctctagtcctagtatagccacacactttaaggaagattattcttattcaggcttatctgatatttggtagacttatgtacttttaatttaatttgacatctccatggcacac

SEQ ID NO: 12473 - DNA, 825 bp, Homo Sapiens
caaagtctgaaaaaaaatcaggcattacatttctttttcaaagaaggtagctttaaagtcagaaaatccagtttcacatcgacgtttctaggccatattaatttatgaaggaacctcacatcaactctaacagacctaaagcagggctgtctcagaagcggacaacatgaccgtgcatgcgctttcctggccggcttgttcaggcgggttattgttattacttctgggttattaaaagctggcccggggctgttgtctcgctcagctgaaaaacattcatctctcctcttgccgactctcaaaataaaggctcagaggggtgtccaatggaccagaaccattctttcgtgtctatttactgtacctcaacgtgggtttccttatcttaagagcaagagttgtactcaacaaataaaccttgccagttccaaagctggtaaatagcttttgtcaggtccacactgagcctctgaaaagcaatctgctggtgggagctgacagctaagctgtgcgtcttttgaccttctccttatctaggcagagaaaattttcactcatccatgagactgttctttacatttttctggggatcagcaaggtgacaggtggtttgcaaaacccaacatgattattatttttctaaatcatagttgttccagctctagctttcttccccccaatattcacatggattcctgtttaaccaaacctcccacttccactagctaataaaagtgtcatgcagattgttacaaagaactattgttatttacaagtctacgttttctttgaaatcaaaacataataaagtgaattttcagtgtt

SEQ ID NO: 12474 - DNA, 358 bp, Homo Sapiens
tgcgtaggcgacggcgccggaggcgggatgatgccagctgctttggaggaaagaaggatggtgagatggaccggaactttgacacgctagacctgcccaagcgaactgaggccgccaaaggctttgagctgctgtaccagcccgaggtggtacgtctctacctctccctcctcacggagagccggaacttcaacaccctggaggctgccgccggcgctctgcagaacctcagtgccggcaactggatgtgggccacgtacatccgcgccacagtgcgcaaagagcgcgggctgccggtgcttgtggaactgctgcagtctgagaccgacaaggtggtgcgcgccgtcgcctacgcacg

SEQ ID NO: 12475 - DNA, 830 bp, Homo Sapiens
  misc_feature (273)..(273): n is a, c, g, or t
ttcagaaggaaagttgacagaaatcagtctgatgagataaagaagagagagaggggaagagtgatgggagaatgtatgtttatctagtaatctctaattagtattttattgcatgtctcatcacagtaattttgtgagtcagggtatcttcaccttatagataaggaatctggcttgacttgtagcatagttggtaaggggcagagttcagttgtcaacccagatctgactgactctaaactcatgcagatcttgccattttagaatactttntctgaagtaagaaggaggggttcctgttttataggagatagaaattagagaactttagtagaaaccaaccaagagtatcactaatggtattaatccttcctttatagccttcagcttatgtattagagatttttaaagggatcaagtcgaggtgagtgagtccttgcgcacaatttttgtaatctgtcagcaaacatttatgaagtgcttatctgaacgggaaataaatagaaattataattgatggttatcttataggtttaactatatcaaagttttgatggaaaataatttataatgttctttttgaagtgctagaactaggaagttccttctaaagtatgaagagagatgcttttaaggacaaataaaggggagtgatttatgttgtaggcgatgaaataatatataattcaattagaagcaccaattgttaatttgttttatattttggcttcttttctatgtacatacacaattggaatattatataaagttttatattctgttctttttcacatatttcctgaacatttgtttgttgttcctattattca

SEQ ID NO: 12476 - DNA, 441 bp, Homo Sapiens
gccccggcttggcgacggcgcacagcttagccgcctcttcaggcactggctattcttcgcattagtccaactcaatgaggacttagacatcttctctgagatccgactgcgttccaactaggatgatgggggctttgggacagtggcatcgaatctccggcacccatttctcactgacgttctggaaggatgaggggctcacgacactgaagcagagcaggaagatgtctgtgttggtgtagcagagaggcctcagcttgtcaaattcatcctgtccggcagtgtcacagagttggggtctcacgggccgccaatccacagacaccaccgcggagaagttgtcgaaggcagtagggagtagtacatcggtggggtagccggttggtggtgtaactcaccaccaggctcgtcttgcccaccgcgccgtcgcctacgggggat

SEQ ID NO: 12477 - DNA, 745 bp, Homo Sapiens
ccaagacccagctttgcccttgcatgtgtgaaaaatggcctcaagtatgaccccatggcaagatggaaagaaactgtgctcttgaatagcttagagattcagagccccccaaccagcttgaaacgcccacctcaaaacaatgacatgagaagaaacaaacctctaatttaagccactgtctttttaagagcattgtagtttgagatctctttctttcagctgtttagtccccagctgaacacttactgaccttatcttacaggtcaagaaaaatgaagttctggggtacaagtcactaatgtattagaaattttccagctctccctccttgcccagcagagtatatttccactcaaacacaatgaacccatttggaatgggacaaaacaaaatggggtggccctggaacaagagaaagttcagctacacaggatccaggtcaaaactctttaatcctcccatttctggatttcaaatgaacacctttttgtctagcagttctcctccagaggtttgctttcccacaacagcttgtcaacagtgtaagaagttcaaaaagaacttttggggttgcacgttgcaggttgtgtggcatcatcccagcttgtctcaacacctctgatgaacagtagcggaagaaaggactctttccacatgagttcctcggcggtccccgtctcttaaggagtttataaaaaaatccatcatcttgttctactaaacccaagtaaatataattaacacc

SEQ ID NO: 12478 - DNA, 395 bp, Homo Sapiens
cacggactgacgcagacgtggctgtgtgtgtactctctgttgaatgtgtgcgtgagcaggcgcaagcacttgacggccagctcccgctgcctctcgttgggagcctccaggggtgatgggcggccctcagccgagagcggggaggaggcgctggaggagccatggaactcagagtcctcgctgaaggccggggacagtgcctccgggacaggccgctgggcggtctccagcttctcccgcaggagcaggtagtgcactagtcttcatccacctcctgcaggaggcatcagcttctcacagctcccactggtggtccagaatgagactgtcatctcgcggggcctaccagcctgccaggttctcctcagccccggacataggccacagatgtgtcc

SEQ ID NO: 12479 - DNA, 441 bp, Homo Sapiens
tggaaatggctcttccatggagtggttggaaaatggcagcctaagagtcacaccttcctgagctgagagccccaaaaatggcgtgtgtcagcgctcacgacgaacccaccagcactcacaggccactcaccatgccctttaacccacccaggcagccccgcgttttgcctttgccctaaggtctgcagctgcaggagggaaagtccttctgagataagtggctgccttggcagtttctggacctttagtgagagctccgtggcagtttgtcagcgtctttccccttagtcagttcctcgcttttaatgtgttagcatttcagcctgggagtcagttaccttaagaagcaataacctgtattccatgtcagctcatcctctttcccaaaggactgaaagaaaacattatcagtggatcattaaaataaacctggttttctcc

SEQ ID NO: 12480 - DNA, 221 bp, Homo Sapiens
cccgccaagtactaaccaggcacgaccctacttagtttccaagatcagatgacatcaggcatgtttagggcggtacagctgtaggtggtttagcactttctattagggagacaatctttctaaagcaatgctctatatccacgggttctgcatctgcagattcagccaaccatggctcaaaaatattcagggaacccttcacctaaataacaatgcaataa

SEQ ID NO: 12481 - DNA, 630 bp, Homo Sapiens
actatgaacaaaatgctgtgggaacaccaaggaggaaatgacacactgctggcaggagatggaaagcaactggagtcttcatggagcgatgacatttgagctggtcctcaagtagggggtgaggattacatccaggcaagaacccctgtgaacccagatactgaagtatgtccaatgacaaggatgataaggtgatatggaaaaaaataatcacaggtgtttctgctcacagcaagcccagcagtactccaagagcagtacttaactggggtgtcatgggctatgctctctatacagaagattacattagagtcttgtcttaaaaaccctttttgggaaaattatcataattcatttttttctaatatccaatgacttttacgcttttgctactttgattcatcagtacgttgatgataccttctcctctttgtcccattcctgcttcatgataatttaatgaaattaaagtaatggatttaattagcacctacatctatgattatatgtatatattatttatctgaaacctttggggtgggccagctaccacaattaaaatatcaacttgattcaagttgtgtgaagcacactttaaatttgaaataaaagtgaataaaatctaaaaaa

SEQ ID NO: 12482 - DNA, 502 bp, Homo Sapiens
tgtattcactccaactgagacctttctgaataactgtagaatagtaagattggcaggaagttccaatttcatatggtttgggcttccactaaagtgtctagtagattagaagatctccttattttaaggcttttctattcacaaaagattctaataagtgtttttaaaattgtgaagaaatatcagtgatgtaatagtggaaacagtctgcaagtcaaatgtgaaggcaagaaagaaaaatccaaaagggtattttatttgccttcagaccctacttttacttcattgccacttaactaaaaagtaattcctaaaatttgtgatttgtccatattaattgaggagccagcccagatatgggtagagatcaccttatgatttattgtttaactttttaagtttgttgtactgcccagaacccccccatgtaaattaatagtaataatgaaaaataacagcagtattgttttctgtttttaaataaacataccagtatggaaaa

SEQ ID NO: 12483 - DNA, 854 bp, Homo Sapiens
aaataaagggcctgtgcacagctcggcgaactgctcctttgggtgtgccaggcaagacaggtggcagttggatggcccgagtctttgtgtgtcagcatctgagtctttatgtgtttgtgactaggggtaaccacagcagtgtcatagctgtggccctgccaatggctagtcaaatagagtccacaagcactgtttgaattgctagcaaatggtcatgcggctcgtacgtggttacgtgtcagctgagctgaaacaaacgaggtgacagaaacacaataagggaagctcggttatgctgccgcccactcccctctgcccagactggttcaagccgccaccctggactgatgagaatatgccagggataaaccacaacctgtgggaaatgctgggtgggggcataaatatcatctgtaaacaattaggcagccactgctcattcagtgccgttttgagaagctaaggaagtccgcaatcagttatatctccaattaccataaaaatatattagccattcattcatttattaatgattcatcagttaaccacacataatgagcaaataattagcagtgctgtacggttgccaaaattgaagaagtgttggcattttaaagatgaaaggttgaatttatgcagaagtctggtgatgataaagttaatatggaagataattataaaagtggctgtcctctattacaggctgaggtaccacaaaacttgcctaattgaactgaaattaatattcttccaaagtctgtgtgttgccacacacaaactgctgaatttctcttgaagatctcccttcagtaagtggcaccgcacaatacaagttaataaaatgccagacagct

SEQ ID NO: 12484 - DNA, 1254 bp, Homo Sapiens
  misc_feature (258)..(357): n is a, c, g, or t
tgccttttaaacgcttgttctgtctctttctaactcctttgtctccgccggactcggggtatctcctgggtggtgtggggctggtttccccaacagctttctctccacccagcttcatagatgacaccctgcctgctaggccagatgttctccggccaagaacactattatagctgcctggcttctccctgagcagcgtcaggtgtgaggagtgcgcatggcagctgcccagtgacagatggaatctccctctctcannnnnnnnnnnnnnnnnnnnnnnnnnnnnnnnnnnnnnnnnnnnnnnnnnnnnnnnnnnnnnnnnnnnnnnnnnnnnnnnnnnnnnnnnnnnnnnnnnnnccttcatttcagtcaacaaccacataacagatcatcaaaatacataaagcaaaaactgacagaactaaagttaaatatacatatctacaattatggagagaataacaaacaaaaaaatagaacaaaaatgttccacgccttggtcaatggtaccaccagccagcgaggttcccaagccaagaacttcggaagcatccgtgattcttcatcttccacatccactttatcaccggaagcacgcattcaaactttctaaacatccctcagactgacccacatctttctatccacttttcacatcttgcttgaatgacttccccaggcccagccagtctcccgcctccagctccgcccccttctgactccctttatgtggtacaatcagagagcccttcccaaagcacaaatctgctttaactgcttggcttcaagccctttcgtggctccctatttccagctggatgagctccaagcctcttaacgtgctgtacgtgtacatgcctgacccccgctacttgaccagccaagtttcttcatagcgctgtgtctttgttcctcctgcctagaatgtccttccccttttctctcgcttcatggtgtgccaaactcctatcctgtgagatccagcttacacgtcagcttccccgtgatgcttttcctaactccctattcagccagtgaagtgctccctgcgttcccatgtggcttgtatctctgtaaaagctccacagagctgttttaatttatccgttaatgtacatgtcttccccactagacttttgctccttaaagtatctccttcatctctgctttgcataacctaacagagttcaacacataggagtgtcttaataaatgctgaataaaataattaataaacaaatgaaacaatacagc

SEQ ID NO: 12485 - DNA, 1059 bp, Homo Sapiens
ggtatatgggatctcaaaagcacagagctcaaaggagacccctgtatgcaccagagcttaggatgtgctttagaaggcattaccaaaccacgggcaaagttactttagtgtcttagtcttactaggtttgaaaagccagagaaaagactcaaggccaccatataagagcaaaacaaaaggacagggagagaatgtgaagatactgaaacattttacataaagttgtataaaacatactttaaagaaaatgtaaagtttaggatatacatcaaaatcagcagaaccactaaataaataggcactgtaaaatagcaagagaaaatttaaatggatttctaaaaaatattgacacctatgatttttaaaaaatgtttaagaaatcctgtatttcacagggcagcctttcacaacatagaaatattaggacataaatttttaatttactagcgtttatagggttaaaaatgtcttctacccttgtcgtttgtctgatggtgcaaaaaattttcataagcatgtaattctgaatgcctgatggattgacatatataatatgctgccagtattaaaatatgtgacagaaaacgcatctaatcttctcactgtttacataaattctaggtttctcctatttacctcaagcacgtatggagtgaattcttaccttttaatattgccatggcattcacattgaatgtaagttgaactctctcatatggtagctgggttcagattcccttgacaatttccagttctaaccctcacagttcctcagtgtggctggcccagatactgaccctacacagttgcctccccctggtgactacccgccatggaaccgttggatacaatctgcatgactcaccccacagacctcacagcccacttggacagcccccacacgccagagtgacctgctcagttgcagtggaagccaaaaaatgtgcctgctggcactcaccccaccgactaaagccccgtggaaaacttatttgggtactgttctgggcccaataaaggctggagtcccacagaccccttttctctctcttgctcccc

SEQ ID NO: 12486 - DNA, 756 bp, Homo Sapiens
gcggccgccggacaccacacggaaggaggcgaaggccggccggtcggcgaaggccgagccctgctgcaccagggcctggtggatggcgcgctcgccattcagcaccactatggggcagctgcccaggcggatctggaaaacgtcgccgtagcgccgcgccaggcgagcgaacgagaggtgagccgcctggcccaccgccgccgcgtttccgatcagtggccacgcaaacgggcccgggggcgcggaccggagctgccgcctccgttgcctcagcagccgctggcccacatgcacagtggccagcaccgacaggagtagcaggagcgtggtctgctggatggacagcgggtttagcggccaagggtcgttcgggctgaggctggtgcccatgctgcggggaggtgcggtttccagtggcgcgggacagccggctccgagaaggaactgggacctttgcctagggcaagacgtcaacaggaacccgcaggcccggcctggacacctgctgccctcactggaagctttaactcccactcgagtctcttggcgtcgtcagtgccaggagcgcttggattgggatggggacggagaagggtgccatcgctcgccgagccccgctgcaccttggggacctggcaaagtcgaggtttcctcacagcgttgagattgagactgggggtcggtgagtggcgtcaattcccatgcccttgcggccatctcacaactggagtcgcagaagcgctcgctcccacatct

SEQ ID NO: 12487 - DNA, 555 bp, Homo Sapiens
aacaagagctgttttgaggaataataggagtggcagccagatggagttggttgagggtaaggtagggaggataagatggaaaagaatagatctttctctccaggggtttgatgtgaaaacaggagagaaatcggagggggatgatggaatggactgtggggacatggaaatattttaatttcattttttaaaatttaagttattgaatagattttaaaaagtacctgtttctaaattcacaaatgatagggcttagccatagacctcctatgatttgctgggccaaaccaggcaaaaaactttatgaaataatgctttagatgaaatgattcatagagttctagccctgaaattctctactgagttatgattaatcttgctttctaaataatgtagatacttgtcacatagatgtggccaataataattactggaaggaattagatttgctggtaattatgatttcactccaatacttaggagtattgataagtgctcacttcagcagcacacacatcaaaattggaatgatacagaaaaaattagcatggcctg

SEQ ID NO: 12488 - DNA, 1038 bp, Homo Sapiens
gctggaccggtccggattcccgggatcatcagggaagacacgcgtgacccggaaggtcttcccgccacactccagagcgggtgtgaggggcgccgatggcggagggaacggcggaggctcctctagagaatggtggtggtggcgactcgggagccggagctttggaacgaggagtggcgcccattaagcgtcaatacctcaccaccaaggagcagtttcaccaattcctggaagccaaagggcaggagaagacttgccgggaaaccgaggtaggagaccctgctggcaatgagctggctgagcctgaggctaagcggatccgactggaggatggacagacggcggacgggcagacggaggaggcagcagagcccggggagcagctacagactcagaagagggcccggggacaaaacaagggccggccccatgtgaagcccacgaactacgacaagaacaggctgtgtccctccctaatccaggagtcggctgctaagtgtttcttcggtgatcgctgccgctttctgcacgacgtggggcgctacctggagaccaagccggccgacctgggcccccgctgcgtgctcttcgagaccttcggccggtgcccctacggcgtgacctgccgcttcgctggggcccacctgaggcccgagggacagaacctggtgcaggaggagttggcggcccgcgggacccagcccccgtccatccgcaacggcctggacaaagccctgcagcagcagctgcggaagcgcgaggtccgcttcgagcgagctgagcaggccctgcgccggttcagccagggccccacacccggctgccgctgtcccccaagggcacgggcacccgaagggcgctccccaagccaggaaaaactgtgggggcccagcaaggtcccccgcagggcccgggccactaaccaccccttcccaggcaggccccgggtgcggaacctggggggcccccctgtaccggaatgaaggaaccgggttccagggttggggggccccgtgtgaagaaaagaaacggggcttg

SEQ ID NO: 12489 - DNA, 613 bp, Homo Sapiens
  misc_feature (94)..(143): n is a, c, g, or t
  misc_feature (437)..(437): n is a, c, g, or t
gcattcattttattggcttttgttatcttttccttatttaccctggcttccatctacactactccggatgacagtaatgaagaggaagaacatnnnnnnnnnnnnnnnnnnnnnnnnnnnnnnnnnnnnnnnnnnnnnnnnnnttgctcagaggaagagcacagaattgaagctgttgagctatgatctcatagccaccgatatttctcgctaagaagacagaggaagcaatccatgggaactacttatccacagttaaacaagaggaggggataatgaagaaagttaaaatcacttactgattaaacacgatgataataacctttaatgaactcaatactcgggaaaggcttcacatttctgggactcagcattatccaaaatatctattaagagccatacaccattctagctgcaattgattatacaaaaaaaangaccaaagtggttacaataataaaatagaacacagagaaagaagaaaactacatgtgttacaatttggtaagataaacaaacaaacaacaaaaattaatcactttttttggtcctgtgacacacatgataatttttgtcttaattctcctaacaaatgacaatgaaaagctataag

SEQ ID NO: 12490 - DNA, 442 bp, Homo Sapiens
cttcatcagcctcttcatctacatggtgctcagcctcttcatcgcgctcatcaccggcgcctacgacaccatcaagcatcccggcggcgcaggcgcagaggagagcgagctgcaggcctacatcgcacagtgccaggacagccccacctccggcaagttccgccgcgggagcggctcggcctgcagccttctctgctgctgcggaagggacccctcggaggagcattcgctgctggtgaattgattcgacctgactgccgttggaccgtaggccctggactgcagagacccccgcccccgaccccgcttatttatttgtagggtttgcttttaaggatcggctccctgtcgcgcccgaggagggcctggacctttcgtgtcggacccttgggggcggggagactgggtggggagggtgttgaataaaagggaaaataaaaaa

SEQ ID NO: 12491 - DNA, 476 bp, Homo Sapiens
caccccttcaagagctcgctgacgcgcctgggccgccactggctgcagcgcctgcaccgcgcgcacacgcccatcgtcctggccgcgctgctcctgccgctctgcttcgtcgactacggcgtcgaggccctgggcgagcaggcgctgcgccgccgccgcctgctcctgctgctcggcgccggcggcccgctcctgtacggcctctactgcctcggcagctacttgggcgtgcaggtgctgctggtgcacgctgccacgctcatctggccgcgggctggactacttcagcagcctgtggatctggacgttggtggttggctatgtgttgactgtttcattcaagtggaatgcaagcactgaacgctacttgagagcagttgcaattcctgcctggattatatggcctcttcatctaccatccctggctggctcatggagaattccagtattcctggttattgttttcctgatgtctg

SEQ ID NO: 12492 - DNA, 336 bp, Homo Sapiens
  misc_feature (147)..(247): n is a, c, g, or t
tcactccccgcggcaagagtggacaccccaagaatgagtgaaaagacagacgttctcagcaggtggaaatggtagaagtgaaaaacatattacctgaagtaaaaaatcacctgaagtaaaaaagctggccaggcacagtggctcatnnnnnnnnnnnnnnnnnnnnnnnnnnnnnnnnnnnnnnnnnnnnnnnnnnnnnnnnnnnnnnnnnnnnnnnnnnnnnnnnnnnnnnnnnnnnnnnnnnnnnaagtacaaaattagccaggcatggtgcacacagctgtagtcccagctattcaggagccgagcatgagatcacttaacccagagcgactc

SEQ ID NO: 12493 - DNA, 260 bp, Homo Sapiens
atttccacaacctctaaccacattcagtccaggaccaaggctcagggatgagtgggagagatgggttatactgtccctggagcttcatcatgattgcctgagaagacagatgctcatcatggctggaatgaaggtatccttcagtaaactttgctttcctaagaaaattcttcagtttctgataagtcatccctatttttatcttgatcaaggctttctacagttacataaaaaaatgaaatgctgtccaggacagttga

SEQ ID NO: 12494 - DNA, 236 bp, Homo Sapiens
gatgacaacaagcaacatttatctaatgaactacagctatcttaatttggttcttcaagttttctgttgcacttgtaaaatgctacaaggaatattaaaaaaatctattccctttaacttataatagtttatgaaataaaaacatgagtcccagcttttgttctgtggtaacctataaaaaaagtttgtctttgagattcaatgtaaagaactgaaaaccatgaatatgttgtaaa

SEQ ID NO: 12495 - DNA, 406 bp, Homo Sapiens
tgtcgtgactctcccacactggcttgcatgaccttaacaaattacttgatctctctgagccttggttttgttctgtaaaatggaagtaatgctggcctgataggcttgaggtgcaaattaactgagatcaggtgtgaagtaggtactccattctctcgctcttgttttgattccgcgatatttgccagcccctttctgtgtcccagcatggcccctgtcccactctgattgctgctagattcctcatttctaaacaccagacagactaaatgcacaaaattgagtggttcacaagtggaagtgctcgttagctctgcctggctcctttcacacagatttagttgctaataaaccgctcagggcacggtggatgatgcttagagggagcctctagaacggtcaaaat

SEQ ID NO: 12496 - DNA, 535 bp, Homo Sapiens
  misc_feature (45)..(45): n is a, c, g, or t
agccctggcaagatatttcactcccgccccatgccatgcattaanaatccaaaattgcctatattccacctgccaagcaagagatgctttcattattgaagttccaaatgtatacctttgagaacagggccttctcgtcttaaaagagaggtcctcattttgtgagttgggagcagagggaattaaagaaagccatgatgcagggatttggccattcaagccgggcagccttcagagaatgtcatccctaatgacacatgcccgatatgaaggagcggggctgagcttgtcctgccttcgtattgaatgttgcctgtctgcctccttaaaagcgggcctctgtgtgagcatttgacaagacttaaaactattcattgaagaaaatggatgatcccccaacaggaagaagcaaccccatgggctgcctgcttgaccacagaagtgcttccagctccagttgctcatctgagaactccccccaccacttgctgttaaaattgttaaaattaaaggccatgttgattgattttttagg

SEQ ID NO: 12497 - DNA, 977 bp, Homo Sapiens
gtctgtaactgatccaacttttcaaaaatggaagctttataaggaaacaagtctttgatttatatcaaaattcatgacttgttcagcttttaaaattaatttggccaatactaccatgactttagtctctatctttaggaagtaccaataaattatatacgctttcccttcattgtaggatcacagaaaatcctctactgaagagcacatacgtaggatctgtgactctgaacactaattccatagtccatccctccttgtacctaccagcaaatgcactaagaaaaaaaagtctgccctcctctataggagatagcagcagaacataggtttgaagcagtcacactgtgccagaaattagtttcttcataactcaacaagaagaaagggaaggcatcatactaaacctctactgagcctcgggtgccccaaactaacagacatattgcattttacatgaatggattcattaccactatcatgaccaaagagcagttacaaggcatcctcctggggtaccagtacaagaacaatacagagaatacgcccctaccctagggcagcttgctgaagactcttctaaggtctggccagttctaaatcactgctcatcacaaaacaacgacatggagcttgacacaagtaaagaaaacaaaggaaaacaggctaccaagttaactaccatataaccagctaaaatagaataattacaaagtgaatatgggacacagaagaggaagaatagtaaacagtgtcctgattagtgcccagggttgacatggcctagagcaccaaagaaacaactaaagcttaacaaaaccagttcttggcaccggaactaagaagggaagagatagtctacatcaattaagcttttacctggtagtgccccctaagagtagcatccattctgcatagcccgttataagaaatatcctgggattgacctgatgtttacccagattagaagacaaaac

SEQ ID NO: 12498 - DNA, 662 bp, Homo Sapiens
ccccccagcggcggtgtactagaggagtgcatgcaaagtatcaacctagctgcccagttcatgacacatgaaatccatgtaaaccacagtataagtcattaggtgagatataatggagaagatcattatcatgttaagcaagaaataatatgactcatttgctaattatttaatcaaacttgagggaaaccagattcagttgtattggagattctgcacatttagctctaacagattcttatctacgtccatttctagtcattcacttaataaacttttattaagtgcccagtatgtttcagtaactattctaaaccctaagtatacaaaaatgaatagaatagggcttaactctcattttgctcccattccagtgggagagacagattcaaacaaaatgcattaagtgtaactatggaggtgcaggcaagggctgggagagcttaaggagcaagtattgaaatccacttagaaaagtcaggagaatttttaagaagaggtaaggaattgagctaaattttacaccgtgagtagcagtttgccaggcagataaggtggagaaggacgtacctgaaaaagagtccagcatatgaaagcaggaagttgaaaaagaaaaaagcagggagagagacggcatgtggctgagtacacctgccggtggg

SEQ ID NO: 12499 - DNA, 539 bp, Homo Sapiens
ttatgatctttctgggattaatttttgtgtgtggtgttagaagtcaaacctcatatttttccatatggatatctgattggcctcactgtttcttgaatatgaccatgtaaatcacaaaactgtcagtgtgggtcagagtcttcgaatttgctatcctgaagatgcttcagtacatcctgaagatttgcttcctgaaaatgaatgctctaggaccctgaaggttgtgactgtgcacctgccaactcaagctgaaggctgaagaggaaagctctgcagccccttcctcaagctggaggcagagtgacgtctgctggggatgcaggctgtgcgccccacaggactccagagtggcactaagcatgttgagttcactcctgcccatggtctagcttctgctttgcaggctcaggcatcttatcttgccagggcctcaaagctggtgggacagaatagcatctttgctcactaagctctgacccaccggcctccttgcagctctatagtccaagcgaactccttccaacatcaggcttctttta

SEQ ID NO: 12500 - DNA, 392 bp, Homo Sapiens
tcggcactgtactgaggactgcctgtataatatgtatactttggagtgttgctgttagtcttctttcttaaaggtttttagtacttgttagtttttccaccgttggaaactttgttccagttgttcaggccacaggtgaaatgtctgtctttgttaattaaagaatgttcagcccagggtgtgcctccacaaagactggactttccttactcgtgacgcccccttggacacagtccatcgctcaggatagtttctgtgagacttgctgcattaatcctacagcaggatattttacaggtggaatcgtatataatttcaaatgttcctttcaaattaaagtgtataactgcaattccatcatggatggatgtggccaagaaaacagcaaaatt

SEQ ID NO: 12501 - DNA, 429 bp, Homo Sapiens
agcatttttaaaaaattgaaagctgcataaccaaagtaaaaataagagcaaaaccccaggacacgccacaaaggtgaagacttacttctaaatgaatgaaaggacctcatttctactcaagatccttggcccctttccaaaaatattcaagtaatgggatttctacttgcaggcagacagtgcttccatcggggaatgttctctgaggcaaggcaacatggtcaactagggatggaattttgaaggcaatgcttttctcatctctgcaacccagaattgagttatctgtgctctgagactttttctttacaaaccatttaatgcttcaatgatggcaaagctaattcagcttcccaacagtgttacctctggaatcccacctcagggattttgtatcctctagatcttggcagtaaatttttggaagta

SEQ ID NO: 12502 - DNA, 409 bp, Homo Sapiens
gaggtgtactccaggaggccttccctagccgacggctctggatgagcaccggaggcagcaacatttcagccaccgctgtcagctctgtgactttgctgcccgggagcgggtgggcctggtaaagcactacctggaacagcatgaggagacttcagcagccgtggcagcctcagatggggatggggatgctggccagcctccgctacactgccccttttgtgacttcacatgccgccatcagctggtactagatcaccatgtgaaagggcatgggggcactcgtctctacaagtgcaccgattgtgcttacagcaccaagaaccgacagaagatcacctggcacagccgcatccacactggggaaaagccttaccactgtcacctctgcccctatgcctgtgctgatccc

SEQ ID NO: 12503 - DNA, 470 bp, Homo Sapiens
  misc_feature (41)..(96): n is a, c, g, or t
ttccctcccaggccacccaagtgagggcatgaagcacagcnnnnnnnnnnnnnnnnnnnnnnnnnnnnnnnnnnnnnnnnnnnnnnnnnnnnnnnngttgcaggggttacagtggacaggatgtgggagggcagctgcagctccaagctgcaagtctttctgatagaatgcttaaaactccttggaccacagcaagagagtgttttcatttgcacccatttttattagcgtttgaacctgtactttttgtagcatgtaaaccttaagctgcttaactattccttgaagcatttacaccagcggttcccaacctttttgctacctgagaccagttttcttgaagacaattcttccacggacccgggagaaggggaagggatgatgtggagatgattcaagcccattacatttattgtgtgcttcatttctattatttcactgtaatatataatgaaataattacacaactc

SEQ ID NO: 12504 - DNA, 393 bp, Homo Sapiens
ggcaggttgtactgggagaatacattggtacagccactttgaggaggaaagtggcctatctggtgaaactaaagatctgtgtacttcctggcacagcacttctaagcctgggcataacccccaaagctgaaatcagtaaactatagcccacagcctggaccttgtttttgtaaagtacgttttattgaatacagccacacatgctcatttacatggtctaatgctgcggctgcattcatgccacatcggcagaattcaatagttgcaagagaccatctggctcaaaaagcctgaagtatttttatctggccctttacagaaagtggcctgattcttgctggaagagacactggctcttaaatttagaggaccatgagtacaacctgccggtgg

SEQ ID NO: 12505 - DNA, 922 bp, Homo Sapiens
  misc_feature (42)..(78): n is a, c, g, or t
  misc_feature (183)..(333): n is a, c, g, or t
tgttacggacaaggatgttaccgacaaggatgttacaaattnnnnnnnnnnnnnnnnnnnnnnnnnnnnnnnnnnnnnatcaaatcaggcacagcctgttgcacaaactcgaaggccttatgacacaatggatgcaggacacatgcccgtgtacacacagtcacagatcctccatctcacacnnnnnnnnnnnnnnnnnnnnnnnnnnnnnnnnnnnnnnnnnnnnnnnnnnnnnnnnnnnnnnnnnnnnnnnnnnnnnnnnnnnnnnnnnnnnnnnnnnnnnnnnnnnnnnnnnnnnnnnnnnnnnnnnnnnnnnnnnnnnnnnnnnnnnnnaacctagcacatttcacatggactcagacacacacagacacagggaggggggactggctaggagttcctggcaggatgtcaatatctgggctgtagggggcctgccagagtcctccatggtgatgatgcatggagtccacccagtggctgtggtcagccaggggagtggcagaggggcactgttctccagttgtgggactgagggtccccttctcagccctgatgaagactggatccctgcccagatgtgaacgctggagggggcaggccggggtccagctgtggccacagggaggggttgagtcagccgcttcccagcagtacaacctaggctgggcccagctgttcctggaaaccagtagagggggtgggctccccaatccagctgggggctgctggcccagacctgcacaccagggctctgtgtccctacaaatggcggccttcagaccatcccccaaaacgttgggggctctctttacctaaaacaggggtttggatccttcttccaaaatgtggagggtttttcagcccctcttgctgaattaaaggtgcctggatacacgcacagcggggctccctgtgtttc

SEQ ID NO: 12506 - DNA, 567 bp, Homo Sapiens
agcatcccttgcatatacaggaatgcatgagatttcaagagagcctacagtatgaaatcattttcacaaaataagcagcttgcttctgaaatgctgtctttcccagtagctactaacctgcctctggtggctggaattcagatgccacaaaactgccagtatctatagaccaggtctgtgccacctcctctctcctctgtgctcagtgaggaggcagtaaatgaagttacaggctagcacaatacctaattcatgtttcccagtacacctgtagatattactgtacttttatgttctcaagaaataagttgttgcctattcagtgttacagatttctttgtttctttttaattaaaatacaagaagcagctgaggaaagggagacaaggtattttatttctgactgattttagaaaaaacttgtgtacatgtgtttggaactgttgaaatgccaagttttctgtataagtgtttttgtaattaaactttcagattttctttgttttttaagaagttgatgtgcttgtttgacatttgtctcattaaaacttttatacgttgaaaaaa

SEQ ID NO: 12507 - DNA, 468 bp, Homo Sapiens
gagccccgagccacctagggatcccaaggacccgaccagcaccataccccctccccaacatccgggctgatagggatcaaggaggcctgcctctcccagctgggctggggctcctgtcccccactgtggtgtgcctggggcctggccaggactcccagtgatgccagaagccctggggggaagccctgctaccctggaccttacaccgggtgtgggaatcagcctctgccccgccccctccagccccatctctgtctcaaggagagcagggtaggtgaaagtctagagaaagaggctacctgcccagggtcacagcaaggctgggaccatggcaagcttggaaccaggacttctatctcccaaccccagcagccagaatactgtgccctcttgctttgggggtaactcccgaaaaccctgccttacctctcccttccccctaacattaaactatttggcatgaaaaaa

SEQ ID NO: 12508 - DNA, 413 bp, Homo Sapiens
ccgtcgtaggctgatctgaagaagacacttgaatcatgggtgacgttcaaaattttctgtatgcctggtgtggcaaaaggaagatgaccccatcctatgaaattagagcagtggggaacaaaaacaggcagaaattcatgtgtgaggttcaggtggaaggttataattacactggcatgggaaattccaccaataaaaaagatgcacaaagcaatgctgccagagactttgttaactatttggttcgaataaatgaaataaagagtgaagaagttccagcttttggggtagcatctccgcccccacttactgatactcctgacactacagcaaatgctgaaggagatttaccaacaaccatgggaggacctcttcctccacatctggctctcaaagcagaaaataattctgag

SEQ ID NO: 12509 - DNA, 553 bp, Homo Sapiens
agcaacgtgaactacgaggactacgcgaaggttcgcattgtgtggtccaacacctctgacctgcccgagaatacgaaggcggttgcgcacctcgatgagaacagcaacaccattctcattcagttcggcgccaacgtcaccgacccggtgaaccccggtgccccggctccaacgcctgataagaagccggatggcccggagatcaacgcccccgccacggtggagcccggcaagaccgtgaccttcacgctcggcgactggtacctcaacgacaagaagctggcggctggcgatgtcaaggatatcgtttggatgctggatggcaaggacgtgaccgctcaggtcaagggcaacaagcttgaggtcaacgcccccgcggctgaaggtacgatgacccttgagatcaagggcaagctggcgagcgatcccactaaggagctctcccagaagaagtccgtcacggtcaagaaggccggagcgacgcctgagcctgagaagaagagctccggcggcggctgcgacgcgggcttcagcgctctggcgctggagaaac

SEQ ID NO: 12510 - DNA, 631 bp, Homo Sapiens
  misc_feature (545)..(545): n is a, c, g, or t
aggtttctaccttcctccagggtcagcacctctggagccttcctgggacacggccttggccgtccagcccacccctcggagataaggcccatctctggaagaggtcaaggccctaaagcaacttctggcttcttcttttgagcaatgacagagggagctgtcatcggcaagtcccgattgtttaaaaatccccagtacgaactaacagggcactgctcccagcctcacccgatggctttggcttgggacacatcactagcgaaggggagagggaggctggggaggccctgggagtggtgaccctgcctgcacaggacacaccttaccccagcgatgcttgcccccaagtgagctgccaacagcccatctctgaggcacagctgagagatgtcttgactcctgaattaccaagagtttgtttcacaaacaaaacctgacctcacaggcccagcgggcaggacagtgcctcttccttccaactgggccccgggctcctctgtacacccatttttgtcctgacactggcccagacaggaaggcagatnatgttctgcttaggacacaccccatgatcatttctcagttcaagggttgtggttaagagatcagtattactacagaaagatctggg

SEQ ID NO: 12511 - DNA, 254 bp, Homo Sapiens
cccgacccctgcctccccgaagcctccctggggccccttcaggcctccttactccatcttccagacccctggcgaccaccgcccctctcagtggctccagggcctccctcagaggtccccaaagatggacacacaaccccaggggcagcaggaaaaacatatgggaattttctttctatattttaatctcatccctttaaaatgtctattttttattgtgttttttataatatacataatctattagtatagta

SEQ ID NO: 12512 - DNA, 720 bp, Homo Sapiens
gcgaccgccttggggcactagccatctccaacctgaggcccacagtacgccatccccccacataactcatacggcggggggcaagggggaatccccacacctcagagcctggcccaacccccggcccgattcctggccctccaggagggccttggaagcttagccaggtcagaggatcaacccagcccggctccgcccccatggcccatcacccccaccgcctggagggggcgagaaggcgaaatccgaagccaggtgtcccgccatggggaaggaaggcgccccaagccgggggcctggtgaaatgagcaattatgctacttttcattgaaagctctgtgaccgtatggctgtgtgtgtcatacgctcactagcaatgaacacagtgcctgaagcatcattaaatgttgactgaatgtgttaggaactcttcaaaagtaatctctttaaatcataatcacctgtgaattgacaattattatcttcactttgtggataagaatgccaagatttggaaatgttgaataatgtgtccattttgtcagtggccgatctgaaattccagtgtaggcaccatgattcctgagtccattctgcttctgccataccatgatgctagattcttcatgggagccatctacttgtgttctgtgctatgaaatggtgtgtccttctttctgattcttatttcttggctgttggcaaaggccccggtttctt

SEQ ID NO: 12513 - DNA, 453 bp, Homo Sapiens
  misc_feature (141)..(192): n is a, c, g, or t
  misc_feature (215)..(235): n is a, c, g, or t
atcacctgaggtcaggagtttgagaccagcctgatgaaaccctgtctctactaaaaatacaagaattagccgggcgtggtggcgcatgcctgtagtatcagctactcaagaggctgaggtgagattatcgcttgaacccannnnnnnnnnnnnnnnnnnnnnnnnnnnnnnnnnnnnnnnnnnnnnnnnnnntgacagagtgagaatccatctcnnnnnnnnnnnnnnnnnnnnnttgcttgctaaagaagtggtctcctgaggtcttaagacattcctgacagtgtcttgagtgggtgggagagaggctgctgtcattgcgctgtggaatttcacagatgagaaccacgcctagccaaaatcacttttcctgtttgcctcagtgacacagctgcagggaccctcgtggatgttgtattaaataaatttgacctttactctttgcaaaaaaaa

SEQ ID NO: 12514 - DNA, 629 bp, Homo Sapiens
gcacgaggcaatataacctacccagtgcgtgccgagcaggcttggtggggaagggacttgagctgggcaagtcctggcctggcacccgcagccgtctcccttccgtggcccagggaggtgtttgctgtccgaaggacctgggccggcccatgggagcctggggttctgtccagataggaccagggggtctcactttggccaccagttcttcggccagcacctctgccctccagaacctgcagcctggaggggtgaggggacaaccacccctctttcctccaggttggcaggggaccctcttctcccgtctgccctgcgggttgcccgcctcctccagagacttgcccaagggcccatcaccactggcctctgggcacttgtgctgagactctgggacccaggcagctgccaccttgtcaccatgagagaatttggggagtgcttgcatgctagccagcaggctcctgtctgggtgccacggggccagcattttggagggagcttccttccttccttcctggacaggtcgtcatgatggatgcactgactgaccgtctggggctcaggctggtgtgggatgcagccggccgatgagaaaataaagccatattgaatgatcgccaaaaaaa

SEQ ID NO: 12515 - DNA, 699 bp, Homo Sapiens
aaataatgatcaaggaatttttttattcattaagtttcagtatcattacagaaaatgttatggtacagaattgtttaacattattttgtctttgctcttgatttccacatgaatgctggtaacactaatatctgtacaagatcagtctttgattttatttttttgttctgtacaattttaaatgtattggttaaaaaggctgtcagcacttaaggaagcattttttcttcagtttgtttcttcaaataaaaggtgtccagttactgcccaagagtactgtgccgtgaggctattggggcgagaaacctccctggatgctctgcaggggatggttcttgaggcaaggcagagcctccacccagtcagtcttcttttggcactgtgcacataaacacgagatacatgagaaagaacaagcaaaagctctctgtaaaacagttatgaagcatactaagaagggaaatccaagtgttgcctacgctagtataaataagcagacagccttgatttaagagcataagtagttgtatcttaaagatgagaaaaacacaagttctgcaggcacctaccgctgtctactaaaagctatcgctatcagacctagcattgaacacacaaagcaattagcaagaaaggaaaaatttgccttgatataagcgctgagcattacacctgccatcacgagtcaccattcgagat

SEQ ID NO: 12516 - DNA, 603 bp, Homo Sapiens
cctgttctgaaatgttgtattccattggacagggctgctatttttagtcagccatgcatttggattttacacttaatctagtaggtaaaaatgagaagaaaatttggcatttaaaaattgattttaagggttggcaaaagtattttttccagtaagcctttcactggatatctgtgaccaatgtttacctacgcaatgtttttgtatctgaattgcttatgtacgttttttattatattgacctaacaagaaagatcaaacttatgctggtatggtgatggttttgctatggcaaaatcaaagggctgatcatacatggtgccctttgggaagggggatggtgtggggctgagcacctctgggttgaatgggaatgggtcagattgggaagcctaggaagagagttctactgtagatttcctaggcactgctctgttgaaataggaacataagtctttagcaacattctgatttaatcgggtgacactgataacaaagtatgccactcagatccatttaaagtgtgcataactgtatttgaaatgtgtttttgtgtgcgtgtgtgtagaatgggtaaataaaattgttgagtaacttgaccct

SEQ ID NO: 12517 - DNA, 462 bp, Homo Sapiens
gctgctgttcatggtgcccagccgacggcggcggctactcaccgggcactggcggccgggtccccggaacccggtgtaggctgggaccactgcggcggccggcgccgggttccgcgaagccgcgcccgctccacctgcgtcatctcgggacagtggcgtgggcgccgcgcctcaacgcctcggcgtcacgcaggcttccgcagcccgcgccagtacagtgttgtgaaccacttgtcatgggataaccaaaattaaacctggaatcgcagaagaaacaaattttttgaagaaattggatgtacttttttaaaatttttcattcaactaaaactttgttaactgtttcttggttgtggtcttctctaaattgtaatctttggcattcacttccaaagtatccaccactaaacttcataacatttattgtgtctcttcatcattaaactttgatgaatttacaaa

SEQ ID NO: 12518 - DNA, 371 bp, Homo Sapiens
aggatacagagagttactgtacctattatttgtttcttcagacaagcaaatcatttggtcagagttcatataatctgtctgttccctggagatgggaatagaggatgatgacagtttattttctacacttcccctccttccacatttgtatcacctttgctatcttggggaaagtgcaaaggacaaacatctcaattgtatgaagggagaaaggagaattgaaagaagaactggggttgttagagctgagatgactgtacacatacccctgcccaatttatatagctctttgtggagataattaggggtgggagcagtttgaaggagtaagcctggttttatacttttaaataaagtgttttaaactatcc

SEQ ID NO: 12519 - DNA, 601 bp, Homo Sapiens
gccaaagatacttttttccagagacagaggccaggaggcagtgaggggagccccgcggggaggcggcggcgactgccacagcccttccagcctgtcttgctggccgccatggttcatatttgagtttaattgtactgaccctggacccagataagcagcaactttgtgtctttgggggtcaccagaaccattttgggccagtttaatgtggtaccaaactgaaaataggagctatttatagatggagccagcacttagtgcttcatagaaagcaatgcctatttttaaagttacaaacgcagatatctacatagatatgctttgctgagaagttaggtctgtggtagaccagaaaccacaaattgactttttttcttagaaaatatttctatttgcggtaaatatagtaatatgtaaataatgtacatctgttgatttctggagtgtctgttattcaatgatgtatatactcccacagctcgcatgaaggaacagcctctattgatacttggttgtaaagtgaagtaagattggagggtggatggctgtcagagctcttgcagatactgtgttcactaaataaaaatcacatgctgttgtt

SEQ ID NO: 12520 - DNA, 893 bp, Homo Sapiens
taatatatatctgctgtccagacagcctgtatcttgggggacagggctggcccagccctgctggccgcctcaccccctcgggtctcctcactcccttctacctgccactcacacagccaggtgccttggagggtcccaagctgggccccagcccaccctcctgtcttcccagggtagcccgcctgccagtcctagctgcacagggcagctgggcccaaccctgtctgtagagggccctggtgtttctagcactggcctgcacggtgggccttgctggggacggggggccccagtcagcctctctcccagtctacccagagaagccccttccccatgggaagacgaggccctcgggcccagcccccacagtgctgtctgatctgtgctttccagctcaccccccacactcactcctgagacccctggcctccggcgtcagcctccagcctctgttcccctagtaagtgccttccatgtcggcctctaaccccaggccccgaggacccagacccagtggggaggcggacgttccagccggcatggctgggaactgcagacctgtcctcctggtgggtccaggggcccctccagcttgtggagccccacactggggtgccgcctgcccgtctctctcccatggagccccagccccctttgggcccagggacaccagccaggctctgtgctgaccctcctgttgcacccagccctggtctcagcagcgaccacccctgcctccaccctctgagctttgcatgttccactaaccccgggcgggtggcaggtggaggtgtcaggctgctggcgcctctgcaagggcagaacactaacctgaccgtgggcggggccttgcggtatccgcccccaataaaagcaattccaaccttaaaaaa

SEQ ID NO: 12521 - DNA, 645 bp, Homo Sapiens
  misc_feature (182)..(182): n is a, c, g, or t
gagcgcaggctgctctattacaagaacccactggatgccttcgagcagggccaggtttttcttgggaacaaggagcagggatatgaagcctacgaagacctgcccaagggcatccgaggaaatcgctggagagccggactcaccattgtcaccccagagcggagatttgtcctcacttgccncagtgagaaggaacagcaggaatggctggaaagtttgcggggtgtcctgtccagccccttgacgcccctcaaccggcttactgcatcaacagagagtggccgcagcagcaggtgacccattaactgaggaactggctgccactgaacacctggaactccttgtgggaagaagtttgcacctcggcccgggcttgcccaccatcagtgccccgcagtcagcagccattcctggcagtgaactctgccaggactgaagctgtggctttatccatcagctccctgggccttccccgcaacccacctcggggatctgaggatctggtgcatagatgaacatctatctccctcctcccccatacacacctaggcttgaaatgccctacaggcccagaactttctcacatctgaaatggaggcattgcaatgaaaaggcacccacagcatcatgcaagtggcatcttgt

SEQ ID NO: 12522 - DNA, 923 bp, Homo Sapiens
  misc_feature (722)..(722): n is a, c, g, or t
  misc_feature (880)..(880): n is a, c, g, or t
tccggaattttcgggattgacaggttgccagtgcttcctcccatctctctgaccagtcctcttccagctcccatgatgatgtggggtttgtgacggcagatgctggtacttgggccaaggctgcaatcagtgattcagccgactgctctttgagtccagatgttgatccagttcttgcttttcaacgagaaggatttggacgtcagagtatgtcagaaaaacgcacaaagcaattttcagatgccagtcaattggatttcgttaaaacacgaaaatcaaaaagcatggatttaggtatagctgacgagactaaactcaatacagtggatgaccagaaagcaggttctcccagcagagatgtgggtccttccctgggtctgaagaagtcaagctcattggagagtctgcagaccgcagttgccgaggtgactttgaatggggatattcctttccatcgtccacggccgcggataatcagaggcaggggatgcaatgagagcttcagagctgccatcgacaaatcttatgataaacccgcggtagatgatgatgatgaaggcatggagaccttggaagaagacacagaagaaagttcaagatcagggagagagtctgtatccacagccagtgatcagccttcccactctctggagagacaaatgaatggaaaccaagagaaaggtgataagactgatagaaaaaaggataaaactggaaaaganaagaagaaagatagagataacgagaacgataaaatgaaagccaagaagggaatgctgaacggcttgggagacatgttcagccttgccaaactgaagcccgagaagagatgaaccacaaagcgattcaaacatgtcttgaacagcaccatatgcacagnttgttgttttttttaaaccaacaattaattttactttttatgg

SEQ ID NO: 12523 - DNA, 758 bp, Homo Sapiens
  misc_feature (72)..(112): n is a, c, g, or t
gcggccgcggcctgcaacgtcatcgtgaacggcacgcgcggcgtccttcgccgagggcgctaagagcgcggnnnnnnnnnnnnnnnnnnnnnnnnnnnnnnnnnnnnnnnnnaagaagctgctgtcgcctgaggaaccggcggtgagcgagctagagtcggtcaaggagaataactgtgcttccaactgccacctggacggggaggcggccaaaaagctgatgggcgaggaggccctggcggggggcgacaagtcagacccgaaccttaataaccccgcggacgaggaccatgcctatgctctgcggatgctgcccaagaccggctgcgtgatccagcctgtgccaaaacccgcggagaaggctgccatggcaccgtgcatcatctcctcgcccatgctcagcgccgggcctgaggacctggagccgccgctcaaaaggaggtgcctccgaattagaaatcagaataagtaaaaggaacgttcactcacagggtacgctcatggagagagggcgcagagcaaaccatgtcacgccatccaatgacaccagctggtcagctcaccaccccctctggctaaaactcaagcaaataaagccgcttcctgtcattaagcatctcagaggaagcagccctccctcgatggcctctagcccagagaagcccgcgcatcttggacccaccaagcaggcccagccttcctgctgccaccatctctgcttctccccagaggaacttagagattaaacccctggcttt

SEQ ID NO: 12524 - DNA, 749 bp, Homo Sapiens
tgctgtatctctgctttcaactgaagttaaagaattctagatagtttaaaatgtgttagggataagcacacttcaaaagatgttttctagccctaaattttatgacattgggtacttaaatttggagtacactagctattgagaacaatattttgggttgaggagagatggttgaggccattatttagtgggagcattggcattttgaacactgtaaacaaaagaacacttccgcctgctgtttgtaaaagctctttgggaagatcttttacgaagaccaactttttaaaatgtaaattacctacctaatataagtgtcctaagacatgtatgtaaacttccggaactgttttgtctgtgtatttagaaaatacacaagaatctttattcaaacctaaaaatataaacttgtgagcactaaactgcttctggctttgtgaattttattgactgacatttaattcagatttctttgcaagtgtactaatttagactaattggggtaaggggaacaccttaatgaactttgacttatgtataattcagatatctttgtacttaaggcttacaagtttgaattatggaatactataagggttttttgtttatttgtatgtttttatatgaaagtacataaatgacagactaccttccaagtaatcctgctttaattaatagcagtgatttgtaatcagtgtatcttttaagattctctacaggttttagaaaatatttataacttctcctgt

SEQ ID NO: 12525 - DNA, 251 bp, Homo Sapiens
gcggccgctgccctcgcggctctcgttaaggcattgcagccgctccaggtcgatgcgcaggtacaggccgtaggccaggccgcgctgctcgggcggctcctcccgttcggcggcgcagcggcagccacccccgccgtggctgtgaccgtgcgacatggcaacgccgccacctgcgcgtcctctcggccccaccgccgcgctcgctcggctcggctcgcctcagaccagctcgcggccgttcccctcgtggc

SEQ ID NO: 12526 - DNA, 385 bp, Homo Sapiens
agagaagaagaaaaagaagaatcgacatagtccagaccacccaggtatgggcagctcccaggccagcagcagcagcagcctacgctaataggaccactggactctttgccaggatggcttttcctgctgtactgaacctgctgataaaagctgccttccaggctcttggacactgccttgggagcatcctgcagctgggacagaggccagctcctgttgggctcagttgagactaagtaaattaggagagagagggacatgcttttgtaggctcatcccagttggttttctcatggacatctcttcctctcccaggaagcttacaattttcttctctctcttttgtgcaatttgtctgatttaggacttgttctgtgttttcttt

SEQ ID NO: 12527 - DNA, 709 bp, Homo Sapiens
ttttaaaaaaatacaccgatttattataagggatataaaagacagtgaaaagaatttattgttaaaaactgtcagtgaaacatctgatacacatctggctatgaatggtagattcaaacgtgataaaactgccacttgaaatgcatcacagtaccagcaggcacgtggcaatcttacctccttacttctttgattacaatgatacgatattcactatatccctctgtggttgtccttttgttaaaatttgttctggttttcatagttccttttgtacttcaacaatcacattttggcaacttactctggtaattaaaagtcggattcaaggaaaactatgaactcccacatttgttcattctcctttccatccctgaattcggtcttttgtaatgtagaccttgtgtgacccacacagcaaaattaaaaaatgtacccacttcagatttccccacctatccaacctaatctgatatctcatcctgacagactgcagctgccaagaagaagattcctgtgctgctctcaggaaaatatgtcccacttgttttctaattcaataaagatactggtttaaatgtgaagccacacaagagaaagatgaagccaaagctggtccccctgaggaattgttttgaaataaggcattaggaccctccattcaattcatatttaatagaccaccatctcttctgaccttcaatcagcg

SEQ ID NO: 12528 - DNA, 316 bp, Homo Sapiens
  misc_feature (171)..(171): n is a, c, g, or t
tctccctactgtatcctacaggctgggctgctcatctcccagtgagcttgccttcccagccattcccataagactctctgcacattctacaagtgatgttcagggagcatctgaaagcttacctcacctccaaatctcaccaatcagaggagcctccagcctgccactccnccagtaagatatgaggatagaggttccctgcgcaggtaagctggcaaagaccagacgcttacccagagctgccttggctcctcacagggcaccgtcttcttcaaagttcagtctcttccctaggatacagtagcgagagtggata

SEQ ID NO: 12529 - DNA, 159 bp, Homo Sapiens
tataatgacatggtgaaatggatatgggcgatatgaaccataaatctcataccgacatgaatatgagccagatgcatcatcattcggataagcaacaatcatctatgtccgtaacaaaccaacataaaccacaagctgttcaaggatgggcaaatgcat

SEQ ID NO: 12530 - DNA, 570 bp, Homo Sapiens
  misc_feature (47)..(47): n is a, c, g, or t
aaggtgatggagtgatcggtcttgaaaagtagagggctaagaaaacncaggtgagaggaaacatatccattttggagaaggtggctctttccagagctgggttcgtaggtttcttgtttaaatctttgtgtttttctctcttttattttcctccttacaacgtcttatgcagaggtttctaatggtcagcgtttccctcctgagtcctggtggcttgtcttcacctctattcttgctggaatttccacctcaccaggaggagagtagctcctgaaatcagcaaagaagggaacaagccgggaagagaacacggttttcctcttaaaaacaaaacgcatatatgttctctccagttcctcaaagtgtcatttcctttatcctacaaatatcacgagtatttcccgaaagccaagcgtaacaataatgataataataataattaaaaccaagacttgccttgggcatcacacggcccccaggcagctgtgtgatctcagaggcgtaaactgacacacatcccgcggcacccttgacggacacacgggcggaggcagccgccgccaaacagcc

SEQ ID NO: 12531 - DNA, 369 bp, Homo Sapiens
actctccctactgtatcctacctagaagagttattagaagtgaatccagcaatattctagcagattcaggcagccaagtcaattctgagtttcacttctaaaagaataagttagaaatcccaaactgctgggcttgtcagattcttatacactgcttgtggaaggtctagggtgccctacaatatttgggccgatccacatatctctaacaccattaatatgaatcattggaaatattttacttattaacaaagtctcttgtgttaagctacagataaagcttttgtggtagtgtctgaagtgactagagtttttttcaaatgctagcagccctgaagttgtattcccaattaggatacagtagggaga

SEQ ID NO: 12532 - DNA, 744 bp, Homo Sapiens
tggctaaccggggttaggccttctccatttgaattgtatcaattctttttcagcaacccggacgattcagtggaaaggtacctgaagctgttcactttcctgccccttccagagattgatcatatcatgcagctgcatgtcaaagagccagaaaggcggggtcctcagaaacgactggcagcagaagtaacaaagcttgttcatggacgagaaggattggattctgctaaaaggtgtacacaagccctttatcacagtagcatagatgcactggaggtcatgtctgatcaggagttaaaagagttgtttaaagaagctccattttctgaattttttctcgatcctggaacaagtgtcctagatacttgccgcaaagcaaatgccattccagatggtccccgagggtatcgaatgataacagaaggcggagtcagcataaatcaccaacaagtaacaaatcctgagagtgttttaattgttggacaacatattctcaagaatggactttccttacttaaaataggaaaaagaaatttctacattataaaatggcttcagttgtgatgaaaagtccttctggttgtccaaataaacttacccatcattcattctcaagacctctgaagggttggctccagaacttagacctttgcttatgcaaatcagaaaaacagaatggactaggactcagtgtgagtaacttcattatttttatgggccggttaataaatatttgtttaataa

SEQ ID NO: 12533 - DNA, 298 bp, Homo Sapiens
ccatcaactgttcacgttgctcggtgtcctgggccatcagctccagggcttcttgcagcagcaggcgtgattcgcccagctgctcatgctccagggcacgctgctcttccagctcagccaattcttcctgcaggcgccggcggcgcaattcgacctgctcggcgcgggcacggctggccgacaggctggcattgagttcgccatgcaggcggttttcttcctggctgaggcgcagcagctgttcgccctgctcttccaggcccagctgctgctcgcgcagggtttggggtaccgagct

SEQ ID NO: 12534 - DNA, 544 bp, Homo Sapiens
agggagctggaatgctgtgggagggccctgaccccggggcccatggagctccctaggctcctctggccacatctcactacccaccccctcccctctccagcaggttccagtttgtggaagtcccaggcaatcactgtgtccacatgagcgaaccccagcacgtggccagtatcatcagctccttcttacagtgcacacacacgctcccagcccagctgtagctctgggcctggaactatgaagacctagtgctcccagactcaacactgggactctgagttctctgagccccacaacaaggccagggatggtggggacaggcctcactagtcttggggcccagcctaggatggtagtcaggggaaggagcgagattccaacttcaacatctgtgacctcaagggggagacagagtctgggttccagggctgctgtctcctggctaataatctccagccagctggaggaaggaaagggcggctgggcccacctagcctttccctgctgcccaactggatggaaaataaaaggttcttgtattctc

SEQ ID NO: 12535 - DNA, 514 bp, Homo Sapiens
tgaaagtgcgagagattcctcccggtgaatgaagccagctcaccaccgtcaagggcaagggatcagcgtgtgttcacatggaggcctctcaccgagggaacccaagggggacagcacaggaattgcagagccagcacccatggaatgggcagggatttgggtttcatccaaccagccagttgatcaataatcactgaatgtctgtcacccattgcatcctctcctgagtagtgaggctaggccagtgccagtcacctggaaatccttactgttctgcagttgacattttgagaggcaagtcaaacaatatatataaacaactagaatgtctagtgtgtttcaggaggtaaatgccgtgccgggatgagcagaaggaggatggagccgttgctgggcagatagactgattttagataaagccgtctgggtgcaggaaagaagaccttaaagagggaatgacatttgagcaaagtcttcaacaaactgaacccaggaagaaaacattccgaaagtc

SEQ ID NO: 12536 - DNA, 403 bp, Homo Sapiens
agtgatattatatcaagaaacaacgtattcaagagccatggctgacagtgccagatatacttagggataaacatcaaaatgcaattatagttgctataacgttagatactcggaatcaaaatttatttgcaagctgacttgataaactaaatgaaccaataaaatttgtagaaatgctatcctgaaataattatatacatgaagacaatgttgactaatgaattaagatacattatatactagttaatgctaactagtctcagtacctgtttttagccatctgttactgtccaatagcacctcattcccacattctattttcccccggtattctttagatcctagtatttggaaaacaatcggctaaccttgacatttcatggcggtccgtgtatcctctaga

SEQ ID NO: 12537 - DNA, 301 bp, Homo Sapiens
ttgtgtcctagccacatcagacagctatctaagctctggactacccctttgtgcagctgaatcactgcagggttgaccatgcctggtgccacagccatggtttccatttctagatgaaaggatggcctaggacataggtctcaaagactcttggatcagaatcaggagattagggaaaacaggatggatacctgagcactaacagcagtagacgtagacctctgtcaattaccatctgaggtcttctggattctttgtggggttaattttgatttgatgtcatggggatactctagagcgg

SEQ ID NO: 12538 - DNA, 988 bp, Homo Sapiens
  misc_feature (131)..(340): n is a, c, g, or t
  misc_feature (649)..(704): n is a, c, g, or t
cctgattcttggcaagaaaggcttgtgtgaaatctgttatgtgcaaagggagattatgtgccggccaccatttctggaaatgacatagaatcatggttatgagtaaagcttctggattcaaactgtttgtnnnnnnnnnnnnnnnnnnnnnnnnnnnnnnnnnnnnnnnnnnnnnnnnnnnnnnnnnnnnnnnnnnnnnnnnnnnnnnnnnnnnnnnnnnnnnnnnnnnnnnnnnnnnnnnnnnnnnnnnnnnnnnnnnnnnnnnnnnnnnnnnnnnnnnnnnnnnnnnnnnnnnnnnnnnnnnnnnnnnnnnnnnnnnnnnnnnnnnnnnnnnnnnnnntcttaaccaatttaattaggagctaatggctggcagttcatagcttttttgaataataggcttctcttgataattgaatggatgctgtgaaccctctcccttcatatatggtttcagtcagtccaggggcccttgaaggccacactgggtcagtggaccctgagtttaggaagggcacatgaaagagatcagttttactggcccaatttcttaaaatacttggcttgtatttagggactactttgtattaaaattggctgatttttgagtgtgagagtctttgtaagatctactttggtcctcccaatnnnnnnnnnnnnnnnnnnnnnnnnnnnnnnnnnnnnnnnnnnnnnnnnnnnnnnnnggctagatcatttagttttctttctgagaagaatttttatttcccaggtccgcctccatcatctcctctttggtaatagtcgcagaggttgccataatgagtcatttgttaaactaatctgtgtttccatagtccactgtggccctctgtattgagcttgggccactcaatggcgcctttgtcaggctgattaaaatgtaactttgcatgccaaaaaagggcactcctctggcttaaaagtcatcttcctttgttataaatgtttacatttgtctattatgcta

SEQ ID NO: 12539 - DNA, 209 bp, Homo Sapiens
gaaaggcagtttgggaatgttctccctccttttcttctctattcacacaccaaatactattttctccaaaccctcaaatgtccagtcatgctatcccaaactctccaatggcaccatccccaagcttgctgttccacgacacattgctctggacttagtaattacccacccttcttttcctttcaataaaatgtccatttccttgatac

SEQ ID NO: 12540 - DNA, 324 bp, Homo Sapiens
atgagccactgcgcctggccagaaaacagaatcttaatacatagatagtgccacctggactctggactcccctcaacccatccaactctacactgcctctcatgggcacacattttgcctgctacaatgttcttcctaaaataagatgtgccttcagtcattcttgatttctctcaataaccttatttcagatctgtccacgaattgattgaaaatgcaactctctctatggatgctacctttggaaaataataaggggagtacttttattacctactatctaaaccttttatattaaatttatctttcagccaccgtgaaaaa

SEQ ID NO: 12541 - DNA, 420 bp, Homo Sapiens
aaaatctttaaatgtacctgtgtagttttatgaggtacttctaaacaatgtaatgttaatacatattcttttatttgcttcaaactaggatgaaatacagggagaacatggttccttttaggattctgataattagggttttattttctaaactagagtttctagctggagtggaagtcctgagttccctttgcctctctgtggccttgccgttttgccgaaaacatcccatctccatagtcacccttggtctctaaaagggctcttttgaggagaactcttattctctagtcagcgggtctagcttatcctttgtactcgaaggacttcgcttatttttcctctggttgacttcatgtgttgaaaattttggcctatcaaactacgtgtattaaacaatagtttttcccattaaaaaaa

SEQ ID NO: 12542 - DNA, 518 bp, Homo Sapiens
  misc_feature (127)..(148): n is a, c, g, or t
gatgataaatgtagtttctaaatatcatattattataagaatatcatgtttgttgattgctaacaactggttttgtactgaaactttattaactatcatggtgaaaatttactctgtcatctgctannnnnnnnnnnnnnnnnnnnnnaaaacacccaaaaggcactataaccctctgttatttattaacgcacatatgttgaggtgaggacatttctaagcccctcaaattgctgactttgcaatgttttagtgtctgtttgttttctcttttatgttgcagtggtgcgaataaagagccgaataacttatgtactactctacatgtgataggacaaaactaagaaaattttaataggctggaaaaggtttgtcaaaacaatctctttggtttaattctttaaactctttttagctagtcatttgatgtgagccattgcaaataaaatgacttaatcctggaaatgcaaataattcatcttcaaatcaattgctagacaataaaatgatattaaatg

SEQ ID NO: 12543 - DNA, 668 bp, Homo Sapiens
tatgcttgatgcactactacctttctaacctcacaccctcacctgtttacccccacgtcctcacggcctgcttctttgtttgatcaccaataaataatgtgggctcccagagctcagggccttcgcagcatccataccagcgttggccccctggacccaccttatgcatatgcactcttaacttgtcttttctcattcctttgactacgctggagtttgtagcccccacggcctggtgttgggtctgatcaccccaacatttctggcacccaacatggggctacgaacactccggtgaaggaacactagagtgtgcggaagcggaggacacattgtcagaggacacccaaggacgactgaaagaagcttggtggaattcatataaagttgcgagtttcaggttggttggctctgactgatcacctgtattatggaccatctgtgtgattatggagaaaagttcaggacaccagcaacctacattggataggaccacctctgactccagggattgccactcaatctttctgagattagcacccacatccaacaaggtgtgatcctggtgatctttgaaaaaaaggcactgaaacaaccatgatttaagtttttggtattatgaatgcatgagaaattttctgggaaaaaatcataactatattaagaat

SEQ ID NO: 12544 - DNA, 718 bp, Homo Sapiens
tctaaaaatactaagatctgaatgtcgaaaaaatttgtaattgttctaataaccatagataacaacagcacatagaccacattacaatcggcggttttcccgcatgcagctcgtcccattcgtagtgtgaaagtctcattagcttcgattttaagcagtgcgttttttttaatcttcccctacgttctggttcccatcttatttttgaggcccatagctgtctaagtcatggtatgtgcagagagagattttttcctgctgattgtatgaaaaattgtgcaaaaggggttgtcatctaaaaaagcgtgtgacactgggagagaccttgtatagtgagcagggcttcccatgagttcatcctggatctttcactgagaacaggatgttttgtcaaggatgggcaaagaggggcacagcagaaagacaaaaggatgtgccagctacaaaaaccacgtgggccaaggacagggggctgcaatgcaaagactggaacttgcagcacggcaaactagagcgtggcaagattagcgtttcagactccagacaaggccacttccctctccaggaaagacgatctcctcaccaacacaagcgcttggcgcttcccttttccgtccaggcgtcctggctggaacgaggaaactcaaaagtgctacgaaagaacaaaagtggcccaaattctgaaaattcttaaaattaaaagattgtaactcaaagg

SEQ ID NO: 12545 - DNA, 575 bp, Homo Sapiens
tttgtcttttaatgttaacattttatttaaaccagtacaagcaccatgcttaacaaaagactgtccaaaataaacatgcaatatgaactagcagagactgaaaccacagcttaaggagttgtgtcagttgttggttttgttaaacgatgacagagaactgttaaaattcacaagactaaaccattaatgtttcaagcctcctgaatgagattatcttggaccatctaaatcagtgggaactgccctggcatgttaatgatctcaaacaatattcaagtaattatatttatatgaattataatccaaaaagcaataaaatacaatttctatcacaagtttactgtatatgagcactgatttgaaatgtcaaatggcataataaaaacaaatttctcaagaatattcagcttgggagcattggttttaagcggtctagaagattactacattcttccagaaatacaaaataagatttgtccagaaatgtttgaaacacatcctcacaaaagttgtaatggctcaaactctataaattccagtgttatcagtctattgaacaaatagggaaagcaacc

SEQ ID NO: 12546 - DNA, 588 bp, Homo Sapiens
tagcaggctggtacaggtccagaagtgtatgatccaccttgtggatcccaaggacatggagccacgggctgccaactgcactcgggtactggtgtggcatactcggacagaaaagcccaagatgaagcaggaggagcagctgcagcggcagggccggggctcagacccagcaatcgaggtgtgatggcggccccaccccaactaccacctcttttcaggcacagaccgtgtgggactgggccccaggcctgcccaggatgtggttttccaagtcctgacccttggagccagaagtggcccctctgcccctccaggcccagggcatggtcctgctgcttcacccctcccctagcctgccgtgtggcactgcccacaggctggggacaagcagcccttgtgttgagtcaggttggccctgtctagggtggaacagaaggacagatggacccaggagggagggcagctgagtaactgggtaacttattggggctgggcatgcactggggggctggaggagctgggctggacccttcccacctgagcatgctgacccccttcctacctccagaataaagaatctcaacctgg

SEQ ID NO: 12547 - DNA, 324 bp, Homo Sapiens
ttaacccctctttagattggaaaaaataattacaactttaaaaatagcttagtgttgaaccctttggtaaactaaagacccttttataatgcacatattcccaacaaaattaatatattttgtgagattaaacaatgcttgtatatgcttgaactttcttaaaatatgtccatgtcatactattatgaatgtacatttttatgagtcataaatattattttcaaaagcactacaggcccatgaattacttcctcacttttgcagttgattactgaaatgtaaatcacaagaatttgtcaattaaatcattttaaactgcatgtt

SEQ ID NO: 12548 - DNA, 154 bp, Homo Sapiens
ctctttcactcagccaaatgtgaaagttgtgaatttaggaaaatcaccttgtaatgaagtgtgaatcttgttatcaaatttatttctctgatgtttccttccttatccttgtagccaataaaacattgacattctcacgttttatagatgaggt

SEQ ID NO: 12549 - DNA, 196 bp, Homo Sapiens
ggccagaataggttttttctttcaacttgatcagtagaaaatggacatcaagtttgaacagataaatcatggacagccttattgtgattgaaatgcttgtaggttctgtgccaattttccaccactgtgtactttgttgctatttaaaactgtatcaactctaacggaagaataaattatttgtgattttaaaaaa

SEQ ID NO: 12550 - DNA, 516 bp, Homo Sapiens
ggcaaggctgtcaggtatgttccctcccgtggcgaagccggggctgggcctccaacagacccacccggactcgcgtccctgggcagaaccacacagcctgctcgacccccgggtgaggacttccacttggggggtcccaagatgcgacgtcacacaccgagggacacgaggcgggtggggaatagccacaagcccctccatcctgcgttcaccccacactacgttctgctccgggccggccggggaccctgcccctccgggtctctggtctcctccgaagcttctttgtctaggaagtgcggggaggtgccggccccgggcgcgcgtccccgtcccccacctttcttccccacgttgcggacccgaggccgccagggtcgtgggggcgggggcgaggctggcgcctcgagacccccgggttccccgccacccgcagggcctgagccgcggggaggggcggggaggggacgccgccgcgggccgggggtggagagcgacttcctcctccgcggccgc

SEQ ID NO: 12551 - DNA, 632 bp, Homo Sapiens
tgaattcatccatttattcaactttccggtatgcaagaacttcttttcatggagtgtcacggaggccctgagggaggaacggtaaactggggcaggggtgtgcatagctctaggaacaggtttaaggtctaggctttagagttggggaaaggggagctattacagatttcaaaaaggccataactggccttaacctgtgcaaaatcttgggggtgaaagggcagacagggagtcaggctggaggtgatggagaagtgaggaatatggggaggtcgtggtagtagagttcacattgagtggatgtgggttctgagtcagggaaggtggtggcactttgtgtgttgagactgggttggtagaagaacagagctcaccacatctctggtgtggagggagaggggaaaagagcagtatgtgagggcaggtgctcagctactgcttccttcttggagcaggtgaccaaggagtttggctatcactccctgcccatcccaggctccctgcttggggaggggcctccactaacctccagtgttttatgttaagagttgtgagtcatggctgaagaaagccagagagaaaataggagaaaaaaggcggagctgaaaatggaggcaaagtccatgggttgg

SEQ ID NO: 12552 - DNA, 327 bp, Homo Sapiens
gacgccttccaggtcaggatgcacatttctggattgtggttccatgcagccttggggcattatgggttcttcccccacttcccctccaagaccctgtgttcatttggtgttcctggaagcaggtgctacaacatgtgaggcattcggggaagctgcacatgtgccacacagtgacttggccccagacgcatagactgaggtataaagacaagtatgaatattactctcaaaatctttgtataaataaatatttttggggcatcctggatgatttcatcttctccaacattgtttctagaacagtaaaagcattaaactaaggtgtaa

SEQ ID NO: 12553 - DNA, 568 bp, Homo Sapiens
agcggccgctcgcgatctgaactagaaaccccacatagttccactgatctaaatcactgggggcgagaggcaaggatagacaatctatgacacaacaccaggtgattcataagtttggtaaccactgacatttgattatgcagtagccatattccttagtaagaacctggtcacaattttcactccactaccccaggcaattccccctccccacaccccccttttttctgagaatttcagtgagatatacaaaagtttcatttaatcctttattaattccagactttatatatttttattaggatttaaaatacatttcaaaaagatcaagtgagaacagaagaaaaaagtaccaagataaaggcataatacaaacttagaaaatacatgttaagcatactgcggcgtcctggtagccccttgcttttgttcacttttttctcttatgtacctacataaaatcccaaatagtatcttccaggatgacacacttgctgtctgccccacccaattaaaaacagattttttagttattaggtattgtgctgaatctaccttattttattgc

SEQ ID NO: 12554 - DNA, 460 bp, Homo Sapiens
gctgaaagtgaggtggccctagagacactagagtcaccagccaccatcctcagagctttgaactccccattccaaaggggcacccacatttttttgaaagactggactggaatcttagcaaacaattgtaagtctcctccttaaaggccccttggaacatgcaggtattttctacgggtgtttgatgttcctgaagtggaagctgtgtgttggcgtgccacggtggggatttcgtgactctataatgattgttactccccctcccttttcaaattccaatgtgaccaattccggatcagggtgtgaggaggctggggctaaggggctcccctgaatatcttctctgctcacttccaccatctaagaggaaaaggtgagttgctcatgctgattaggattgaaatgatttgtttctcttcctaggatgaaaactaaatcaattaattattcaattaaaaaa

SEQ ID NO: 12555 - DNA, 533 bp, Homo Sapiens
  misc_feature (317)..(317): n is a, c, g, or t
  misc_feature (355)..(355): n is a, c, g, or t
aggggtgttggtgccctgacagggactgggcagggtgtccaaacttggggcttcccaggcacctgcagtgtgaacactgcttggctggctcaagattagggccgcggagggggctgtgcacataccagttacttaagcagccacgagtgtcccccatgccttggtgcgggtcctggaggcctcttgggggtgggacctttgggcagggtttgcccactgacgcgcccgccatggggcactggctgcatggggctccttggaccctgtagacccagcagaccccgcctgtgtcaggccagctgcccgaaggcacttgngctgtggtcccaggggacggcttcagctggcacacttncaggagcctggccgcggggactgcaagggagggtgcctggacccgtggggttgcttcattgagataaagcacacttatcacatagcacaaaggacgtgccatggtgctttccccaaaagttgtgttgcttttatcagttttctaacttaataaaaagagttgagaaaattcaaaaaaa

SEQ ID NO: 12556 - DNA, 346 bp, Homo Sapiens
ggctccgtttcaaaaaaattaaaagatacctgagagctccctttaatatcaaggtatttgcatccattcccacccctgttagctcttaagggaggagggaaatcaattccaaccatactttcctgtgatggaagatgtttcctcttgaaaaaatgccaatacagatttttaaaacctattgttttccaaatgcactttgtaagtttttgcttttaaaatagcttcttggaaccaattttattgtatttgtacttaatttttgttctcatctaaatgtgcattttctgactgtatagaagaagctttggtatgtaatttaataataaattagaaatctaaatgaaat

SEQ ID NO: 12557 - DNA, 279 bp, Homo Sapiens
ccacgcgtccgtcaggtttggagttatttcaggaagacagatattgaccttttaattgataaatattcttattatcctggaatgccagaaaagaactatgtcctgcttgtctagtttgtattcgctgactttctatgtgatatagatgcatttgtaatactctttttcaagtgctaaaggatttctaaaatttcaaactgattaatatgtttctgctgttctggattttgatgacatttacaataaaacaacctacatttgactttggtttaaaaaaaa

SEQ ID NO: 12558 - DNA, 757 bp, Homo Sapiens
  misc_feature (372)..(644): n is a, c, g, or t
gtaaccggagatagtttttacaagtgaaataacatttcagctaaataaaacatcgctaaataattgatatttgatgaaaatctgctttgtataatttctgtaaattatccttgttctgaaaaaggtgtaatgccctaatatttttaaatccttatcctttgattttttaaaaactgacctattgataaaactataaattttcattttccagtgcagttagttacctttttaaacataaatgcacaacaagcaaatgaatttaagagaactaaactggaataagtgttcataaatgaaacccttggactatttaataaagttgaaatgtgaattaaggaaaacttttgttaataaaaactttcttttacaaannnnnnnnnnnnnnnnnnnnnnnnnnnnnnnnnnnnnnnnnnnnnnnnnnnnnnnnnnnnnnnnnnnnnnnnnnnnnnnnnnnnnnnnnnnnnnnnnnnnnnnnnnnnnnnnnnnnnnnnnnnnnnnnnnnnnnnnnnnnnnnnnnnnnnnnnnnnnnnnnnnnnnnnnnnnnnnnnnnnnnnnnnnnnnnnnnnnnnnnnnnnnnnnnnnnnnnnnnnnnnnnnnnnnnnnnnnnnnnnnnnnnnnnnnnnnnnnnnnnnnnnnnnnnnnnngactccgccaaaaccatgacagagtaaacacaccaacgccaccacctgcgctgcacgaaaaacaacaacaaacaacaacacacgaccaacccacgcgcgcaaccaaccgacga

SEQ ID NO: 12559 - DNA, 781 bp, Homo Sapiens
aggcattgaacattaacagtggttcaaaaagcaaggctggtacaggtcccggaatcccgggatatcgtcgacccacgcgtccggaaaaagcatttgattatttcatttctggaggatgagcttgagggaagctttttaatattagtttcaagctttccttaccctacaactttaaacaaaagctttaatttgttgcactcctatttgagcttgtaactggaaaagcatgtcttgcactgttcaacctcctgagtggtcgctttaacaacctccaaattgtgtacagtggttattttccccagttgtatagttttgagacattcaattatcactgtcttagttgtattttaatttactaaattatgtagctatttgactgttaagttcttttaaacaactgtttccttgggcttcagttatttaaagtaaatttaggtgtaatatagaaaactgtccctttccaggtgggagcttaacacctgtataaaacctaaggttttagtaagtaccttagttgaataaaagcacaaggttatcaccttttttatccgtccaccgtgacatggttatgcatcctttagattaacctcaccaaatgaagctttttctatccatttttaatattgtccttacataatattgtccttagattttgatcaattctatgtctgactttgaaattccatttacaatgtagtatgttcttcaatgaaaaaccataaagtaacatccaagtgtttcatggtttgttgggaaggtaattttaaaataaaacaatttc

SEQ ID NO: 12560 - DNA, 376 bp, Homo Sapiens
ccggaatgaaatgtctgtaatcaattgaaggtaatttttaatatagtatgtgttaggagtccagcttcattgttttgcatgtatctatgcaattgacccaaagtgatttgttgaaaaatattattttctgatggtatggtcctgacacccttgtagaaattcaattgaagatatatgtatgagtttacttctgcagtctcaattctattctattggtctaaatgtttatctttatgccagtaccagcctgttttggttattttagttttgtaataaaatagacaaacatttggccgattaatcaagacaaaaagaaaagtatatagaaataatattatgaaagaaaagggggagcatattgaaaaacaccataaag

SEQ ID NO: 12561 - DNA, 590 bp, Homo Sapiens
acgagagcaagcgtggcccctgatcagtaccaacaccagtttgccactcaatcctacattgggtcttgcgaaggctcaacaatttacactggatacccgctgagtcctaccaagatcagccagtattcatacttatagttggtgagcatgagggaggaggaatcatggctaccttctcctggccctgcgttcttaatattgggctatggagagatcctcctttaccctcttgaaatttcttagccagcaacttgttctgcaggggcccactgaagcagaaggtttttctctgggggaacctgtctcagtgttgactgcattgttgtagtcttcccaaagtttgccctatttttaaattcattatttttgtgacagtaattttggtacttggaagagttcagatgcccatcttctgcagttaccaaggaagagagattgttctgaagttaccctctgaaaaatattttgtctctctgacttgatttctataaatgcttttaaaaacaagtgaagcccctctttatttcattttgtgttattgtgactgctggtcaggaaaaatgctgatagaaggagttgaaatctgatga

SEQ ID NO: 12562 - DNA, 523 bp, Homo Sapiens
cttgtaacatttataagtgctgcttacatcactgaacaacaacaaaaaaataataatggagtagctgttgcccttctccggttgtgtgtacagtatgtgtggaataaaaaagggaaactgttttcacaagctgttctttgtttcataattggattcatcaatcccgtagctacccatattgcactgagcttgccagtggtgactgccaggaacgtcctatgatccactttgttggttgttggtgcagaagactgaactgttttggaatatttaacaattacagaaacagtcaagtgttttccaatgtggttgtccggtttctatggccttgctgtgtactttccctctttttgacagtaaacttctacctatggcttacagtttgacatttaatttactagctgctgctctgcaacccctcccttgggagggagacttcatgtggtttattgcgagttttttgtttacttttcaggtttgtactacaaggtttaataataaaaacaaagttttttggcaaaac

SEQ ID NO: 12563 - DNA, 454 bp, Homo Sapiens
gtcatagctgtctctagagggtaaacctaggtccaaagcgacgttgaagttgcacagggggctgacctcaaagaaggtcatgcagttcttctctgcgtacgcgcgggcctgctccgtcgggacctgccgcttgaaggccaggtgcagccggtttccaaccaagatccgggggactccgggtgcatgctcatcgatctccttgatccagcggtcgatgccgtcaaaggaccagcggttggtgatgtcatacaccaagaggatcccctgagcgcccctggagtaggacctgaagatggtgcagaaccggccctggcccgacgtgtcccagagctccagcttcacgcgccggccgtacagcaggatggtggtggtcttgtagtcgatcccgttactgtaggcgtacggggactctgccgcgccgtcctgcaggctctccaggatctcgcccttgccc

SEQ ID NO: 12564 - DNA, 625 bp, Homo Sapiens
  misc_feature (376)..(412): n is a, c, g, or t
ttcatctggactacacctaaaaccaaaaccactgagtaagattttttcattttgtgaaagttctgccaattttgcttaagtagctgtgtgattttaaaggttgccacagatggtgggctttttttaatcttcgttaatctcaaatgagttaactgttgatccttatcattcatggattctgtatttgtaatttacctacttgctaaactttatttgtaaccccaaaatcaatagtcacagggcttttgcagacatgagctgggaagtgaaaagtttgagcctcccaacacacatgttcccaactgaggtggaacaaagggatgctcatctttcatactgtgaataagtgtccttttcttgggtctttttagtgccnnnnnnnnnnnnnnnnnnnnnnnnnnnnnnnnnnnnngttgttggtgatttcactattaaaagcccctaagtgtagtgatgaagtgctgactagtgttcctaagtgaaagaaggctgtgttgtgccatatgtagaaaatatgtatattgggatgtttcttttaggtctgggttacagtgctgtttgccatgagtacaatgttaatgaatcagtatatattaaataaagtgtcttaaacatgcgttaacat

SEQ ID NO: 12565 - DNA, 408 bp, Homo Sapiens
cccgactgtaagcaatctacgaagaccgaggaaaagctgcggcctaccaggacatcctcggaaagtatttattctaggccaggctccagtattcctggctcaccaggtcatactatctatgcaaaagtagacaatgagatcctggattacaaggatttagcagccattccgaaggtcaaggcaatttatgacattgaacgtccagatcttattacctatgagcctttctacacttcgggctatgatgacaaacaggagagacagagccttggagagtctccgaggactttgtctcctactccatcagcagaagggtaccaggatgttcgggatcggatgatccatcggtccacgagccagggctccatcaactcccctgtgtacagccgccacagctacactccaacc

SEQ ID NO: 12566 - DNA, 595 bp, Homo Sapiens
  misc_feature (417)..(417): n is a, c, g, or t
  misc_feature (458)..(458): n is a, c, g, or t
  misc_feature (508)..(516): n is a, c, g, or t
tcgaaaggccaaagaatttcgggccacgaggagagcacataaaaaagcatatcgagcgttgtgttgggtagggccttcccgttgttctaatgagataaaagcaaggaattgggaaattatttcccacatttttaagaagcaatctaaaagcccaccttgggtatgtttaagcaaattggcccccaaaaaggacccaattagggaggaaaacggttacatgtcctttttgcgtatcatctcaagccagtaccccatgatggctgggatcccaagaacccacccttgagaatgctgccgtatttgcgtgtggttgacaaggttgggccagacactcaggaaatagggttgtcgtcctaccctcccccactaacttcctgtaagaacttcagcccctctcaggacctttttctttaccanataaaattcagaaattgggctcaatcagtaattcccaagcntattttccaaagaacatgaattttgtggaacctttaatagatatcatgcnnnnnnnnntgtgggagggattgttccatggtcaaatggtcttggaaataactcgtttaaacaaaaataaaactgtttctttacccac

SEQ ID NO: 12567 - DNA, 420 bp, Homo Sapiens
gagaaggccccaggtgggatgacgtgagtgtgttcatggagtagtgtacaaggccccaggtgggatgaattgagcatgttcagggagcagagagaatgctgctctgtccagtacctgtgagcaggggaggtgggggcgggaggaagtgagaggtaggatctggtaccatctcgagaggctgcagcagggacacttgaagatctagtgacacctaagagctccctgttgctgctgctgggggagcaggaagggggatcaccctgacaagactggtggcagctgggacaagagtcgtggctgaggaggagggaaggaggtcagcttcccgatgtgtctgtgggccggcaggactcaccgccgcaggcagcaggctcaggcacctttggtatctaggcccacaacagatcctgaactccctgt

SEQ ID NO: 12568 - DNA, 492 bp, Homo Sapiens
cacgtgggagggagaggcagagatacaccttagcagacgccaggatgcaagtttaggagttctcagcgtcaggaagacatccagaacgtctctgtcagtatcctcttatgcctacagtatcccaaactcccaattttcctggtagtggggcagactggtcatctggtcacaacacccgttaattacggagtaaagggatgggcaagaggcttctcaccttaagagtcacgcggagagaaatgctcaggcacaagggacttaaaatgagaggtagagggtggatgtaggaggtgtagttcttccccgagagcgaactagcccaaccggagaaaaggttttaggtccctggtaagggaagaggcctcagtccccgacgtctcttaccacctacaccgcctggaggtgcggaggaattccgcgggggtgtcaggtacgcgtcgcgacacgcgccgcccgaggccccgcctctcgtcctgccttatgatccgctag

SEQ ID NO: 12569 - DNA, 693 bp, Homo Sapiens
ccaaacagtagaacacaacttctctttagaggatggtgaattttactacttgaagttatgtagaacgttaggactattccagggctattatttttgaaggccattgagaatctgaattagtattgttatcccattttacagatgaggaaacagcagacagtataacaagttaaccagtgacaagattaaattagacctttaatcctctttcttaactacatgagtctactagtttttctgtcatatacttaaagctgaataacaaatttgagattgtaagttaactctggttccaaaacaggataaatacctgttgaatgaaatcagtgccatgggattgtttgaacgagcttggaccttgatttccaggtctacctgaaatatagtcactcttacaaacacagattcttttccacaaacctctgaggtagggagtaaaatatggaggccaagaacacaagctctggaaccagactgtgtgcgtttgacccaggttccatggcctactgtgtgaacttaatctgttgcgtaactctctctggcttagtttcctcctctgtaacatgaggtcattagtagtacctgtctcataaagttattttatgcattaaaggagttaatatattgtgtaaagcacttagaatagtgcctgtcaaataataagcactcaataaaagttgttgctgctcttat

SEQ ID NO: 12570 - DNA, 339 bp, Homo Sapiens
cgaagaagtcaaatacaggcaaatatctgggaatcagggaccacatagaatcagatcaaactggggactgtgggtagaagacatgtgagcagcgaggactgcagaagctatgaaagaactagagatacaaagttctgaaactatcttcgccttaggaacagactttctcttctagctgtagcaaaagccagtaatggtttcccaggcaacatccagtctggcataacctggaagctcatgtgcttctgcaatgcgggatcatcttttgatgggcaaattttgacataattttccagacttttaaccaatccaggaatggaagcttagaatgttctattg

SEQ ID NO: 12571 - DNA, 809 bp, Homo Sapiens
gtgacatttgagccaagacctgaggagggggagaaagccagtcatccagttatccagaagaaaggaggaacataaaacctccaaagtaagaagatgcttggcatgtcccaggaacagcactttttactgcctggcactgtacgtttgttgatttactgtctctctgctatcacccagaacgttgcttccagaagaagactgtctcattactgttacatctctggccctggagtagcccctggcaaatatgtactcagtacatgtttgcgagacgcatggacttgtagaacagttccacagctgtccatcactaatggcttcggcagtatgatagtctgccttgagggtctccccaatcaccaagaacaggttcttaggtgttgacatcaaccaggactccagtagcacacttcaagagtccccatccatgccaatgttagaagtaatcctaggattgtcagaatgttccagggctggagacaaatccttcgtgtgtgtttttggaaaacatgcagaggtttagttgaatgaagtcaattttactgggacactggaatttttccagaggaagcagggatcttcctggacatttggggcagctactggggaatgatgcttgcaggacagctaagcttatccagagatcaccatgtatttcagtctgacaaaagataaattgtcaccaaattttagttgctatgtgtagctatgttcctccaaattcataagacttgtgatctttgatcataaaaatcgtttatattggttagtttcagtaactcaaaggaaataaacaccttaaatcttga

SEQ ID NO: 12572 - DNA, 605 bp, Homo Sapiens
cccagtgtctacggatatagcatactatagtttacaaaacacttctaacatgcattctgtaattttgtttcatgtctcacaactaccttatgaagtaataaaaggaagagatggggattattattgacttcttacatacaaataaccaaatctcagaaaaagtagggcttttctaaggttatacaactagtaaatgacagagtttggacatgaacccagatcctccaattccaaattcatgcttcactcactgtactacctagtctttttgtgttttggggaactatatgtataccagataactttttaaaaacctaacttctgagccaccacgtctggcctttgatctgctttcaacacttttagctcttctagaatttcagaaaaatggtatcggatgtacagcatggacccttctgtggtgggcttctttactgtaatgcttttgagattcatctgtgctgttgagtgtctctgcagtccattccttctgttgagtgtatcagtagtccattccttttcatggctgagtagtatttcattgtataattataccactatttgttcatttactagataataaacagttggcttgtttaagtatg

SEQ ID NO: 12573 - DNA, 334 bp, Homo Sapiens
tgcacccacatgtatgcgtgtctgtatgcctagcccaggtgtctctattcagaggctgtctgttgggggccttggctgaggcactttcctccactttgactccacgcctttctactcctagccctttcccgtttcccagcctgtgggctataaagaggcaggagcgttttgtgtggggcaggggctcatttttcttgcctgttctgcatgtcatctgatcctcacctagagctgttccagggggataaggggaatgtgggggagctggagccgtcctcttttgcctcttgcccgcactgttgtagaagagaataaagacctgattgttactctc

SEQ ID NO: 12574 - DNA, 294 bp, Homo Sapiens
cagactaggcaggtggtgccccgtgtgaggagcagcgcagtggatcatgatggaaccctcgaaaatgaacgtgaagtgactgcgcaaggtcatctcaggaacttccaggaagagtcaaataaagagctgtcacacaccctagagctggaatctgcaccctccacaccaacccctttgcacagcctgtctgctctgcatgatcctgcagctggttactgcagcctggaagagctgagacagagaagacagacgtggggagggagaataacaataataaacagaccttaaacaaga

SEQ ID NO: 12575 - DNA, 894 bp, Homo Sapiens
agagcgaacacgacccacatttctctttttgttttaagaggaaatgtaggagttacagcatagaattacaatatctggacattagaaataacaggtcccggtcacggtatggcaccgcgcgacacacttggtccctgaggcctggatgccgctcagcaaacgttcgcggaatagggttgggtttactgtcccccaccgagccggttgctcattcattcagcataaatgaatacctcctgtgtgccaggcactgaatcaagtgtcggagacaatgtcctgccctcaagctcctggccggttacttgacaaccttccgggacctcaacgctatgtgcctactgtgtgaaagcaaagtgccaggtggaggacacaaagatggcgagcgacacaggatagtccttaacaattaagcgtgactaattttaataacaaatgagaatatgatgtgacatccgttccaaatcctgtcgttccaagtaacttaagcatctttcacgatacagcctctgcttgaaaggaattaaaacaggtacaagcatggaaggagacgttgctatcatatttcaagaataagaaaatgctgttttgtgtggttgtgcagcaggcaatgaaatgagcttacattcaagcttccgtgttttactgaaacaacagtcacagatgcagtggatgttaaaggttgaaagacgagtgcagtaaaagcattatgaggacaagaagaaaacgtaaatatttgtgttgtttcattctttgttgtggtggcagaaacagccccctctttctaaggtaactccaatataatgatctctcccagctttgaaatactccatgtctgtttcattttccagaaatatggaaaaatgaatatataataaaaaaccctatttctcattt

SEQ ID NO: 12576 - DNA, 183 bp, Homo Sapiens
acattaatttatgggattacatatgcaggataaattcttaaaaccaatggtggtttgtggggagggtgacagggtggataggtacaggattgggagacttttcactgtatctccttttgtatttttttgaattttgtaccatatgtatcacctattcaaaaaaaatacaatatttttaaatcc

SEQ ID NO: 12577 - DNA, 895 bp, Homo Sapiens
cagagtttaaaaatctctagtttatttctaacaaacaccacttgatgcttgactcacaggctttatttacatttgtctacagtatcatttccttatgaaatgaactagtacagcttagttaaaccaaatgaaatcataatcatcagaattgtctgtaaactactattagctaaattataaccttgcatttgcttagtacagccaaagttttaaatacagaaagcacaagaataaaccaatggtaacatgtagaatctagatcgtcggggcaatttagaaggtagactttcaaaaagtctgaggcacaattacaagtgagtaaaagttcttgtgcaacctacataaacgcagcaaagaaacttaagacataaaaacatgggaaagctcactgtaaaaatattatcaaaatatttctacataagatattttgctttcatttttagatcagctgaagagaaaaacattcactttaaagtaaaaacatatatttttgtttggtttgtctatgaaatatcttaaaatgtcgtaatttttatttaaattgcagcagacaatgttacggaaaaaaaacaagaaatcaatatcccataacaaaaagcccccaagcacaactgttgatttcctttgatatacttaccttgcattgtcactggaaatactgttaagagaaacctttttattttttaaaccagaaaacaaactaaagctcatgtgaccagattcttaattttgagaaataaactccaaaagcattttaagccataacttatttcaaatgaataggaaaaataatgacttttgcttacatcatgcagcataagcattcatttgttattcagaagaaaattgtatgcagtgtgtttatagtaacatctgaggcaaatgtcgctggtcc

SEQ ID NO: 12578 - DNA, 531 bp, Homo Sapiens
  misc_feature (96)..(96): n is a, c, g, or t
  misc_feature (183)..(183): n is a, c, g, or t
agtatcccacgtgcacatactgactaaatacagagctaggcccagtttgtattgtactctgaacttaatgcaaagtctccttggtgattttcgcanagtccgtggatttgggtcagaggcacatttcatacataacagcccttatagacgtttgacctgcctccacattttacagtatcttanaacagtacatttctttcaaagaattttatctctatgagtcagtactccaacttagtggttctcacattgtggaccaggagcatcagcatcatctggggaattgttcaacttacctcttataacctatgaactcagaaaccctgggggtgggctgagcagtctgttttagaaagccctccatgtgattctgatgcatagtagcctatgacataattccagaccaggtgaatctcaagatactaatcctcacatcatttgccttctcatatttccctagtcgtgaccatctggtgcctataatgcagtccaacattctgcagcaataaaagtgttttattataaagtatt

SEQ ID NO: 12579 - DNA, 969 bp, Homo Sapiens
  misc_feature (517)..(525): n is a, c, g, or t
gaataacaacacaaagaagcgagattccaaaactgacagcacagaatccagtggaacccaaagtcctaagcgccattctgggccttaccttgtgacatctgtttaaaagagaggaagaatgaaactaagaaaattctatgataattacaactgctatatagacaatttgtttcaaatggaaactttaaaagactgaaaaatttggtaaatagggttggattcttgttaagagggttttggttctggaagccatattggatagtatacttggtcttcactggtcttattttgggaggcactcttgatggttagaaaaaaaatagtaaagcccaagtatgtttgtacagtatgttttacatgtatttaaagtagcatcccatcccaacttcctttaaataattgcttgtcttaaaataatgaacactacagatagaaaatatgatatattgctgttatcaatcatttctagattataaactgactaaacttacatcagggaaaaattggtatttatgcnnnnnnnnntgtttttgtccttgtgagtccatctaacatcataattaatcatgtggctgtgaaattcacagtaatatggttcccgatgaacaagtttacccagcctgctttgctttactgcatgaatgaaactgatggttcaatttcagaagtaatgattaacagttatgtggtcacatgatgtgcatagagatagctacagtgtaataatttacactattttgtgctccaaacaaaacaaaaatctgtgtaactgtaaaacattgaatgaaactattttacctgaactagattttatctgaaagtaggtagaatttttgctatgctgtaatttgttgtatattctggtatttgaggtgagatggctgctcttttattaatgagacatgaattgtgtctcaacagaaactaaatgaacatttcagaataaattattgctgtatgtaaactgtt

SEQ ID NO: 12580 - DNA, 465 bp, Homo Sapiens
ggaaacagtctgactaatgtggaacctgcaactgtcagtgtggctggggtctttttaattccagtgagaagctctggctgagaagaaaatcaccactattaaaaaagctgctccccaagcagattagctctctgttaggattttactagtggccattcagcaaggacctctctttacagtggcacttcataggcacactctaaggagaaagtgcagagtagaattccttcagggcataagccaaaatgactctttttctcagggacctgcatgggcctccagcttgtctattggaattgttaagtgaagcctctcacttagtgcctcattagcagagatttcctccaacccagcttttctgtgctcttggtattttactacttgatgtggacctcagagaagctgaactgtaattgaaaatgtttccgatgtgtggaagaaatgaagactgctttgtgtcaaaaa

SEQ ID NO: 12581 - DNA, 1039 bp, Homo Sapiens
  misc_feature (388)..(388): n is a, c, g, or t
ataccctagcatattgggattaagagctttctagccagaatctggacctataccatgggaaaatttaggggtgctgggaatcccaaagccaaggttctggcttcattggcaacccactaggaacttgaatgtgagattcagctctagtttgcaccttgatttccccagtgaaaagggagaagagccaaagtattgtctaggtgctgagttcccttttctgagtggatttcaagcatttgccagggtatgctggaggagggactcctaaagtaggtgagttgtgggactaggtaacactttaaatacttttttactcaaagatttgccaagaacacagcttattagtgaaagagacctgtggattgaaatggctgcagatagatcccgncagtcccttctgaaaggaactgtgtagccagcagggacctaaactttggcaaaaagtgaacacaattcaaatacgaatgaaggaagagccctcagatggaacgaaaggcgatgtgcaaggccatcccagagagacggaagcaggtgcgatactaagcctcagcccaagaataaaagagagttcaactgttactcttttctttcatcaatcccctatcagttagaactgcaggccagttccaaagagtgtttgcttaagattcaaaagtgggtaagtaaaatggatcagtgggaaggataaggtgtccaacagaaagtgtggaggagaaactcttggcctatcaagtgctcctgagagaaacccatgcaatttaacacttcagttaaagaaatacatgagaactgcttgtcatgaccagacaagataggaaaggggaaaccccagaaacgtgctcttcatctgtcagccttttggaccaagaagctgtcactatcacacataagcaccattcccttagagtggatccaggtgttgactataaccagatttactctttgcttactaggttttccattgtcaccattggatgaacctctggtttagccacagttgtgaaaataaatggaaaatggttgattgtctagaaagtgc

SEQ ID NO: 12582 - DNA, 1047 bp, Homo Sapiens
  misc_feature (488)..(621): n is a, c, g, or t
tgcccctcctcagctgtgcaaggagaaagcatgcttaggaagttttcaggtccttgtgataaaacctccttaaatctgttcagaccaagcaatgcgagcttcctctcctgtcccatgttggaagttgctctgaaggggtggtagatgctggaagccagacacaaccctgcgtacgctgctcagttggtggagactggggctgggactggagtcagcccagctgggaggaggggctggggaggatctgcagctgaagcccgaggcagggttggtgtgatgccaaggcaaagtggtgaggagaaaacaggaaacgggctttctctgaattggtaaatgggaaagaagtgagcaacttaagattgtcacaattaatcacaagtgtacaggattagactgggtttatatttaactcttgcttcataggtgtaccatttaaagagtgttatttaatgctaagtttaactgctttaataaagtttatttttaannnnnnnnnnnnnnnnnnnnnnnnnnnnnnnnnnnnnnnnnnnnnnnnnnnnnnnnnnnnnnnnnnnnnnnnnnnnnnnnnnnnnnnnnnnnnnnnnnnnnnnnnnnnnnnnnnnnnnnnnnnnnnnnnnnnnngacaccgacaacaagaacagacagctatacgacgcgggtgcgctatgccactaaaaaactgaccctctcgtaacggcgaacgatacttgccgagagcgcgcacgacatccccttacacgatcctcgcgagggcctaacaactatcaaagtctgctctgtaactcataacccacacgagagagcccacaagcggcgttaatattacagaacacagcaagagcagacccatgcctcacacccctcacgcgacacttcactaacaggagagacaatagcaaaaacaatacgcacgcccacccaaatcggtaggctgaagctatatactagaagttatatgcgctcacccccaacaaatgatcacacacgacaacacaaacgctccactcggaggacacaaacaccgaaacggtctacaggttctaccca

SEQ ID NO: 12583 - DNA, 471 bp, Homo Sapiens
gcagttggtgtggcacgtgcggggtgttggcaccggaggcatggaaaagcacaggctgtactgccaggctgcgatgcgtgctggcccccgcacaggctcctgtgtgcagggactgattcctcagcacacgaggcttccacaacccagtctgctccatagcactctggcccaccctgtctgcaggtgaaacaggagggctgtttgcctctgccccatccccccgactgtgttcaggagtcccaccttgcatttcagacctgggctggcagtctgttggacttctcttcaggaagaaaaagcatcagggggaaatggaatgcccctgccccaggaacatggcagaagcacaggttctgtacctcagatggactcctgctgggccttcggggtctcagttggcttcccccagattctgattctacagctgcagaatgtatataacgcaataaaagcaaatgtttgaaccagtaa

SEQ ID NO: 12584 - DNA, 483 bp, Homo Sapiens
ggtgcatgggaaatggtcagcctaggataggacacgagagtctgaaattcaaagcaaccagcttgaagtggtttgagaagctggaagcaaacatgggctagagagatagggcagaagtcaagacgaggatctggactgatgtggagaaagtagccacggaagcatgaactgtatcctgcacaaagtccctcttccccgcctcctaattcattatgcccaaaaggccttacgtgaaattccagcccagagtactcatgacttgagagacgtggacagagccagcttctaccttgcctggccgtctctcccctgtcttaatgtctgctcttgctctaagctccagaagagtggcgggccatgtatcttcaatatgtttttgctgtatgggcaggttgtcttattatgtgatcaacagatgtccaggaactaatgagtggaatttaatattattgtcaaataaaacttgatttgtcctataaaaaa

SEQ ID NO: 12585 - DNA, 667 bp, Homo Sapiens
  misc_feature (503)..(522): n is a, c, g, or t
ttggtggaaatcctaatctttactgccatggggaaaagaacgctggaattttccaaacttaagtctgtaaatatgctcatcttaagttcatgtaatgtttccgctaactcaccaagaataagctgacaatttaaacaacttttactgtgtaaaaatgaagtgcacggcatggcatcacagtatcttgacatttgtttttgtcatttagctactttagaaaatagtttctgaactctttccccctttatactgtattaaggcaaaaacaaaacttctgaagcattaaagatcttcaccaaaataactattggtaacttcaggaatttgtcagttgccttatgtgaggatgaatagatccaccaagcacgcctataatacaaagtaaactatgatttttattgtgaaattttcatagatggaaaattgaatattctgtccatttcattttacaattatcttaccacttatttttgtaccatgtatttcaattgcctgtttagtgnnnnnnnnnnnnnnnnnnnncctattcatttttggcttgtgtttagcttaaattttatcattaaattaaggagcccacaacaaaatgtgttgccagcagccatatcccagcccctgcgtgaagaatgttttggctgctatttcaacctaaggaacaacgtttgac

SEQ ID NO: 12586 - DNA, 741 bp, Homo Sapiens
tatgggagagctgtaagtgagtgcaaggaggcaggtggcctggggcaggagtactgaagactcaccagcaggaaggagcccggccacacccatcagtgctggtcaagcagggccatgagcctcccaccttcattggatggttcttcacttcgggacccctacaagtggactagccacccgtcccacaaggaagtggtggatggcagcccggcagcagcatcaaccatctctgagataacagcagaagtcaacaacttgcggctatccagatggccgggcaatggcagggcaggtgccgtggccctgcaggccctcaagggctcccaggacagctcagagaatgatctggtgcgaagccccaagtcggctggcagcagaaccagcagctccgtcagcagcaccagcgccacgatcaacgggggcctgcgccgggaacaactgatgcaccaggctgttgaggacctgccagagggcgtggaccctgcccgcagggagttctatctctcagactctgacttccaagatatctttgggaaatccaaggaggaattctacagcatggccacgtggaggcagcggcaggagaaaaagcagctgggcttcttctgaacccaagccctctcgactgcccctatcccctggaccccaacatacctacaatgctggggaggccctgcttccactcccctcagaggcttttggtcatcctctgcgtgtcagtaaaagcaggcagcccataaa

SEQ ID NO: 12587 - DNA, 468 bp, Homo Sapiens
agaatcgtggaggtaggaagcccaaaaggaagatgaagacacaaaaattagatgcagatctcctagtccctgcaagtgtcaaagtgttaaggagaagtaaccgaaaaaagatagatgatcctatagatgaggaagaagagtttgaagaactcaaaggctctgaaccccacatgagaactagaaatcaaggtcgaaggacagctttctataatgaggatgactctgaagaggagcaaaggcagctgttgttcgaagacacctctttaacttttggaacttctagtagaggacgagtccgaaagttgactgaaaaagcaaaagctaatttaattggttggtaacttgtaccaaaatattttacttcaaaatctataaagcaggtacagttaaggaataagtagaactaaggcttctgcttccttgctgctgtggtggagtagggaatgttatgatttgatttgcaaaaaa

SEQ ID NO: 12588 - DNA, 626 bp, Homo Sapiens
ggcacgagggtcagcattccctttaaaagtgtccattgttctttgaaagtagacgtttcagtcattcttttcaaacaagtgtttgtgtaccttttgccaagctgtgggcatcgtgtgtgagtacagggtgctcagctcttccaccgtcattttgaattgttcacatgggtaattggtcatggaaatgatcagattgaccttgattgactgtcaggcatggctttgtttctagtttcaatctgttctcgttccttgtaccggattattctactcctgcaatgaaccctgttgacaccggatttagctcttgtcggccttcgtggggagctgtttgtgttaatatgagctactgcatgtaattcttaaactgggcttgtcacattgtattgtatttttgtgatctgtaatgaaaagaatctgtactgcaagtaaaacctactcccaaaaaatgtgtggctttgggtctgcattaaacgctgtagtccatgttcatgccaaaaatggctgggaacgtttgctttatttacattcagtcagcgttgctttcagatcacactttatccacacaggaaagccagtcagcctataatgaagtagttattaaaataaatgtaatgaatatgtct

SEQ ID NO: 12589 - DNA, 440 bp, Homo Sapiens
  misc_feature (24)..(24): n is a, c, g, or t
gagctcggtaccctgcagagaacncgaaggtttatatgttcctacaaaaaattaatgtgatgtaaaacctaaagacatactttcatagtcaaaacatccagatacattgagtgtacttcttgttcagagacaggcaggattaattgtaaccaaatcaaaagaaaggaatgtaaaagcagcccctctcaaacaccccaaggaaaaactgagcaaaagctaaacaagcaagtcatagaaaaccaaacaaaataactaagaaacctacaagtaatctaacaaaatacatgcaaacaatgaaacagttttgtccaccagaatggcaaagattaaaaaacggttaatatctgtgttggtgaaagtataaaatattcccctatactgttgttgattagtatacaattgatacaacttctttgaagagggttctctgcctcatctgt

SEQ ID NO: 12590 - DNA, 422 bp, Homo Sapiens
tggacagggtaagggggtgcttccagcctcctaacccaaagccagctgttccaggctccaggggaaaaaggtgtggccaggctgctcctcgaggaggctgggagctggccgactgcaaaagccagactggggcacctcccgtatccttggggcatggtgtggggtggtgagggtctcctgctatattctcctggatccgtggaaatagcctggctccctcttacccagtaatgaggggcagggaagggaactgggaggcagccgtttagtcctccctgccctgcccactgcctggatggggcgatgccacccctcatccttcacccagctctggcctctgggtcccaccacccagccccccgtgtcagaacaatctttgctctgtacaatcggcctctttacaataaaacctcctgctccac

SEQ ID NO: 12591 - DNA, 618 bp, Homo Sapiens
caggcagatgagaaatatggaaataaggaaaagggaaaatgaagatatgacaaagttgatgaaaaggttgaaataatgatttatacatgatgggcaatcaagtgccccttttgccctgttttttggagagggtgtatcattgcctcaatggtgcgtctgcctgcactgagggcattacacatggctgactcgacctccctgcctcacacactctgtgtattttgtgaagctccacaaacggggtcacgtcatccaggtgaggccaccaccggtacagaaacctctcggcaatggttcttagccagggggtgactttgacttcacccctcgcctccctctccagcagctcccacagctcctcctgggacaggtagaggatgcttttcgtttcactgggatccgggttcagagtgacgtttttcctcacaagcagaaggtaacaaatttcatgctctccccaaattctgtctgattttgccttgtggtgatagattgtcatgaacacaatgtcctctggagaaatctattgacagaaattggtgcagtgttaacaacgctaatgtaaaacacagaatttacagaaaaatagagaaaataaacacatttgttttaatcaga

SEQ ID NO: 12592 - DNA, 1183 bp, Homo Sapiens
cagcgcgggagccgcacagtcgaggagggagcgcgggacgccgagcccacgcgcgcctgccgggacaagtggagacgaagccggcgagcggacgccccgagggtcggcgaaggaaccgaggcccggtccccttcttatccagcccgagacactgcgctccgctccgattccgcgaaacctctccggcaccacctcggaagccccgcccaggcgatggtccgggcctaacctgccggccccgcccacccggcccttgggctccctgaggcccgcccagcagactcgaggaacgcttgacaaagtggcgaaggagccctacgggagtcccggattggaccctgctccttcggtccctcagcctcggcaagccgcggtctcctggcccttggcctgggtcaccttaggaggcaggaggagatgtggtcagtgtgggagcttggaggggccatgcacttccggagaagaccaccgactcatggctttggtggaggggcgccggcagattcagttaagctctcccccatccctgacacacccagccggggcgcgaccggggcttgtgaccactccggagagctttgagggcccctggcttggggactccgcacggacaagtcactgtctcagagtgcattctccaggggccactctcttggggacactgtaggggtcacagggcaggtgggcagcctctctcggggggcggcgtgagagccggagagcagggggcgggggcgggcccggctcgggctcacgtctgcgttgaagccgctggggaaggggagagaaaccgagagaaccggttcccccgccttgacagcggaggcccccacaccaaggcccttggactaagcggggcagggacagcctccaggtagagctgttcgccggggcgcctgcagagcccgcatcccaaccctgaccccggggccggggcgcaggctcctggagggaggcgtccaggcgggacagggcccggggagcggcaggaaatgggctgctcttcccacttgactgacgggaaaactaaggcacggtcaactatcaagcaagcgtggtgtcgaccttagagcaggactgaagcgaggctgaaatcttagaatcaaccccacggaatgaagaggttgtcctaattccagcactgagtgtaagaatggaagccttgcatgtgattttattcaag

SEQ ID NO: 12593 - DNA, 706 bp, Homo Sapiens
gtgcgctggagccgaatacaaaatacagttaaaataaaatgtcaacctcctggagtgatcggttacagaatgcagcagatatgcctgctaacatggataagcatgccctgaaaaagtatcgtcgagaagcctatcatcgggtgtttgtgaaccgaagtttagcaatggaaaagataaagtgtttcggttttgatatggattatacccttgctgtgtacaagtccccagagtatgagtcccttggttttgagcttactgtggagagattagtttctattggctatccccaggagttgctcagctttgcttatgattctacattccctaccaggggacttgtctttgacacactgtatggaaatcttttgaaagtcgatgcctatggaaacctcttggtctgtgcacatggatttaactttataaggggaccagaaactagagaacagtatccaaataaatttatccagcgagatgatactgaaagattttacattctgaacacactattcaacctaccagagacctacctgttggcctgcctagtagatttctcatactaattgtcccagatataccagttgtgaaacaggacttccaagatggggacctcttcatgtcctaccggagtatgttccaaggcatgtccagagatgcttgtgcactgcggttcattacaagggctcccttaggacaggccgctgaaacc

SEQ ID NO: 12594 - DNA, 237 bp, Homo Sapiens
tgacgggagactctagagaagccccgaccagacatagtcaaagacaaaatgagtggattggcagttacttcacaaaattgacccagatgacagggacaagatggaggggcacaatgataaaattcaaggtcctgaattcaggcaggcctgtagccgactctgtactttgacttgacagttatgtgccatattatggctatttattaattattattttttgagatggagtttcgctct

SEQ ID NO: 12595 - DNA, 404 bp, Homo Sapiens
  misc_feature (347)..(356): n is a, c, g, or t
aaaagaaatcgtatacttcctaattccatagtatggacaaaccgaggctagagaactgggccagggttacagtcatttggccagaggattagaattcagcgcttctgacctgaagacggcttcctcttaacctttttggaggatctctcctgctgtgggcggactgagcctgccgccaggtgtcttaacagtgcttgacttggcccgcgaccacttaagcctaggagcctaggctatttttagccatcttctagaatggtggttcttaaactctgcagtgtgtcagaatccccagaaagctaataaaaaacagacgtctgggttcattgaaaaagcttaagactgcnnnnnnnnnntccgcatttttaccaggtgaatctaattaaacctaattttgagaaccc

SEQ ID NO: 12596 - DNA, 318 bp, Homo Sapiens
atgcagagaaccccacccactcgatgtccagaaagttggagcattgtttgatttggagacaaaaccccatacatttggtgttagaagtgctgagactaaaactgttcagaaccatcattaccacagtctagatgatgaacaggagtccccaagacaaatattcttacatctagtcttgcaccactctaattcattgtccatgctgcagctggaataattttaattcaggattacttcttctacttctcttaaaaccctttttgtcgtccttaggataatatccacatttcctaacatacaaggttctctgcatcatct

SEQ ID NO: 12597 - DNA, 545 bp, Homo Sapiens
  misc_feature (502)..(502): n is a, c, g, or t
ccagatgacgcagagaaccctatgcacagtggccgagtccactgtaaagtggaagagacagaagggacattgtggataaggaaaatcttggtttgggacacaacaatgtacccatagattaggacttagctatctacccattcctaaccttctgcaaactcttcttccaacaattccacaacttcccggaaaagggacaggtgggaggaagaccaatgaggggctcagacttcctcctttgctatccacaccaacccagactctgcttccaagactaataacaacagctcatgatgttcaaggtggggactaggggatggggaggtgacggacgtgggcatgcctttcatttcttcccctctccagttcaagagaaggatgagggggtcataatgtacttggagaaaaacagaattgcagacctgtgagaaaactgctccaatcctcttgcctgtcttctgtggataccgccgaggcaggcaggaacaaatgcagtcatggnagatggcagagacttgagcagtccaaagtcagtttattttccc

SEQ ID NO: 12598 - DNA, 523 bp, Homo Sapiens
ataatagttaacttggggagtcagtaaggaatcaagtggaaagacaaagcactttattatgcttcataacttctgataaggccttattatttaattgtagttggatttgaggatttgaatccacaaagatttttcttttgccctttcaagaatctttatacttagatctatctgctacttgacaatcaaaacaaaattccagaactgtcacggaggtaaacagtaaatagctcgtgatccttgttatgaaaccataattaggaatttaatggccctaaatttgtctcttttccatacgatttttcataggctactgctaaattttaatatcagagtccagcaaaaagaactagaagatgattaagtctaaagaattaatgacatgctttaaaatagaatttccaaagtatatatccagaggaataactactgataggccataagcagagaatttccaaacagaatattcattcaagatcatcattactgaagagaaaactggcacattttaaaaaatgattta

SEQ ID NO: 12599 - DNA, 556 bp, Homo Sapiens
actccagaggataaacagaggtgcagagaacccttgttagttacactatgtgcttcgcaaacatataagcataacagcggtgggcctgactcattcttagagccccttcccttggaatattaatggatacaatagtaattattcatggttctgcgtaacagagaagacccacttatgtgtatgcctttatcattgctcctagatagtgtgaactacctaccaccttgcattaatatgtaaaacactaattgcccatagtcccactcattagtctaggatgccctctttgccattgctgctgagttctgactacccaagtttccttctcttaaacagttgatatgcataattgcatatattcatggttctgtgcaataaaaatggattctcaccccatcccaccttctgtgggatgttgctaacgagtgcagattttgttcccagtgccctaggttcaaatcctgagtccaccactttgttaggtgtgtgatcctgggcaaatcacttaccttccttgtatcttattcctccatctataaaatggagctacctcata

SEQ ID NO: 12600 - DNA, 660 bp, Homo Sapiens
ttacgctactcatacatctgaggttccagagtctaaatctggaaagatctacctccatagagacgtacggctcctgttctctagaaagtcaatggaggttgatagcggtgctgcatatgaactcaaatcttacactgaatcaccaacaaaccctcagttttcaccaagatgttgataaggagtgatgatttaaagtatttactcagtacccaagtttgcaagtaaaaattagcatagaatggagtgtaccaaattaacaatcaggagagtggattctctcctgttatcctggaccagtttttatgaaaggattcctgaaatgaaatccatatattccatgtagactggaaaaactcatgtcctaatcctttttgtactgttgaaaccacttcattggacatgttgcaatagcaaaacccccagttagattagtgtttacacattttctcagttatttaatatttaatgttttccttaatactcaagtgatgtttgtctctagtgttctaatgtagcacaaatcctatgtaaaatcatactatgtatttttgacattaatgttgaaatcaaatatatgcacaagtctttaattttgtgtaatgtgttaagtgctgttcatttaagttattgaaaatgagaataaaatgttgagcttcttta

SEQ ID NO: 12601 - DNA, 465 bp, Homo Sapiens
ctaatcattcactgacttattttccttccattttctggtttttaaaattagccacaccacaggaaacccacatttttagatggaaagagcaagaaaattgtgtcagtgctcttagttattttcatcttaatggtatagtgaaaagacattgacttgagatgatactaaggaagctttggctcactctcacttgaagaggggatcttggtgttgtagtacttggactgtacaaatgttttactgacttttcttactgctgtaaaggaatcaggcagttgggtattgatatgttatttggtgctctcattcatggcaaaggatttgataaataaaagttctttaaacactaaagcaaaatcaaatgagcaaaactaaggatgaaatgtaatattcatcagaacaaggatcactgagaaaaaatattcagaaacaactttaataaaacctggaattggaaataactgc

SEQ ID NO: 12602 - DNA, 497 bp, Homo Sapiens
caccactcctatagatcagtactaaagcactggttctcaaactttttggtctcagaccccactcttagaaattgaggatctcaaagagctttgcttatattttgttcttttgatacttaccatactagaaattaaagcgaatacatttttaaaataaatacacatgcacacattacattagccatgggagcaataatgtcaccacacacacttcatgaagcctctggaaaactctacagtatacttgtgagagaatgagagtgaaagggacaaataacatctgtgtagcagtattatgaaaatagcttgacctcgtggacttcctcagagggttggtccctggatcacactttgagaaccatacttgtcctgaagtattggagttcatgtctaacttcttcccagggcattatgtacagtgctttttattactgtggggagagggcagtgctaaataaattaatcactactgatctataggagtggtgggggatcct

SEQ ID NO: 12603 - DNA, 388 bp, Homo Sapiens
attggggggaacctgagactgaccatcacattggtgaggaagtcctccacctggatgagagtttggaataactaggagactctttaaacctacttcctgacattctttatgaaatttagaattgttgaagaactataacatttcagtagggttcaaggtggtcccaaaagttatataaaagattagtttttactataaacccttgtcttttactcagatcctagcatcccttttcacatggtttctccatgtatataacagaatcaagaaacaaattttaattaaacaatctgtaacagaatcaagaaacaaatacattttaattaaacaatctatatggaacaaacattcccaaattctaagaataaatttttcttaaagttttcaa

SEQ ID NO: 12604 - DNA, 414 bp, Homo Sapiens
gggccgccctgagacgtggcgactacagagcctttgccgcctcatggtggagagccaccgctcactcagagacgactatgaggtgagctgcccagagctggaccagctggtggaggctgcgcttgctgtgcctggggtttatggcagccgcatgacgggcggtggcttcggtggctgcacggtgacactgctggaggcctccgctgctccccacgccatgcggcacatccaggagcactacggcgggactgccaccttctacctctctcaagcagccgatggagccaaggtgctgtgcttgtgaggcacccccaggacagcacacggtgagggtgcggggcctgcaggccagtcccacggctctgtgcccggtgccatcttccatatccgggtgctcaataaacttgtgcctcc

SEQ ID NO: 12605 - DNA, 813 bp, Homo Sapiens
gggctgtcatcagcatggactggtcactgaggaggaaatccagttctatgtgcagcagttcaagaagtctggtttcagaggtcctctaaactggtaccgaaacatggaaaggaactggaagtgggcttgcaaaagcttgggacggaagatcctgattccggccctgatggtcacggcggagaaggacttcgtgctcgttcctcagatgtcccagcacatggaggactggattccccacctgaaaaggggacacattgaggactgtgggcactggacacagatggacaagccaaccgaggtgaatcagatcctcattaagtggctggattctgatgcccggaacccaccggtggtctcaaagatgtagaacgcagcgtgtgcccacgctcagcaggtgtgccgtccttccacctgctggggcaccattcttagtatacagaggtggccttacacacatctcgcatggatggcagcattgttctgaaggggtttgcagaaaaaaaagattttctttacataaagtgaatcaaatttgacattattttagatcccagagaaatcaggtgtgattagttctccaggcatgaatgcatcgtccctttatctgtaagaacccttagtgtcctgtagggggacagaatggggtggccaggtggtgatttctctttgaccaatgcatagtttggcagaaaaatcagccgttcatttagaagaatcttagcagagattgggatgccttactcaataaagctaagatgactatgctactggctgtcttagttcttggagaggtggagtgactgtccacggaga

SEQ ID NO: 12606 - DNA, 778 bp, Homo Sapiens
  misc_feature (501)..(501): n is a, c, g, or t
  misc_feature (530)..(574): n is a, c, g, or t
gccaagcggagggaagcagcaggaaccaggacccctgcagatggtggaggcaagaggctttatctgagcctttgggaccctggccacctgcccagctccatctgcatgggagaacctaggggaggggctggttctggtacctgggcccactgaggccttgagctgagcttccagttctggcaggtccccagcacagcagcctgggggctcctctggcacagaaggcctcgccctctgtgctctctgcagccgccactgggattaaggggaccaggtgtgtctgtggcacctgttgccctcctagcaatctcgcaagcaaccagctgaacaggtttggtgctcctgggtatctgggagggcctggggacgttcctgcctcctggtgtggcttagactgaaaagtcctgaaagttccgaactcgggggatactcgaggttttcctggacatagacttaacgggcccagagttctggccgggctctgagggacgctgccccggnccaggccccggcaccatccttccgcattnnnnnnnnnnnnnnnnnnnnnnnnnnnnnnnnnnnnnnnnnnnnngacagagctgggagggcctgagggacactgcccaggccggcaccccgctgcccctcccaaccttggtcagcgctgagctgggctgcccagaaatctatgagcctgttaaataatccagattattgttcttaatctcaaaacaatgagtggaaggtgccattatttctctttgcaataaaaataaaagttgaaatacgcaaaaaa

SEQ ID NO: 12607 - DNA, 617 bp, Homo Sapiens
gtgatagacatagcagactatggcctcgcacgagacattcaccacatcgactactataaaaagacaaccaacgggccaactgcctgtgaagtggatggcacccgagacattatttgaccggatctacacccaccagagtgatgtgtggtctttcggggtgctcctgtgggagatcttcactctgggcggctccccataccccggtgtgcctgtggaggaacttttcaagctgctgaaggagggtcaccgcatggacaagcccagtaactgcaccaacgagctgtacatgatgatgcgggactactggcatgcagtgccctcacagagacccaccttcaagcagctggtggaagacctggaccgcatcgtggccttgacctccaaccaggagtacctggacctgtccatgcccctggaccagtactcccccagctttcccgacacccggagctctacgtgctcctcaggggaggattccgtcttctctcatgagccgctgcccgaggagccctgcctgccccgacacccagcccagcttgccaatggcggactcaaacgccgctgactgccaccaacacgccctcccagcagcaccattctgatgttggagcggccgc

SEQ ID NO: 12608 - DNA, 412 bp, Homo Sapiens
taaagataagtaaatgcatccagaaatgtatgcacagatttaagttttccccatagttttatctgctaggtgataggttggagcttcttagtgcttctgctgggaattcagataggacagacttgcagcctcagaggacacactgcaggtagtgcagagagacatggaaggaaaacacactgcctgctacatagtttttatcccaggtataatttgtgaggaatgtataacaaatgtttcttaaagcatgaatcctcttcttgaattcttgtttttatgaaagccatcccactacttactcaatcctcttgaaatctgccttttgtaatgtaactgataggccagcgttttctttcactgtgggaaataaaggctacttggttgctttagggagggcaacaaatatcagcag

SEQ ID NO: 12609 - DNA, 519 bp, Homo Sapiens
  misc_feature (29)..(29): n is a, c, g, or t
  misc_feature (36)..(36): n is a, c, g, or t
ggacccccgggattaccaactccctgggntatcttncccccaagccaaatgaaaaaccatgtgtccccccagaaaaatttgcaccacaatgtccatagccagccattatttataataattgagaaatgggaatagcccaaatgcccatcagctaatgaatagataaacaaaatatggcatagctatacaatggaatattatatggccctaaaaagtaatgaagaagccagacataaaaggctttgtgtgattccatttccagacagaaagcagattagtagttgctgcaggctggcgggagggaggaatggaaagtggctgctaacaggaacacggtttattctgggggcaatgaaagtgttctaaacttagatgtgatgatggatgtacaactgcgtgaatatactaaaaagcattgaatggcattgaatggttcatcttaaatgggtgaattttatagtgcgtgaattatatagataaagatgtaaaagatttgtttaacatcaataaagatgtaaa

SEQ ID NO: 12610 - DNA, 799 bp, Homo Sapiens
  misc_feature (114)..(114): n is a, c, g, or t
  misc_feature (124)..(124): n is a, c, g, or t
  misc_feature (148)..(148): n is a, c, g, or t
cagtctcagtcagaggagtctgcttctgcctttagtgctgatgaccttatgagtatagatttagcagaacagatggctaatgactctgatgatagcatctcagcagcaacacanaaggaagagnccgaggaagaggtcgaagaggtgnaagagggcagaattcagcatcgagaggagggtctcaaagaggaagagcagacactggtctggagacttctacccgtagcaggaactcaaagactgctgtgtcagcatctagaaatatgtctattatagatgcctttaaatctacaagacagcagccttcccgaaatgtcactactaagaattattcagaggtgattgaggtagatgaatcagatgtggaagaagacatttttcctaccacttcaaagacagatcaaaggtggtccagcacatcatccagcaaaatcatgtcccagagtcaagtatcgaaaggggttgattttgaatcaagtgaggatgatgatgatgatccttttatgaacactagttctttaagaagaaatagaagataatatatttaatggcactgagaaacatgcaagatacaggaaaaatgaaaatgttacaagctaagagtttacagtttaagattttaagtattgtttcctgagcataactccataagtaagaaatttctagttcacagacatacaatagcattgattcaccttgtttttttaacctggttgttgtagtaagagctttgtttcaatatcactcttgagtaaagattaaaataaagctaccattttacatttctatttcataatga

SEQ ID NO: 12611 - DNA, 194 bp, Homo Sapiens
agatgaggcagagaacccacattagagtaatgcaaaccaaaacttgcaattttatgatttcttcatactataacccttaatactatgcataaagaagttaccccattcccaagtcataactagaaaggacaaagggaaagtctgtcagaaaaaacagtgataaatttgaatgcatagtacaatatgcatcctct

SEQ ID NO: 12612 - DNA, 745 bp, Homo Sapiens
  misc_feature (574)..(574): n is a, c, g, or t
  misc_feature (679)..(679): n is a, c, g, or t
  misc_feature (714)..(714): n is a, c, g, or t
gcggccgcgggtgcacggggcactgagggacgccggctcctggacacggcctcgctctgcacctgggctcccgagggccccgccttgaacgcagctaagagccgtctccctcttcacctctggattcttcctcccaatctcatgtcagcaaatggcgagtggatgtcgctgctcgggctgagggcgcaggggcgccgctccaggggagcagcctcggacccgagcgtgcgcgttggcagccacctagtccttttctccgtcttcgctgcttccgccctgctcgatgtccgagtcggtcaggtgtgtgagggaaaagctggcaatgttggcgggagagatggagaaccgggagtaaggcgccgagtgcggccagctctgctccgtgctccgggccggtggcggcggagaaaagtacttggatgtttggagagaaggcttggagctgagcaggttacttgttgtctttgacataaaaggatctggggagaagtcatcatcccactcaaagccaccaccttcttcgtcggtggagctttcggagttgatgcacctgctcaggtagggagagcctganggctggggctgggccgctcaggtcccggccgcacgcctctcctccacagggcccccagctctttgggtgcgtctcctggtcaaacaagtagactgtgacatcatncgaaaaacgtgactggcctcttttccttcttcaantcttcgggcaggggtcggggcattgggcgct

SEQ ID NO: 12613 - DNA, 537 bp, Homo Sapiens
acgcggagaacccagaatacagagcaactctcagaataccagagcaacactctcaagtcatacttttgaacccagaataccagaataccaggcttcagaacccagaataccagagcaacactctcaagtcatacttttgactacaattaagagatgaaaatggacggatatctgaagataggtattccctctgctctgaaggtgagcaagattttaacatgtgagcaacacagaactccactcctctggagctcctttcaactcagaatgcttcagttcagtaagtcaatatattattcttaaaaattaaagtttggtcactaagaaggactgaacaaaaattattcccctcccgccaaacacaaccagaacagttctaatcaggccctcttctccccacaaaaatagggaagtagctgggctgaagactttaagtgtgacatttcagttcctaaaacatcactgctatttgctcaaaggtgtaggtctatgtatttccttctcctatgatatggtgcaatacgttaattgactatc

SEQ ID NO: 12614 - DNA, 293 bp, Homo Sapiens
tggcgggggtgttggggacgggtgctgcgaccggcactgcccatccgagcgggacgggcgctgagtggccgggaggcagccgggtagccgcctggaggagcagtctcggggcctattattggttttttccctccgagaccgattccatctgcagagaccgcgacgccccatcctgggccgggccgcagtgcccgcccgcctgagaggcgccgcccgccagccggcccgagcgaacctggagccgccgccgagaccgccgctcttctcgcggagcctgggcggtcggcggggcc

SEQ ID NO: 12615 - DNA, 696 bp, Homo Sapiens
tcacatccctgaggccagaggtcagtaccctttggtatttcgattagaagaagctgcaaaagaaaggcagcccattttaccattgccagccaggccggggacacaggagccggtgtgtgcactctgcctcctcaccttgcacccagagcaagaggactgggtgctgggctgcagaggccggtcagtggagcccctagcacgtgtgaactcaggcttttcattgggcccggctccacttctaggccatgttttgactcatttggtaaccattgcctgtaagcagcacagaattggtgccatggattatcttttccatgttgatggaattcattctgttggaatcctttggccagatgtcacttcagccagggtgtgcatcatcatcggttctttttcacagcctgagcctcctgaaaacccatgaacgctggggctggggaagtgaaccctgaggtggggaccctctcttcccatcaaatcatccagctcagtgtggggcgtggcaggggggtaaatgaagccagccaatgtgttaacctgtctctgtcaacctaagaatgttggccttactgacacacctttgctccatgttcaagaccagaagtagctgggatttgtttgcaattgggtaattagtttaaaaatctgtgtgacatttttaaatgaaattttcaaagtgcctcttctgagcaggcc

SEQ ID NO: 12616 - DNA, 564 bp, Homo Sapiens
gcttgatcctccatctagtgtggtacccggttcccatgcctccagctccagcctgggactataccagcccgtcgtagagggacagcgcctgcacaatggacgggtctgccttggaaccctcctggaactcctgcagggtcagcttcccgtcggcattcttatccatcatggcaaagatccggtccaccctcttctcaggagtgttctcctcctctgggagctccacggtattccccaccatctggtaaatggcatccacaatgtccagcatctcattcctggtgatgtagccatcattgtccaagtcgtagagcttgaaggcccaccgtagcttctcatccagggttccccgtgaggtcaccgacagcgcctggatgaactcggagaactcaattcgcccgtccttgttttcatcaaagacgttgaaaacaaatgtggcaaacttggtggggtctccgaacgggaagaattgcttgtagatcttctggaagcctgccgcatccagctgcccactggggcagtccttgatgaagcctttgtaccactgctggacctccttctcgg

SEQ ID NO: 12617 - DNA, 444 bp, Homo Sapiens
gcacgagatgactcaaacagctgccttacaattcactcattccatgtggaacaaacatttatcagatgcctattatgggcatatgtctctgctaagcaccatagttgtcaatgtgctgtgcaaatgctaagttccttttagcaattgttcagttggaagacgtattaatatttggggaaggaaaagaaagtagttgttttacaagggaggaaaaaagtgaatctggttacacatatggaagtaagcaaaatgaaaagcacttattgctttctgacagaattatagatgtaattttaagagttgctcctagcaagttaaaagtgcatataaaatatgcaactcttagttaaaggccttattatcagtcttacctatacaagtagtaaattttgtcattgctttagttacaaccatctgtaaataacttaaaagacttattatgtg

SEQ ID NO: 12618 - DNA, 409 bp, Homo Sapiens
aaagttataaaaatattttatttaaatgatacagaaaaaaatgtatacttaaaagtgattaaaacttcacattaggaaatgctaaaaacccagtaatgtacataatgataaaatctaaagtgatgagaaaacataaaatattttcatttggtcctgtcacctaacaaaactatcataaatatgagattatagtaattactaaagctggttaaaggcacatgacaacataattcctttatacacatccagtcattttatacaaggaactgctatcccttaaatggaagagtgaactacttgtttaaaatattaacagtgcactatgtacctacaatgaaaccactttctccaaagactcaaacagattaacattgcaaaatagtacttctgtatcactgacttctgaaaa

SEQ ID NO: 12619 - DNA, 303 bp, Homo Sapiens
cccaattcatgattccaggctcctttctctgcggaccatgccagtagtctccatcccactcccagaatagcccaaaagtccctccacccctcacacttaaaactttcccacgagatcacagggctctttctcactgcactgagacgtgctcctgcctcctgcccctgcctcgggctttgccccaaccattcctctactgaattctcgtccactcttccttttggtgctttaagacgctccttatgctagagacctatgtgagcagcgcccccacgtcactcccagggttcccgacagcatttc

SEQ ID NO: 12620 - DNA, 460 bp, Homo Sapiens
gtctagcagtcttccattagtatctacttgaccacaggtcctcatacgtcaacaacaacatctattgagatgccttgagtaatctgtatctacagcactgagactagatttgagaaggaagaagtccaaactatagaacaagctttcaatttgtagggactcccacacctgacagagtttcgagtccctttgagagcataatggtgaggtgagatggtccaaggccactgtagtataactttataactgtaatgatgaattcctaaggaggaaggaaacttttcaattattctgctcattaagtgtattccaattctacagggccagcttagacagcatgtaagcatccaatcaccactgtagtcaagaacaaaaatctccctgatccaaacataaatacctaccaaaagcctttggggagtggcagagtggacagggagtcttcagtccaggcccacag

SEQ ID NO: 12621 - DNA, 225 bp, Homo Sapiens
acactccaatatgcgggatctctgggagggagcaaatgtctgactagggcttcatagagggctgcatgctgaagagcgtgttgaagctggggttctgaagctcaagtaggagtgtaccaggtagacaagagtaggaagaacagcccgggcaaagaaggcactggtaaggcagataataagcaggtttaagatattgtagcacctctctaaaaaactgaggccaaa

SEQ ID NO: 12622 - DNA, 456 bp, Homo Sapiens
tttgcaaaggtggagctccagacagctcctgtcctaggcggggagcaggaaccagacctgctatgggaagcagaaagagttaagggaaggtttcctttcattcctgttccttctcttttgcttttgaacagtttttaaatatactaatagctaagtcatttgccagccaggtcccggtgaacagtagagaacaaggagcttgctaagaattaattttgctgtttttcaccccattcaaacagagctgccctgttccctgatggagttccattcctgccagggcacggctgagtaacacgaagccattcaagaaaggcgggtgtgaaatcactgccaccccatggacagacccctcactcttccttcttagccgcagcgctacataataaatatatttatactttgaaattatgataaccgatttttcccatgcggcatcctaagggcacttgccag

SEQ ID NO: 12623 - DNA, 606 bp, Homo Sapiens
gtttcttctctttctgtaaatgtttttggccatcaagtagcagtcgtcagtaggagcttataataccaagaatgtgctgcgtatcttgtcccaataagttttaagtaacatttaaaaatattaaagcatgtcatttgacctaattttttagcatttgagttgttccattaaatggagcatcttgtaaatttcaagtattttatacttgcaattgttaagagttaacaggtagttggatttgtcgcagacaatgagttaaggaatcctttcacgtttttcccaactttaaaattaaggattctcaggtccctgtgtagagcagtgaaaataagatgtgcgtatgtgtgtgtatgcctggagaattggtgtttcacttcagtgagaggattggctgtgagcttcagaccaggaaatgtgtcatcttgccaggcacctggctgagtgtgctggagtgaggatcttgaacagaaacttccttttctgttattattcactacgaagctaaaatggccaaatatataccgtgaaaattggtttcatttaacaaaagatcagatccctccttcagctgtacacatttttaaataaaatcatatattactaaaa

SEQ ID NO: 12624 - DNA, 866 bp, Homo Sapiens
gccgagttctaggtgactcccaacatgtaccaggtgccactcaccctagatgggtagaccacacagtgtgcagcgtcacagaataaggcttgccgttcttcaggattgggactagagttcaactcatttcagcaccagttgcgagtccaggatcaagaatttcaggaaggctttgatggtggctggtgcctctctgtacatcagccctgggcttctctgcttgtcagagggattaaaagggtggagggcagatcctggtacaccccccacagaggacgactttggatagcagccacagctaaaaaaccctcccctcaagaagtctcagaactccaggctacatatcgtcttcttcgtgggaaagatgtgaaattacctaatgactatccgacaggttgtcttctgggctgtgtggacctaattgactgcttgtcccagaagcaatttaaggagcagtttccagacatcagtcaagaatctgattctccatttgttttcatctgcaaaaatcctcaggaaatggttgtgaagtttcctattaaaggaaatccaaaaatctggaaattggattccaagatccatcaaggagcaaagaaggggttaatgaagcagaataaagctgtctgacccaggagaaaaggaactatacagcatagtggagttttgtgtactaaaattgctatctactggtcctttggaattgaagtagtagaaacctaaaggcttggcgtcaggcttgaatatctcagaacttaaactcttaccaaaatctgtatatttttcttaaggagtgggattcctactttatgtaatggggtcgaaatctttgaacacattatttataaaaacctgtttaaaaattctaa

SEQ ID NO: 12625 - DNA, 225 bp, Homo Sapiens
cgcaagaaagaaaaaatgatgaagttgcaaatggcagtgtgctgtcacctgcaacagaagtgcgtaccagaagtatgactcatgcaaagcattttaccgtacaaatatcctggtgcgatgatgggcctggcaacattttctactgtacttttgtttaaatttaatgaaacaaaaaattcctaagaaataccaccctaccactaacaaaatggtataaagaatctc

SEQ ID NO: 12626 - DNA, 428 bp, Homo Sapiens
agccccctcccttcaggaccactttctaccatcggttttcaaaaaactatccacatgttaattctgttttatgttctgtgattctgtggtagactcagtgctttcagagtccagagcttgacttgggttagtggccttaatgaagtgctaaatttgctctttaccgcgagactgatcagaagaagcaaaaggggaaagggggctagaggtccactcgcaccttttacatcagacaagaggaggactgtgccagaaatctgtgcatgaaacaccatctgctcttcatgcagggaggggtcaaccgtgtgaacgtgcagagattactcgagccttctttgccaaaaatatgcattcttcccagctgtaagcgtgtgaagccaaatatgtcttttagcatgaaacaataaaaacatgtttattttcactta

SEQ ID NO: 12627 - DNA, 478 bp, Homo Sapiens
ccaagacaggcagatcacttgagcccaggagtttgaggccagcctgggcaacatggtgaaacccggtgtctaccaaaaatacaaaatgtatccagacatggtggtgtgtacctgtagtcccagctactcaggaggcaaagatgggaggattacttgagcccaggaggtcaaggctacagtgagccatgattgcactactgcagtgcaacctgggtgacagagtgagaccctgactcagaaagaaccacttgcccacagtccagacagatggattgtaggtgggttttctggagattagtagatactgtataaagttgtatacataaaattgtgtcagtagtacaaagtgtatataggctgtttactcttacatttcctactgtaagatacagatttatggtactgatacctttaaattatatcatattttgaaaatgtaattactgatattcaaaataaattaaaggacttaaaatca

SEQ ID NO: 12628 - DNA, 426 bp, Homo Sapiens
ggggggacagcactttcctatcattgagaatctcatggtctcatattcacaagtaaacgtgcctctcaatgcttaggacagggtgcatcactgaggtgcttacactttgaaaccacacgccaggaagatttcttcaacaggaaagtgctgccagtgccggtcggccttggggcaggaggctgctgcacctaaaaaattccgttcacctttggccaaagttctgagccagctcccaccggctgggccctcccctcaaggcccccaccaacagtgaaagaggtggtgggtggcagacaggccacagcagggcaaacccacacagaggacccccgagccgactctgtctagtcaacagtgaccacacgtgacaaccagtcctccctagaacccagcctggattcccgagaccacctgggagccatcacc

SEQ ID NO: 12629 - DNA, 595 bp, Homo Sapiens
actactctgatagtttatatttggtcttttattgaaatggtaatctttactttcacattgaaccttagatatattatcatcgtgtttgttactggaggggtgcttggcttcttcatgactggttacctccctttgggttttgaatttgctgttgaaatcacttaccctgaatctgaaggtacttcatctggtcttcttaatgcttctgcacagatatttggaattttgttcacattggctcaaggaaagctcacatcagactatggtcctaaggcagggaacatttttctctgtgtctggatgtttataggcatcatattaacagcattaatcaagtctgatctgcgaagacacaacataaatataggaattacaaatgttgatgttaaagctataccagctgacagtcccacagaccaagaaccaaaaacggttatgttgtccaagcagtcagaatcagcaatttgaagagaaaggcaaagttactgtcctgtagtaattggggacaatgtgatcatccttggagagagatgtgagcaccaaggctgggtttgtatgtggtgggggaataaacacacttacttgaaaattaaaa

SEQ ID NO: 12630 - DNA, 172 bp, Homo Sapiens
cacggggactcgtcgagagacggacgtccctgctatctcgataggtagagcctagaacagaatccttcactccatccagcacagccttgatgaccccctgcacagtcgtcaccatctccttgtctactgagtacacgccttccagcatcacttggtcagaccagcgaatgag

SEQ ID NO: 12631 - DNA, 141 bp, Homo Sapiens
gcaggtcgggcaatcaggtagacacttgagtaggggcaggtggcagcaccaggtctctgatagccttcccttggcccatcagggctgaaacacggccttcccaggcagctgctggcagggaaggccgtgtttcagccctga

SEQ ID NO: 12632 - DNA, 261 bp, Homo Sapiens
  misc_feature (188)..(197): n is a, c, g, or t
cgcaggcgtctctcaggtgggatcagcttctctgtcaccaacaaggttagatgcctcgtcatctcttccttggtattgtttacatgggttctaagtgactgcgattcagtgccacctggagctgtattcttttgattctctctgttgagcaaatatgtctctgacgtcaggaatctggtactgtttgnnnnnnnnnncctcaaggtctgggagaccgtctctactcgcttctgaactgctgctacctggattcgcgaccga

SEQ ID NO: 12633 - DNA, 445 bp, Homo Sapiens
  misc_feature (317)..(317): n is a, c, g, or t
  misc_feature (345)..(345): n is a, c, g, or t
tcgcgaatccagtagtagaggcacgggcttctttttgtctctcagctgtcgaaggcggtgaaacacattgatgacgtcccgtatgcgtcttggggcctcttctatcttggaagccagatggacacaggccattgacacatgctccatggagtgcttcacgaaggacttggtataaaagaaccgctggaacaacacctgcccggtagccatggccactgcggcagtcggagcaggataccggccgcctggatgagctcgcagcccaccacgcgcaggtcggtctctgtgtcggtgtcgaggccgctcgacatggacgncgtgaaacggagcttgtcgtcaggcagnaggcagttctccaaggtgatgagcaccccggagtacagcctgtccccgatcagcaccccctgcgaccctgagggtgcgcccccagatcccggggcgccgt

SEQ ID NO: 12634 - DNA, 215 bp, Homo Sapiens
cccggtcccatggcacagttaatacagcttttttgtggtccctattccacacactattcttattacaaattttgcgtttgctcccactagaaagcagaatgttgtgggaacctcctgcaccaggagagccccagcaccttacacgctgactgcctcgagtcatgtgatagagcttgagtttttccactgtttgaaaactggctctgcgatctttc

SEQ ID NO: 12635 - DNA, 400 bp, Homo Sapiens
catcctggccaagtatgcggagaccatgggccgcgagttcaggaagtggatgaaatggtatggaataaagcatgcagaatacacattggagagaggcgatttcctctcagaagagtggagggagcgaatcgccaacacgagtgttatatttgtgaataattttgcctttggtcctgaggtggatcaccagctgaaggagcggtttgcaaacatgaaggaaggtggcagaatcgtgtcctcgaaaccctttgcacctctgaacttcagaataaacagtagaaacttgagtgacatcggcaccatcatgcgcgtggtggagctctcgctcctgaagggctcgggtcgtggaccgggaagccagtctcctactacctgcacactatcaaccgcatcaccccgc

SEQ ID NO: 12636 - DNA, 467 bp, Homo Sapiens
ggatagaacaggatggtgtgttctggaggaagataccggtgtttctgcaataatgtcctgaatgcgtggctggaaaaccatgttttccacaaaatcaatgcgctaaaagtaacaggacttatgcaaactataaagctggagcaaccccttaaaaccttgggaactttgtaggcattaatcagaacactacaaaaattacagtcctagtaaaataaaagcccagttaaattttcactgtgcccgatattacaggtggcttggtctgttgcagctttagactctgggtcttgagcttttgcttcttcaagaaggaatgattgaagttagagtggaagttagcgggaataaagaggttcaggaattaaaacgcagggacaaaaataattaaacgtgagtgttaagtgtgtaaatgtgcatggagagatacatgttgctatgagggcttctcaaaaggagcttcaacctgt

SEQ ID NO: 12637 - DNA, 424 bp, Homo Sapiens
ggagtgagggaagctgagggccggcataatccagagggacagtccccgaggggggctgcagctccagaaggcctgggaggagcgctgagcgtgcaggcccagcaggagcatagtccacctcgctcagcgtcttggccatctgcagcaccgagcaggaccggtcatccccactggccacttcccccaggaaagtgctggctggtgaggggcctgggggcagtggaggccttggatgggccttgggaggtggtgggccacgggcctcagccccaccacggccccggaccactggccctggtaaaggatccaggctgcggggcaggaagatggctgagtccggcagtggtggaggtggaaagtctggagggggcagtgtgcctccagactcctcatctgaagaactcccctctcccacacgagggtg

SEQ ID NO: 12638 - DNA, 389 bp, Homo Sapiens
tgctgatcaatcttagagttggtctccctgcttccgcctcttctttctatgtctacacagcaggtagagggatcctgtcaagacattcaatgacccctctggtaaaaattctctaatgacttcccatctcatgcagaataaaagccaaagtctacgaaactctagaagccccacagaatttctatgaccttcctccttccttccctgatttcatctcctactactttctccctcattccacattccagccagacattagccttctggctattttaacatgccacaaacattcctacctctggggcttgttgtacacttgctgttccctctacctgggattcttttcctccagataactgcaccagcttgctcctcatttccttcaagtc

SEQ ID NO: 12639 - DNA, 345 bp, Homo Sapiens
cgcgcttgtcgctgagggcagctgccagctccacctcgctccggtggaacagggactccaggtccttcacacggccctgggccaccgtaagctcgccctccctcttcttggcgctcttgttgacctcgtccaactctgccctcagcttcccaatctctatctgcagccgggcacgctctcgagccgtctcatccaggactctccgggcatcaggccagctccgactcgtacagcgccttgatgccactcacctcgcgcgtggtcacctcctcacttctctgagatcttgagcaggagccgctcgttctccagctccagcgcgcgtacgcgtttcgatgtagtgcg

SEQ ID NO: 12640 - DNA, 320 bp, Homo Sapiens
cgaggagcccctgttttggtaagtgcttaatagatgattcatctttaaagatgagtagagttcatcagctgtatcggatcatgttaagcacaaaaagtcagctgaactagcttttccgcatcagtctcgggacaggatttccaggctgaacaggccacaacaaacctgtcatctctgatatggtagaaaaatccataaccattgtgtaccatgggaactaccactccctggactcgtaaatagccaaccagacttgttgagagaacaaaatttccacctcctcagcttttggaaaaaagtgggtccgtaaagagttctgg

SEQ ID NO: 12641 - DNA, 511 bp, Homo Sapiens
tttcacaccaaatcgctacttcattcattcaacaagtatttactgagtgccttctgtgtgccacgctactgttaagacagagtccaactccaactgcgggcaggtatgttttccatactctccccatccaggtactaaccaggcctgaccctgcttagcttacgagattaggcacgtacagggtggtatggccgtaaactattttggatacccattatcttgaagtattctcagcgaacccttcaaaacaggtatcacaagcctcatcttgcaccataacgagactgaggccttgtagaggctaaaattgacccaagtcacccggctgacagatggcaggcctacggttctgattcagtccattggattcccaaggcctgtgcttgttccacccggccacactgcctgtcatcaaaacacatgtctttcttgcaggctggtctattgcatttccgtcccgccatctgtcaaaaatgggcctggaacggagaggcctctgcctattctgccc

SEQ ID NO: 12642 - DNA, 265 bp, Homo Sapiens
ccgtggtgtttcttgaaatagatcttttttgtctttttgaaaggctgataatggaggccccaaagtagccatctgttactttgttccatgtactctaattgcgtgcctcttaggatctggctaggactaacagttttcaaaagtgagtaacacacgtgaccagtataaaaggaaccataactcaaactcaactgtgatctagaaaaaagacctgtgtaaatatgtgtgagatgcaagtatactctgtttgccctctcgtatagcg

SEQ ID NO: 12643 - DNA, 569 bp, Homo Sapiens
cggtcgcgaatccaggtcggtcgcaggtgaggaaagaagaatccggaagagagagtcagctcagacttgacagcagagaactactaacaagcctgagagaatcacctcaaggagctgtcaacagcgtctctctgaggacagtgatggggaaggggaggaagatgtgggactggaataaggagaagggctgtggaccagagaggttttccctcccagtggacatctggcaatgtctggacacatttttggttgtcgtaactgggggactgctacaggcacctggcagggagaggccgggatgctgctaaaatagcctacaacacacaggacagccctcttcacactcacacacccaacgattacctagccccaaacgttaatagtgccgctgctggaaaacgctgtcttaaaggatatcagggagctcacagactagcagctgagtagacaggagcaatgtccaagatcacactgaaaacaccactgttgccaccactgggcacctggcactggtcactggacttggcattagagccaccccttcactgctgcccttatacctgtgacca

SEQ ID NO: 12644 - DNA, 155 bp, Homo Sapiens
  misc_feature (45)..(45): n is a, c, g, or t
catttgatttcacagtcccaagaacccatttgggatctgaatttntgtggtactcattaataaaaaacttaaaaataagttggagaaacagccttagccttgtacattatacatcacaagatgaaaagcaaaagaaacatttaagaattaagttt

SEQ ID NO: 12645 - DNA, 998 bp, Homo Sapiens
  misc_feature (814)..(814): n is a, c, g, or t
  misc_feature (840)..(840): n is a, c, g, or t
  misc_feature (931)..(931): n is a, c, g, or t
  misc_feature (959)..(959): n is a, c, g, or t
  misc_feature (964)..(964): n is a, c, g, or t
ggtaccggtccggaattcccgggatcttcattcaaggaggcaggcgctttggaagtttgtaaacaccgactttctgagtaagggaggagcactttttttccaaaaaggaaagaacgtctctactgggtttttttcctcctgatattcagcattagagtagaaaagaaactattgtttggccacattagccgtggttagcaggtgctgcagcctttgccactgttattatttttaaagggcagaaatgcctgaaggtgaagactttggaccaggcaaaagctgggaagttatcaattccaaaccagatgaaagacccaggctcagccactgtattgcagaatcatggatgaatttcagcatatttcttcaagaaatgtctctttttaaacagcagagccctggcaagttttgtctcctggtctgtagtgtgtgcacattttttacgatcttgggaagttacattcctggggttatactcagctatctactgttactgtgtgcatttttgtgtccattgtttaaatgtaatgatattggacaaaaaatttacagcaaaattaagtcagttctgctgaaactggattttggaattggagaatatattaatcagaagaaacgtgagagatctgaagcagacaaagaaaaaagtcacaaagatgacagtgaattagacttttcagctctttgtcctaagattagcctcacggttgctgccaaagagttatctgtgtctgacacagacgtctcagaggtatcctggactgataatgggaccttcaacctttcagaaggatacactccacagacagacacnttctgatgatcttgaccgaccccagntgaggaagtttttctctagagaatctttcagattttccatctctagaaaatggcatgggaacaaatgatgaaagatgatttaagccttggntttgccactgagctccagagaaaaaggnacccnttgggacaggggtcacagaccagcaaagagacgc

SEQ ID NO: 12646 - DNA, 349 bp, Homo Sapiens
ccagggaatggcacggaggcagaccccccagaaggtgcgcctggcggtgtatagagatgaagcacactaccgcgatgaggagaacttggagattttccctgtggatctgcagaagaaagctggccgcggcctgggcctgagcatcgttgggaaacgaaatggaagcggagcgtttatttctgacatcgtgaaaggcggagccgcagacctggatgggagattgactcagcgagatcagatcttatctgtgaatgcagaggacgtgagaaatgcctcacaggagacagcggccaccatcctcaagtgtgcacagagacttgtgcagctagagattgcaagactccgtgcg

SEQ ID NO: 12647 - DNA, 485 bp, Homo Sapiens
  misc_feature (16)..(16): n is a, c, g, or t
caagtttccattgccntcagtggtgaatgaatagactccctcaccttctctgtacctggtctggaattttgcctaacagcattaacatctaacttaatgaccaaggaggaaggagattcttagaggcagtagaaaatggtcaagtgttcagaagatggcctttcattatatatctttagttctttctggcagatttggttatactgtcttaatctatcaggttgggtaagtagcccagggtgtcttctccattctttctgtatgccttatctcagcattaccatcttcctaggcttcaggataggaactcggtcatctttgacttcttttcttcaaagtcagtaagttatcaagtcctcctgattctacctttctgtgaatggtttcctgaattcatcccctgctgcgtcagtcagaccctcacaatcctctgccgtgagccatctgtttggtttcgactttgtctcttctcaccttctcaccta

SEQ ID NO: 12648 - DNA, 529 bp, Homo Sapiens
tgggcagtggatggccgtgaatgggtgcccacagtgtcaggcactgggcatgaggggttcctcccctccagctccctgtgcccccagggtcctgggaggagagacactggtggggataggccagccgcgcatcagactgtgaaccccacgaaggagcccattgtggcctaagaggctgccctcctgtgctcagccctgaggacagatgcctccttcctcttttccttcccaaagcaagcaagaggccgtggctgctgtgggaaatggtactgtacagctggctctacttccccatggccctgagcgagtggagtctgccacccaggatccccaaggcacttgagggggaaggattctgctggcctctgcgagtggtttcttgtgcactggcaccaagtgcgggtccggcagcttctgccccctgcagaaccggagagccagctaaggggtggggctgcgggggttccgtgtccacccccatacatttatttctgtaaataatgtgcactgaataaattgtacagccggc

SEQ ID NO: 12649 - DNA, 143 bp, Homo Sapiens
agaagaaaaatctgcaaaagatctttccaaagacaatgtgccacagatcttttgttctctgtaatgaggattaattgctgtttaaacaaaaatgtaattgttcatctttaaattctttccttttcataaaaggatcaagctgt

SEQ ID NO: 12650 - DNA, 793 bp, Homo Sapiens
agcggccgcggtcagagaaggagagacaccagcagaggacgcgaagctggaccggccaggttcagagcccgcctcggttgctcccaatcagaatctgctttgtgctccacggcctccaagcactttcatgagcgttctgctcctacgtggccaggtcctaccttccctgacggctctggccaggccagctcggtttccctctaacccatgaggcctgggggggctgtgacagaggctggaagcgtggccagagcccaggggcaggcccgcctggtcacagcaggatgaggctggggtggcgcagctgccggtacacctgtagcagcctctgggcggtggcacaggagctggcctcatcctccgtgcagagccggtcgcgcagggtctgcacctcccgcagcagtgtctcgtggttggcgtggatctggcggaggtactgcacacggagatcaggagcgctggagccctgggcggcctgctctgtcaccatcgtctgcatgcgcccgacaacggcatggtgcgccctgcaaatgtcggccagagaggagctttccacttgaatctccacggcctggatgggccctgctgggcacaggtcagtcatggccacctctcggacgatgaggtgaacgttggcgccatcaggggccactccctggatggaagatagtgctcgggccctcacgacgtccacagcagcattctcagcaaggagccactgcagggtggcacagcacaggggcacgcctgagtggccgtccttcaaggcagctctgagcagctccgccgacac

SEQ ID NO: 12651 - DNA, 283 bp, Homo Sapiens
atgggcctggctgcctgaagaggaaggaaaccacccccaacttggttgctggggacttgaagacttcagtgtgatctttacctaggggagggacagagctgggctggtggagcccatgggtgctgcctgatggtgctgtggggtgggtgctcatgtgccaagtcctgcttggcagtggagacctggggcccttaaagtgttacaacagcctgcagcaagggaagttccccgtagcctcagtcttctctgggcttgaggctgctccttggcaggcatttaaagt

SEQ ID NO: 12652 - DNA, 384 bp, Homo Sapiens
tccctatccgcgttcggggatgcagggatggtgtacaacaggtcctagcatgtatagctgcatagatttcttcacctgatctttgtgtggaagatcagaatgaatgcagttgtgtgtctatattttcccctctcaaaatcttttagaatttttttggaggggtttgttttctccagaataaaggtattactttagaataggtattctcctcattttgtgaaagaaatgaacctagattcttaagcattattacacatccatgtttgcttaaagatggatttccctgggaatgggagaaaacagccagcaggaggagcttcatctgttcccttcccacctccaacctagccctactgcccacccaaccccggacacggatacgga

SEQ ID NO: 12653 - DNA, 561 bp, Homo Sapiens
tggggaggggggcagccacgcagactccgggagccccctgccgcagcggggctgcgcgccctaccccagctaggccccttccccgcagaggatgtgcctctgttgtcctcgcgggaccaccggaccccgctgctctatgccggcttctccacgtccagcagcatctaccagggctctgcggtgtgcgtgtacagcatgaacgacgtgcgccgggccttcttgggaccctttgcacacaaggaggggcccatgcaccagtgggtgtcataccagggtcgcgtcccctacccgcggccaggcatggttcggagcccacgcactcctgctacaacccacttcaaagcctcaagggtttgagaacttggcctggggtcttcttggtgaatgtggtttcttcctttagttatgggtgggaaaacgtttccatcataagacaaggcttgtttcccgcctctgacttcctagggcaaggctgatctcctctctaattctcagggcagggttctgtccccatccccctccatgttcccagtggctgggcatggagggctgaaaatctcc

SEQ ID NO: 12654 - DNA, 636 bp, Homo Sapiens
aatacgcactgactctcccaaatttgtgcatacactgctagagtcattttgaagctcaagcattttcactttgtttcttacatgtgtacttttttgtttacctgtgaaaatggccatctttaagcatatttattttctgccactttatttaaaggcaagcaatattttcttgatcataaatattttgtaatgaaatacttcctcttttccagggctttgtatgcacttgtataattacattgatggcaatgtagagtttgaatttcagtctgtaaatacttttttggaaaatagaaatttttattgctttaaagttttggatatgggtggttttcttttccgggtttggtggaaagtaatttgagaactttaaggttgtctttttaactgctggcaaaatgttgattttttaatattagataaaacgagtaaacgaaattccccagaaattagtagtaagtggggtctttgtgggttgggaagtagttttaatgtagaaagacatttacatataagtctgtttaatttcaaaggagtttgtgaaaaaaaatccatggtgaaaatgaaacaatgacatggttaatctggaacttacgttcttataccaataaaaggtacctcaatacatgttctttc

SEQ ID NO: 12655 - DNA, 473 bp, Homo Sapiens
ggaagtggctgggccagcactggggtcgggcggcccgaactccaggctgtagcgcaccacgaaatagttgttccagacgtacagctggttgtcgcgagggttgtagtcaacggaggagatgaactggtaggggttggggaaggtgaggctgacaggctcctcgcggttggcattggtgttgaaggcatagtccacgcggttgccagccgcctcgctgtcatcatccacgtacacggaacgcaggacgtacaggaccccacacaccatgaaggcgttggatgccgagcgcttgtcgtaacccgtctcccacgtgccctcaaagcgcagtgtgtaggggttcagctggctcaccaccagccgcccgttgttgccctcagtggcgtagatgacccacagcccgttctcgtccaccgccaggacaatggcgggctttccagccccagcggaagggcgaggagtcaatggaagtggcg

SEQ ID NO: 12656 - DNA, 395 bp, Homo Sapiens
gggatggggctcgggctaagcgggctggggctcatcgggagagctagtttgtcagtttccagctgggtggtgtcttccatcagcccacgaatcttctccacaacatcgtttctccggtgctggcgcagggcgctaattagctgggcgaggctggcctcggggccccggatggtccagtgctgcagagctgcgtaggcccgctcgtggtcggctgtgtacccattggagaaagcagcaacctccctctcactggcattgcaaagaaactgatagatatctttccactggcttcccacttgggctgctacaagcttcaggatatcgataccatggccattgcagtagtagatccatttctcccggttctgggtgcgagtcatggatttcttcacgca

SEQ ID NO: 12657 - DNA, 348 bp, Homo Sapiens
ctgtcaccaaggtcactgctgcctatgaccgccaacagctctggaaagccaacgtcggctttgttatccagctccaggcccgcctccgtggcttcctagttcggcagaagtttgctgagcattcccactttctgaggacctggctcccagcagtcatcaagatccaggtggcaggctctggctttctcagtcttcagggcctgggcttatctgggctccagggtatccacgctgcttccttttccactggtgtgtggtgcaagatgaggcacattttccatggatggtgaacagagggaggagccttttgatcacaaccaggtcaccccacttctaagccactgtgca

SEQ ID NO: 12658 - DNA, 526 bp, Homo Sapiens
  misc_feature (509)..(509): n is a, c, g, or t
agctccgatcctaatcggggtcgggggttggcaagcttcttgttagtggtgacaatgcttggggtgaggaccagctggttgtgaaccagcacagggggtgtgttgatcccctgggtgagaaccttcactgtgcctcccagggtgacaggcgtggacaccgagaggtgaatgggctcgggcttctccaaggatggcctatcggccttcacagacgaaatcacaggagaggcattatatgtctgggcggtcagtaccaacgtggaatgggtggccacgttcgcatagcctgcaggtagcttgagggcctttggtatggaggctgcgatgctgtgacagaatcaaggtttgacctgagacttggacactgactggctgaaattcaatgtccattgcactggccggggggatctggctgatcttggcgctgatccgctgttgggccttcaggtcttctgccctgagtaactcaggagcacaaccccttcagaagtgctcacacgcagccccgncctgagccgcgtctgta

SEQ ID NO: 12659 - DNA, 332 bp, Homo Sapiens
gtgtctcacttgccgcagctagtaaacctcacttctttgtgggtggacaggtgtatccctggtggtctgtagcaaaggaacttgaagttttatcagcctcctgaaccgagagcctcagtgcaaaacgtatatgtatttttaaaaaggtaaatactttgttgtacggtgttatttggaggcagctatgctcaccactatacaccaaggcagccgtacagtattattcgcactttattttcttttcttttaaccctggcctacagatggactttatttcttagcaccaccctctcttaaaacaaaattttacttcgattccttgaataatgaat

SEQ ID NO: 12660 - DNA, 414 bp, Homo Sapiens
accgtgctcggggttggtggcagtgcccacctcactagatgcctctgacccagcctcccctgggggagtgggtggccacagaccctccctgccagagctcctggaaggctcctgcaggcctgacccatctattcctgtagacctggtttaggatgaagtctcggtgcgatttttgcagagttgggtttatctttcaactatagacccttctggctgttctcagccatatcatgtgactctgaatagttggatgaggaatggaaagaaagcaaggatgagagccgggcacgtggcagtctccgcccagcatcggctgtccgcacagaggcacagggcaggcctcctgtgcactccccacctagcactggcctgtcctgaatccccgccttccctggttagaggccagctgtggca

SEQ ID NO: 12661 - DNA, 350 bp, Homo Sapiens
agaaggaggtgtataccagcctctcatcgaacttctgcacctgccggaagttgttgatcatttctctgggggaagggtcgtccatgtgtgtgcagtacagggctgtctccaaagccagcagctgctcctgggaaatttgcacggggtctcggaaaactgtccagagcacagtggcgttgcaagggggcgtggtcagggacccccggtagcggtaatattcagcggtcctctccggaagcagctcttcaatgttgaatcccgggacgaatgcttcctggcctttgtactttacatgttgaaggtgactgaagatcttgtcataggacggattgaaggagcacatctcaatg

SEQ ID NO: 12662 - DNA, 351 bp, Homo Sapiens
gggttggtgaggctgggcttgttccccaccgacagggcgatgacctgctcacccaaggcctgacaggtcacaaggatccagtgttgctgataattccgggaggaatggggggcaaagagagccaggccgatgctgtcagtgtcctcagcggcgacgttctggaagaattaggacggctcgaggatccaaggtctgggacctccttcaaacagcatctcctttgaggagcccagggttaccaaggcaacagaggagggatccacagccttgaggggcaggtaggcagcaatggtgatcttggcactcaggtggacgtggccgtgtctgtagctcacaagacgcgtggtagag

SEQ ID NO: 12663 - DNA, 165 bp, Homo Sapiens
gaagcagtgaggtggtgccagtccatgcaggatccttctgtcaatcttcgtgagcggcagcaaaagatgttacaagcttttgcaaagcataataaaatgatgaaagattgttcagctggaaaaggatttgatcgtcaccttttaggtctcttactcatagcaaaa

SEQ ID NO: 12664 - DNA, 714 bp, Homo Sapiens
gggcgggttgttgggctgggggttccaattacaggcatgggcagccagaggagacctcagccagaggggatgcctgagggtgggagcgtctgctggccctggtctctgaggcaggcatgtgtctgcccagcaaggcagcagccgcttctgaccgcagcgcccagcgctgtaggtggggctttggataccgtcctgtgggctatggctctgccttatgtgtgggagttctgaaaggaggaccggctgctggcagctcgggacaggcagggctctggtgatcacctggcagcagcaggagatggtggcaatggggacagagaagtgccaggatcctggatatttactttttaggcagagacaaccggcctcgctgctgaattggttgtagttacaaaaagatgagccatcagtaagcgtgtctcgagttatggaacggaaggagactgtcctgggtcttctcctttctgtctctgcgcccccaagcccctgccagagctgtaccccaggctcgggaggaaaacgtccttcctgagctgggcagaagccgcccttggccgtgaggcggtgttggttctgatgcggcttcccatggctttggtgtctccaacaggcagttcttatggagcctcaggctgcccggggaggcgcagaagattgatcgcatgatggaggctttcgcttctcgctactgcctgtgcaaccccgacacggata

SEQ ID NO: 12665 - DNA, 449 bp, Homo Sapiens
tgcgccgttgctgacacttagtaggtgtttaagaaggagatgctggctggttaccaccctctgccaacatgagggtgcgtaagtgacatctatctgagatgcctgtggtccagctgatgttgacagggtcctcagggtgccccccaccccctcactgaagcatgagctcttctacacccgccagaggtcactgggcagaggccaaagttgcagggaccatgctgaatgctgggcccatcccagcaacattttactgttgtggagactgtttccctgctgttgggtgaggtcaagcattgatgtttaagggtctgtctgtttctttgtaattcaattgctgcccatgcccttaacctgtttgcctttccggttttctgtttcttattgacattacgaactctctgtaatgaagataagtgaggtctttgtctctcatttgtgttgcaatg
